United States Patent Application Publication US 2007/0277258 A1 - sequence listing, part 2

SEQ ID NO: 6901 - DNA, 400 bp, Zea mays
  Clone ID: LIB3118-039-P1-K1-H10
cccacgcgtccgcggacgcgtgggtcaacaccgaccgcggtgtgatgattgccgatggcaagtcgcggttttcaatcaatgggaagcctatctaccactttgttgggacttccaccttcagcgagtacactgtcatgcatgtcggttgtgttgcaaagatcaatcctcaggctccccttgataaagtttgcgtccttagctgtggtatttctaccggtcttggtgcatcaattaatgttgcaaaacctccgaagggttcgacagtggctgttttcggtttaggagccgttggtcttgccgctgcagaaggtgcaaggattgctggagcgtcaaggatcattggtgtcgacctgaaccccagcagattcgaagaagctaggaagttcggttgcactgaatt

SEQ ID NO: 6902 - DNA, 276 bp, Zea mays
  Clone ID: LIB3118-039-P1-K1-H11
cccacgcgtccgcggacgcgtgggtcaacaccgaccgcggtgtgatgattgccgatggcaagtcgcggttttcaatcaatgggaagcctatctaccactttgttgggacttccaccttcagcgagtacactgtcatgcatgtcggttgtgatgtaaagatcaattctaagtctccctctgataaaggttgcgtccttagctgtggtatttttaccggtcttgatgcattaattaatgttgcaaaacctccctagtggttcgacagtggctgttttc

SEQ ID NO: 6903 - DNA, 298 bp, Zea mays
  Clone ID: LIB3118-039-P1-K1-H12
tccacgcgtacgagcgctgttgcttaaagcattctcatggattgacttgcaccgaaatgtgtgtcctgatgagtacacttttttggttagtcgtctcaagttctgagcgttatgccatattttcagacctgatttgcacactgtgatctaaaagcgattgagctctagtccatatatgcaatttaagttgtcaataatttaaatacttgaggactactatagactatttaggtactaaaatatattatcagaaaaacttttatcttttttggggggggccgttttaaaggttccaagt

SEQ ID NO: 6904 - DNA, 343 bp, Zea mays
  Clone ID: LIB3118-039-P1-K1-H2
cacacgcgtacgacatggctttgacgtgtaccgaagcttctgacggaggaccaggcgatagcatctgtcctctgcgagtgcaggggttggcccaccggggactaattttgccatgatggagctcggctgacgtgtcatggttgtcaacttatccagatgaggatcccggctgctaacatggacaacggatgcggtgaacagcatgagggtattgagttaactagttcggggaggcctaagttgcctaacgtaaagaggaggctaactgcaaatttcgtaaggtacacttatcttgtgacgcgtgctaaggtacaactaatctggataggcatatttaagtgta

SEQ ID NO: 6905 - DNA, 408 bp, Zea mays
  Clone ID: LIB3118-039-P1-K1-H3
cccacgcgtccgcggacgcgtgggcagcaacccatcgttggaggtgccatcttttagattacatatgagatgtactcgataatggtgccctcattccggcatgtgtttcctagaaataatcaatatattgattgagatttatctcaatatatttctgaaaaaaaaaaaaaaaaaaaaaaaaaaaaaaaaaaaaaaaaaaaaaaaaaaaaaaaaaaaaaaaaaaaaaaaaaaaaaaaaaaaaaaaaaaaaaaaaaaaaaaaaaaaaaaggggggggccgttttaggggatcaaagtttacttccccgtgcttgcaaggtaataatttttttttgggggcccctaaattaaattaacgggccggggttttaaaacgtgtggacggggaaaacccgggggttacccaattt

SEQ ID NO: 6906 - DNA, 402 bp, Zea mays
  Clone ID: LIB3118-039-P1-K1-H4
gttgaatgaactcaaatcgccgtctgatttgctcgattttggcgagttctcagattgcatgaatttcagtactcaggatggcagccccttgttaaatgttgtcaacccaacatttgactatgtgccaccgaagcttgtgagcctattcatcactgacactgggggacacagtccatcttatatgtatcggcttattgctgagtattactcagctgatgacctggtagtgagacggaaggcaacatcttgaaggaagacaaaagcgctgcgaagtctccttggtgttctgatcataggatttgcgatcttattggaatcctagtgttcttgtactcgtcatgatctgttgcctgtagagcggtgctgctgtgataagtggaatcacctgtttgtggatccagt

SEQ ID NO: 6907 - DNA, 226 bp, Zea mays
  Clone ID: LIB3118-039-P1-K1-H5
catgaacggcaaggagctcgacggccgtaacatcaccgttaaccaggcccagtcccgtggcggtggcggtggcggcggtggctacggcggcggtcgcggcggctgcggcggttatggtggcgggcgccgtgacggcggttgtcgcggctgtagtgactccggcggacacatctcttgttatatgtatcggttctattgctgattattactcttgtgatgactttgt

SEQ ID NO: 6908 - DNA, 172 bp, Zea mays
  Clone ID: LIB3118-039-P1-K1-H6
gataaaaaaagaaaagctaaaaataataacacaaaaacaaaaagaaaaaaatataaaaaaaaaataaaaaataaaaaaaaaaaaaatatggcaaaaaagggggggcccttttttgggttccaaagttttcttaccgggcctgcagactcataactttttttttggggccccc

SEQ ID NO: 6909 - DNA, 399 bp, Zea mays
  Clone ID: LIB3118-039-P1-K1-H8
cccacgcgtccgcggacgcgtgggtcaacaccgaccgcggtgtgatgattgccgatggcaagtcgcggttttcaatcaatgggaagcctatctaccactttgttgggacttccaccttcagcgagtacactgtcatgcatgtcggttgtgttgcaaagatcaatcctcaggctccccttgataaagtttgcgtccttagctgtggtatttctaccggtcttggtgcatcaattaatgttgcaaaacctccgaagggttcgacagtggctgttttcggtttaggagccgttggtcttgccgctgcagaaggtgcaaggattgctggagcgtcaaggatcattggtgtcgacctgaaccccagcagattcgaagaagctaggaagttcggttgcactgaat

SEQ ID NO: 6910 - DNA, 404 bp, Zea mays
  Clone ID: LIB3118-039-P1-K1-H9
cggacgcgtgggtttttgcctatcaaaaaaaaaagtcatttctattttccctcgggtacaacaagtgaacttcataattaaactagccatggttggttctcccgtcaaaaggctttcatgtacagaaaccaccacacacacacagagagagagaaacatctggtgctggcaacaaggcactaatagtgaagcataaattaacaggcctgccaaaaatccaggcaagacatcatgtaacagtttcccccagccccaggtatcgccaatccttggctttcttttgtcccatcctcatcgccgcctatttacagattcagctgtgtgctcatcagtattctccttattattacaccacgatgcagaagtgtctgttcacagattcagtcattcttctgtgtgctcag

SEQ ID NO: 6911 - DNA, 289 bp, Zea mays
  Clone ID: LIB3118-040-P1-K1-A1
gccgctgccgcaccggctccgaccgtccactcgccggctccgtcgccgaaggcggagaacgtgagcagcccggatggcaaggagaagaagggcttgctgggcaagatcatggtcaagatacccggctgccacaagagctcatctgaggaagcagaccacatggcggacgccggcggcgagcacaggaccagctcctaaggtcgcagtctcagcgcgtgtcctgtccgaggccgggccttgggcgatcagaatgtaactagcggtggcatgtatggttcgggtctggttt

SEQ ID NO: 6912 - DNA, 278 bp, Zea mays
  Clone ID: LIB3118-040-P1-K1-A10
cgactccaaggtcatcaccgaccgggagacggcgaggtctcgcggcttcggcttcgttaccttctcctccgagaactccatgctcgacgctatcgagaacatgaacggcaaggagctcgacggccgtaacatcaccgttaaccaggcccagtcccgtggcggtggcggtggcggcggtggctacggcggcggtcgcggcggcggcggctatggtggcgggcgccgtgacggcggttatggcggcggtggcggctaccgcggtcggcgcgagggtggtg

SEQ ID NO: 6913 - DNA, 277 bp, Zea mays
  Clone ID: LIB3118-040-P1-K1-A12
tcgcccacgcgttccgccaacccttccgttgcggcggccggtcaacctgcaacggcggttcaatgtgccgccgccggttaatttgccgccgccaccatgccactaccttactaaaccgccccggcctaagcctaatcccaagccacacccatgcccgtgccaacagccgaatccaagcccgtgccagttgaagggaacctgcggggttggcagcaccccgatcctgggccagcgcgtcgagttcctgaggcataagtgcagcccgacggggacgcct

SEQ ID NO: 6914 - DNA, 92 bp, Zea mays
  Clone ID: LIB3118-040-P1-K1-A2
gttctttttacttctttattacatttgatgtaaggaaatcgtacatatagcggtagttttttttttcaaacaagcactgtttgttttttgtc

SEQ ID NO: 6915 - DNA, 279 bp, Zea mays
  Clone ID: LIB3118-040-P1-K1-A3
cttcggttcattgtccgggtgtcttgcgaagaccaccaaaaaggttgggcttctatgaccatggtgcggtgcattgggaaaatccccgtttcgttcaacttgctcgacatgaggggaagcatcagggcttgcaagaaagcttcattggggtgcgatgaaacgaaatttgagcaatacaagctggttgcaggtgattgtatcacggcagagatcacccagtctgtagagaagtgctttgagaagatcagaggactagagagcttagcagaagaattgaca

SEQ ID NO: 6916 - DNA, 278 bp, Zea mays
  Clone ID: LIB3118-040-P1-K1-A5
cggacgcgtgggcgtcgtcaccagctgggtgtcccggccctctctagtttctaccggggcccccaacattggcctgatgctgctgccatgtagcccagcgctcccccctcggcttcaccggcggcggcggcaacgacggtgaaaactacatcgggtgctagctccgacggtggtgcgtgccctgttgacgatagggcacgcggggcgcgggcagcttgtaagcgttcgatcggccatgtagggcaactatacatctttggcaggtgtccaactctcca

SEQ ID NO: 6917 - DNA, 273 bp, Zea mays
  Clone ID: LIB3118-040-P1-K1-A6
gtttgggtatgcaaatgttgatgaggaagtctctgttggagagtgcaaggttgtggggatcactggaatcaaggacatggttaggaccgcaactgtacttgtcaggggatctaaccaattggttattgatgaaactgaacgtagtctccatgatgcactctgtgtcataaggtacaatttattatattattgttgagtaaataagacaatgctttactaacatattggtttttgagtattagtcccgtttctatgattcttgataattgattt

SEQ ID NO: 6918 - DNA, 106 bp, Zea mays
  Clone ID: LIB3118-040-P1-K1-A7
ggcccacacctacgcgtccttttactcctttattacatttgatgtaaggaaatcgtacatatagcgggtggtggttttttcaaacaaacactgtttgttttttgtc

SEQ ID NO: 6919 - DNA, 255 bp, Zea mays
  Clone ID: LIB3118-040-P1-K1-A8
gacccacgcgtccttccacccgtgcggaagaagatcacggctgacagcatgaacatgtatgacaaccatgcagagcatgtcaaaacactccccattcctgtaagtaagaagaaaggtgacgtgacgctaactcctgactaaaaagctcatgggggggccaacaaaagaaatatgatccaaacactgcgtttggcagggaattgtatacgggggagaacacccccatctgaaagaagagctttgtagagatcactg

SEQ ID NO: 6920 - DNA, 91 bp, Zea mays
  Clone ID: LIB3118-040-P1-K1-A9
aaatcatgatgaccatagtcgacaatactgtctctgacgacactctcattgagggctatctgtgcgctgagccaagaaaccagtacctttc

SEQ ID NO: 6921 - DNA, 269 bp, Zea mays
  Clone ID: LIB3118-040-P1-K1-B1
aaatcatgatgaccatagtcgacgatcttgtctctgtcgacactctcattgaggactatctgtgcgctgagccagttaacgagtacgtccagagctgcgacatcgttgccttcaacaagatctaggcgtgactttcgatcagtccttcccctggggtgctggcgattgtggtggctgggcaatgcaccaggctaatttttccataggtatatgtctgctttgggtgggcagtgatatttgcgtgagtatttttggatcctattcgagtc

SEQ ID NO: 6922 - DNA, 277 bp, Zea mays
  Clone ID: LIB3118-040-P1-K1-B10
gatttatcgaaggctgggaaactagatatgttgtatgagttggctcagaaagtgaaatttgcagggaaattcgatgtatctaatgcgttttatcagtgggcagatagaatgaagattcaggtcaagagaaatgtatctaatcagattggcaatagaatgttctaacattactacgctgccagaaggaatgtggcatgctgtcatggtgcttgaaatttgattactaaggagagctgttacctttttccccttttcaatggtatggtaatgtgtcatt

SEQ ID NO: 6923 - DNA, 266 bp, Zea mays
  Clone ID: LIB3118-040-P1-K1-B11
gtgagagaatgcataagtcacaggctacctattggccgtatgggcattagttgggggggtatctgggcaccaagtcctgattttgaccgcaactgttcgtgtaacctaatgtatcgagttgtgcaccaatgatacgctgcgtgccatgcatgttgcactctgtgtcatacggtacaaattatcgcctactttttgcgacaattagccattgcgttgcgtacagatgcatctgggcccaagttggccgtataaacaaaaaaataatg

SEQ ID NO: 6924 - DNA, 280 bp, Zea mays
  Clone ID: LIB3118-040-P1-K1-B2
taggacggcatcgacacatcaacaccacccatggctaccgttcctatccccaagcgtcgtcgcaggtccctgcccaggcgcgttgcgtctccatcccagggcttccgccactcgagaaactctttgctactgcgcccccatccgctcccttaaatggggggcatgaatcatttgccgccgagctgtcttgtcccggggccccgccgctggggcacccaatccctctatttgcgcctaggagtaggttcaagtctttggacacaattgccggaacacctct

SEQ ID NO: 6925 - DNA, 60 bp, Zea mays
  Clone ID: LIB3118-040-P1-K1-B3
aaaaaaaaaaaaaaaaaaaaaaaaaaaaaaaaaaaaaaaaaaaaaaaaaaaaaaaaaagg

SEQ ID NO: 6926 - DNA, 280 bp, Zea mays
  Clone ID: LIB3118-040-P1-K1-B4
taatggcgtcgtcgtctagcagcagccaccgtcgcctcatcctcgcagccgccgtcctgctctccgtgctcgcggctgccagcgccagcgccgggacctcctgcgtgccggggtgggccatcccgcacaacccgctcccgagctgccgctggtacgtgaccagccggacctgcggcatcgggccgcgcctcccgtggccggagctgaagaggagatgctgccgggagctggcggacatcccggcgtactgccggtgcacggcgctgagcatcctcatgga

SEQ ID NO: 6927 - DNA, 272 bp, Zea mays
  Clone ID: LIB3118-040-P1-K1-B5
ctgaaagaatgaatcattcacatgctacctaatgtccatatttccattagttttggttgtatagttgcaccgattcctgattttggagtgtaaagtttgtataacctagtgtattgtgttatgcaccagttatatgctgagtgccatgtttttttttgcggtttgctactgtatcacagcgagccgacattttacaacagttatatgtaatgttgtgtagtgatacaatagtgcctattctgggtgaaaaaaaaaaaaaaaaaagggcggcc

SEQ ID NO: 6928 - DNA, 255 bp, Zea mays
  Clone ID: LIB3118-040-P1-K1-B6
gtttgggtatgcaaatgttgttgaggaagtctctgttggagagggcaaggttgtgaagatcactggaatcaaggacatgggtaggaccgcaactgtacttgtcaggggatctaaccaattggttattgatgaagctgaacgtagtctccatgatgcactctgtgtcataaggtacaatttatcatatattgattgagataataagccaatgctatactcacaattgcttctgagttctagtctgtcttatgttct

SEQ ID NO: 6929 - DNA, 277 bp, Zea mays
  Clone ID: LIB3118-040-P1-K1-B7
tccacgcgtccggcggataggatgggacattgctcgagctccccaagctcggtagttccatggaatgaacaaccaattagttaaagcaatgtcaagtcttattttcacacaaaagtgcaagatgttgattgtacatcatcatgtgccatttgcttggaagactacatcagaaacgtcatatattttggaacagaggtagtagtcaataattagcttattcgttttttatatggttgtatatatcctagcaagagaccactctgtagtcattttctta

SEQ ID NO: 6930 - DNA, 281 bp, Zea mays
  Clone ID: LIB3118-040-P1-K1-B8
tgggttggcttctcctccccctccggttcgggttcgggttcgtgaggttctccggggttcgggttcgtgggtgagcggatcgagatggcggcgtcggatgttgagtaccgctgcttcgtcggcggcctcgcctgggccacggacgaccactccctccacaacgccttcagcacctacggcgaggtcctcgagtccaagatcatcctcgatcgggagacgcagaggtcccgcggcttcggcttcgtcaccttctccacggaggaggcgatgcggaacgccat

SEQ ID NO: 6931 - DNA, 283 bp, Zea mays
  Clone ID: LIB3118-040-P1-K1-C1
gaggagaggagaggagaggttgggtctgggacaccatggctccgatgaagctgtacggggcggtgatgtcgtggaacgtgacgaggtgcgcaacggcgctggaggaggctggctccgactacgagatcgtgcccatcaacttcgccaccgccgagcacaagagccccgagcaccttgtccgcaacccgtttggtcaggttccagctctgcaggatggtgacttgtacctcttcgaatcacgagcaatctgcaagtacgctgctcgcaaaaacaagccagagct

SEQ ID NO: 6932 - DNA, 149 bp, Zea mays
  unsure at all n locations
  Clone ID: LIB3118-040-P1-K1-C10
agcgacgcccacgcgnccgcccacgcgnncgcccacgcgaccgcccacgcgnncgcgagaggaagcacgcaacgacagcaancccaagcncgncggccaccccaaacccaaccgcgaggaccccggcaaggcgccccaggaccgggacc

SEQ ID NO: 6933 - DNA, 261 bp, Zea mays
  Clone ID: LIB3118-040-P1-K1-C12
cggacgcgtgggcggacgcgtgggcggacgcgtgggcgcgccaacggcgacggcggggtgaggtcatttgaccctccgctccaggtccccaacggagaaaccaatattgtccgctacctgtgttgtaaggcccacacccatcaaaagaacaatccttcaaggagagccacctctaagcgcaaccagaccctattcctcttgcgctacagctgatgaactaagcaagtgataggatactgcaactgatcgatcattcccaat

SEQ ID NO: 6934 - DNA, 235 bp, Zea mays
  Clone ID: LIB3118-040-P1-K1-C2
cccacgcgtccgcccacgcgtccggtcggttcacttctccaggtaaggaaagggttcgtactcatggcgccgccgcagccaaagtcgggcctcttcgttggcatcaacaagggtcatgtcgtcaccaagcgcgagctgcctccccggccgtgccaccgcaaggggaaatcaacgaagagggtgtctatggtcaggggcctgatcagagaggttgctgggtttgctccttatgaga

SEQ ID NO: 6935 - DNA, 59 bp, Zea mays
  Clone ID: LIB3118-040-P1-K1-C3
cccactcgtccgcccacgcgttcgcggacgcgtgggaaaaaaaaaaaacaagggtaatt

SEQ ID NO: 6936 - DNA, 280 bp, Zea mays
  Clone ID: LIB3118-040-P1-K1-C4
cccacgcgtccgcccacgcgtccgcccacgcgtccgcccacgcgtccgcgagacttagcacgcatcgtcagcaatctcaagctcgtcgtcttccccaatccctaccgcgaggaccccggcaaggcgctcagggactgggacctgtggggtcccttcttcttcatcgtcttccttggcctcacgctctcctggtcagcttccgttaagaagtctgaagtatttgctgttgcatttgctgtcctggcagctggggctataattctgaccttgaatgttctgc

SEQ ID NO: 6937 - DNA, 180 bp, Zea mays
  Clone ID: LIB3118-040-P1-K1-C5
cccacgcgtccgcccacgcgtccgcccacgcgtccgcccacgcgtccgcgagacttagcacgcatcgtcagcaatctcaagctcgtcgtcttccccaatccctaccgcgaggaccccggcaaggcgctcagggactgggacctgtggggtcccttcttctttatcgtttttcttgacctt

SEQ ID NO: 6938 - DNA, 74 bp, Zea mays
  Clone ID: LIB3118-040-P1-K1-C6
gaagatgaagggtttgaagcagaagaaggctcacctgatggagattcagggcagtgggggttccattgctttca

SEQ ID NO: 6939 - DNA, 284 bp, Zea mays
  Clone ID: LIB3118-040-P1-K1-C7
acgcaggcgaggacaggcaagcttgcgtttgggtcaccatggctgcgatggaacggggcggggctggtgtgtcctgcaacgcgacgaggtgcccaactggttctggaggaggctggctatgactacaagatcgggccgatgaatttcggcaccggccagcacaaggggcaatcgcaccacaggcggaacccgtgttggtcaccttccaactcaggaggatggggttgctccccattagaagcgaatcactgtgcttctgtacgctggcaaggacaaccgtgccc

SEQ ID NO: 6940 - DNA, 280 bp, Zea mays
  Clone ID: LIB3118-040-P1-K1-D1
agcacatacacgaggaataataagtgaagtgcttaaagctctgcaagaactgcatgtttactggaaaaagattggacactacaacatgaaatgcatatggagtcctggctgccttgcgagtatgatgcataacagagatagcttcagcgcggagtctgctataattgaaactgatgttttcatggacaaatcaaccccaacagcgaagttttagattcatctttacaaatcgagggatgagaagtaccttcttgacctgcaaagggtcagtggatcacat

SEQ ID NO: 6941 - DNA, 278 bp, Zea mays
  Clone ID: LIB3118-040-P1-K1-D10
cccacgcgtacggagagaagggccttcttggatcaagaatcaagatctcgtgtcctgtgtgtctccctctctcggggagggagggagggaggattggttagtcgttggatcatgtcggggagtgcactgacatcatttctgataaagaacaggagaaagaagctagctcttaagggcgttgttcaaatctctcttgaccttgccaggggattaagctatgtccattccaagaagactgcgcaccgtgatgtgaagactgaaaatatgcttcttgacaa

SEQ ID NO: 6942 - DNA, 270 bp, Zea mays
  Clone ID: LIB3118-040-P1-K1-D11
cccacgcgtccgatcgcgagcgccgccctttttttttttttttttttttttggtttttttttttttttttttttccaaggcaccactccatttttaataagataaggggttttttacttagcatagcaatgctgaagggaattttggggtccaccacagtggtgccaatttttttttaacatcaccgctcaccaaaattttaataaaagcgtaatagcaacacttgttagcttacaaaaaaactgccactttgttaaaacagagggaaga

SEQ ID NO: 6943 - DNA, 249 bp, Zea mays
  Clone ID: LIB3118-040-P1-K1-D3
atcacgctcaggagctccgacttagaggagttcgagggggaggaagcggtggccatggagtcgcagactctccgccacatgatcgaggacgactgcgccgacaacggcattccgctccccaacgtcaactccaggatcctgtgtaaggtcatcgagtactgcaacagtcacgtccacgccgccgccaaacccgctgacttcgctgcctccgagggcggggaggacctcaagagctgggacgcgaagttc

SEQ ID NO: 6944 - DNA, 280 bp, Zea mays
  Clone ID: LIB3118-040-P1-K1-D4
ccttgtggacgttgcccacaaagccatcaaaaccgacccgaggatcaactggctatgcaaccctgtgcacaagcaccgtgagctccgtggcctcacctcagcaggcaagaagtaccgtggcctgcgtggcaagggccacacccaccacaagaacaggccctcaaggagagccacctggaagcgcaaccagaccctctccctccgccgctaccgctgagcagctcgtcgggtgcttggatactgccactgtccgatcattcccaatcaagacaacaagcgt

SEQ ID NO: 6945 - DNA, 277 bp, Zea mays
  Clone ID: LIB3118-040-P1-K1-D5
gttctagatcgcgagcggcccctttttttttttttttttttacacaaaagggggggtatggataagattatagatggatggggacacaacacagcagggcacatggctagcctgctagcgtgcggtacccacacaacacaacacactgttcgtcagaagcgccccaggaggccaggggaggacacgacgccgccatcagccatcatcatcatctcagactcagagcatgccatggcacgcaactgactgactgactcgaaacacacacagcgacgcc

SEQ ID NO: 6946 - DNA, 186 bp, Zea mays
  Clone ID: LIB3118-040-P1-K1-D6
cccacgcgtccggccgtggggccggtacgcggcggagatccgcgacccggtgcggaaggcgcgcgtggggctgggcaccttcgacacgccggagcaggcggcgcgggcgtacgacgccgccgcgcgcaagctccgtgggcccggcgccgccaccaactaccctgccccggagccgacggctgaggc

SEQ ID NO: 6947 - DNA, 281 bp, Zea mays
  Clone ID: LIB3118-040-P1-K1-D7
cggacgcgtgggatcgcggccacaacttccccggcgtcggtgcgatccgcggcgcgtacgagacgctgccggccgcggccaaggagaggctgcgcgccgtctacttcgtgcacccggccctccagtccaggatcttcttcgccaccttcgggcgcttcctcttcagctcagggttgtatgagaagctgcgatacatgagccggcttgagtacgtttgggcccacatagacaaggagcagctggaggtccccgaatgcgtgcgcgagcacgacgacgagctg

SEQ ID NO: 6948 - DNA, 279 bp, Zea mays
  Clone ID: LIB3118-040-P1-K1-D9
atccagatcagcaaagcggcagtgcgtagagaggatcgtcgaacagaacagcgtgaagatggtcatcgttctcgtcgtgtgcctggctctgtcagctgccagcgcctctgcaatgcagatgccctgcccctgcgcggggctgcagggcttgtacggcgctggcgccggcctgacgacgatgatgggcgccggcgggctgtacccctacgcggagtacctgtggcagccgcagtgcagcccgctggcgggggcgccctactaccccgggtgtgggcagac

SEQ ID NO: 6949 - DNA, 209 bp, Zea mays
  Clone ID: LIB3118-040-P1-K1-E1
atccagatcatcatatggttatttcatagagagaaacgtagaacataacagagtgtatatgggcattgctctcccggtgcgccaagatatgaaaaagtacacccactataccatttatattccctgcccctttccaaagataaaatgctcttactttatattctcatatctgacaaacatatatgtcatccggagggtggacccataca

SEQ ID NO: 6950 - DNA, 279 bp, Zea mays
  Clone ID: LIB3118-040-P1-K1-E10
cccacgcgtccgcccacgcgtccggaagaaaaccttgcaaaaccattcctcactctttatggccttgaatcagaaaaaaagcctactgttacagcatttgatacaagcaatggagccaagtatctgatggaggcagatatcaatgcaaacaacctgagggagttctgcttaagtcttctggatggcacgctcccgccataccacaaatcagaaccattgcctcaagagaagggacttattgaaaaggttgttggtcgtacatttgattcttctgtgctg

SEQ ID NO: 6951 - DNA, 274 bp, Zea mays
  Clone ID: LIB3118-040-P1-K1-E11
tacatcatctctgtccctgtggtggccatggtctgggagggcaagagcgtggtcacaactggccgcaagatcattggcgccaccaaccccctggcttctgagcccggcaccatccgtggcgactttgctgtcgacattggcaggaatgtcattcatggaagtgacagcattgagagtgctaataaggagattgccctgtggctccccgagggccctgctgattggcagagcagtcagcacccctggatctacgagaagtaaacatggaaagctt

SEQ ID NO: 6952 - DNA, 279 bp, Zea mays
  Clone ID: LIB3118-040-P1-K1-E12
cccacgcgtacgaccatttagccagctagctgcagcaagccgtgcttccttattgacacagcaacagttgctgcctttctaccagcagtttgcggctaaccccgcaaccctcttacaactacaacaattgttgccctttgtccaacttgctttgacaaacccagcagccttctaccaacaacacatcattggtggtgccctcttttagattgcttattagttgtaattcaataataaagttttttggatgatgtatgtggccaaccagaaataagaagt

SEQ ID NO: 6953 - DNA, 204 bp, Zea mays
  Clone ID: LIB3118-040-P1-K1-E2
gcacgacgacccttggtatatatcatgggttgacagggacgtgtctttcgatcctattgacctgtgcgagccggcgcgtaccattgaagtgaccgagcatgcccgtcgtcctcttcctcctggtggccggctgcagcagaaaagtgcccctttgtaatattacccaaaggggacggtcccccttccattccggtagccgctttc

SEQ ID NO: 6954 - DNA, 273 bp, Zea mays
  Clone ID: LIB3118-040-P1-K1-E4
cacgcgtccgcccacgcgttcgcccacgcgtacacgtttattattttgtcaaaaccattcctcagtctttatggccttgaatcagaaaaaaagcctactgttacagcatttgatacaagcaatggagccaagtatctgatggaggcagatatcaatgcaaacaacctgagggagttctgcttaagtcttctggatggtacgctcccgccataccacaaatcagaaccattgcctcaagagaaggtacttattgaaaagggttgttggtcgtac

SEQ ID NO: 6955 - DNA, 287 bp, Zea mays
  Clone ID: LIB3118-040-P1-K1-E5
gcgtctggcttctcctccccctacttaccaaggactactcgggttagggctacttagggctttgtggaggggcgaatgaggaaaaatgatgaggagtaccgcatcttatacaaggaacttggccgagccaccaacgaaggagtggatgaagaaagactacctctggtagggcgaggataattctcttgaagggcacgatcgaccgatagaacaaatggtctcgcggcttcggctttaagggacttattgaaaaggtcgttggtcgtacatttgattcttctgtgctg

SEQ ID NO: 6956 - DNA, 275 bp, Zea mays
  Clone ID: LIB3118-040-P1-K1-E6
tacatcatctctggccctgtggtggccatggtctgggagggcaagagcgtcgtcacaactggccgcaagatcattggcgccaccaaccccctggcttctgagcccggcaccatccgtggcgactttgctgtcgacattggcaggaatgtcattcatggaagtgacagcattgagagtgctaataaggagattgccctgtggttccccgagggccctgctgattggcagagcagccagcacccctggatctacgagaagtaaacatggaaagtttc

SEQ ID NO: 6957 - DNA, 217 bp, Zea mays
  Clone ID: LIB3118-040-P1-K1-E7
cgcacgacgacccttggtatatatcatgggttgacagggtcgtgcctttcgatcctcttgccctgtgcgagccggcggatccatgaagtgaccgagcatgcccgccgtactcttccttctggcggccggctgcagaagacaagatgccctttgtaaatatagccataggggacggacccgagtgcgtgcgggagcgtggacaaatggaaagaaaacc

SEQ ID NO: 6958 - DNA, 124 bp, Zea mays
  Clone ID: LIB3118-040-P1-K1-E8
cccacgcgtacggtgagtatatattatcaaggcgacagcgaccttgtacttcgatgacccttggccgtgaaggagccagtcctaccccttgaagttgacccagcatgccctgttgtttcttttt

SEQ ID NO: 6959 - DNA, 286 bp, Zea mays
  Clone ID: LIB3118-040-P1-K1-F1
tagtagcaatgttccttcgagtagtcaaaatataactcttgctttggaccatgagctacaacatttgagtttggagagcaaactgaagaacagtaaaacgaatgttaagaaaacagcttctgtttctcactacaagccagaaccttggatgctccagagtgaaaatcaagaaatccgtaatcagctaagtcttgccattgttggtcatgttgattctgggaaatcaactttatgtggtcgattgcgacatgctctgggattgatttcaaaaaagcaaatgcataaa

SEQ ID NO: 6960 - DNA, 281 bp, Zea mays
  Clone ID: LIB3118-040-P1-K1-F10
cccacgcgtccattctgcttgtgaggtcccactcaagggtattatgggctacgtggaggacgatctgtttttcaccaacatcacctgggacataacctcgagcactcttttacaactacgacattatgggcctctacgaccaacttgtttagccaaacccatgggtctactaccaacggcacatcattgacggtgccctctacctgatccgccacatgttcaagacccagtagagagagatattttctgcctccctatcgagggtcagccccaatggcctt

SEQ ID NO: 6961 - DNA, 216 bp, Zea mays
  Clone ID: LIB3118-040-P1-K1-F12
cccacgcgtccggagagaagggccttcttggatcaagaatcaagatctcgtgtgctgtgtgtctccctctctcggggagggagggagggaggattttttcttggcagcataagggtgtggagtgcgaagagctttcaccccatcaaaatcaacaacttgtgcatttatcttcgacatttttattgaacagtggtgtgctgctttaacaatataaaa

SEQ ID NO: 6962 - DNA, 286 bp, Zea mays
  Clone ID: LIB3118-040-P1-K1-F2
acgctgacgtggtcgccctcaccgaggcgctcatgaacgagctggtcaagctggactccatcgccgccgacggcgaagtcaaggtgcagcgacgaatgcaggagaagcgggtgcagaagtacgtggagacgctggacgctatccgcgccaagaacgcggcggcgcccaaggccaaggccaaggccaacggcgacatgaatgggcacgccaaggcccgcgcgccgcaactcccgccgcgcccgccgcccgtgtcgcagaggcggaacttccagcagccctccccggc

SEQ ID NO: 6963 - DNA, 282 bp, Zea mays
  Clone ID: LIB3118-040-P1-K1-F3
cccacgcgtccgcgcctctctctctttccccgagctctcgaaaccctaggtgcgtgccgaccggcggcggcggcgaggtgatggcgatggacccggacgcggtggcgaaagccttcgtggagcactactaccggacgttcgacaccaaccgcgcggcgctggtggggctgtatcaggagacctccatgctcaccttcgagggccagaagttccagggcccatccgccattgccggcaagctcggatctcttcccttccaggcctgcgagcaccagatcgtca

SEQ ID NO: 6964 - DNA, 279 bp, Zea mays
  Clone ID: LIB3118-040-P1-K1-F4
cccacgcgtccgggctgcttctgagggcccactcaagggtattatgggctacgtggaggaggatctggtttccaccgacttcaccggtgacagcaggtcgagcatcttcgacgccaaggccgggattgccctgaacgaccacttcatcaagctcgtctgttggtacgacaacgagtggggctacagcaaccgcgtcgtcgacctgatccgccacatgttcaagacccagtagagagagatatttctgcctccctatcgtgggtcgtccccaatggcctt

SEQ ID NO: 6965 - DNA, 282 bp, Zea mays
  Clone ID: LIB3118-040-P1-K1-F5
ctttcattcgccgccgccgcctcctctctgctgccgtcgccatggggagaaggcctgcgagatgctatcgccaaatcaagaacaagccataccccaagtccaggtactgccgtggtgtccctgaccccaagattaggatctacgatgttggcatgaagagaaagggtgttgatgagttcccctactgtgtgcaccttgtctcttgggagaaggagaatgtctccagtgaggctcttgaggctgcccgtattgcctgcaacaagtacatgaccaagtctgcag

SEQ ID NO: 6966 - DNA, 205 bp, Zea mays
  Clone ID: LIB3118-040-P1-K1-F7
gatcaattttcatgtgttctcttcgggggggaagtaatgtcagatttgaaccagcaacgttaaaaatgaactaaagatgagatacatcgcgttctagatgactccatgttcacttagattgagcgcggctgtacaacatttctttgaaccatgtgtaatcgattgcactgtttctcatgtaatggtagaggagtcttgtcgatgc

SEQ ID NO: 6967 - DNA, 279 bp, Zea mays
  Clone ID: LIB3118-040-P1-K1-F8
cggacgcgtgggccaggacaaggagggcattccaccggaccagcagcggctgatcttcgccggcaagcagctggaggatggtcgcaccttggctgactacaacatccagaaggagagcaccctccacctggtgctccgcctcaggggtggtatgcagatttttgtgaagacattgactggcaagaccatcaccttggaggtggagtcgtctgacacaatcgataatgtcaaagccaagatccaagacatggagggcattccaccggaccagcagcgcct

SEQ ID NO: 6968 - DNA, 283 bp, Zea mays
  Clone ID: LIB3118-040-P1-K1-G1
agtttgtgaggtatcctgttgtgaacatgtggttagggtccagacatctaaagccagggaagaaagcgaaccgcaagagaagtaaaatgataagacgtgttgtagcctgcaaggacgcggcaaatttatcttgtttgagtgagcagctgacgtcaacatcgtacactgtatgctctgaaaccgtataatgtacctccagccatcaaaaacggtcacatgctaatgcaaggtccaaagatgacgcccagtcctcgcaaaacaagcagaaggtcgacggagctcg

SEQ ID NO: 6969 - DNA, 279 bp, Zea mays
  Clone ID: LIB3118-040-P1-K1-G10
attcttcaaccctacaggatccaacaggcaatcacagctggcatcttacctttatcacccttgttcctccaacaatcatcagccctattacatcagttacctttggtgcatttattggcacaaaacatcagggcacaacaactacaacaacttgtgctagcaaaccttgctgcctactctcagcaacagcagtttcttccattcaaccaactagctgcattgaactctgcttcttatttgcaacaacaacaactaccattcagccagctacctgctgcc

SEQ ID NO: 6970 - DNA, 111 bp, Zea mays
  unsure at all n locations
  Clone ID: LIB3118-040-P1-K1-G11
ccacgcatacgcggacgcgtgggcagtcgcttgggctcgacatcggtgggggcaaagctttgtccttatatcattctctanccgtatgacatgaggtacatgctatgaatt

SEQ ID NO: 6971 - DNA, 264 bp, Zea mays
  Clone ID: LIB3118-040-P1-K1-G12
gaccaacaagcaacatagaaagtggaatacagtagcaacaatagagcaacaatggcggccaagatattttccatccttatgctccttgctctttctgcatgtgttgctaacgcgaccatttttcctcaatactcacaagctcctatagctgcccttcttcccccataccttccatcaatgaccgcttcagtatgtgaaaacccagcccttcaaccctacaggctccaacatgcaatcgcaacaagcaacttacctttatcaccc

SEQ ID NO: 6972 - DNA, 281 bp, Zea mays
  Clone ID: LIB3118-040-P1-K1-G2
cccactcgtccgaaaaaaaaaaaaaaaaaaaaaaaaaaaaaaaaaaaaaaaaaagaaaaaaaaaaaattaaaaaaaaaaaaaaaaaaaaaaaaaaaaaaaaaaaaaaaaaaaaaaaaaaaaaaaaaaaaaaaaaaaaaagggggggcccttttaaataatcaaaatttacttcccctttcttgcaaaattataattttttttttgtgtcaccaaaataaaattaactgcccgttattttaaaacgtttagattggaaaaaccctggctttaccaaatttaa

SEQ ID NO: 6973 - DNA, 281 bp, Zea mays
  Clone ID: LIB3118-040-P1-K1-G3
cggacgcgtggggcggcgttggcagcaccccgatcctgggccagtgcgtcgagttcctgaggcatcagtgcagcccgacggcgacgccctactgctcgcctcagtgccagtcgttgcggcagcagtgttgccagcagctcaggcaggtggagccgcagcaccggtaccaggcgatcttcggcttggtcctccagtccatcctgcagcagcagccgcaaagcggccaggtcgcggggctgttggcggcgcagatagcgcagcaactgacggcgatgtgcggc

SEQ ID NO: 6974 - DNA, 280 bp, Zea mays
  Clone ID: LIB3118-040-P1-K1-G4
cccacgcgtccgcattggcaagcgaccatcatggggccttcggacagcccatttgcaggtggggtattcttggtgaacattcacttccaacggattacccttttaaggcaccaaaggtgtcttttcgcaccaaggtttttcacccgaacatcaacagcaacggcagcatttgccttgacattcttaaagaacagtggagtcctgctttaactatctcaaaggttctcctgtcaatctgctcactggtcacggacccaaaccctgatgatcctcttgtccc

SEQ ID NO: 6975 - DNA, 250 bp, Zea mays
  Clone ID: LIB3118-040-P1-K1-G5
cccactcgttcgtgtacgcgtgggcggacgcgtgggccctccggctttccagggggaggtgctttttgtttgttcaacattcacttccgagcgtaataccctagaaagccatcaaagttttttccacgcaccaaagtttaacacccggacatgaacaggatcgcgcgctatttgccttaacattgataaagaacattcttgttcctattttaacaatctcaaaggtttactttcctatctgttgggtgtt

SEQ ID NO: 6976 - DNA, 265 bp, Zea mays
  Clone ID: LIB3118-040-P1-K1-G6
agaaatataacaatgtccaacttgatggtaagcccatgaagatagagatagttgggaccaatactccaactgcatctgctgctcttccagtctccaatggtggccatgctaggaatgctgtgaggagtgcaccgaggggtgctgccccagcaggtatgccgcagcgaagacctcatcagaggggtgggaggcgtagtggtggatctgggggtggtcgtcgtggcaaggagcgcaacaagccaaagtcagcttgaagactcgacgc

SEQ ID NO: 6977 - DNA, 85 bp, Zea mays
  Clone ID: LIB3118-040-P1-K1-G7
aaaaaaaaaaaaaaaaaaaaaaaaaaaaaaaaaaaaaaaaaaaaaaaaaaaaaaaaaaaaaaaaaaaaaaaaaaaaaaaaaaaaa

SEQ ID NO: 6978 - DNA, 277 bp, Zea mays
  Clone ID: LIB3118-040-P1-K1-G8
aaattgcaccaagaaatccatcgagaggccgtcgacaggggaattaatggcgtcgtcgtctagcagcagccaccgccgcctcatcctcgcagccgccgtcctgctctccgtgctcgcggctgccagcgccagcgccgggacctcctgcgtgccggggtgggccatcccgcacaacccgctcccgagctgccgctggtacgtgaccagccggacctgcggcatcgggccgcgcctcccgtggccggagctgaagaggagatgctgcccggagctggcg

SEQ ID NO: 6979 - DNA, 131 bp, Zea mays
  Clone ID: LIB3118-040-P1-K1-H1
cccacgcgtccgcccacgcgtccgatttctggttggccacatacatcatccaaaaatctggaaatgtaacttcttatttctggttggccacatacatcatccaaaaataagaagttacatttccagatttt

SEQ ID NO: 6980 - DNA, 279 bp, Zea mays
  Clone ID: LIB3118-040-P1-K1-H10
ctgcaccacagaaccggttgaccagcgttcccagcccaagagttcctcttagcccaggggctagggatcagtctggcttctcaaggctcactgacagcaggacgttacgctccagcccttcccagcgaaagataaatggctactgatcgcttggcacacatattacacgtgtcacgatgacagttggcctcgatgaagcgccccgctgtatcttcatactcaactgcccctgcgtggagaagtccaattgttgctctgtcagatggtggcacgtgagtg

SEQ ID NO: 6981 - DNA, 219 bp, Zea mays
  Clone ID: LIB3118-040-P1-K1-H11
gcagctagagacaacctctgcgtaaacgaatgcatcggcatgtattctcgtgtggttgcggaggtgccctcctactcccgcctcttctcaatgccaccgcttgctcgactaatgaatctccgtggtcctgcccgcgcctccgaccgccatagttgtgggcatgaaccattgggcgacgatccgctctgccccagcgagccgacggcagagcactttagt

SEQ ID NO: 6982 - DNA, 94 bp, Zea mays
  Clone ID: LIB3118-040-P1-K1-H12
cgcagtgtcggcctacacctacgcgtacgcacaaacatggctgatgcaacgtggtatacaccaccactccaaaatggttcgtggcacgcatatg

SEQ ID NO: 6983 - DNA, 280 bp, Zea mays
  Clone ID: LIB3118-040-P1-K1-H2
cctagaccgcgagccggcaggtactataggatcacagattacactcgcgggcatgcgacgtgatagctattttatagagccacctaaacccaatacaccggccgctgctgacaacccccaggactgggaaaacacccggcgatacccaacttaatggccttgcagacaattcacagttcgccagatctactaccattcagccagctagctggtgtgagccctgctaccttgttgacacaaccacagttgttgccgttctaccagcacgctgcgcctaaag

SEQ ID NO: 6984 - DNA, 282 bp, Zea mays
  Clone ID: LIB3118-040-P1-K1-H3
cagctagctgtggcaaaccctgctgcctacttgcaacagctgcttccattcaaccaactgactgtgtcgaactctgctgcgtacctacaacagcgacaacagttacttaatccactagcggtggctaacccattggtcgctgccttcctacagcagcaacaattgctgccatacaaccagttctctttgatgaaccctgccttgttgtggcagcaacccatcgttggaggtgccatcttttagattacatatgagatgtactcgataatggtgccctcatag

SEQ ID NO: 6985 - DNA, 279 bp, Zea mays
  Clone ID: LIB3118-040-P1-K1-H4
gttgtgaggtgatcggagtggaaagctcaaggcccaaagagccaagtccatgaaggtcaaggatggctacatgatctcatctggtcagccagtgaacgagtacattgactcggctgtgagacacgttcttctcagacagggtgttcttggcatcaaggtgaagatcatgcttgactgggacccgaagggcaaggttggcccgatcactcctttttcggacctggtgaccatccacaccccgaaggacgaggacgagccgcgccctccggtcttggcacc

SEQ ID NO: 6986 - DNA, 285 bp, Zea mays
  Clone ID: LIB3118-040-P1-K1-H5
taggacggcatcgacacatcaacaccacccatggctaccgttcctatccccaagcgtcgtcgcaggtccctgcccaggcgcgttgcgtctccatcccagggcttccgccactcgagaaactctttgctactgcgcccccatccgctcccttcaatcgggggcatgaatcatttgccgccgagctgtgctgatccgggggcccgacgtctgtggcactcagtcctcctatttgcgcttagtagtaggttcagttctctgcagacaatagctgaaacactactgtac

SEQ ID NO: 6987 - DNA, 242 bp, Zea mays
  Clone ID: LIB3118-040-P1-K1-H6
gagaagcaaatgatttgctgctgcaacatgattgatgcatccactccaaaatactccatggcacgttatgatgtgattgtgaaggacgtctcatcctacctgaagaaagttcggctccaccctgatcagattgccttcgttcccatttctggttttgtgggctacaacctgattgagaggtccacctacctctgctgtttcaaaggcccaaccctgcttgcgggtattgacctgattaccgg

SEQ ID NO: 6988 - DNA, 270 bp, Zea mays
  Clone ID: LIB3118-040-P1-K1-H7
ccttctcgctgtcgccgggagacgagaccaggcacatcaacgttcagatgtgacacgccaacatttagggctcctctcctgacggtccgatccatacctgggtcggagtacttattactagctgatgtacgtagtggcggtaagtgattgttgtcgaagaagattgctcagtcaatctatgtttcttacttgtcctgtgtcaaatttagtgtaagaactggcgtccttgacagctggtatgtaaaatattatggccatcactattactat

SEQ ID NO: 6989 - DNA, 286 bp, Zea mays
  Clone ID: LIB3118-041-P1-K1-A10
agctgtatgagtgatacttcaataatagcgacgctggcgtaatctttgccggtgtctagagagactagagtcacaagctccaagccaacgaaggaaagcaaaaagcctggaggaggaagcgcaagtatgagcttgcaagctagccaaccaacacaaagtagtcaagaaataatacatagaggagggtaactgattgtacaggcaatgtgaaaacaacggctctacgtgtaaaactgtgaactactcaaggtgaagtgatggtaatacatacaagattcgtcagctg

SEQ ID NO: 6990 - DNA, 339 bp, Zea mays
  Clone ID: LIB3118-041-P1-K1-A12
ggaggagtacaggttcaaagaatacggtaacgagtcagaggccctcattgataagtgcatgtgcttcaatttacattctaagaagctggaaaccgatgcctgatcattcaaacttggatctcaagtgctcaaagcatgaatctgtgtatttcctaggtgcaaagatgtctagtcagctctcccactctcttgtaaacaaaggtgccgtcattcggagtttctctaaatgtgtcccagttactaataaccctgatgtgttagctggtgttttaagtgtacggaaacgagtaaatgggaattccatacactctgttaccccagtccaatacaaccttgctg

SEQ ID NO: 6991 - DNA, 384 bp, Zea mays
  Clone ID: LIB3118-041-P1-K1-A2
ctcaggaaatgtggttatgttttatggaaatttatcctgttgctatttgattgatcaattgacgatggtgccccattatttgaaaaaaaaaaaaaaaaaaaaaaaaaaaaaaaaaaaaaaaaaaaaaaaaaaaaaaaaaaaaaaaaaaaaaaaaaaaaaaaaaaaaaaaaaaaaaaaaaaaaaaaaaaaaataaaaaaaaaaaaaaaaaaaaaaaaaaaaaaggggggggccgttttaagggatcaaatttaattgccggggcatggcaagttaaaattttttattaagggagcccaaaatcaaattgatggggcgaataataaaaaaataaaagtgggaaaaaccatggggacacaaaaataaaactcgtgtgagaaaatccc

SEQ ID NO: 6992 - DNA, 242 bp, Zea mays
  unsure at all n locations
  Clone ID: LIB3118-041-P1-K1-A3
gggggggcgaacgctcaggaaaagaggaaaaacnnaaaaaaaaccnaccccggggcaacaggagggagggggggacgaaggagccccatgatccgaaaaaaaaaaaaaaaagaaaaaaaaacaaaagaggaaaaaaaaaaagaaaaaaaaaaagaaaaaaaaaaaaaaagaacaaaaaaaaaaaaggaaggcaacaaagaaggaaaaaaaagaaggagggaaaaaaaaaaagaaaggggggg

SEQ ID NO: 6993 - DNA, 340 bp, Zea mays
  Clone ID: LIB3118-041-P1-K1-A4
cggacgcgtgggcggacgcgtgggcgcgccgccgccgccgccgtgacggaaggaagaggaggagcaaggagcacgacgcgatgggccactccaacgtttggaactcgcaccctaagaactacggccctggctcccgcgtctgccgggtctgcgcgaaccctcacggtctgatcaggaagtacgggctcatgtgctgcaggcagtgctttcgcagcaacgccaaggacattggtttcatcaagtaccggtgaagaggccactgtgctgctgcggagaacttcctacatcaaagaaatgggtccttcattagaaggcctaatttatgcgctttagctttttg

SEQ ID NO: 6994 - DNA, 355 bp, Zea mays
  Clone ID: LIB3118-041-P1-K1-A5
agctagctagcgttcctaatcaccgacgaataatctcttcttcacctcactaacaccgagctagcagctcgctctgtcctgcaacaatggccgctcgctcctcctcccagcagctggtcgcggcggcggtcctggcagcggcgctgctgctgctggcggcgggggccgggacggcgtcggcggcggtgagctgcggcgaggtgacgtcgtcggtggcgccgtgcctcgggtacgcgatgggcagcgcggcgtcgccctccgcggcgtgctgcagcggggtgcgctcgctcaacagccgcgcgtcgtcgacggcggaccggcaggccacctgcaactgcctcagagcatgacgggc

SEQ ID NO: 6995 - DNA, 225 bp, Zea mays
  Clone ID: LIB3118-041-P1-K1-A6
tccacggtggtgaggacgtcatggcaagaataagctggcgatatgcctgcattgtggggagccttctgcatagggagacagtcaaaccaagccgtaggtccgctacaagataaaaaaataagggaccggttgtgaaaggaggaacaactaccgatacaagggacaaaacaaagtgtggccctgcgggttgacattaaaatagtgcaaaccgatgtgggtgatcag

SEQ ID NO: 6996 - DNA, 384 bp, Zea mays
  Clone ID: LIB3118-041-P1-K1-A8
cagaaaagcaataattgacaaaaatgctcgcattggagaaaatgtgaagataatcaattttgataatgtccaagaagcagtaagggagacagaaggatattttatcaaaagtggaattgtcacggtgattaaagatgctttaattcctagtggaacaatcatataaagtcagccaacaccatgtatataaggttgggttgcatcatatggtgatcgccaatgcgcatcaagttctctcatcccttgcgagaccatgcttatttccattgcaaaatcatcaagctctgcatcaacttgttgtggataataatgaaataataaatggtgccattccatggcaacatttttctgtcactagtatgaggcactgttctaaatgtactg

SEQ ID NO: 6997 - DNA, 385 bp, Zea mays
  Clone ID: LIB3118-041-P1-K1-A9
cagaaatgtagtaacagacaaaaatgctcgtattggatgaagtgtgaagataatcaattttgataatgtccaggacgcactatgtaagacagacaggttttttatcaaacgcgtcatacgtactagctattaaagatgctttaataactagaggaacattgatataaagtcacacaacaccatgtatataaggctgggttgcatcatatgttgatcgccagtgcgcataaagttctctcataccttgcgagaccatgcttatttccattgcaaaatcatcatgctatcaatcaacttgctgagtataataatgaaataataaatggtgccattccatagcaacatttttgtgtcactagtatgacgcactgctctaaatgtactg

SEQ ID NO: 6998 - DNA, 429 bp, Zea mays
  unsure at all n locations
  Clone ID: LIB3118-041-P1-K1-B1
aagacaaaaaaaaaaacaaagaaagaaagagagaaaacaaangggggggggggggaaaaaaaaaaaagaaagcaaaaaaacaacaaaaaaaaaaaaaaaaagaagaaaaaaaaagaaaaaaaaaaaaagagaaaaaaaaaaaaaaaaaaaaaaaaaaagaaagaaaaaaggaaaaagagaaaagaaaagaaaagaaaaaaaaaaaaaaaaaaaaaaagaaaaaaggagaaaaaaaaaaaaaaaagaaaaaaaagaaaaaaaaagaaaaagaaaagaaaaaaaaaaaaaagaaggaaaagaaaagaaggaagagaggaaagagagaaaaggaagaaagaaagaaaaagagaaaaaagaagaaaagaggaagacgagggagaaagaaagaaaaaagaaaaaaagaagaaaaaaacacagaaaaaaaaaaga

SEQ ID NO: 6999 - DNA, 315 bp, Zea mays
  Clone ID: LIB3118-041-P1-K1-B10
cggacgcgtgggcggtcacgtgggggaggagaaggaagaaagttatcacgacgggggcttcagcctggtggactaagcttgggcaatagtcaacaatattgtttttgagtcgcggcagccgaggggataaaaatcttagtcatgtgtggactttaactttgttttatgttggaaagtactcgaaagacttttactggggtaattctaggcgtaggttgctgtgctagttggggtttactggcaaaccagagatttattatcccattatgaatgtgttacgtgacgagacctggatggttactgcattggtggtac

SEQ ID NO: 7000 - DNA, 181 bp, Zea mays
  Clone ID: LIB3118-041-P1-K1-B11
acgcgggttttttcgcatgaaaattatagagaatgaagggagggggacaaacattgggcacgcatcaactgtttttaataaaaagatctaggagcgggacacacgacaactgtgtactgatgcatgtagacttacgcacgacaaggtcgctagatggtcgactcctctcctggggcgggcc

SEQ ID NO: 7001 - DNA, 144 bp, Zea mays
  Clone ID: LIB3118-041-P1-K1-B12
acgcggacgcgtgggtttttttttttgcatgaaacattaattctactcatgatcgaccacggcacacaacaattgaggacgcatgcaagctgttttttttatttagaagattccgaggagcggggacgacgacaaccatctgct

SEQ ID NO: 7002 - DNA, 126 bp, Zea mays
  Clone ID: LIB3118-041-P1-K1-B2
cagcagcccaccattggtggtgccatcttctagattttttatgctttatactgtaataataaagttctcatactgatatgtgcaacttctcagtaataaaagattagagatctatattttaagttc

SEQ ID NO: 7003 - DNA, 126 bp, Zea mays; identical to SEQ ID NO: 7002
  Clone ID: LIB3118-041-P1-K1-B3

SEQ ID NO: 7004 - DNA, 307 bp, Zea mays
  Clone ID: LIB3118-041-P1-K1-B5
cccacgcgttcgcccacgcgtccgcccacgcgttcggtttgtggcttcccagaaataagaaagtacatttctaaaaaaaaaaaaaaaaaaaaaaaaaaaaaaaaaaaaaaaaaaaaaaaaaaaaaaaaaaaaaaaaaaaaaaaaaaaaaaaaaaaaaaaaaaaaaaaaaaaaaaaaaaaaaaaaaaaaaaaaaaaaaaaaaaaaaaatgggtggggggcttccgatttaaaaaataaaattttccttcaccggaaatcaaaactttatatattttttattgcaacactaaataaaatgcccggggcg

SEQ ID NO: 7005 - DNA, 374 bp, Zea mays
  Clone ID: LIB3118-041-P1-K1-B6
cggacgcgtgggtttttttttttgcatgaaacattaattctactcatgatcgaccacgacacacaacaattgagcacgcatgcaagctgttttttttattcagaagattccgaggagcggggacgacgacgacgtcctgctgctcctgcatgcatgtagtcctctacgcacgacggcggtcgccgcagctcggcgcgggctcctcctcctcggcggccgggccggcgacgaggtgctcgtagacgacgccggagaggccggcgccgaccatgggccccacccagtacacccattggtgtctccagcgacgggagcccacgacggcgggcccgaacgcgcgcgccggattcatcacggcgccctccagcgcgccg

SEQ ID NO: 7006 - DNA, 158 bp, Zea mays
  unsure at all n locations
  Clone ID: LIB3118-041-P1-K1-B7
cccacgcgtncgnccaattcttcaaccctacaggatccaacatgcaattgcatcaggcatcttacctttatcacccttgttcctncaacaatcatcagccctattacagcaggtacctttggtgcatttattggcacaaaacatcagggcacaacaac

SEQ ID NO: 7007 - DNA, 188 bp, Zea mays
  Clone ID: LIB3118-041-P1-K1-B8
tccgtggtggtcagtaagtcatgggtcgtttaagctgccgatgtgcctgcgtcgtctggtgccctctccatatggaggttgtcgaagtatctgctgttcgtgtcagtgttggtttaataatggaccggttgtgttgtgtgtgcgtactacccagaactatgacaaatcatgaataagtttgttgtttg

SEQ ID NO: 7008 - DNA, 270 bp, Zea mays
  Clone ID: LIB3118-041-P1-K1-B9
tagctacatcgaaagcacaatattgtaccaataatggcagccaaaatcgggcgcctcattatgctccttggtctttctgcaagtgcttcttcgtcgagcatttttccgtaatgttcacaagctcctatagcttcccttctttccccatacctatcaccagcgatgtcttcagtatgtgaaaatccaatttttataccctacaggatccaacaggcaatcttagcaagcaatttttaccttttatcacccctcgctgctataacccctttt

SEQ ID NO: 7009 - DNA, 380 bp, Zea mays
  Clone ID: LIB3118-041-P1-K1-C1
tagcaacatagaaagcacaatattgtaccaataatggcagccaaactatttgcgcctcattatgctccttggtctttctgcaagtgctgctacggcgagcattttcccgcaatgctcacaagctcctatagcttcccttcttcccccatacctatcaccagcgatgtcttcagtatgtgaaaatccaattcttctaccctacaggatccaacaggcaatcgcagcaagcatcttacctttatcacccttgttcctccaacaatcatcagccctattacagcagctacctttggtgcatttattggcacaaaacatgatggcacaacaactacaacaactcgtgctagcaaaccttgctgcctactctcagcaacagcagt

SEQ ID NO: 7010 - DNA, 371 bp, Zea mays
  Clone ID: LIB3118-041-P1-K1-C10
caccaagatcgtggagaagctgtttgagatcgaccctgatggtaccgtggtcgctctggctgacatgatgaggaagaagatctcaatgcctgcccacctgatgtttgacgggcaggacgacaagctgttcgagcacttctccatggtcgcgcagaggcttggcgtttacactgccagggactacgccgacatcctcgagttcctcgtcgacaggtggaaggtggtgaacctgactggtctgtcgggtgaagggaacaaggcgcaggactacctttgcacccttgcttcaaggatcaggaggctggaggagagggcccagagcagagccaagaaagcaggcacgctgcctttcagctgggtatacggtaggg

SEQ ID NO: 7011 - DNA, 196 bp, Zea mays
  Clone ID: LIB3118-041-P1-K1-C11
caccaacattgcgtatactctaatcgagacctacactaattgcaactggagggctactacatacatgtggcgactcaacttattaatcccagtcataattatctttgaccagcaataccacaagcttttatagcacttttccatggtcgtgcaaaggcttggcgtatacactgacaaacaccacacattcattttt

SEQ ID NO: 7012 - DNA, 370 bp, Zea mays
  Clone ID: LIB3118-041-P1-K1-C12
gtttctttccgcttgaggttttacctgaggggggcactggaacggtcggcgtggtccggcgaggccacgctgtcgcgtctggttggcgcgctcatcgcgttcaagccgctctactcggtattgaagctcgcctcccgggaggtcatcatcagactatctcaacctgtttcatgcctacgacgaagggaatctatcatggctggctgcaacagaggctgagcctgcaacaatgtcgatcgcaaagagggccatacctgaggctacatcaatcgaagaggccaaccaaatcgtctgcggcaactggctgaatgtaattgaggagcatcgtctgaagtacttggggagctctcaggtaacctggacattggct

SEQ ID NO: 7013 - DNA, 58 bp, Zea mays
  Clone ID: LIB3118-041-P1-K1-C2
aaaaaaaaaaaaaaaaaaaaaaaaaaaaaaaaaaaaaaaaaaaaaaaaaaaaaaaaaa

SEQ ID NO: 7014 - DNA, 58 bp, Zea mays
  Clone ID: LIB3118-041-P1-K1-C3
aaaaaaaaaaaaaaaaaaaaaaaaaaaaaaaaaaaaaaaaaaaaaaaaaaaaagagaa

SEQ ID NO: 7015 - DNA, 260 bp, Zea mays
  Clone ID: LIB3118-041-P1-K1-C4
cggacgcgtgggtttttttttttgcatgaaacattaattctactcatgatcgaccaggacacacaacaattgagcacgcatgcaagctgttttttttattcagaagattccgaggagcggggacgacgacgacgtcctgctgctcctgcatgcatgtagtcctctacgcacgacggcggtcgccgtagtttggcgcgggctcctcctcctcggagggcgggccggttatgaggtgctcttagactactcctgagaggtcg

SEQ ID NO: 7016 - DNA, 125 bp, Zea mays
  Clone ID: LIB3118-041-P1-K1-C5
cccacgcgtccgaaaaaaaaaaaaaaaaaaaaaaaaaaaaaaaaatgaaaaaagaaaagggaaaaaaatatgatggtcaaaaaaaagatattaaaaataaggcagcctggtgtttgacggtcaag

SEQ ID NO: 7017 - DNA, 343 bp, Zea mays
  unsure at all n locations
  Clone ID: LIB3118-041-P1-K1-C6
agcaacagttgcttccattccatctacaagttgtggcaaacattgctgctttcttgcaacaacaacaacaattgctgccattttacccacaggttgtgggaaacattaacgccttcttgcaacaacaacagttgctaccattctacccacaggatgtgggcaacaatgtcggcttcttacaacaacaacaattgctgccatttaaccaacttgctttgacgaatcctaccaccttattgcagcagcccaccattggtggtgccatcttctagatttttttatgctttatactgtaataataaagttctcatactgatatgtgcaacttctcagtnntnnanaa

SEQ ID NO: 7018 - DNA, 381 bp, Zea mays
  Clone ID: LIB3118-041-P1-K1-C7
cccacgcgtccggggttggcttctcctccccctccggttcgggttcgggttcgtgaggttctccggggttcgggttcgtgggtgagcggatcgagatggcggcgtcggatgttgagtaccgctgcttcgtcggcggcctcgcctgggccacggacgaccactccctccacaacgccttcagcacctacggcgaggtcctcgagtccaagatcatcctcgatcgggagacgcagaggtcccgcggcttcggcttcgtcaccttctccacggaggaggcgatgcggaacgccatcgagggcatgaacggcaaggagctggacggccgcaacatcaccgtcaacgaggcccagtcccgcggcggccgtggaggcggcggcggtg

SEQ ID NO: 7019 - DNA, 185 bp, Zea mays
  Clone ID: LIB3118-041-P1-K1-C8
gcgctcagtcgatatccttgcaggtggcgggtgtacatgttatctatgttggggatggtggcctggcgatgaagtatgatgactttcggtgaaaccgggatgctatgaacactttattgttgttagggaacatggtgtgtggggcaacaggtataagaccttattgaggccacgggggggcgtta

SEQ ID NO: 7020 - DNA, 337 bp, Zea mays
  Clone ID: LIB3118-041-P1-K1-D1
attggccgcactgaaccccgctgcttatttgcagcagcaaatactactaccatttagccagctagctgcagcaaaccgtgcttccttcttgacacagcaacagttgctgcctttctaccagcagtttgcggctaaccccgcaaccctcttacaactacaacaattgttgccctttgtccaacttgctttgacagacccagcggcctcctaccaacaacacatcattggtggtgccctcttttagattgcttattagttgtaattcaataataaagttttttggatgatgtatgtggccaaccagaaataagaagttacatttccagattctaatgtg

SEQ ID NO: 7021 - DNA, 372 bp, Zea mays
  Clone ID: LIB3118-041-P1-K1-D10
cccacgcgtccggagaccaacaagcaacatagaaagtggaatccagtagcagcaatagagcaacaatggcgaccaagatattttccctccttatgctccttgctctttctacatgtgttgctaacgcgacaattttccctcaatgctcacaagctcctatagcttcccttcttcccccataccttccatcaattatagcttcaatatgtgaaaacccagctcttcaaccatataggcttcaacaagcaatcgcagcaagcaacatacctttatcgcccttgttgtttcaacaatcgccagccctatctttggtgcagtcattggtacaaaccatcagggcacaacagctgcagcaactcgtgctacctctga

SEQ ID NO: 7022 - DNA, 355 bp, Zea mays
  Clone ID: LIB3118-041-P1-K1-D11
acttctcttcgcaagcctttcaatctaaagtgtatccttgataagccagtattttaaccctgctaggggagcccactcttctgcctatctctactgttatgtcgttacctctcatagcatgcttccttatagtttcgaagtgcaaggagatcccgttacttgtctgtatcataactcataaattgttcgaaactttgattgaggatgtggcgtgctctgctcctctaaacctggacgatgtggaatggtgggaaaaccccccctactattgtgttgtttgtgaatgtaccgttgtaaccacaagtgaacttgctgtctcggacaagaattattagctaaataaccatggtactgt

SEQ ID NO: 7023 - DNA, 377 bp, Zea mays
  Clone ID: LIB3118-041-P1-K1-D2
aaaccatcgcaatgcaacagcaacagcaacaacagttcctactagcactgagccacctagccatggtgaaccctggcgccgacttgtaacaacaactgcttgcatccaacccacttgctctggcaaacgcagttgcaaaccagcaacaacaacagctgcaacagtttctgccagcgctcagtcaactagccatggtgaaccctgccgccgacctacaacagcaacaactgctttcatctagctcgctcgctgtggccaatgcacctacatacctgcaacaacaattgttgcaacagattgtaccagctctgactcagctagctgtggcaaaccctgctgcctacttgcaacagctgcttccattcaaccaactgact

SEQ ID NO: 7024 - DNA, 377 bp, Zea mays; identical to SEQ ID NO: 7023
  Clone ID: LIB3118-041-P1-K1-D3

SEQ ID NO: 7025 - DNA, 312 bp, Zea mays
  Clone ID: LIB3118-041-P1-K1-D4
gtcctccagtccatcctgcagcagcagccgcaaagcggccaggtcgcggggctgttggcggcgcacatagcgcagcaactgacggcgatgtgcggcctgcagcagccgactccatgcccctacgctgctgccggcggtgtcccccactgaagaaactatgtgctgtagtatagccgctggctagctagctagttgagtcatttagcggcgatgattgagtaataatgtgtcacgcatcaccatgggtggcagtgtcagtgtgagcaatgacctgaatgaacaattgaaatgaaaagaaaaaagtattgttcc

SEQ ID NO: 7026 - DNA, 353 bp, Zea mays
  Clone ID: LIB3118-041-P1-K1-D6
ccggaattgaagggtcggcgccacgcgaccggtctcggatgctatttgtcaacttatcccgcttaagactcaaggggcataaatcatggatggagagaaacctacaaacgctccaaaactaccaaagaaagcaaactctaagaacaaaggggccgaagagccacttattggtcggatcatgcagacacgggaaggatgaaaactccgaatcagttgcctcaagtatggcatagcaaaggacaggaagaagattattaaaaggctgacggcccatattatgaaccttgctctaagggattggggatgaaaccctcttatctgcagtgttgctattgaaggtgacacatagaccg

SEQ ID NO: 7027 - DNA, 384 bp, Zea mays
  Clone ID: LIB3118-041-P1-K1-D7
caccagccgccgccatgtcgaagcgaggcaggggaggttcggcggggaacaagttccgcatgtcgctgggtctgccagtggccgcgacggtgaactgcgcggacaacaccggcgccaagaacctctacatcatctccgtcaagggcataaagggccggctgaatcgccttccgtccgcctgcgttggcgacatggtcatggccaccgtcaagaaggggaagcccgacctcaggaagaaggtgatgcccgccgtcatcgtccgccagcgcaagccgtggcgccgcaaggacggggtctacatgtacttagaagataatgctggagtgattgcgaatcccaagggtgagatgaaaggtttcgctatcactggacctatcggcaagg

SEQ ID NO: 7028 - DNA, 275 bp, Zea mays
  Clone ID: LIB3118-041-P1-K1-D8
tagggacaacaagcatctcttagggacacttctggatcgcagtccctttttttgttctgaaaggatgggcaaaaataagtcgttttctgtttgtcgtgtttgtttggtcttagaagattgttgagggtggagataactccacatgaagctattggttgtcaagtctgtatgccgtaggatgctttacatttccctttttgccgtcttccatgtcaaaacaatatctggcaacctccgatactaactgttattcatgggtcactgaattccggatc

SEQ ID NO: 7029 - DNA, 380 bp, Zea mays
  Clone ID: LIB3118-041-P1-K1-D9
cttcaatgcttgtgtgtctggctgtggattcagatttgacatcccaacggagaaggtcgaagaaatcaagcccaataggccatccaaaccatcagctcctgaacctgaagtgaaacaaactaggaatgcagattgtaatgaagatgtgccgtgcacgtcagcctagtttgagtgttggcgtgcctcaaattttgtaaagccaatgtgcttctccgttgtatttctactcgtcctattttcccatggaaaactcacgggaaactttatctagcttagctctagtttggaaactcaaatcccttcgtcgatggaaagggtttgagggacaaattagtttatttccatcttaatcccttccaatcctcgggtgatttgagtta

SEQ ID NO: 7030 - DNA, 209 bp, Zea mays
  Clone ID: LIB3118-041-P1-K1-E1
caccctgtatggcttccccatggtgttctaagtctgctcttttgtgaagtctgctaggttctggcaccgaggttttattgaattaaactcttgttaagagtatgtttttggacgatcctatatttcgtcctggcgctactatgtttcagaatggtggtactactataagtattgcttgaaaggatcaatataatttgcgtgtcataccc

SEQ ID NO: 7031 - DNA, 299 bp, Zea mays
  Clone ID: LIB3118-041-P1-K1-E10
cccacgcgtccggtaagctgtagcacggtgggggctcaaccgaataacctgggcgcattgccctttctgttacgtgttttattttattgtgtttctgggggcgtatatctgttttgtgacgtgttccctgcttctcccatgtgaattccagaactatgataaatttcaggttggtgatcactcattagtgctgtcactatttgtgcagaaataatagcatataattactactaaatgttaatcaacataggtataggaataataacaataacataattaaaacgggggggcgttttaga

SEQ ID NO: 7032 - DNA, 373 bp, Zea mays
  Clone ID: LIB3118-041-P1-K1-E11
tcggcaagagcagcttcttcagcaatataaattgggcagttcaccgtagcgacagggtcatggacaggatctctacattaaagggccagctctgtttgagaatgatgaccccgcaccggtcaagccggtgggaacaaggtgccagctctgcaagcttgatgttgctttccggacacaaggggatgctggccgtgatgccaatgcttcaccaatcattgcagttttggcatgccaccatgtgttccacaacaggggcattgaatttgtttaccggctcgctgagcctgctgagtgccttgcctgcctggagtacggtgcaacgcactgattgctaaccagatacaccaagtataggataaagtttcctcttata

SEQ ID NO: 7033 - DNA, 380 bp, Zea mays
  Clone ID: LIB3118-041-P1-K1-E2
cccacgcgtccgcccacgcgtccgcccacgcgtccgcggacgcgtgggtgaagatcgaccccttcatatcccctacccagaaggctctttcccgtgggcagtgtggtgtaaactgctgaaatgatccgaactgcctgctgaataacattgctccggcacaatcatgatctaccccttcgtgtaaataccagaggttaggcaagacttttcttggtaggtggcgaagatgtgtcgtttaagttcactctactgcatctggggtgggcagcatgaaactttgtcaacttatgtcgtgctactgttacttatttgtagctaagtagcagtaagtagtgcctatttcatgttgactgtcgtgactacctgttcaccgtgggctt

SEQ ID NO: 7034 - DNA, 375 bp, Zea mays
  Clone ID: LIB3118-041-P1-K1-E3
tcgcccacgcgtccgcccacgcgtccgcccacgcgtccgcggacgcgtgggtgaagatcgaccccttcatatcccctacccagaaggctctttcccgtgggcagtgtggtgtaaactgctgaaatgatccgaactgcctgctgaataacattgctccggcacaatcatgatctaccccttcgtgtaaataccagaggttaggcaagacttttcttggtaggtggcgaagatgtgtcgtttaagttcactctactgcatctggggtgggcagcatgaaactttgtcaacttatgtcgagctactgttacttatttgtagctaagtagcagtaagtagtgcctatttcatgttgactgtcgtgactacctgttcacc

SEQ ID NO: 7035 - DNA, 366 bp, Zea mays
  Clone ID: LIB3118-041-P1-K1-E5
atccaaagaggtagagagatggaaaggatgagttcgtcgctgcagtactgggtggaggagcacaagctctcaaccatcggagccgtgtgggcgacggcggtgggcgcgtcggtggcgtacagccggcggcgggcgccggcgcgggcgacgggcatgcgcctcatccacgccaggatgcacgcgcaggcgctcacgctcgccgtcctcgggggagccgggctcgcgcaccactaccacggtaagagcaccaacgccgggaagaggcagtagcaggaggacctggactacggcttgtactcgcagctgtcggcggccaccgacgccgacggtaacgagaacgagcgctggagctggtggagcatgctg

SEQ ID NO: 7036 - DNA, 132 bp, Zea mays
  Clone ID: LIB3118-041-P1-K1-E6
tttgctaccaatgattatgtgatagaggttttatgttatttgaaaactgctctgtgcctggatgagagttctggaacataatgtgaacctgtgtgtctgtgacctgagctttgaagatctcattatgtggtt

SEQ ID NO: 7037 - DNA, 359 bp, Zea mays
  Clone ID: LIB3118-041-P1-K1-E8
gcagctcgcacatcaaacaagtggcgacagacaaagattcgtgagggtgatccgcgctgagaagagatggataaaatcgccgcggacgctgcggcggacgctgtgcttcgcggtcctggtggccgaggcactttgtcaaggcgaggtcgatcggtagaggctcaacgacctgcagtgctggcaagagcgtccaggagagcccgctcgacgcgtgccgccaggtcctctaccgacagctaaccggatgtggccgctgcggcggcgcaatgcacctacggtcctacaccaacatttgcatgcacagatggcaccagctctagctcatgtggctgtggcaaaccttgctgcctacttacaac

SEQ ID NO: 7038 - DNA, 383 bp, Zea mays
  Clone ID: LIB3118-041-P1-K1-E9
gtcaaaaagccagcggcggaggcgcctgcgacagagaaggacataaaggctgcggcgaggtaaaagaacagggcctacatgcgcctctcggtgggcaagtacaaagagggcggacagggcattgatgggacaaaaagggcaacaaagaacctggagacctacaagatctacatattgaaggtgctgaagcatgtgcaccctgagcatgccaatttagcacaaggtccagtgcatcatgtactacgttataaacgacatattatagaagatgagggacgcgttcgacaagctgtctcgctacaacaagaagcccaccatcacctttcgtgagatccagacctaggagcgccttgttctcactgacgagctcggcaagcacgcct

SEQ ID NO: 7039 - DNA, 362 bp, Zea mays
  Clone ID: LIB3118-041-P1-K1-F1
ctggaagtacgtgagcaacctggagaggcgcgagacccgccgctacatcgagatgttctacgccctgaagtaccgtagcctggcaagccaggttccgctgtccttcgattagtacggggaaagaagaagaagaagaagcccaggccggagaaccatcgcctgcatttcgatctgtttcaccgcaattcgcattgttagtcgtgtattggagttatgtgtacttggtttccaagaactttggttccttctcggtttttttccttggttgagcggttttgggcagcgctggcctggttcctagtatggtgggaattggctgcaccttttgcttcgaaataaaatgcctggctcgttcacctgtc

SEQ ID NO: 7040 - DNA, 250 bp, Zea mays
  Clone ID: LIB3118-041-P1-K1-F10
cggacgcgtgggccaagatccatttaaaggaggaaaggactccaaaatttacaaatcgttcttgtagctgttccaccaaaaagggaacaatttaccacttatttatccgagagagagggcggtttaagtcagagagcatttacatgagatcaggccagttaactctgggagccttggaatccgcagtgctcggtaaatttaggtcctttaaccacgtttctgtatggaagggtgaaaggccaccgagctt

SEQ ID NO: 7041 - DNA, 313 bp, Zea mays
  Clone ID: LIB3118-041-P1-K1-F11
gccaaaaaagagatcattcagcagagttcaaacattttcatcttacaatgaagctatcattagaaacaagtttcagtaatctcgaattctaggtttcgtggagtcctcgcgtcgtatcactatcagtccaccgagctcgctttgagcaaagccaagaccgcggctaccacgggcagggacaccatcagcagagctaccacaatgtttggcctcgtgatgtccgggagcaggatgcttccggtcttgataaccgcggcggccccaagggacccaagcaccaatgtccacagatagccggagtcatcacccttga

SEQ ID NO: 7042 - DNA, 379 bp, Zea mays
  Clone ID: LIB3118-041-P1-K1-F12
cggacgcgtgggtttcttatgagttatagttcaataataaatctaaaagagggcaccaccaatgatggggtgctgaaaaataagtagaaagaaatcaagaaacaagtagatgacgctattgctaaagcaaaggaaagttctatgcctgatacttctgaactcttcacaaatgtttataagaagggcttcggcgtggagtcatttgggccagacaggaaggagatgagagcttctcttccgtaggttggcagcatgatgaggcagtcctcattacatggtatgatagccaggaaaaataaattttgatgaaggcctcaggcattattggaatattttatcgggaaatgaacctgtatagagatgcgttgtctggaggatc

SEQ ID NO: 7043 - DNA, 189 bp, Zea mays
  unsure at all n locations
  Clone ID: LIB3118-041-P1-K1-F2
ccggaacnaaagagccgggccgacccacgcgaccggaggaaggacgggagcacccagcagaggcacgagaccaaacgcgacagggggggggacaacacacgaaagaaccgcagccaggcaagccagaccaagcagccccaggaaaagcaaggggaaagaaaaagaagaagaagcccaagccggagaacc

SEQ ID NO: 7044 - DNA, 113 bp, Zea mays
  Clone ID: LIB3118-041-P1-K1-F3
atttagcggcgatgattgagtaataatgtgtcacgcatcaccatgggtggcagtgtcagtgtgagcaatgacctgaatgaacaattgaaatgaaaagaaaaaagtattgttcc

SEQ ID NO: 7045 - DNA, 384 bp, Zea mays
  Clone ID: LIB3118-041-P1-K1-F4
gcctcggatgctatttgtcaacttatcccccttcttactcaaggggcattaatcatagatggagatgaacctacaaacgctccagaactaccaaagaaagcaaaagctaagaagaaaaggtcgaaagagccacttattgttcggatcatgcagacaagggaaggattaaaactaggaattagttgcctcaagtatggcagtgcaaaggacaggaagaagattattaaaagtttgaagggccacattatgaagcttgctctaagtgattttggatgtctttttcttatctgcattatttctattgttgatgacacaaagcttgtttctaagattgtcattcaagagctggtaaaacatttaaagcagctcatttttgacaagaat

SEQ ID NO: 7046 - DNA, 383 bp, Zea mays
  Clone ID: LIB3118-041-P1-K1-F5
aatggtttgtttctttttcaaatggctaaaagttgtgaaagttcaaatttccttgggtttgagatgaatgaaaagcttgtcattaggtgcctccaaggtatggcttcagatgagaaaaggaacctatattttgtgtcaacaaatgcaacgtccacatttcgttccatagtttcaagttatcctggacggttgactcttgtcacaatacagtgcccaaatcctgacttcaacaaagagcaaaataggtggagaatggtgcgaagaatgctcattgaagctatcgtcgaccttcttcataccaatggacaggtttatctgcagtcagatgtggagtccgttctgctcgtgatgaaggagcagttcctctcctacagcaagggtca

SEQ ID NO: 7047 - DNA, 296 bp, Zea mays
  Clone ID: LIB3118-041-P1-K1-F6
cggacgcgtgggttcgccccggggcatcaataaaatgttggcatgcgtggtgggatgctatcctttttttttattatattttattttatttttagcttggatcagttggggttttgaacattgctagtgtcgtgtgattgggaaggctaatgtgatgccttcactgcaaagttatcaaggtatgcttgggcgcaaacgtaccattgtgtaataatgccttgtattgatcagcgactctaatagtccgttttggccagagattgtccggagcaggatgcttacgtactttataaccg

SEQ ID NO: 7048 - DNA, 382 bp, Zea mays
  Clone ID: LIB3118-041-P1-K1-F7
cccacgcgtccggtgttgtcgcctcccttgcatcagatagaaatgtctgggatgcagtattgaagaacgagaaggttatggagttttataagactcaccagacaactctagttcagacatcccctaacgaagccgtcacagtagagttgccggggaagctggaagatgctgcctctgaaaacacatccagcggcgaactccccgctggctcaggcccgagtttctccgatttcgtggacaatgcgaagaagacagtgatggacgtggtccataacataaccgacttcttcaaggacttgttcgacgactcagccaagacccagactggggcaggcccttcagcagctgagaagggcccttctacggcagatatggctgtcgg

SEQ ID NO: 7049 - DNA, 348 bp, Zea mays
  Clone ID: LIB3118-041-P1-K1-F8
cccacgcattcggcgttggaggctcccttgacacagaaagacatgcatgctgtgccgggttaaaaaaccagagccttcttgcgcttcatgatactcacgtacacaagatgtggttaggcattcgctagcgaaaccagggcactaaagttcctggggacgttcaagagctacatcttcaaggaacatatccaggggcacactcacatgtcgttcatgcccgagttcctgtgcatcagctaccagttcatagaagacagctgtgagcagctggcgtacgagaaccgcatgctggaacgatttgacaagaagctcaccatcaacctacactggatccagaccttggtgcgc

SEQ ID NO: 7050 - DNA, 378 bp, Zea mays
  Clone ID: LIB3118-041-P1-K1-F9
cggacgcgtgggcggacgcgtggggtcccatcccatggaggccaccccgatctccatgaagccaccgtctccggcgccggcggcgccacccccagccactctggagcccggggacttgccaacgcatgccttcggagggaccgagctggagccgtccagtatgaaccagctcgcaatagctccggaccccaaacggccgagggtggaggaggctgcggacggcaacgggtgcaagcattgcgcctgcaaaaagtccagatgcttgaagctctattgcccatgtttttctggaggtggttattgctctgataagtgtggctgccaaccatgtttcaacaaagaagcttttgcagaaacagttcatactactcgcaaggt

SEQ ID NO: 7051 - DNA, 329 bp, Zea mays
  Clone ID: LIB3118-041-P1-K1-G11
acggactggttgctgatctgttcgaggttctggatgagttattgaagaagatcccagagaagaaataagtggccgttattagctcttcactcctgcatgttcatttgcccatgtggcgctaataagatctcacgatgtcaatcccgtaaaatctgtaatgctctatttggatgtcgatattgaaaggtatgaattgaattgggttcaatactaaatcagctatggtattaaaattagatgtaattcaaactctattgtttggatgtctctgaattagagtttggaattatgtggtctaaaaaaaaaaaacaaaaaaaaaataaataaaa

SEQ ID NO: 7052 - DNA, 321 bp, Zea mays
  Clone ID: LIB3118-041-P1-K1-G12
ggatgagaagaagaagagggttgaaaagcaagaaaaaaacagactggataacttaaagaaagctgcaaaggttggcgctttgccaagtcatatacagcttgctgcgaaggcgttgcccatcacaggaacaaaagctgaccttgcaaaaaaatctagaaaagaggatcttgagagtgttgtcggcatggctttatcagcaacagcaagtggtgggaagcttgatgagaagttgcctggcgagaaacctccaaagcaccctggcaaacacagaaagtttctcccagttgcccaagggaagggaatggcctgcctgggaagaca

SEQ ID NO: 7053 - DNA, 370 bp, Zea mays
  Clone ID: LIB3118-041-P1-K1-G3
cggacgcgtgggcggacgcgtgggcgcgacatcaaggatgcagcacagcaccgcatcgaccaggcgcaggggtcttgagagaagaaccacactcgagcggaccgcgcgcgcgacctccttgaaccactgccggcgcggcggcatatggcccttaaaggcggtggctgctgctacgtacgctgccgtagagtctcggtcgccgcgatagctctagctagtcgtttatgtgttgtgctttgtgtgtgcatgcttgtgtctgggggcatgcagtgcagtgcagtactatatgctgtatgcgtctctctttgatcggagaggcggatgtacagcatgctcgatatgtctagtttggatgtcatgtttatgatga

SEQ ID NO: 7054 - DNA, 108 bp, Zea mays
  Clone ID: LIB3118-041-P1-K1-G4
atccacccgggccgcgtcgcttgggccttgttatctgatttaaaatgatgggcaaatttaaaggagggggtcccattcttttgatagtattttattttatttttagtt

SEQ ID NO: 7055 - DNA, 312 bp, Zea mays
  Clone ID: LIB3118-041-P1-K1-G6
acggactggttgctgatctgttcgaggttctggatgagttattgaagaagagcccagagaagaaataagtggccgttattagctcttcactcctgcatgttcatttgcccatgtggcgctaataagatctcacgatgtcaatcccgtaaaatctgtaatgctctatttggatgtcgatattgaaaggtatgaattgaattgggttcaatactaaatcagctatggtattaaaattagatgtaattcaacctttttggttgggaggctcttgaataaaagttgggattatgtgggcttaaaaaaaacattaac

SEQ ID NO: 7056 - DNA, 372 bp, Zea mays
  Clone ID: LIB3118-041-P1-K1-G7
gccacgcgtacgtccacgcgtacggttgctcctggttgagctcagtaccaggatccagcttaaacccgggggaacggacacgttccactaacttttacccggtggtcaccatactaagctaccttaccaaggcaccactgtttccccctggcacaccggtggtgaacgctctggcaaagcagagggcgatgctggagaacatgatgagggcctgtgttggcctggccccagagaacaacatgatcctggagtacaagtgagcgaaatggcgtggcctgcagttagatatgcaggaggctgcacgaacgaaactagagaggcgagattagatgtgagattgtgttggcttctcgagttttcttttgcgttctt

SEQ ID NO: 7057 - DNA, 295 bp, Zea mays
  Clone ID: LIB3118-041-P1-K1-G9
cggacgcgtggggcaaagcggccaggtcgcggggctgttggcggcgcagatagcgcagcaactgacggcgatgtgcggcctgcagcagccgactccatgcccctacgctgctgccggcggtgtcccccactgaagaaactatgtgctgtagtatagccgctggctagctagctagttgagtcatttagcggcgatgattgagtaataatgtgtcacgcatcaccatgggtggcagtgtcagtgtgagcaatgacctgaatgaacaattgaaatgaaaagaaaaaagtattgttcc

SEQ ID NO: 7058 - DNA, 350 bp, Zea mays
  Clone ID: LIB3118-041-P1-K1-H1
ttttgaggatgttggacgcgtatatagggatgaaactgacttatatgatggagatggagctgctgaattaagacatataatgttttgacagggatatgttgtactgcatgaactgtatcattatgatataacaagtgaaatagcattgattgatactgtaaatactactcaatgattgagtaataatgttctcttttataattaaacgatttaatgtatttgtcacgaaatactgctataatgaactgtgtatatggaaaggtaatagattagaaggaaaaagaattatttaggggcggacagtgtataggatacaagattacttaaggtgaatgtgacgttggaatttt

SEQ ID NO: 7059 - DNA, 386 bp, Zea mays
  Clone ID: LIB3118-041-P1-K1-H10
cgcgacaagggtctacagagtatggaggaggaagctgaacgcgtattacacgatgacacgagtgttaattcatgaaaatggagctgtttcagcaagagatactatgtatgaacaagcagaagttcctgagcatgaactgcaacatatgacagaacaagtcaaatccatcattcagactatgaatgctactcacggtggtgagctcgagtccgctgatagtatgacaccatttgatgttgctgtccgaatactggataatcaactgcgttccctgatgtggattgatgagaaggttaatgagttctgtggcagaatacagaggctgcctaacaacagcgttttagccgaacgtgactctggaattcccaggttttggctaagctgat

SEQ ID NO: 7060 - DNA, 389 bp, Zea mays
  Clone ID: LIB3118-041-P1-K1-H11
ctacgcgacaaggctctacagagtatggaggaggaagctgaacgcgtattccaggatgaacgagtgttacttcatgaagatggagctgcttcagcaagagatactatgtatgaacaagcagaagttgtggagcatgaactgcaacatatgacagaacaagtaaaatccatcattcagactatgaatgctactcagggtggtgagctcgagtccgctgatagtatgacaccatttgatgttgctgtccgaatactggataatcaactgcgttccctgatgtggattgatgagaaggttaatgagttctctggcagaatacagaggctgcctaacaacagcgttttagccgaacgtgactctggaattcccaggttttggataagctgatt

SEQ ID NO: 7061 - DNA, 376 bp, Zea mays
  unsure at all n locations
  Clone ID: LIB3118-041-P1-K1-H3
ccgtgatcgggtacaagcaccagacggacgcgtcggcgtcgggcgccgacgcggcgtgcggcggcgtgggggtgctgggcatcgcctgggccttcggcggcatgatcttcgtcctcgtctactgcaccgccggcatctcggggggccacatcaaccccgccgtcaccttcggcctcttcctggcgcgcaaggtctccctggtgcgcgcgctgctctacatcgtggcgcagtgcctcggcgccatctgcggcgtcggcctcgtcaaggcgttccagagcgcctacttcgacaggtacggcggcggcgccaactcgctcgcctncggctactcccgcggcaccggcctcggcgccgagatcatcggcaccttcgtgct

SEQ ID NO: 7062 - DNA, 378 bp, Zea mays
  Clone ID: LIB3118-041-P1-K1-H4
cacaaacccatcgcagggcattctcgagcatagcttctctgcctctctctcccctcctctcctctcgtccactcctttgtccaaagcttcgagatggctcagcagcagaaggtggtggtcagggttccaaccatgacagatgacaagatcaagcagaaggccatcgaagctgttgcggacatttacggtattgactccatagcagcggatctgaaggagaacaagatgaccatcataggcgagatggatgcagtagcgattgccaagaagttaaagaagattggaaagattgacattgtgtctgttggacctgcaaaagaagaaaagaaggaagaaaagaaagaggagaaaaaggaggaaaagaaagaagagaagaaa

SEQ ID NO: 7063 - DNA, 382 bp, Zea mays
  Clone ID: LIB3118-041-P1-K1-H5
agacaaggctctacagagtatggaggaggaagctgaacgcgtattccaggatgaacgagtgttacttcatgaagatggagctgcttcagcaagagatactatgtatgaacaagcagaagttgtggagcatgaactgcaacatatgacagaacaagtaaaatccatcattcagactatgaatgctactcagggtggtgagctcgagtccgctgatagtatgacaccatttgatgttgctgtccgaatactggataatcaactgcgttccctgatgtggattgatgagaaggttaatgagttctctggcagaatacagaggctgcctaacaacagcgtttcagccgaacgtgactctggaattcccaggttttggttaagctga

SEQ ID NO: 7064 - DNA, 387 bp, Zea mays
  Clone ID: LIB3118-041-P1-K1-H6
agacaaggctctacagagtatggaggaggaagctgaacgcgtattccaggatgaacgagtgttacttcatgaagatggagctgcttcagcaagagatactatgtatgaacaagcagaagttgtggagcatgaactgcaacatatgacagaacaagtaaaatccatcattcagactatgaatgctactcagggtggtgagctcgagtccgctgatagtatgacaccatttgatgttgctgtccgaatactggataatcaactgcgttccctgatgtggattgatgagaaggttaatgagttctctggcagaatacagaggctgcctaacaacagcgtttcagccgaacgtgactctggaattcccaggttttggttaagctgattaat

SEQ ID NO: 7065 - DNA, 378 bp, Zea mays
  Clone ID: LIB3118-041-P1-K1-H8
ccgtgatcgggtacaagcaccagacggacgcgtcggcgtcgggcgccgacgcggcgtgcggcggcgtgggggtgctgggcatcgcctgggccttcggcggcatgatcttcgtcctcgtctactgcaccgccggcatctcggggggccacatcaaccccgccgtcaccttcggcctcttcctggcgcgcaaggtctccctggtgcgcgcgctgctctacatcgtggcgcagtgcctcggcgccatctgcggcgtcggcctcgtcaaggcgttccagagcgcctacttcgacaggtacggcggcggcgccaactcgctcgccttcggctactcccgcggcaccggcctcggcgccgagatcatcggcaccttcgtgctcg

SEQ ID NO: 7066 - DNA, 237 bp, Zea mays
  Clone ID: LIB3118-041-P1-K1-H9
gcgagagggtgcaagcaccaaacaaagccgtcgccgtcgacgggacggaagggagggggggatctagtagaacttaccttcttctgcacttaaaaccggttgatgttccctaagaactaccggcctgggttccaagggtggcgcggattatccactacctgcccgtttgtctagtaagggcgcgcaatgtcttcctggcgcaggtgctgttctacatcgtggcgctaaatgtttatt

SEQ ID NO: 7067 - DNA, 362 bp, Zea mays
  Clone ID: LIB3118-042-P1-K1-A1
ccgccccgctccttgcctccgatccccaattcctccttcggatctcgcattcagcgcagcgcaggtgtgaaggaagggggacgcggaggaagatggggctcgcgttcgggaagctcttcagccggctcttcgccaagaaggagatgcggatcctcatggtcggcctcgacgccgccggtaaaaccaccatcctctacaagctcaagctcggcgagatcgtcaccaccatccccaccatcggtttcaatgttgaaactgttgagtacaagaacattagcttcactgtctgggatgtcgggggtcaggacaagatcagacctctttggaggcattactttcagaacacccagggtcttattttt

SEQ ID NO: 7068 - DNA, 302 bp, Zea mays
  Clone ID: LIB3118-042-P1-K1-A10
gaaaacccagctcttcaaccatataggcttcaacaagcaatcgcagcaagcagcatacctttatcgcccttgttgtttcaacaatcgccagccctatctttggtgcaggcattggtacaaaccatcagggcacaacagctgcagcaactcgtgctacctctgatcaaccaagtagctctggcaaacctttctccctactctcagcaacaacaatttctttcattcaaccaactggctacactggaccctgctggttatttgcagcaacaactattaccatttagccagctagctactggcta

SEQ ID NO: 7069 - DNA, 295 bp, Zea mays
  Clone ID: LIB3118-042-P1-K1-A12
ggcacaccaggtaagaaacataagaaaccctatcaccgccggatctgaagacgtgggtatagaactcgatggcgatgaaaggaacaagaagaccaagagcacagcgtcttaaaacgacgatgaatatttgaagctccttgttaagatataccgattgttggacaagaggaccaaaaacaacttgaatgctgtcattcttaagaggctcttcatgagcaaaatgaataacctatcaatcttcatgcgccgacttgtctagttcatggaaggcaaagagaagaacatggatcggatt

SEQ ID NO: 7070 - DNA, 340 bp, Zea mays
  Clone ID: LIB3118-042-P1-K1-A2
ttttttttttttttattttttttattttttttttttttttttttttttttttttttttttttttttttttttttatttattattaaaaattttattttttttttttttatttttttatttttgggagagggaaaaaaatcaaaaaaaaaattttaatattgggagggggcccaaaaaaaaaaaaaaaaaaatttgaaaaaataaaattttatcagttttttttattaaaaataaaaaaaatttttttttaaaatttatgtataaaaaatagaaaaattagaaaaaaatatattatttatatataaaaaaaaaaaattattttatatttttttgggagtgg

SEQ ID NO: 7071 - DNA, 392 bp, Zea mays
  Clone ID: LIB3118-042-P1-K1-A4
gaaaacccagctcttcaaccatataggcttcaacaagcaatcgcagcaagcaacatacctttatcgcccttgttgtttcaacaatcgccagccctatctttggtgcagtcattggtacaaaccatcagggcacaacagctgcagcaactcgtgctacctctgatcaaccaagtagctctggcaaacctttctccctactctcagcaacaacaatttcttccattcaaccaactgtctacactgaaccctgctgcttatttgcagcaacaactattaccatttagccagctagctactgcctactctcagcaacaacaacttttttcatttaaccaattggccgcactgaaccccggtgcttatttgccggagcaaatactactaccatttaa

SEQ ID NO: 7072 - DNA, 391 bp, Zea mays
  Clone ID: LIB3118-042-P1-K1-A5
acggaaaacccagctcttcaaccatataggcttcaacaagcaatcgcaggaaggagcatacctttatcgcccttgttgtttcaacaatcgccagccctatctttggtgcagtcattggtacaaaccatcagggcacaacagctgcagcaactcgtgctacctgtgatcaaccaagtagctctggcaaacctttctccctactctcagcaacaacaatttcttccattcaaccaactgtctacactgaaccctgctgcttatttgcagcaacaactattaccatttagccagctagctactgcctactctcagcaacaacaacttttttcatttaaccaattgggcggactgaaccccgctggttatttgcaggagcaaatactactaccat

SEQ ID NO: 7073 - DNA, 301 bp, Zea mays
  Clone ID: LIB3118-042-P1-K1-A6
cccacgcgtccgcttgcaccgaaatgtgtgtcctgatgagtacactttttttggttagtcgtctcaagttcagagcgttatgccatgttttcagtcctgattagtacactgttttctaaaagcgattgagctctagtccaatgtattgataatttctgctgttgtcctattgcggtgatgtttatttgccctgttcgctagctgcaatagttcctatttgagcactgagcagggtatgattatttgttgatgaatttgttttaagcataaacacataagctggtatgattatttgttgatg

SEQ ID NO: 7074 - DNA, 241 bp, Zea mays
  Clone ID: LIB3118-042-P1-K1-A7
aaggaagggtgacgcgtaggaagatggggctcgcttttttttttttttttaacccgttttttctattttttttttttttttcttttgtttttttttttttcttttttgtggggggggggcgaaaaccccaaacaatggttttttttttgggggggggccccctcatttttacacattttgaggggggcgcccactttttcccccttttttttttttaagttttaaaaaaaacttctttttt

SEQ ID NO: 7075 - DNA, 279 bp, Zea mays
  Clone ID: LIB3118-042-P1-K1-A8
acgcacacgcgtacgcagacgcgtggggttctaaatagagagcggacggcctttttttttttttttaatattttttttataaaaataattttaaataagaattaaattaaaaaaaaaataaattatctttacactaaaaaaaataaagctactattgaagatttgaataccaatataactgaaataaaaaaaaaataataaacattttagattaaataaatgtaaagatggataatgtaaataaaaagatgacgttaataatgaataaataaataatgt

SEQ ID NO: 7076 - DNA, 304 bp, Zea mays
  Clone ID: LIB3118-042-P1-K1-B10
acgcccacgcgtccgcttgcaccgaaatgtgtgtcctgatgagtacactttttttggttagtcgtctcaagttcagagcgttatgccatgttttcagtcctgattagtacactgttttctaaaagcgattgagctctagtccaatgtattgataatttctgctgttgtcctattgcggtgatgtttatttgccctgttcgctagctgcaatagttcctatttgagcactgagcagggtatgattatttgttgatgaatttgtttaaagcataaacacagaagcgggtatgattattgtgtgatg

SEQ ID NO: 7077 - DNA, 249 bp, Zea mays
  Clone ID: LIB3118-042-P1-K1-B11
gcgcgatcatggactcaggccgttcgaaatatttgggaatgcttgcggtgtggggctttattggatggttggtactgatagagataggggaaggcttgcatcttgtgctggagtaggtattttactcccatttccttggtggtgggcggagtcggatcgattccgtgggaggtgaggtccagacttgggtatgtggatcctattcgaggttcgtgttgcccaacaaacatattcacaaactttattatt

SEQ ID NO: 7078 - DNA, 321 bp, Zea mays
  Clone ID: LIB3118-042-P1-K1-B12
cccacgcgtccgcccacgcgtccgcggacgcgtgggtggcagcattgaactgtgctgcttatttacaggagcaacaactactaccattcagccagctagctggtgtgagccctgctaccttcttgacacaaccacagttgttgccgttctaccagcacgctgcgcctaacgctggcaccctcttacaactggaacaatggctgccattcaaccaacttgctttgacaaacctagcagtgttctaccaacaacccatcattggtggtgccctcttttagatttcttatgagttataggtcaataataaagttttttggcgtg

SEQ ID NO: 7079 - DNA, 413 bp, Zea mays
  Clone ID: LIB3118-042-P1-K1-B2
cgaccattttcccgcaatgctcacaagctcctatagcttctcttcttcccccatacctctcaccagcgttgtcttcagtatgtgaaaacccaattcttcaaccctacaggatccaacaggcaatcacagcaggcatcttacctttatcacccttgttcctccaacaatcatcagccctattacatcaattacctttggtgcatttattggcacaaaacatgagggcacaacaactacaacaactcgtgctagcaaaccttgctgcctacgctcagcaacagcagttacctttggtgcaattgttggcacaaaacatcagggcacaacaactacaacaactcgtgctagcaaaccttgctgcctactctcaacaacagcagtttctgccattcaaccaactaactgcattgaac

SEQ ID NO: 7080 - DNA, 331 bp, Zea mays
  Clone ID: LIB3118-042-P1-K1-B3
acgggctagctagctagttgagtcatttagcggcgatgattgagtaataatgtgtcacgcatcaccatgggtggcagtgtcagtgtgagcaatgacctgaatgaacaattgaaatgaaaaaaaaaaaaaggggaagaaggaaccaaatataaaggaactaccgagcgggcctacaatttaaatgtaggaagaaaaaaaaaaaaggggggggcgatggaccaacatacatttatggcccttgtggatttaaaaatggctactcctatttttggggcgaagattggaacaaaccatgaggggaaaatagctgggaaaactagggctacttttg

SEQ ID NO: 7081 - DNA, 301 bp, Zea mays
  Clone ID: LIB3118-042-P1-K1-B4
cccacgcgtccgcttgcaccgaaatgtgtgtcctgatgagtacactttttttggttagtcgtctcaagttcagagcgttatgccatgttttcagtcctgattagtacactgttttctaaaagcgattgagctctagtccaatgtattgataatttctgctgttgtcctattgcggtgatgtttatttgccctgttcgctagctgcaatagttcctatttgagcactgagcagggtatgattatttgttgatgaatttgtttaaagcataaacacagaagcgggtatgattatttgttgatg

SEQ ID NO: 7082 - DNA, 376 bp, Zea mays
  Clone ID: LIB3118-042-P1-K1-B6
ggacgccctagatcagaagagcctcggagggatgatcgtcgtgccgatagggatcgtgaaaaatctcgtgaaagggtacgggaaagagaccgtgaggagaggacccgtgaacgttcgcatgaccggactcgtgatagagatctacgagatgagaagcatcaccatagagaccgtgagaggactcgggatagggagagaggaaaggaccgtgaaagagaccacggccgtgaccgggagcgtgatcgtcgtgacagggacaaggatcgtggtcgggactattatagagaaagggaccgtggtcgctctcatgatcgccatctggagagaggcagggaccgtggtgaaagagattatgagcgcaccagccatgaacgtg

SEQ ID NO: 7083 - DNA, 90 bp, Zea mays
  Clone ID: LIB3118-042-P1-K1-B8
aaaaaaaaaaaaaaaaaaaaaaaaaaaaaaaaaaaaaaaaaaaaaaaaaaaaaaaaaaaaaaaaaaaaaaaaaaaaaaaaaaaaaaaaaa

SEQ ID NO: 7084 - DNA, 399 bp, Zea mays
  Clone ID: LIB3118-042-P1-K1-B9
gtcggagggaaccgaaaactcagggtctcgaatttcctaggagcggaggcgatggctgggaagggaggaaaaggattgctcgccgcgaagacgacggcggccaagtcggcggagaaggacaaggggaagaaggcccccatctcacggtcctcccgcgcgggcctccagtttcctgttggacgaatccaccgtcagctgaagcaaaggactcaggcaaatggccgcgttggtgccactgcagccgtctactccgccgccatcctggagtacttaactgccgaggttctggagctggctgggaacgctagcaaggatctgaaagtgaagcgtatcacccctcgccacctacaggtggccattcgcggagacgaggagctggataccctcatcaagggcacc

SEQ ID NO: 7085 - DNA, 256 bp, Zea mays
  Clone ID: LIB3118-042-P1-K1-C1
ccttgactgcgagcaccagcaatgagaacaaggtcatgctgtacaggctctacatgtaagccacgtttggagcatgccttaccgatccgtgcggactaattcaccgaaaggtcaagcccaagcgtaatgcactggaacgctgttgaacgcatatagaacgatgactgcgacgaatgactacattactaaactgaaccagttccaggaggaggctgccacctcttacaaggatctgaatggggagggcatacagctt

SEQ ID NO: 7086 - DNA, 384 bp, Zea mays
  Clone ID: LIB3118-042-P1-K1-C10
gtcttctactactggaaaacgactcctgcactcgagttggcccctgtgataggctgtagcaaaccgcccggtggcgccccaccttcctctgaagaagccacagttcagcgcgactttctcaatctcgcatcgtatattcggggtcgcgttgggagttgccatcgtatctggccctctcgccaccaagttcagcctaatgtttggtgtctgagagcgatttgctgcgtgtcaagagaaccatcattttccgtttctgcgtctgtatttcatcgtctcggataccttgcgacacaactgtaggtgccgttggaataatatctttgccatgcttgcagacttgtgtaataagtgaataaacctataaaataccagtttaactgtttg

SEQ ID NO: 7087 - DNA, 247 bp, Zea mays
  Clone ID: LIB3118-042-P1-K1-C11
gctcgatcatggactcaggccgttcgaaatatttgggaatccttgcggggtggggctttattggatggttggtactgatagagataggggaaggcttgcatcttgtgctggagtaggtattttactcccatttccttggtggtgggcggagtcggatcgattccgtgggaggggaggttgagacttgtggatgtggatcctattcgtgttctgtttgcccagcagcatgtacagaaactttattatt

SEQ ID NO: 7088 - DNA, 354 bp, Zea mays
  Clone ID: LIB3118-042-P1-K1-C12
cccacgcgtccgcccacgcgtccgcgactccagattggagaactcgacaccatgaaggtgctgatcgttgcccttgctctcctggcgctcgctgcgagcgccgcctccagtacaagcggcggctgtggctgccagacaccaccgtttcatctaccgcctccgttctatatgccgcctccgttctatctgccgccgcagcagcagccgcagccatggcaataccccactcaaccaccgcagctaagcccgtgccagcagttcggatcctgcggcgtcggcagcgtcggcagcccgttcctgggccagtgcgtcgagttcctgaggcaccagtgcagcccggcggcgacgccctac

SEQ ID NO: 7089 - DNA, 321 bp, Zea mays
  Clone ID: LIB3118-042-P1-K1-C2
acgcgtacgcgtaggatgtactaacaaacgtttgcattcaataatcttactaccgggaacgctggttcttgatgattcaaaccaacatgcatgtggatgaggcggctagagtctgctaactggtagctgaaataatatgggatagtcgacgaattgcaacatctgatctggaaagcgtaattcctgccacgaaattcaactgccatgtggaacaatgttctattaaaaagctgaacttgttactaacacaacaacacctgctgtcattttcaataaaggcagagactaaatggagaatgggtcgactactgtagcagttga

SEQ ID NO: 7090 - DNA, 403 bp, Zea mays
  Clone ID: LIB3118-042-P1-K1-C3
gaacaaccgtactacatcgccgtcctgcaggtgagggacctgatctggtctgcggcgccggcggacggggtgcaggctccaccgcccgcgccgcagcccgacgcggcgccggggttgacggatctgctgtccaagaacggctgcgggggcttcgccagcctcctcgccgcgacggccgacgcagtcaccaagtacgacagcagcgccgccgggctcaccgtcttctgcccggtcgacgaggcggtggaggccttcaactacaccttcaagaaccttaccgccgacgcccagctcgcgctcctgctgtaccacggcgtggcggaacactactccgcgcagtctctcaaggcgatcaatggggacgtaagcacgcttgcctccgacggatccaagaacaacaacg

SEQ ID NO: 7091 - DNA, 145 bp, Zea mays
  Clone ID: LIB3118-042-P1-K1-C4
cccgtcacgcgtactactactgtaaacatacaaatgcacttgcgtgaccaactggcaggggctgaattatacacgagggtggcgacccgaccgacctgctaacaatgcacagcacatggccactttaatactcgactatcgtata

SEQ ID NO: 7092 - DNA, 409 bp, Zea mays
  Clone ID: LIB3118-042-P1-K1-C5
gtcctcacataatcatcttcattcactcactctcttcgatcactgtactgaagataccatggccaagtcgaccgcgatgtttgtagccgccctggccctggtggtggtgatggcgacgacgagcacaggcggtggcagggcggcagcggcgtgcgatcccaagccgctggtggtgtgcgatccggcgttcatggacggagcgaaacccgcggcagcatgctgctccaccctgcgtgcgcaggaggcatgcttgtgcgtgtacgccaaagaccccaagtttgcaaaatacatcaacaaccccaacaccgccaaaacctttacctcgtgcggcatagccatccccaaatgctaagcaagcgctctgcgtcgtcgcttcgcttgctcttgctcttgtgtgtaacatatccag

SEQ ID NO: 7093 - DNA, 248 bp, Zea mays
  Clone ID: LIB3118-042-P1-K1-C6
ctcgatcatggactcacgacgttcgaaatacttgggaatccttgcggagtggggctttattgaatggtgggaactaaaagggggggggtaaaatctatcatctcatgctggagtaagtattttactcccatttccttggtggtgggcggagtccaatcgatttcctaccaagggaggtttataactcgactctgttttatttttctgcggaaaaataacccaacaacatgtacaaaaactttattatt

SEQ ID NO: 7094 - DNA, 380 bp, Zea mays
  Clone ID: LIB3118-042-P1-K1-C7
gcacgaatctacttccaaatgttgtgtgtgaatacttgtacaatctatctggaatgttcacaaaattctataccaactgccaggtggttgggtcgccggaggagacgagccggttgttgctttgccaggcgactgctgttgtcatgcgacagtgcttcaacctgctcgggatcacgccagtatacaagctgtgattggctgcatgttcgattaatacattcaacatgtagaaaccccaattcatcatggttgcagttttggtcttgtaacctagttgaggcaggtaacataatctactgtcctgtttgaaaacagaaggaactcaaaaggttgtatcaaaatgtgcttgcaaagtttctgttactgtaggctagttttgc

SEQ ID NO: 7095 - DNA, 396 bp, Zea mays
  Clone ID: LIB3118-042-P1-K1-C8
cccacgcgtccgcaacaatttcttccattcaaccaactgtctacactgaaccctgctgcttatttgcagcaacaacaactactaccattcagccagctagctactgcctactctcagcagcaacaatttcttccatttaaccaattcgccgcactgaacccctctgcttatttccagcagcaaatactactaccatttggccagctagctacaacaagccccgcttccttcttgacacaacaacaattgcttccgttctaccagcagtttgtggctaaccccgcaacccttttacaactgcaacagttgctgccctttgtccaacttgctttgacaaacccagcagccttctaccaacaacacatcattggcggggcccttttttagattgcttat

SEQ ID NO: 7096 - DNA, 373 bp, Zea mays
  unsure at all n locations
  Clone ID: LIB3118-042-P1-K1-C9
gaacaaccgtactacatcgccgtcctgcaggtgagggacctgatctggtctgcggcgccggcggacggggtgcaggctccaccgcccgcgccgcagcccgacgcggcgccggggttgacggatctgctgtccaagaacggctgcgggggcttcgccagcctcctcgccgcgacggccgacgcagtcaccaagtacgacagcagcgccgccgggctcaccgtcttctgcccggccgacgaggcggtggaggccttcaactccaccttcaagaacctcaccgncgacgcccagctcgcgctcctgctgtaccacggcgtggcggaacactactccgcgcagtctctcaaggcgatcaatggggacgtaagcacgc

SEQ ID NO: 7097 - DNA, 336 bp, Zea mays
  Clone ID: LIB3118-042-P1-K1-D1
acgccacagccgtacttcatgcacgttctggaagggagggacctgatctggactgcggcgacccacagactgtgggcatgctccaccgcccgcgccgtatctcgacgctgggccatggttgactgatctgctaccaaagaacggttgacgatgcttagccaggcttctcgtcgggacggccgacgcagtcaccaagtacgacagcagcgccgtccagctcaccgtcttttgcccgggcgacgaggcgagcgaggacttgaacatatattttaataaccttaccgtcgtcctccaggtggcgctactcctctaccacggtgtggaacaacactactg

SEQ ID NO: 7098 - DNA, 387 bp, Zea mays
  unsure at all n locations
  Clone ID: LIB3118-042-P1-K1-D10
gccaaggttgctgaagccatggaggtcctccgctctgcccagcatctccagcggagcaatgtttctactgagcagcagctggctaatctatcattgaatgatggcgtcgtctccagctgaacgttaatgtttctgatgtttcggaagtgctgccagtttttgcttgaatactaccctatctagagtgtaatgactttgtttacttggtttgttggagttttagctgctcctattactaggggttggttttgacttgactttgttattttggttgcatggataatcgtttcgtttggatctattgtccgattgttactcgaattacaacagttgagtgtttgggcgtcctnttacatagaagaaatcaaattgaaataactggccttc

SEQ ID NO: 7099 - DNA, 221 bp, Zea mays
  Clone ID: LIB3118-042-P1-K1-D12
acgccccggtaccgaaaccccaggtcgggctgcacccacgcgcacctacaattgtgagatcgaacaaatcaatcgtctcgtgtatttcacatgggctgggtaaccttgtggcgagaagacataaaacaagaaccatttaatcaggagcattttttgcgaaaaagaaacttaacacttggtgggaagagaataatggcttcttttatgaaaactacatcact

SEQ ID NO: 7100 - DNA, 154 bp, Zea mays
  Clone ID: LIB3118-042-P1-K1-D2
acgacattggccacttggatgcgaatggcctgtacgatggtcacttcaccacgtgaggtggctctgggtttgtccgagctcacggagaagatgacagatcggatgtcagggtttgacaaatgactactgattggatggaggacagaatcttgct

SEQ ID NO: 7101 - DNA, 270 bp, Zea mays
  Clone ID: LIB3118-042-P1-K1-D3
acgctgtgctctgctatcgcctcgcacggactcgtggcaaaggatggagaccatgtcgggtctcgcgaggacggcgccaccccttgctgaaaccattcgccggccgtgctgcgcgctgcggtcgacggcgatcctctactgggccaccgatacaacgacgccccgcggccggctcaggctgtagatgaacacggcgacggcaaagagcatcagggccgccaaagctcaagccctccacggatcgcatcatcacctcctacgaggccgagc

SEQ ID NO: 7102 - DNA, 270 bp, Zea mays
  Clone ID: LIB3118-042-P1-K1-D4
cagccagctagctggtgtgagccctgctaccttcttgacacaaccacagttgttgccgttctaccagcacgttgcgcctaacgctggcaccctcttacaactgcaacaattgctgccattcaaccaacttgctttgacaaacccagcagtgttctaccaacaacccatcattggtggtgccctcttttagatttcttatgagttatagttcaataataaagttttttatctgatgtttgtggcttcccagaaataagaaagtacatttct

SEQ ID NO: 7103 - DNA, 395 bp, Zea mays
  Clone ID: LIB3118-042-P1-K1-D5
cggacgcgtgggcggacgcgtgggcggaaggtacgaggacgtgaagcggtacgaggggaaggcgccgcacgcgagggtggcgcacccgtggccggaccacttctacccgctgcacgtcgcgctcggcgccgccggggacgccgcgaaggcggagcagatccaccagtgctggtccaacggcacgctctcctacgcgtcctaccggttcaccaccaacacctgacgcgctgctcgtggtgtcggtggaataccacccggccagctgctgaattcgcggggaagcatccatcgacgggtgtggcactggcagcattgcacatactgtatttctaataaacccccgtgtgcctgccgttccgttcgcggtagatatgcgtttgttgatgttttgcatt

SEQ ID NO: 7104 - DNA, 405 bp, Zea mays
  Clone ID: LIB3118-042-P1-K1-D6
gtcacctccaatggtgtgatcgagcaaatcgagcgtggggtgtatgtcacatttgctgtatcaccttgtggcaagaagacataaaacgtgtacgattcagtcggaagcattttggcgagaaggaagctcaacactggtgggaagagaataagggcagcgtctatgaaaagtacagcactgaaaaagcgcaacatcagctagaggttacaatcaagagtgtacaagagtaaccacaagttggattgggttacctactgctgagcaagatgaaaaaaaatgacatggagcaaataagatgatattaacggaacagacaactgaccgtcctttttcaatgaaaataggcagtttaacttattgtagatacgaatgtacagataagaatgagtgaatgacggctggatg

SEQ ID NO: 7105 - DNA, 401 bp, Zea mays
  Clone ID: LIB3118-042-P1-K1-D7
cggacgcgtgggcggacgcgtgggttggcagctgcaataagatgctagagggactctgcagttcatgagaggttcgcaaggcgaacaacctgctgacggcaatgatggacaaaggacttcttcctgataaggatacatacttgagccttattaatggatatggtaaggttggtgatgcccaatgtattgtcaacatctaccatgagatggaacacaaaaggcttgatcccggtgttgaggtttttactgccttgatcaagggtctttgccggtgtgggaatctgaaggaagctgagaaactctttgcggcgatgaagaagaaaacgttggcttcgactagtgacttggatgatatgcttatcaagcgatactgtgagaagcgcaatgcttagaaggcactt

SEQ ID NO: 7106 - DNA, 238 bp, Zea mays
  Clone ID: LIB3118-042-P1-K1-D8
gggtggctttttcttccccttccggttcggtttcggtttcggagggttttcgggggttcggtttcggggggaaccgaatcaaaatggcggcttcgattgttaagtcccgttgtttggtggggggcttggcttgggcaacggacaacaattccttcaaaaacgctttaagaacttacgggagggtcttgaagtcaaaaataatcttgaatcggaaaacccaaaggtccgggggttttgg

SEQ ID NO: 7107 - DNA, 348 bp, Zea mays
  Clone ID: LIB3118-042-P1-K1-D9
atcgagatggcggcgtcggatgttgagtaccgctgcttcgtcggcggcctcgcctgggccacggacgaccactccctccacaacgccttcagcacctacggcgaggtcctcgagtccaagatcatcctcgatcgggagacgcagaggtcccgcggcttcggcttcgtcaccttctccacggaggaggcgatgcggaacgccatcgagggcatgaacggcaaggagctggacggccgcaacatcaccgtcaacgaggcccagtcccgcggcggccgtggaggcggcggcggtgggtacggtggtggccgtggaggcggcggctacggcggtggcgggcgccgtgatggc

SEQ ID NO: 7108 - DNA, 175 bp, Zea mays
  Clone ID: LIB3118-042-P1-K1-E1
acctacgcctatgtttgtgatgcacacataagacgttgcattccattccattccattccatctcaaatgatacaataacgaccactctctccacacaagcctttacgacgtactgttagtgcttgtgtgctacaaccatactcaagggggagacgcaactatgccgtgggttagg

SEQ ID NO: 7109 - DNA, 395 bp, Zea mays
  Clone ID: LIB3118-042-P1-K1-E11
cttgaagagctccaagagcttggttctggaacttttggaactgtctatcatggtaaatggagaggcactgatgttgcaataaaaagaatcaatgatagatgttttgctgggaaaccatctgagcaagaaaagatgcggtatgacttctggaatgaagcatctaaacttgctgatctgcaccacccaaatgttgtcgcgttttatggtgttgttcttgatggacctgggggatccattgccacagttacagaatatatggtcaatggttcacttaggacagctttgctaaagaatgccaaaaccctcgatcgacgcaagagattaattattgccatggatacagactttggaatggaatacttgcatagcaaaaacattgtgcactttgacttgaa

SEQ ID NO: 7110 - DNA, 105 bp, Zea mays
  Clone ID: LIB3118-042-P1-K1-E12
aagcaacctcatgtccagactcagagttgtctacttgttttcatccgcccctaagattttgtctggaaacaagtttaaaattaagattattctcaacaagtgttt

SEQ ID NO: 7111 - DNA, 288 bp, Zea mays
  Clone ID: LIB3118-042-P1-K1-E2
acgacaatgcgcacttggatgcgaatggtcgtggcaacccagactccaccacttgaagtatatctgggttattcccagctcagggagaagatgccagatcatatctatgacattaaggacttactactgaccggatggaggaaggattctcgctcagtgaataacaagaggagcacgtgtgtgggatactgaagtagctctgctccaactactgggacacgattttgatgtttgattctgagaaggcagactagccagagtaaagtttttctgcacatgttaccgtcg

SEQ ID NO: 7112 - DNA, 276 bp, Zea mays
  Clone ID: LIB3118-042-P1-K1-E3
agcctacgggtgcggacgatgtgatcggtttacctggcgagccaacaagcaagcaaaagtaaacggggcgaggagctggagagacgccggcgacgtgaagcaaccgcccaatcggtgccgaggctgagcaggaggagggagccggagatggtgggtctcgtcggcggcagcacggcgcgggcggagcatgtcatcaacaacgccggaggcctggcagaggacgagcgccgcatgtaccggcacgcgccggtcgagcacctatgcacctgcaccctt

SEQ ID NO: 7113 - DNA, 370 bp, Zea mays
  Clone ID: LIB3118-042-P1-K1-E5
gcccgtcgttgagcggcaggctcctggagaccgggacgacggcatcggcggcggcggcggcggcggacggccgcacgccgcggcggaagtagaggtggagcgtgaggttggcgtggtagacgccgtcgtaggtgtcgtcgatgaggttgccgaggtagacagcgagcgtggcgttgccggccgcgaggagggccgcgtagcgggtgacgtccttggagaccgaccagaccaccccgccggggcgcggctccgcggtgctgccgcgcaggagctcggcgccgccgagccacacgccgaatgtgcggtcgtactgcgcgccgcggtactcggcgcgccactcgagcacggttagcgagaccggtggcgcgtc

SEQ ID NO: 7114 - DNA, 412 bp, Zea mays
  Clone ID: LIB3118-042-P1-K1-E6
ctgcaacagtttctgccagcgctcagtcaactagccatggtgaaccctgccgcctacctacaacagcaacaactgctttcatctagcccgctcgctgtggccaatgcacctacatacctgcaacaacaattgttgcaacagattgtaccagctctgactcagctagttgtggcaaaccctgctgcctacttgcaacagctgcttccattcaaccaactgactatgtcgaactctgctgcgtacctacaacagcgacaacagttacttaatccactagcagtggctaacccattggtcgctgccttcctacagcagcaacaattgctgccatacaaccagttctctttgataaaccctgtcttgtcgaggcagcaacccatcgttggaggtgccatcttttagattacatatg

SEQ ID NO: 7115 - DNA, 222 bp, Zea mays
  Clone ID: LIB3118-042-P1-K1-E7
acgatcgagatggcggcgttggatgttgagtaccgttgctttatcttcggtctggtctgggccacgaacgaccactccctccacaacgccttcagctcctactgcgaggtccttgtgtccaagatcatcctcgatcgggagtcgcatttgttccgtggctttggattcgtaacctccttcacagtggaagcgatgcggtctcgccataggtgggcatgaacg

SEQ ID NO: 7116 - DNA, 146 bp, Zea mays
  Clone ID: LIB3118-042-P1-K1-E8
gtcagtctgccctgcttgcgtgaaccgcaccagtatgctttgcatggtggctggagggatatgactatatgagtttacctatatattatggactatccttgttggcgtattggtgtattaacgattatatttagccaggtataatt

SEQ ID NO: 7117 - DNA, 372 bp, Zea mays
  Clone ID: LIB3118-042-P1-K1-E9
cacgtcctcatccatccaaccaggcgagccaacaagcaagcaaaagtaaacggggcgaggagctggagagacgccggcgacgtgaagcaaccgcccgatcggagccgcggctgagcaggaggagggagccggagatggtgggtctcgtcggcggcagcacggcgcgggcggagcacgtcgtcgccaacgccggaggggaggcagagtacgtgcgccgcatgcaccgccacgcgccggccgagcaccagtgcacctccaccctcgtcaagcacatcaaggcgcccgtccacctcgtgtggcagctcgtgcggaggttcgaccagcccgaacggtacaagccgttcgtcaggaactgggtcgtgcgcggggacc

SEQ ID NO: 7118 - DNA, 352 bp, Zea mays
  Clone ID: LIB3118-042-P1-K1-F1
atacgtactaatgcatgcaaccaggctagctaacatgcaagcaaaagttaacggtgagagtggctggcaacacgcccgcgacgtgaatcaaccagcccatcggagctcgccactgaacacgaggagggaggccgacatggtgggtctagtcggcggcagcacggcgcgcgcggacgcacgtagttcccaacctgcggagcgacagcatgctcgcatcggcccatggacaacatacaacccggccgggcacgcacctcatctccaccactagttaatgacatgaaggacctcatccacctggtctagaagatcctgccgatggtgaggcagcactagtacgacaacgcgcccg

SEQ ID NO: 7119 - DNA, 399 bp, Zea mays
  Clone ID: LIB3118-042-P1-K1-F10
cccacgcgtccgcccacgcgtccgctatccttgttggtggtagattgtggtgaagtttgaatataaagatgtatatgaataagctgcatgctcaagatagtctaagcaaccaattttgcgatgttttgcgctgttgttgacggatgcgggggtgttgccgaggcgtctgcatttggtgatgttgcagtggttgctgtgaggcagctgtgttaagtaagcgactctatcattttctctatcgctttttgtgacgaagtctgtatgtgttaggttgacgcttttgctgaacaagtggtgtctaaggcgctagtggacctcgcgaccttacatgtgttctgataagaaacggctggagtacaaggttgagcgtctccgaatgcaaaatacagatgctgtcac

SEQ ID NO: 7120 - DNA, 408 bp, Zea mays
  Clone ID: LIB3118-042-P1-K1-F11
cttgaagagctccaagagcttggttctggaacttttggaactgtctatcatggtaaatggagaggcactgatgttgcaataaaaagaatcaatgatagatgttttgctgggaaaccatctgagcaagaaaagatgcggtatgacttctggaatgaagcatctaaacttgctgatctgcaccacccaaatgttgtcgcgttttatggtgttgttcttgatggacctgggggatccattgccacagttacagaatatatggtcaatggttcacttaggacagctttgctaaagaatgccaaaaccctcgatcgacgcaagagattaattattgccatggatacagcctttggaatggaatacttgcatagcaaaaacattgtgcactttgacttgaaaagtgacaatttg

SEQ ID NO: 7121 - DNA, 398 bp, Zea mays
  Clone ID: LIB3118-042-P1-K1-F12
ccctacaggatccaacaggcaatcgcaacaggcatcttaccattatcacccttgttcctccaacaaccgtcagccctattacagcagttacctttggtccatttggtggcacaaaacatcagggcacaacaactacaacaacttgtgctagcaaaccttgctgcatactctcagcaacatcagtttcttccattcaaccaactggctgcattgaactctgctgcttatttgcaacaacaattaccattcagccagctagttgctgcctacccccagcaatttcttccattcaaccaactagcagcattgaactctgctgcttatttacagcagcaacaactactaccattcagccagctagctgatgtgagccctgctgccttcttgacacaacaaca

SEQ ID NO: 7122 - DNA, 308 bp, Zea mays
  Clone ID: LIB3118-042-P1-K1-F2
acgcccacgcgtacggtggctctcggacatcggctgacactatttcttgagacagcgatgcaagttatggaggctcccaggcacctgaaagaggatatggggcttacagtgggtacagggctcgctaatataatagtgggtgatctggacatagctctcttcactatggaaagcgtcacggatattaggatttagattgcttgataaagcttctatctgaggcacactggattataaccttggacacccctgctttcctcacgtactataaaaacagacaatacatggaagctgggatgctgcttatt

SEQ ID NO: 7123 - DNA, 345 bp, Zea mays
  Clone ID: LIB3118-042-P1-K1-F3
acgcgacggttgatggagtctctcctcgcctcgcgagccattaggtcttacttctccgccggtgccagcaccaggggcgccgcttcccccatgccctcgcgcgttgccaccctcgccagcgccggcgcccgctcccgcgcgctccatgctcagcactcggactaaatccttgaagttcttgcacaggacgactttctgtacccacaggacctgctccaattgcagaatggcttggcattctatgacattatgtctaggctcgggatttgaatgctgagacactgactgccgacttcctccttgaaggagatagaggacgagctcataaccgcctttaacatccta

SEQ ID NO: 7124 - DNA, 105 bp, Zea mays
  Clone ID: LIB3118-042-P1-K1-F4
aagcaacctcatgtccagactcagagttgtctacttgttttcatccgcccctgagattttgtctggaaacaagtttaaaattaagattattctcaacaagtgttt

SEQ ID NO: 7125 - DNA, 412 bp, Zea mays
  Clone ID: LIB3118-042-P1-K1-F5
caactagcaacatagaaagcacaatagtgtaccaacaatggtagccaaaatattttgcctccttatgctccttggtctttctgcaagtgctgctacgacgaccattttcccgcaatgctcacaagctcctatagcttctcttcttcccccatacctctcaccagcgttgtcttcagtatgtgaaaacccaattcttcaaccctacaggatccaacaggcaatcacagcaggcatcttacctttatcacccttgttcctccaacaatcatcagccctattacatcaattacctttggtgcatttattggcacaaaacatcagggcacaacaactacaacaactcgtgctagcaaaccttgctgcctacgctcagcaacagcagttacctttggtgcaattgttggcacaaaac

SEQ ID NO: 7126 - DNA, 332 bp, Zea mays
  Clone ID: LIB3118-042-P1-K1-F6
cttcccttttaataaccacaaaatttatcctcaacacccttattaaccttatcaccgcggtttctcaaacattcctttgtcccaataacaaatataaacgatacatttacacccctcaaaacatttgaccactaacaacaccacaactttgtcctaacaaacctctactaatactttcactcacaacctgtccattcattccaccaaccctccaaaaatccactctcctaactatttttaccatcccttcccattcatcctccataatactagctacccccaacaattttttccattcacaccaactagaccctctctcctccgccataaat

SEQ ID NO: 7127 - DNA, 396 bp, Zea mays
  Clone ID: LIB3118-042-P1-K1-F8
gttggcttctcctccccctccggttcgggttcgggttcgtgaggttctccggggttcgggttcgtgggtgagcggatcgagatggcggcgtcggatgttgagtaccgctgcttcgtcggcggcctcgcctgggccacggacgaccactccctccacaacgccttcagcacctacggcgaggtcctcgagtccaagatcatcctcgatcgggagacgcagaggtcccgcggcttcggcttcgtcaccttctccacggaggaggcgatgcggaacgccatcgagggcatgaacggcaaggagctggacggccgcaacatcaccgtcaacgaggcccaatcccgcggcggccgtggaggcggcggcggtgggtacggtggtggccgtggaggcggcggc

SEQ ID NO: 7128 - DNA, 393 bp, Zea mays
  Clone ID: LIB3118-042-P1-K1-F9
tagattcttatgagattgaaggcggcgagacaaaatcagagattttgcagaatctagctgagttccagttttcttgtgtcctgtacaatggtgccctagagaatgcatgcagtgagcttggagcccgtatgtctgccatggacagctctagcagaaatgctggcgatatgcttgatcgtctcactctcacttacaacaggacacgccaagcatgcatcaccacagagcttactgagattatatctggtgcatcggcccttgaggggtagtgaagagactgcggacttcttccttttgccgtttgtgttcctctcccatgaaagctttttccctcgggagtctcagtttcagctcctttcatttcacttttccttgagaaacttgctctcatgc

SEQ ID NO: 7129 - DNA, 306 bp, Zea mays
  Clone ID: LIB3118-042-P1-K1-G1
ttgattcttatgagaatgaaggcggcgagacaaaatcagtgattttgcagcaggtagctgagttccagttttcttgtgtcctgtacaatggcgccctatagaatgcatgcagtgagcttggaacccgaatttgtgccatgggcagctgtagcagaaaaggtggggaattgctggatcagctgaattttacttacaacaagacaccccgaagcttcatcaccacaaagcttactgagattatatgtggtgcatcagaccttgaggggtgatgaagagactgccgacttgttgcttttgacgcttgtg

SEQ ID NO: 7130 - DNA, 379 bp, Zea mays
  Clone ID: LIB3118-042-P1-K1-G10
gcaaagcggcagtgcgtagagaggatcgtcgaacagaacagcatgaagatggtcatcgttctcgtcgtgtgcctggctctgtcagctgccagcgcctctgcaatgcagatgccctgcccctgcgcggggctgcagggcttgtacggcgctggcgccggcctgacgacgatgatgggcgccggcgggctgtacccctacgcggagtacctgaggcagccgcagtgcagcccgctggcggcggcgccctactacgccgggtgtgggcagccgagcgccatgttccagccgctccggcaacagtgctgccagcagcagatgaggatgatggacgtgcagtccgtcgcgcagcagctgcaaatgatgatgcagcttgagcgtg

SEQ ID NO: 7131 - DNA, 269 bp, Zea mays
  Clone ID: LIB3118-042-P1-K1-G11
gtgaggttctccgaagttcggtttagtgggtgagcggatcgagatggcgaggtaggatgtagagtaccggtgcttcgttgaaggcctatgactgggccacggacgaccactccctccacaacgccttgagaacctacggtgaggccctcgaagacaagatcatactcgatcgggagacgcagaggtactgggcattgagctttatgaccttcttcacggaggacgcgatgcggaacgccatacagggtatgaacggataggaactggac

SEQ ID NO: 7132 - DNA, 84 bp, Zea mays
  Clone ID: LIB3118-042-P1-K1-G12
cggacgcgtgggcggacgcgtgcgtatcatgggtggtatgaccaatagtatatgcatgatcataataaagtattggttttaatg

SEQ ID NO: 7133 - DNA, 401 bp, Zea mays
  Clone ID: LIB3118-042-P1-K1-G2
atacgatctgacgctcatacgacattagtagtcgaccaatcacaagcaacggggccggccggaatatgtggacgatcaggaaggcggcgacgccaaacgtggccgtcctactgctgctcctcatcgtcgatgcgcacgaggcggccccgttggcggaggcgcgcgtgtgccgtagcccaagcgcgagcttcaagggggtctgcatgtccgaccacaactgcgcacaggtgtgcttgcatgagggctacggggggggcaacttgcacggcatcatgcgccagtgcaagggcatcagggagggctagctagctaggctctaagatctaacaagcttgctatatcggcctttaattaaattaataaagatcgacgtcgtggccggacgctaaatatgtactact

SEQ ID NO: 7134 - DNA, 316 bp, Zea mays
  Clone ID: LIB3118-042-P1-K1-G3
ctgcgaactgcaaagagctggcagcacagcctgatgtcgatggtttccttgtgggcggtgcttctttgaagcccgagttcatcgacatcatcaacgccgccgccgtgtgaagtccgctgaagatgttccaacccttcaccctgttgcggtgatgtgctgaagacagatcagactatttttttgtttaaccgcgcagtgctatgtaagctactaactttgcgctggtgcggatgctgatttccctccccctagctttttgtgaggctactctacagcttgattcagcttgctaataatgtttgcctctggacatagc

SEQ ID NO: 7135 - DNA, 404 bp, Zea mays
  Clone ID: LIB3118-042-P1-K1-G4
gcatacaggatccaacaggagaggatagcaggcctcttaacattatcaacggggatccttcaacaaccgtgagtcctattacaacatgtaccttcggttcatttggtggtacaaaacatctgggcacagctactacgactagctcgggctatgcaaacctgtgctacataactatgatgaacatcagtttcttgcattcaaacaactggttgcatagaactctgctgcttatttgcatcaacaattaccattaatacagctagtggctgcctacccccaccattttcttccattcaaccaactagcagcattgaactctgctgcttatttacagcagcaacaactactaccattcagccagctagctgatgtgagccctgcttgctttttgacacaacaacagt

SEQ ID NO: 7136 - DNA, 400 bp, Zea mays
  Clone ID: LIB3118-042-P1-K1-G5
cccacgcgtacgctagatgcgacggcccccttttttttttttttttttttaaaaatgtactttcttatttctgggaagccacaaacatcatgcaaaaaactttattatggaactataactcataagcaatctaaaagagggcaccaccaatgatgggttgttgctagaacactgatgggtttgtcaaagcaagttggttgaatggcagcaattgttgcagttgtaagagggcgccatcgttaggcatagcttgtaggtagaacggcaacaactgttgttgtgtcaagaaggcagcagggctcacatcaactagctggctgaatggtagtagttgttgctgctgtaaatcaacagcagagttcaatgctgctagttgggtgaatcgaagaaattgctgggg

SEQ ID NO: 7137 - DNA, 248 bp, Zea mays
  unsure at all n locations
  Clone ID: LIB3118-042-P1-K1-G6
tgatcaaactggannaagactgtnnggatacttaggtgtgtgatttcgagtgccagcttagttgctgcatgaaagaataccttgatttcacgtcattaatgttgtatcgaaagatcanncatcattgggcgacacgctacactgaccaaactgnntcaatgagtggcttagtatggagtttagctcggttcccagattataccatcgccgacttctactgtacctcgcgaatcgggatgtctattggg

SEQ ID NO: 7138 - DNA, 326 bp, Zea mays
  Clone ID: LIB3118-042-P1-K1-G7
gcttccagtacatcgccttcgagacgaaccctgacaccatggtcagccacgtggccgggaagaactccgtcctgagcgacttgccggccgccgtcatcgccagctcgtatgccatctccatggaggaagctgcagagctcaagaacggtaggaagcatgagctggctgtgcttactcctgctggcagtggcagctaccaacaaggtcaagctggcagcgcccaacagtaggcacaacctcagagtgatctgcctgaataagtactcgtagactgtaataattaaacaaagcttgctcatggttaaactgcgtgttgattagtcttt

SEQ ID NO: 7139 - DNA, 405 bp, Zea mays
  Clone ID: LIB3118-042-P1-K1-G8
atacgatctgacgctcatcccacatcagtagtcgaccaagcacaagcagcagagccggccggaatatgtggacgatcaggaaggtggcgacgccgcaggtggccgtcctcctgctgctcctcatcgtcgttgcgcaggaggcggcgccgttggcggaggcgcgcgtgtgccggcgccggagcgcgggcttcaagggggtctgcatgtccgaccacaactgcgcgcaggtgtgcttgcaggagggctacggcggcggcaactgcgacggcatcatgcgccagtgcaagtgcatcagggagtgctagctagctaggctctaggatctagcaagctagctatatcggcctttaattaaattaataaggatcgacgtcgtggccggtcgctaaatatgtactactatac

SEQ ID NO: 7140 - DNA, 325 bp, Zea mays
  Clone ID: LIB3118-042-P1-K1-G9
gcgtacgcttccaactgcaaagagctggcatcacaaactgatgtccatggttaccttgtgggcggggcttatttgaatttctttgttcatcgacatcatcaacgccgccgccgtgtgaagtccgctgaagatgttccaacccttcaccctgttgcggtgatgtgctgaaaacagatcagactatttttttgtttaaccgtgcagtgctatgtaagctactaactttgcgctggtgcggatgctgatttccctccccctatctttttgtgaggctactctacagcttgattcaactggctgattatgtttgcctctggacattccc

SEQ ID NO: 7141 - DNA, 363 bp, Zea mays
  Clone ID: LIB3118-042-P1-K1-H1
acgcgtgcgaccaccgatgtcggacacctccagctggcggtaaacataaatgctacatgcggatgcacctgaaccgttcttttttcgacatgagtaaaagcgcaactggcccatgctcactggtatagccatcaccggattcatcatcacgaagatgacggccaacttcaccgaggaggatctcaagaactctaagttcgtccaggaacacaagaagaagcactgacgaaccaggtgaaggagttgttagaaacgcatgtttggccagccagttcttgtatgcttttgaatgaaaaagttagacccttctttctcgtttccttaatcgaaatgcttgcactctgtgtgccatttgtaatggat

SEQ ID NO: 7142 - DNA, 241 bp, Zea mays
  Clone ID: LIB3118-042-P1-K1-H10
cggacgcgtgggcggacgcataggattgatgtgtggaataccccatagatggtgcatgatcttaatatacgcttggctctaacgaaaaacaaaaaaaatgggacggacactctatacacttcaaggttacgtacaggttcattcgacgttatatctcttctatcgaccaaccaaaatcgaattcactggtctcccatacacaacgtacctactgctataacattgcagtgccccaacttaa

SEQ ID NO: 7143 - DNA, 193 bp, Zea mays
  Clone ID: LIB3118-042-P1-K1-H11
cttttgatgaggccgagaaaaagaaggaagaagaggatgccgccaagggtggggatgatgaggatgatgacctagaggatgaggaagacgatgagaaggcagacgaggacaaggccgactctgatgccgaggatagcaaggattctgatgatgagaagcagcacgacgagctctagatggcgaggatgatgtt

SEQ ID NO: 7144 - DNA, 347 bp, Zea mays
  Clone ID: LIB3118-042-P1-K1-H2
cccacgcgtgcgtccacgcatacacaagtggcttcacataaatgctacatgggaatgcagctgcaatgaaaggggcactcgcatgaagactgacctagctttactaaagtttttaagcccgctcttaggcatgaaggagatgcggagcctcatggtggggctttacgtcgtccgtaaaaccaccatctttttcaagttcaagctcggcgagatcgacaccaccatccccaccatgggttttaatgttgaaactgtggagtacaagaacattaacttgcactgtttgggaggggggcggtaaggtcacgatcacaccttctttggaggcattactttcagaacaccca

SEQ ID NO: 7145 - DNA, 248 bp, Zea mays
  Clone ID: LIB3118-042-P1-K1-H3
gccacacgtcctgtccaaaacaagaaaccacccgtttgtagagcaggtggtcgaacacctgagtatataaacgggcatggttgtcgtctagggacaagatgtgcaaacttatacaggctctagaataggcatgcagaagcggttgagcacgataacggtgttgtacgtgaaccccaacgcgctgatctttattgcggggtgttaccggcaggtggaggtcttctggtctcagtggggggagttagtca

SEQ ID NO: 7146 - DNA, 84 bp, Zea mays
  Clone ID: LIB3118-042-P1-K1-H4
cggacgcgtgggcggacgcgtgggtatcatgtgtggtatgaccaataggatgtgcatgatcataataaagttttggttctaatg

SEQ ID NO: 7147 - DNA, 241 bp, Zea mays
  Clone ID: LIB3118-042-P1-K1-H5
acgcgccggacccgaaccccaagttccgggtcagacccaccgtacgattatgatgaggcccaaaaaaagaattaagaagaggatgcccccaagggtggggatgattatgtatgatgacctagaggatgaggaagacaataagaaggcagacgaggacaaggccgactctgatgccgaggataggaaggatcctgatgatgagaagcacgcacgacgagctctagatggcgaggatgatgtt

SEQ ID NO: 7148 - DNA, 323 bp, Zea mays
  unsure at all n locations
  Clone ID: LIB3118-042-P1-K1-H7
cccacgcgtccgcccacgcgtccgcaagtggcttcacataaatgctacatgtgcaatgcagctgcagtgaaaatggtggntgcaaggaagctcacgtagttccaccattttcactgcagctgcattgacaagtggctttatatagaagctacatgccgacgcgggaagggtggcatcatctagacgcaccgggagatacgagaacgttaggtcactcaagacaaaacagcggaataattttatacatgtctctgctgggcatttacgtactaccggtacaccattgggcggtgctgcgttgtcgtttccggtcctttatgtga

SEQ ID NO: 7149 - DNA, 259 bp, Zea mays
  Clone ID: LIB3118-042-P1-K1-H8
gccacacgtccggtccagaacaagaaaccacccgcttgcagagcggatggtcgaacacatcactatataaacgggcatggctgtggtcgagggccaagatgtgcaaagttatacaggctctagcatggacatgccgtagcggatgagcaccataaaggtgttgtacgtgaaccccaacgcgctgatctatattctggcggcgtaccggtaggtggaggaattttttcccgagtggggagagctagttaaaaccacctgg

SEQ ID NO: 7150 - DNA, 335 bp, Zea mays
  Clone ID: LIB3118-042-P1-K1-H9
gaaaacccagctgttcaaccatataggcttcaacaagcaatcgcagcaagcaacatacctttatcgcccttggtgcttcaacaatcgccagccctatctttggtgcagtcattggtacaaaccatcagggcacaacagctggagcaacttgtgctacctctgatcaaccaagtagctctggcaaacctttatccctactttcaacaacaacaattttttgcattcaaccaactggctacactgaaccctgctgcttatttgcagcaacaaccattaccatttagcccggtaggtactggctactctcagcaacaacaacttcttccatttaacca

SEQ ID NO: 7151 - DNA, 416 bp, Zea mays
  Clone ID: 21LIB3118-001-Q1-K1-C9-R1
ggcgatgcggaagccatcgagggcatgaacggcaaggagctggacggccgcaacatcaccgtcaacgaggcccagtcccgcggcggccgtggaggcggcggcggcggctacggtggtggccgtggaggcggcggctacggcggtggcgggcgccgtgatggcggcggcggctacggcggtggcggcggcggctacggtggcggcggtggctacggtggtggtggtggcggctacggcggtggcaaccgtggcggcggctacggcaactccgacgggaactggaggaactgagcggtggggcccgcgcggccaagttatcctgttcgctaccgtgatgtttaccctagtccagagggtttatcttcgttcgtctcgtttgttgttgcccatctgtgtttttgattgcaaggtcgctc

SEQ ID NO: 7152 - DNA, 445 bp, Zea mays
  Clone ID: 33LIB3118-002-Q1-K1-G8-R1
gatcaaccaagtagctctggcaaacctttctccctactctcagcaacaacaatttcttccattcaaccaactgtctacactgaaccctgctgcttatttgcagcaacaactattaccatttagccagctagctactgcctactctcagcaacaacaacttcttccatttaaccaattggccgcactgaaccccgctgcttatttgcagcagcaaatactactaccatttagccagctagctgcagcaaaccgtgcttccttcttgacacagcaacagttgctgcctttctaccagcagtttgcggctaaccccgcaaccctcttacaactacaacaattgttgccctttgtccaacttgctttgacagacccagcggcctccctaccacaacacatcattggtggtggcctcttttagattgcctaataagtggaattcaataat

SEQ ID NO: 7153 - DNA, 333 bp, Zea mays
  Clone ID: 47LIB3118-003-Q1-K1-B2-R1
gtagatcacgatcgagatcaagatctcgttcaccatcccattctaggcgtcatggccgtgggatacatgctgatagaattattggagcaagcaaaaggctcctagggttgaatatattactgaatttggaggttcagttgataccagtgaaccaagagtttcatggatctctccgccttcgtctccaatacgacttgacatacctaaccggttgtctcatcgtctaattcatgacgcacttcaaagtgatactgcctcgacattgtctgctggaacaagctagaactgcaagacttatgacaccttcgcccagtacatcatcagcattagcta

SEQ ID NO: 7154 - DNA, 586 bp, Zea mays
  Clone ID: LIB3118-003-Q1-K1-B2-r3a
agctgtaataaaactggctacaatgccattacaacatttcacaggtctacatggcgacgctgggattcttgttcggcgaatgactagatgatatgaggctgatgctgctgtgcctgcggtagtagagagagcctggagatgatgagccgcgccacgttctctgctgctacagcacccgtctatatggcgctcgcggcgctctcaaaggtgttcacgtagtacagctgcttcccgtgcaacactataggagcaaactcctctggagcttgatagtgcagctaagcaacccagttgatccggatcgtctctatacgagccctgaagatctgatccagcaaaccatcattcagctttgcccgtgaaaacatcttgtacgccggcatgtcgacttcgatgtacctcttcacaacagagatgcacgagaaagggatatcaaggagctctagggtaccaatcagctctggaatatctgaagccgagttcagaccaaaatatgccgggttcaatatgcctctcacaaaggacgcatgtgtgtgctgcatcttcctcagcggaatggagattggagggctaaacgtaatgttca

SEQ ID NO: 7155 - DNA, 572 bp, Zea mays
  Clone ID: LIB3118-003-Q1-K1-B2-r4a
gagagagcctggagatgatgagccgcgccacgttctctgctgctacagcacccgtctctatggcgctcgcggtgctctcaaaggtgttcacgtagtacagctgcttcccgtccaacactatcggagcaaactcctctggggcttggtagtgcgggtaagcagcccagttgatccggatcgtctctatccgagccctgaagatctgatccagcaaaccatcatccagctttgcccgtgaaaacatcttgtacgccgccatgtcgccttcgctgtacctcttcagaacagagatgcaggagaaagggatatcagggagctctagggtaccaatcagctctggaatatctgatgccgagttcagaccaaaatatcccgggttcaatatgcctctcacaaaggtcgcatgtgtgtgctgcatcttcctcggcggaatggagattggagggctaaacgtaatgttcagctcgtcgagtggggttgccaccaccgtcaccatacactcgtattcgctcccactattggatctcagaacgtagtgatccccggcatcagtgatggagcccacgcgtccg

SEQ ID NO: 7156 - DNA, 435 bp, Zea mays
  unsure at all n locations
  Clone ID: LIB3118-003-Q1-K1-B2-r5a
ggggctnggaagggcgcgtaagcagcccagnngatccggatcgnctctatccgagccctgaagatttgtttcagcaaaccatcatccagctttgcccgtgaaaacatcttgtacgccgccatgtcgccttcgctgtacctcttcagaacagagatgcaggagaaagggatatcagggagctctagggtaccaatcagctctggaatatctgatgccgagttcagaccaaaatatcccgggttcaatatgcctctcacaaaggtcgcatgtgtgtgctgcatcttcctcggcggaatggagattggagggctaaacgtaatgttcagctcgtcgagtggggttgccaccaccgtcaccatacactcgtattcgctcccactattggatctcagaacgtagtgatccccggcatcagtgatggagcccacgcgttcg

SEQ ID NO: 7157 - DNA, 248 bp, Zea mays
  unsure at all n locations
  Clone ID: LIB3150-007-B6-F1A
gcaagcatcgaccttctagagtagactcatgtgtatgtctgatagtatcagcgtaataacgttagcataatcagtgacatatgtaattcctatagtgaagttaaagtcgacagcagtgttccggtacaacatacaaccgagttcatatatgtngattacctgtagtaggtgatgaaataactaacgcacataanttngnatncgcgcgctaagcagattacgaacnattagcctgtcnttgcggctgc

SEQ ID NO: 7158 - DNA, 502 bp, Zea mays
  Clone ID: LIB3150-023-F1-F1A
tggttattgagtatcgtggtgaacaagttagacaacgtgttgctgatttgagggaagcacggtaccatagagaaaaaaaggattgctatttgttcaagataagtgaagatgttgtcatcgatgctacaggcaaaggaaacatagcgcgcctgattaatcactcgtgtataccaagctgctatgctaggatcgtgaccgtcagtggtgacaggagccagatcattcttattgcgaagagagacgtctctgccggagaagagctgacgtataactacctgtttgaccctgacgagtccgaagactgcaaggttccatgcctgtgcaaagctcctaactgtcgtggatacatgaactagggtgctgctagaagagtaaaaaccaatctaacaaacaaggactgaggctaactccttacagaagccaaaagccggccattttttttttcctggaattctttcggtagtttctcgttttcttatatcactcaccagaagcttacaat

SEQ ID NO: 7159 - DNA, 474 bp, Zea mays
  Clone ID: LIB3150-023-F1-R1A
aaatatttttttttgaatcaaaccgagtttttcttattttcatttaaccaaaaaaaaattttgagcattcttaccatcttatcacagcaacggaagaatatacaaatggatgacagcctacggctgccctaaatcgcaatttctgaacaaaatggtccaaaccttgtgcagcccacgaattgtaagcttctggtgagtaatataagaaaacgagaaaccaccgaaagaattccaggaaaaaaaaaatggccggcttttggcttctgtaaggagttagcctcagtccttgtttgttagattggtttttactcttctagcagcaccctagttcatgtatccacgacagttaggagctttgcacaggcatggaaccttgcagtcttcggactcgtcagggtcaaacaggtagttatacgtcagctcttctccggcagagacgtctctcttcgcaataagaatgatctggctcctgtc

SEQ ID NO: 7160 - DNA, 363 bp, Zea mays
  Clone ID: LIB3150-034-F5-R1A
ccacagcaacaagccaacaacaaccttgttttgttcgggtcgaaaaatgtcaacagatacttatttattacacatgaatagttcatcaggtttcacagatcagttcatcaactgctgcggctccagcaccagcagcatatgtacacaaatcatcagttgcatgaatcagcgagagtagggttacaggctcttcacattagcatcgatcgaccgagcggtcatcagattggcatggatcaaggagcaagggatggaaaccagtaacagggagggtgtcggctatcgtctcagcctctcaggcgggcccggtctcctcagcgcaggctggggtttggagggcggggacacgcccgccgaagcctg

SEQ ID NO: 7161 - DNA, 151 bp, Zea mays
  Clone ID: LIB3150-054-G6-F1A
tcttgtctcgtcgtatactcgccgccgggcaagtaggctctcggcgtgggcggcggcatcgatacgttcgtcggtggcagctcgagctagtcgcgcgccatcggcaagatgttcatcaagactaagctctgctgcaagttcctggccggga

SEQ ID NO: 7162 - DNA, 173 bp, Zea mays
  unsure at all n locations
  Clone ID: LIB3150-054-G6-R1A
ttttattattgttctttttttttatttttgcttttttctttttttttttcggttttttttttttttcttcttttttttttttanannggaaaaaanaccccgntnanatgcctnaactgcttggtacacagcgcacagctcattgggccaaagagtaaggcttataatatccg

SEQ ID NO: 7163 - DNA, 406 bp, Zea mays
  Clone ID: LIB3150-001-Q1-N1-A10
cgcagtcggctgccgcagactggtagtagccggcgcgccgtcaccgtatcctcagatcagcggcgagcagataccacaccactctactgacgcccgacgagcagtgtaacattttccttcagccatgggtaaggagaagactcacatcaacattgtggtcattggccatgtcgactctggcaagtcgaccaccactggccacctgatctacaagcttggaggtattgacaagcgagtgattgagaggttcgagaaagaggctgccgagatgaacaagcggtcattcaagtatgcgtgggtgcttgacaagctcaaggctgagcgtgagagaggtattacaattgatattgccctgtggaagttcgagaccaccaagtactactgcactgttattgatgccccggga

SEQ ID NO: 7164 - DNA, 376 bp, Zea mays
  Clone ID: LIB3150-001-Q1-N1-A12
cagctgctcatccagtccctaatggtggggatgctaggaatgctgcgaggagtgcaccaaaggatgctgctccagcaggtatgtcgcagcatagaccccatcagaggggcgggaggcgtgctgctggatctggtggtggtcgtcgtggcaaagagcgcagcaagccgaagtcgactgaagaactcgatgctgatttggagaagtatcatgctgatgcgatgcagaccaactaaatacattcacaaatttgatattcgacatcaaatatcaagtgcattagtccttccattacagctgtttgtgctaccatgttcaggggacaacaaacattttcttttgtgttggggggggggggtttcgctttactgagtttttg

SEQ ID NO: 7165 - DNA, 420 bp, Zea mays
  Clone ID: LIB3150-001-Q1-N1-A3
ttgcactgtcattgatgcccctggacaccgggacttcatcaagaatatgattactggcacttcccaagctgactgcgctgttcttatcattgactccactactggtggttttgaggctggtatctccaaggatggacagacccgcgagcatgctctccttgctttcacgcttggagtgaagcagatgatttgctgttgcaacaagatggatgccaccacacccaagtactccaaggcccgttatgatgagattgtgaaggaagtctcttcctacctgaagaaggttggatacaaccctgacaagatccactttgttcccatctctggtttcgaaggtgacaacatgattgagaggtccaccaaccttgactggtacaagggcccaaccctacttgaggctttggacttgatcaatgagcc

SEQ ID NO: 7166 - DNA, 419 bp, Zea mays
  Clone ID: LIB3150-001-Q1-N1-A6
cgagtttttgaacgcaagttgcgcccgaagccttctggcggagggcacgtctgcctgggcgtcacgccccgcctccactcccccctcccaggtgctgcccaggtaagtcggcggcggcgatgacaacgcgcttcaagaagaaccgcaagaagcgcggccacgtgtccgccgggcacggccgcatcggcaagcacaggaagcacccgggaggtcgcggtaacgccggtggcatgcaccaccaccgtatcctcttcgacaagtaccatccgggctacttcggcaaggttggcatgcgttacttccataagctccgcaacaagttctactgccccgcggtcaacatcgagcgcctctggtcgatggtgcccgccgacaaggctgcggatgccggcggcgacaaggccccgcagatcgacgtc

SEQ ID NO: 7167 - DNA, 398 bp, Zea mays
  Clone ID: LIB3150-001-Q1-N1-A7
tcgggaacgcggagctgaagatcgtcgacggagacaccagcgcgtcgctgggacggaaccagccaggcgagatatgcatccgcggcgaacaaatcatgaaaggttatctgaatgatccagaggcgacaaagaacaccattgataaggacggatggctgcacaccggggacattggttatgtggacgatgacgacgagatcttcatcgttgacaggctgaaggagataatcaaatacaagggcttccaagtacctcctgcggagcttgaagcccttctcatcacacatcctgaaatcaaggatgccgctgttgtctcgatgaaagatgaagtcgccggcgaagtcccggtggcattcattatacgcagtgaaggctctgagatcagtgagaacgagatc

SEQ ID NO: 7168 - DNA, 282 bp, Zea mays
  Clone ID: LIB3150-001-Q1-N1-A8
tctcacaactccaccgctagcagcatccaacggactctcgtcaggatggccggggcgctcctcctcctgctggtgacgcccgtcgggctgctcgccgcgctcgcgctcctcacgcggccccgggccgcgcgggtcccgctcaaaggccgccacgtcttcatcacgggcgggtccagcggcatcgggctcgccatggccacggccccggcgcgggagggctcgcggctcttcatcctggcccgcaactctctccgcctttaggacactcgctccttcattcag

SEQ ID NO: 7169 - DNA, 407 bp, Zea mays
  Clone ID: LIB3150-001-Q1-N1-B10
cttcgaacacctgtactcactgcaacttgaagaagacataaatgaggttctgtttgcatcaccgagcggaagattcctagaaatcaatgacattactgcaggagcctccaaactgcaggacttgctcaaaattccggttgatgtagaatcagatatacagaagttgcagaaactccagtaacaatctcacctgacgcggagcaccatccatttgcatccacttgatttaggtgctgttcagttctcaccccagcagggcacaccaaaatgtcctttgttttgctcgtggaagccaaattgggaccagctgttttggacaccagaattttgtccaactgtgctatagaaaatttttggcctgccagaatgtcttttacaaccaaagaggtgaaaaatctggcttgacc

SEQ ID NO: 7170 - DNA, 422 bp, Zea mays
  Clone ID: LIB3150-001-Q1-N1-B12
gcgttcccatctgcggcggggagtgagcgcattgaggacggtctactcctcgttcgcgtgcggttcgtcccgagcgatccggcaaccatgaacatcttcaagaagaaggtcgaccccaaagaggctctcaggaccagcaaacgtgaaatggcggtcgccacgcggggagttgagagagagattggttccctgcaaatggaggagaaaaggctggttgcagagataaagaagactgccaagactggaaatgaggctgcaaccaaaatattagctcggcaacttgtcaggctgaggcaacaaatcctcaatttgcaaggcacacgggcacagattcgtggagtagctactcacacacaggcaatgtatgctggcacttcaatctctgctggaatgaaaggtgcaagcaaagctatgtcagcaat

SEQ ID NO: 7171 - DNA, 422 bp, Zea mays
  unsure at all n locations
  Clone ID: LIB3150-001-Q1-N1-B2
gatcgccgcacgatctcctcggcggcggcgccgttgcggatgtggtgctgtggaggaagaaggaggtggccaccgggacgctggcggccgtggtggcctcatgggcgctcttctactgcgtgcccggctacactctgctctccttcctggcccaggtgctcatgatcctgctcaccgtcctcttcgtctgggccaaggctgcgcagctgctcaacagggcacctccgcctatcccattgatgaaaatttctgacgagtcaatgagtgaagcagcagaaatggttggtagcttcatcaacaaggtgctcaaggatttcgaaaacattgcacttgggaaggataacagcctcttctacaaggtggcttttgtgctgntgctggcctccatagttggacgactgaccgatcttatcactttagta

SEQ ID NO: 7172 - DNA, 421 bp, Zea mays
  Clone ID: LIB3150-001-Q1-N1-B3
ccttattacaatcttcctcagcgccgccggtcccagacaccgagcccgactgcccaaccccgatccggcgatccgtctccttcttttcctcctttctgccgtccccgatcactcgcaaccatggcggcggcagcaggcggaggcgcggtgcgtgctctgtcccagaaggagcaggacatacagatgatgctcgccgccgacgtccaccttggcaccaagaactgcgatttccagacggagcgctatgtctttaagcgccgttccgacggcatctacatcatcaatcttggcaagacatgggataaactccagcttgcagcgagggttatcgttgccatcgagaacccgcaggacatcatcgtccagtctgcccgcccatatggccagcgtgctgtcctcaagttcgctcagtacactggcg

SEQ ID NO: 7173 - DNA, 401 bp, Zea mays
  Clone ID: LIB3150-001-Q1-N1-B4
tcgcattataaatgttgcacgtggtggcggggttgatgaagaagctctagtcagggcacttgattcaggggtagtagcacaggctgctcttgatgttttcactaaagaacccccagcagctgacaacaagttggtactgcacgggaatgttactgtcacacctcaccttggtgccagcacagtggaggcacaggaaggggtggctattgagatagctgaagctgtcattggagctctgaaaggggagcttgcagcttctgcagtgaacgcgccgatggttcctgctgaggtgctgtcagagcttgcaccttttgttgtgctcgcagaaaagcttgggcgcttggctgtgcaactaggttgctggtggtggtggtatcaagtctgtgaaagtgacctatgca

SEQ ID NO: 7174 - DNA, 420 bp, Zea mays
  Clone ID: LIB3150-001-Q1-N1-B5
caggaggactcgcacagatcggtgagcgagcaagcgagagatggctgggaggctaaccgcggcagggtcccgcatcctgggcggcggcggcgcacgcgccgcggcttccgccctccgacaccgcgccggcatgggcctccccgtcggccgccacatcgtccccgacaagcccctccccgtgaacgacgagttggtatgggataacggcacgcccttcccggaaccctgcatcgaccgccttgccccgcacatcggcaagtacgaggcgttggcgtggctgtgcggagggctagggttcttcgctgccctcggtatggctgctgttgtgaacgacaaggcctccaatataccatatactcccaaagtctacccgtacgacaacttgagagctgagcttggtgatagaccatataaggtttt

SEQ ID NO: 7175 - DNA, 410 bp, Zea mays
  Clone ID: LIB3150-001-Q1-N1-B6
agcgccggcgcctccatttcgttttcctcactctctcctccagctcagggtccggcggcgaagggaaggcaagatgtacaccgcgaggaagaagatccagaaggagaagggtcttgagccctccgagttcgaggactccgttgcccaggctttctttgatctggagaacgggaaccaggagctcaagagcgacctcaaggacctgtacatcaacaatgctatccagatggatgttaccgggagtaggaaggctgttgtcattcacgtcccataccgcctgcgcaaggccttcaggaagatccatgtcagactcgtcagggagctggagaagaaattcagcggcaaggatgtggtaattgttgctacacggaggattgtgaggccacccaagaagggttcagctgttctgc

SEQ ID NO: 7176 - DNA, 389 bp, Zea mays
  Clone ID: LIB3150-001-Q1-N1-B7
ctcgtagagagaaggaaaaatatccccgagccctagctcccgatctcgatggcgaaccctcgcgtcttcttcgacatgaccgtcggcggcgccccggcgggccggatcgtgatggagctgtacgccaacgaggtgcccaagaccgcggagaacttccgcgcgctgtgcacgggcgagaagggcgtgggcaagtccgggaagccgctccactacaagggctccaccttccaccgcgtcatccccgagttcatgtgccagggcggcgacttcacccgcggcaacggcaccggcggcgagtccatctacggcgagaagttccccgacgagaagttcgtgcgcaagcacaccggccccggtgtgctctccatggccaacgccgggcccaacac

SEQ ID NO: 7177 - DNA, 423 bp, Zea mays
  Clone ID: LIB3150-001-Q1-N1-B8
gggaatggttggagacaaaacatagtgggagaataagggagtttagtgtagtaaaatatattaaaaaaatacagataaggggagatgtataggggaaatggttggagatggcatgagttcttattatcaattgggtctaaatttaatgtgtggtctttttgtttgatatttttttgttatttgtggccgaaagttcaaaagataaaaaggggaaaggggttgtgtaggctgtgacgttttttagtgaggttgttgtccttttatttatgttgcacgttgaagttgcttatctatgaatttgccctgtatgatgcacgatgctgtgctgtctcctgtaatgcaaggttgaaagatgtgaaattgtgtttcatggtttttttattaccccctaccctacaacacgtatatcttgttatctgattt

SEQ ID NO: 7178 - DNA, 423 bp, Zea mays
  Clone ID: LIB3150-001-Q1-N1-B9
agcagctagagctggtcttaagaaggtcgcgtgggatggctatctgaaacacaaccgccctagtcccaaacacaccgaagagaagcaacgcatattcgccgaatctgtcttgaggagactagaggagaaatgaagagacatcaaacactacaagcgcatttggttagtggtttaccgttcagctaccttgtaattcggttggctccccgaaaaaaaaaagtccgggacacgtcaagtgcccagctcagttttgttgtaaatttattagaaatttgacagaattggtagtgtgaacttaccaagaaaggaagaatagccgcatgtgttgtggctgttcattctatgattggttaggaattgacacttgaaacacggtactctattcagaggctgtgtccgtatttatgaatcgacgatgtaatg

SEQ ID NO: 7179 - DNA, 374 bp, Zea mays
  Clone ID: LIB3150-001-Q1-N1-C10
ttgctttgcttactacacgatcacatgcttgggatgatctcaaagattccagggcccacatacaacatgctcttttaaagtcatatgtcctcatacaagtccaaagatctttacatgagaatgcattgcgtctggaggatctcccaaccaacccatcttcttaatctacatcacaccctccagagtcctgtcaagacattagaccacaatctttgccttgtgaaatggtacttggaggaccaggtcgactatggcattttatatataaaagcatttatcttgaccaggatcgtgtatcataactttccctcactcataagtaacaaatagcagaagaatggattgtacatagcttaccaaaaattttatgcatt

SEQ ID NO: 7180 - DNA, 420 bp, Zea mays
  Clone ID: LIB3150-001-Q1-N1-C11
tcggtgcgaagcggggaagagggcgcccacctaaggttgtggttgctgggaaagagaagatgcaacaacctgaatctgtgcagtccgtggatgcttcattgactaagagagggcgtgggaggcccagaaaggagaaggcattggaaagtggcctcatgaaagcctcgcagatgactgagggtcaacgtgaagctctgactgcagaccaagctggggctgtccaaaatgaagtagaagatagggatttgcaatccttgggtactcctttgacagagaagagaggccgcggtcgtcctagaaagaggccgttggaaatcgaaactgcaaaagcaggggctgctaagcgtgggaggccaagaaaggagaagacatctgaaactggggccttgaaagttgcacagatgactgagggtcggcatg

SEQ ID NO: 7181 - DNA, 407 bp, Zea mays
  Clone ID: LIB3150-001-Q1-N1-C4
cctcgacctccgcgcgctcgtctcccacccgcgcctgctctccgccggcgcctcgctccttcacgcgctcccggccacgcgcccctacggcctcgtctgcggcgtaccctacaccgcgctccccatcgccggcgtcctatccgacaaccgctcaatccccatgctcatgcgccgaaaggaggtcaaggcccacggcaccgccaagtccatcgagggctccttcagccccggggacaccgacctcatcatcgaggacctcgtcaccagtggcgcctgcgggctcgagaccgtcgtcccgatccgtgccgaggggctcgtcgtcaccgacgccgtagtcgttgtcgaccgcgagcagggtggcagggagaacctgccgctaatgggatcacgctgcactcgctcatgac

SEQ ID NO: 7182 - DNA, 400 bp, Zea mays
  Clone ID: LIB3150-001-Q1-N1-C5
ttagataagccattccactcattcaaaaaaattgcacggtcactgggatacactgatgatgatcttcctttggtatcattccagtcagtttctaaaggctactacggagaatgtggaaaacgaggcggttatatggagataactggattcagtcctgaagtacgggaacaaatttacaaggtggcatcagtaaacctgtgctccaatgtttcggggcaaattcttgctagccttgtaatgaacccaccaaaggctggggatgaatcctttgaatccttcatgtcagagagggatggtatcctttcatcgttggctcggcgtgcaaaggctttggaagaaacattcaacagtttagaaggaattacatgcaacaaagccgaaggtgcaatgtatctgttcc

SEQ ID NO: 7183 - DNA, 388 bp, Zea mays
  Clone ID: LIB3150-001-Q1-N1-C6
tttacagcatgttcgggacctttatcgcgagtcactgaaaaaatatagaactgaaacagaaagtaaagacccagaaatagatacactttcatttactgagctgagggacaagctgcttgcccttgatcctctggataaagatcatgtggtgaaaatcaataaagcggaagctgagtattggaagaagtcagaagggtatcgcatgggctggagtgatgaaatactgggcttcgattgtggtgggcagcagtgggtttctgaaaactgcttccccactggaaccctagcaaagccaagtatgaaggatcttgattatatagataagctgctgcagttgattgaaaaggaggagatacccgcacctggacctattgagcagcgttggact

SEQ ID NO: 7184 - DNA, 331 bp, Zea mays
  Clone ID: LIB3150-001-Q1-N1-C7
atccgcagttcccccgcgcccgagacgcagccccgcgccaggagtaagtttgttcttttatcgatattatcgatatggcgagggaggagaatgtctacatggccaagctggctgagcaggccgaaaggtatgaagagatggttgagtatatggagaaggtggctaagactgtagatgtggaagagctcactgttgaggagcgtaacctcttgtcggtcgcatacaagaatgtgattggggctcgccgtgcttcatggcgcattgtctcttctattgaacagaaagaggagtcccgtaagaacgaagagcatgtgaaccttatcaaggaata

SEQ ID NO: 7185 - DNA, 405 bp, Zea mays
  Clone ID: LIB3150-001-Q1-N1-C8
gtggtaccagatgttcctttggaagagacagatgtcttgaggagtgaggctgccaaaaacaacctagagctggtgctattgacaacaccgactacaccaaatgaaagaatggagaaaattgcacaggcttcagaaggatttatttatcttgtaagcactgttggagttactggtacacgtgcaaatgtaagcggcaaggtgcaatctcttcttcaggatatcaagaaggtgacagaaaaacccgtggctgttggctttggtgtgtcgactccagagcatgtccggcagattgcaggatggggcgcagatggtgtgattatcggtagcgcagtgatgaaaaacgttggaggaagcttcttcttcagaaaaaggattgaagaagctagaagagttcgccaagaacct

SEQ ID NO: 7186 - DNA, 381 bp, Zea mays
  Clone ID: LIB3150-001-Q1-N1-C9
gttcctctagccgtctcgcgcagccacagcctccatttctcctccgacggcggtgcggctagctcaaccatggcggactccaaggccacctcggcggtcaccctccgcactcgcaagttcatgaccaaccgcctgctggcccgcaaacaatttgtgcttgaggttatccaccccggccgcgccaacgtctccaaggcggagttgaaggagaggcttgccaagatgtacgaggtgaaggaccccaacaccatcttcgtcttcaagttccgcacccacttcggtggaggcaagtccactggcttcggcctcatctacgataacctcgagtctgccaagaagttcgagcccaaataccgcctcatcaggaatggtcttgctact

SEQ ID NO: 7187 - DNA, 432 bp, Zea mays
  Clone ID: LIB3150-001-Q1-N1-D1
ctttaaatccaacccacccgtccgcaatatttaaaactgctcctctccgatagggagtcacttttggatgatcttgagggcgaaaattctaatcaaagtgattcaaatcatgtcacactagcaataagtattgaggacacaggtgtcgggataccactgcaagcacaagatcgtgtttttacaccgtttatgcaggctgacagttcaacttcaaggaattatggcggtactggcatcggtttaagcatcagcaagtgtctagctgaacttatgggtgggcagataagtttcactagccatccttctgttggaagcacgttcactttctcagccacactgaagcactcatacaaagatatttcggtcgattcaagtaggagcttgacagaggcactaccaactgcttttaagggaatgaaggccatcttggta

SEQ ID NO: 7188 - DNA, 228 bp, Zea mays
  Clone ID: LIB3150-001-Q1-N1-D11
ccgtcatcgatctcgtttcaaatccatcgagcctcgtttcctccgtcccgcagcatctcaaccccatggccaagatcaagatcgggatcaatgggttcggcaggatcggaaggctggtggccagggtggccctgcagagtgaccatgtcgagctcgtcgccgtgaacgaccccttcatcagaaccgactacatgacctacatgttcaaagaccacactttgcacggac

SEQ ID NO: 7189 - DNA, 394 bp, Zea mays
  Clone ID: LIB3150-001-Q1-N1-D12
gcggcgcgggcggacaaggagcaggcggaggaggagctgtgccaagccacaatgggtatctcgcgtgactcgatgcacaagcgccgggccaccggtggaaagcagaaggcctggaggaagaagcgaaagtatgagcttggtcgccagccagccaacaccaagttgtcaagcaataagacagtgaggagggtccgtgttcgtggaggtaatgtgaaatggagggctcttcgccttgatactggtaactactcatggggaagtgaagctgttacccgcaagacccgtatcctcgacgtggtctacaatgcatcaaacaatgagcttgtgaggacacaaacccttgtgaagagtgccattgaacaagtcgatgctgagctattcaagcggacatacc

SEQ ID NO: 7190 - DNA, 427 bp, Zea mays
  unsure at all n locations
  Clone ID: LIB3150-001-Q1-N1-D2
tctttaaaagccgaccaacccgtccgaaagagctaagctagattcatggcgctgctgaagacaggctccaagagcactctggttgtcgccgtcgtatggctgctgatagcaatccttgctacggctgatggcgctactcaaaagaagctccaaggggcctgcgaaaaaatagtgaaaggcgcctgtagtgagaaggtctgtggcggaatgtgcgctatgataggctccaacgctgttgggtcatgcaaggtcgatggccgggtctcctactgctgctgccaacaaaaaacccccacacacatcggtgtccactagctgggatctagcttgctttttgatccagacgtatgattgttgaactgaaatttttcgttattataagcaaagtgtatggttcgtgattggtctacaaataatacantgtacc

SEQ ID NO: 7191 - DNA, 381 bp, Zea mays
  Clone ID: LIB3150-001-Q1-N1-D4
cacgcttgccttatcttctcccgttcaccgcgccgtgcgcgcgcgcccccgcggcgacaaccgggcgaccgccgccgacctacgccaggtgccaagccgttcctcagtcccatcacgaggccttcaacgaacccttcgccggcgacgagaaagtacaatgtggtctaccggaactagaaaaggaagttgacgaaaagatagaccagttcagtgcatgggtggagaaacacccaaaccgcagaagccagatctgcctctcctttttcgacgagaaacacagacaccctggttggtttgtcaacaaaacagagcgcatctattgggagcaatggttcatcaatttgcaagtcatgttccccaaaagatacagcaagtcaaaca

SEQ ID NO: 7192 - DNA, 381 bp, Zea mays
  Clone ID: LIB3150-001-Q1-N1-D5
gcgcagaagaacccgatcgacaccatgagggtgttgctcgttgccctcgctctcctggctctcgctgcgagcgccacctccacgcatacaagcggcggctgcggctgccagccaccgccgccggttcatctaccgccgccggtgcatctgccacctccggttcacctgccacctccggtgcatctcccaccgccggtccacctgccgccgccggtccacctgccaccgccggtccatgtgccgccgccggttcatctgccgccgccaccatgccactaccctactcaaccgccccggcctcagcctcatccccagccacacccatgcccgtgccaacagccgcatccaagcccgtgccagctgcatggaacctgcggcgtt

SEQ ID NO: 7193 - DNA, 407 bp, Zea mays
  Clone ID: LIB3150-001-Q1-N1-D7
ggatcaatgggtggggcaggatcggaaggctggtggccagggtggccctgcagagtgacgatgtcgagctcgtcgccgtgaacgaccccttcatcagcaccgactacatgacctacatgttcaagtacgacactgtgcacggacagtggaagcaccatgaagtcaaggtgaaggactccaaaacccttctctttggtgagaaggaggttgctgtgtttggctgcaggaaccctgaggagatcccgtggggttcggttggtgctgaatatgttgttgagtctactggtgttttcactgaccaggagaaggctgcagctcacttgaagggtggtgccaagaaggttgtcatctctgctcctagcaaggatgcccccatgtttgtcgttggtgtcaacgagaaagagtac

SEQ ID NO: 7194 - DNA, 410 bp, Zea mays
  Clone ID: LIB3150-001-Q1-N1-D9
ggccaccaaggatgccggcgtcatctccgggctgaacgtgatgcgtatcatcaacgagcccaccgccgcggccattgcctacgggctcgacaaaaaggccaccagcagcggcgagaagaacgtgctcatcttcgacctcggtggtggcaccttcgatgtgtcgctcttgaccatcgaggagggcatcttcgaggtgaaggccaccgccggtgatacccatctgggtggggaggacttcgacaaccgcatggtcaaccacttcgtccaggagttcaagcgcaagcacaagaaggacatcagcggcaacccacgcgcgctgcggcgtctgcggacggcctgcgagcgggccaagcgcacgctgtcgtccaccgcgcagaccaccatcgagatcgactcgctgtacgagggca

SEQ ID NO: 7195 - DNA, 411 bp, Zea mays
  Clone ID: LIB3150-001-Q1-N1-E10
ctttgctcctcttcaaacgctcgagaaagagagagagagacgaaaccctccttcgaaaccctagcatagccactgccttcccgcacgctaggaaggggaagatatgggcgccgaggaggacgccgctgcacgccgcgagcgtctccgcgccctccgtgccgccaaggacctcctctccacccccgacggcgccccaaccccttccaccgacggagaacaccaaaatggcaaccatgagatggcagaagagccagaattaccaggtcctcaggatgcacctggtgaggctggtaaagaggatggtagccccactgaggaggccgaagaggttgaagatgatggtgagcttccagccatgaagttcagaaactaccttccccatgatgagcaacttcgaggaggcaagctggc

SEQ ID NO: 7196 - DNA, 420 bp, Zea mays
  Clone ID: LIB3150-001-Q1-N1-E11
cgctctcgtcccacccctcaccggccgccggtcgccgccggcatctcgcgtaccgcagatttgccgcagaagaatcagatccaaaccccgtatcttctcttcttccccctccttccccattgtccccgccgctgccatggccaccggcggcgccgcccccaccgcctccgatgccgggtccaagaagaagttgctcatcttcgactccgaggaggatctcgcggtttctcttgcgaagtacactgcggagctgtcggagaagttcgcggccgagaggggtgccttcaccgccgtgctctctggcggatccctcatcgaggcactcaggaagctgacggagccgccgtacctggattcagtggactggagcaagtggcacgtcttctgggtggatgagagggtcgtgcccaaagaccatgt

SEQ ID NO: 7197 - DNA, 394 bp, Zea mays
  Clone ID: LIB3150-001-Q1-N1-E3
gtcagtgccttggcacattttgcacgcttggaacacgcaaaggtacacgggtgatacacatttcttgattaagaccgttgaccctttttttaagaaggattgttctatcatcaagagtcactgatgaacgattgtgctcaacattctgaagagtgttttatttatgaaatatggtactagcatatattgtgtggatcatatacttaatgtctaaaaagaaaaactacgtcatattcatcttgacagaggatcaagcttacaggaaaatcaggctccgtgctgaagatgtgcaaggcaggaatgtgctcacaaacttttggggtatgaattttaccactgacaaactcagatccctagtgaagaagtggcagacattaatcgaagcccatgttta

SEQ ID NO: 7198 - DNA, 317 bp, Zea mays
  Clone ID: LIB3150-001-Q1-N1-E5
tgaccttctataaaccgctaggtgacgtaggcgacatttcaaaactctgtctggtcggactgcacacccatgtccaagaactacccacccgagtgcgctgagtacacagcggctgtgaacgcggtcacgctcaggccttcagccccaatctgggacatgagctgctcaccgctcatgctctccctggagtgtcactgcgtgggcacgttctacttttcgttgaggacctagactacattttgaacgatgatacactagtccgaattgtctcacagcactaacgcggagctggacatctcgatgcggatgatcaagcg

SEQ ID NO: 7199 - DNA, 414 bp, Zea mays
  Clone ID: LIB3150-001-Q1-N1-E6
ggcatacagagagtaaaggaggcaagtaggcggctccggcgagagaagtgcggctgcggccatggcggacaagccgagccgcgcgctggtcgtctacgccgccggccacgccgtggcgctcatccccccgccgggctccgcagccgcggggagccacctcgacgcgttcgcctcccgcgcctgctgcggccttctcaccctacgctccccgccgacttcccatcctacgaccggcaccgaggataatagcagcacgattttggaactggcgcagctgctcgacgtttacgatcatctctaccccggaaagaatgcggaaagtggtcaagaagttgcccaagtggatccacaggagctcgtggttcccaagctgtttgagaggtttatgggcctgagagctgccttggtcaccag

SEQ ID NO: 7200 - DNA, 391 bp, Zea mays
  Clone ID: LIB3150-001-Q1-N1-E7
gtgagaggatcagaggaggcatccgtgacgcaaagatcgagtagccaagaagaagagagatgaacgccgacttcggcgcgcccaaggagctcgcgggaggcctgcagcagcggcgggccctgtaccagccccgcctcccgccatgcctccagggaccgacggtaagggcggagtacggtgacgcgaccacaaccatcgatcccacctgtgcccaagccgtcgcgcaggccttcccgcacacctttggccagccgctcgtcagcttcgtcgcgccggccgccggcgccggcgccgttgaagagcgccacccgatcagggtgggcgtggtgttctctgggaggcagtcgccgggagggcacaacgtcgtctggggcctccatgacgcacttaa

SEQ ID NO: 7201 - DNA, 399 bp, Zea mays
  Clone ID: LIB3150-001-Q1-N1-E8
tctggagcacggaggcgaaggaggaggagcaggagcatcaggcggcgccgaggagcggcatcccactcagtgcttgcaaccatggctaggggattgaagaagcacttgaagaggctcaatgcgcccaagcattggatgctcgacaagcttggcggagcttttgctcccaagccatcttctggacctcacaagtccagggagtgccttcctctgatcctcatcatcaggaacaggctcaagtatgctctgaactaccgtgaggtcatttctatcctgatgcaacgccatgtacttgttgatggcaaggtcaggactgacaagacctaccctgctgggttcatggatgtcatttccatccctaagacaatggagaactacaggctgctttatgacaccaag

SEQ ID NO: 7202 - DNA, 327 bp, Zea mays
  Clone ID: LIB3150-001-Q1-N1-E9
tttcgacgctggagtcctgcgcctcgtccaaggcctgctcggcgctgctctggtacacgctgtacgcggacctgaagcttgcggagctggccgcgctgttcgcggccgacccgctgggcatcctggccgccaacgccatcgacttcgcggtcccggacccgggggaccgcatcctcccggcggggctcgcgctgcgcgtgccggtgccgtgcgcctgctccgacggcatccgcaaggccacctccgcccggtacgtggcgcggacgggggacacgctggcgtacgtggccggcagcgtctacggcggactcaccacggccgactgga

SEQ ID NO: 7203 - DNA, 404 bp, Zea mays
  Clone ID: LIB3150-001-Q1-N1-F1
ttaaaagtccaaccaacccgtccgtaagaatctggagcttcttctcacggcagggatcggctccgatcatattgatcttccagcagctgctgctgcgggcttaactgtggctgaggtcactggaagcaacactgtctctgtggcagaagatgagctcttgcgcattctgattctgctcaggaacttcttgcctgggtaccaacaggtagttcaaggcgaatggaacgtagcaggcattgcccatagagcttatgatcttgaaggaaaaactgttgggactgttggggctggtcgtattggcaggctcttgcttcagcgtcttaagccctttaactgcaacctgctttaccatgacagacttcagattgacccagagcttgagaaagaaattggggccaaatttg

SEQ ID NO: 7204 - DNA, 296 bp, Zea mays
  Clone ID: LIB3150-001-Q1-N1-F10
ttttgatcagggggggggtgcatattgactatgtctagctcgtcgccgtgaacgaccccttcatcagcaccgactacatgacctacatgttcaagtacgacactgtgcacggacagtggaagcaccatgaagtcaaggtgaaggactccaaaacccttctctttggtgagaaggaggttgctgtgtttggctgctagaaccctgaagagatccctgtgggttcgtgtggtgctgaatattttgttgagtctactgtggttttttactgaccttgaaaatgcttgtatctttacttt

SEQ ID NO: 7205 - DNA, 395 bp, Zea mays
  unsure at all n locations
  Clone ID: LIB3150-001-Q1-N1-F11
attagctttatctactccagagcgcagaagaacccgatcgacaccatgagggtgttgctcgttgccctcgctctcctggctctcgctgcgagcgccacctccacgcatacaagcggcggctgcggctgccagccaccgccgccggttcatctaccgccgccggtgcatctgccacctccggttcacctgccacctccggtgcatctcccaccgccggtccacctgccgccgccggtccacctgccaccgccggtccatgtgccgccgccggttcatctgccgccgccaccatgccactaccctactcaaccgccccggcctcagcctcatccccagccacacccatgcccgtgccaacagccgcatncaagcccgtgccagctgcagggaacctg

SEQ ID NO: 7206 - DNA, 420 bp, Zea mays
  Clone ID: LIB3150-001-Q1-N1-F4
ttcgggatcaatgggttcggcaggatcggaaggctggtggccagggtggccctgcagagtgacgatgtcgagctcgtcgccgtgaacgaccccttcatcagcaccgactacatgacctacatgttcaagtacgacactgtgcacggacagtggaagcaccatgaagtcaaggtgaaggactccaaaacccttctctttggtgagaaggaggttgctgtgtttggctgcaggaaccctgaggagatcccgtggggttcggttggtgctgaatatgttgttgagtctactggtgttttcactgaccaggagaaggctgcagctcacttgaagggtggtgccaagaaggttgtcatctctgctcctagcaaggatgcccccatgtttgtcgttggtgtcaacgagaaggagtacaagtctgac

SEQ ID NO: 7207 - DNA, 439 bp, Zea mays
  unsure at all n locations
  Clone ID: LIB3150-001-Q1-N1-F5
aaaaatactttgtgtggaagctttcaagaaatggagacgattcacagtggtggccctgttgcgttttagtgttagtcaacaggctttagagctaatatcagagttacattactttgcttatatctnggagggatnnagaagctagtgactttgatgctcttcatantgcaacagtggcagtcgatctttagttatccatcttcaagnctctgaggacatagcttannaccctgctgagctcccattcatgattgatcttgattatcacttcccaacattggggatatcgctggggaggagaaggtttaagggaagacattnaattcgttgggcagcttgagaaaaacaaagaaagtggacaaaaaatatttattgaggatgaagaatgctcatccacctactgcatttcatttaaagtgtccaatactgcagctgcacc

SEQ ID NO: 7208 - DNA, 224 bp, Zea mays
  Clone ID: LIB3150-001-Q1-N1-F8
tcgcgcggttgagcggaagttggcacaacccgcacccctgtgcatctaaaacgcttcttccgagtcccgacccgacagcataaagcatattcgagtgcgcacacgagcagacccccgcatacagccaggcacactcgtgcgaccatgtaccgggcggcggctgacatctcgaggtcctcatcaacactgcggacgcaggtcgcgcggggcgtggccggggagct

SEQ ID NO: 7209 - DNA, 391 bp, Zea mays
  Clone ID: LIB3150-001-Q1-N1-F9
tctggttatcagggaaaatgatatattatacgtcataatggaatacatggagtgtaatctctatcaacttatgaaagaaagggtcaagcctttctccgagtctgaagtccgcaactggtgttttcagatatttcaggctcttgcatacatgcaccagaggggctactttcatcgtgacctcaaacctgagaatctgttggttagcaaaggtgtcataaagctagcagactttggtcttgcaagggaagtctcatcattgccaccatatacagaatatgtctcaactcgctggtatcgggcaccagaagtcttgctccagtcatctgcttatgattctgcagttgatatgtgggcaatgggtgccataatggctgagcttgtgacactccat

SEQ ID NO: 7210 - DNA, 402 bp, Zea mays
  Clone ID: LIB3150-001-Q1-N1-G10
cgcgtgcgaaccaagcagaccacaacaagaagaagcgtagtcgtcgccggaaggaaaggcgcggagcaagatgtcgtggcaggcgtacgtcgacgagcacctgatgtgcgagatcgaaggacagcatctcagcgccgccgccatcgtcggtcacgacggcagcgtttgggcgcagtccgagagcttccccgagttaaagcctgaggaggttgctggtatcataaaggactttgatgaacctggtactcttgcaccaactggtcttttcgttggaggtacatagtacatggtgatccaaggtgaacctggagttgtcatccgaggaaagaagggcactgggggcattactatcaagaaaaccggcatgtccttgattattggtgtctacgacgagccaatgac

SEQ ID NO: 7211 - DNA, 417 bp, Zea mays
  Clone ID: LIB3150-001-Q1-N1-G11
ctccctgctcctccgcctccttcttgatggagccaagccagggatcgccatgtcggactcggaggagcaccacttcgaatcgaaggccgacgccggagcgtccaagacctacccgcagcaggctggcaccgtccgtaagaacggcttcatcgtcatcaagaaccgcccctgcaaggttgtggaggtttctacctcaaagactggtaagcatggccatgccaaatgccactttgttgccatagacatattcaacgggaaaaagctcgaagatattgttccttcgtcacacaactgtgatattccgcatgtgaaccgtactgagtaccagctgattgatatatcagaggatggatttgtgagccttcttacttcagatggcaacactaaggatgatcttagactcccaactgatgagac

SEQ ID NO: 7212 - DNA, 323 bp, Zea mays
  Clone ID: LIB3150-001-Q1-N1-G12
ttcggtcccttccatctcctagccgccggcggcgccgtcgccgccgctgcccggaaccctacctaccctcttctccccctcactctcctttcatctccattctaatggcggcccaacccgtccggcgaagctgctagtgcttgtatctactatcttcatcaggtacttcgcgatcctactgaagtattccccgccgccgctgccatggccaccctcaaccctttcgaactcctcggcggcggctgctgctcagaaagccgaggcgaataagtccgccgtggcgcctgctgggaaggctgcccagcctgcggcgaccaccaagt

SEQ ID NO: 7213 - DNA, 195 bp, Zea mays
  unsure at all n locations
  Clone ID: LIB3150-001-Q1-N1-G7
tgtctgataacaaattatactctaactgacgatgacttttgaagcaaagagggcttacttataccnaatcttaccccatatttttcttgttttcaaaaaagctcagttatgttcctgtacactcggactcagtcctacatttaatgattcaaatggaatccatattttttcacctaaaataaatttacaatatat

SEQ ID NO: 7214 - DNA, 338 bp, Zea mays
  unsure at all n locations
  Clone ID: LIB3150-001-Q1-N1-G8
gaagaccaagcgcacagcgccgaagtccgacgatgtttatctcaagctccttgtcaagctctaccgtttcttggtcaggaggaccaagagcaacttcaatgctgtcattctcaagaggctcttcatgagcaaaaccaatcgcccaccaatctccatgcgccgccttgtcaagttcatggaaggaaaggagaagaacattgctgtgattgttggcacagtcacagatgacaagaggatccaagaggttccagcaatgaaggttactgccctgaggttcaccgagacggcaagggccaggattgtcaatgctggtggngagtgcctcacatttgaccagc

SEQ ID NO: 7215 - DNA, 376 bp, Zea mays
  Clone ID: LIB3150-001-Q1-N1-G9
ttgctaaaacccgcgaactgaagcgactaggggaaggctgcggcggcggcggcgatggggagcgacctggagacggagaagaagaagaccccggtggcgctgatgcccatcgcgaagcccctcgctggaaagaagctctgcaagcggaccctcaagctcgtgcgacgagcctctgaggccaagtgcctcaagcgcggagtcaaagaggtagtcaagagcattcgccgcgggaacaaagggttgtgtgtgattgctggaaatatttctcctattgatgtgattacacacgttccaatactatgtgaggaatctaatgttccttacatatatgttccatcaaaagaggatcttgcgaccgcaggaaccactaagaggc

SEQ ID NO: 7216 - DNA, 228 bp, Zea mays
  unsure at all n locations
  Clone ID: LIB3150-001-Q1-N1-H1
aaacccaacacacctaaccaaccaaaggaaatttttaaaattcgccggggcgtgancaagagctagagatggacggtaggatgttcggtctcgagacccccctgatggaggcgctgcagcaccttctggacgtgcccgacggcgacgcctgctcggacggcgacaaggcaggctgcggcggtcccacgcgcacctacatccgctacgcgcgcgccatggctgtcaccc

SEQ ID NO: 7217 - DNA, 425 bp, Zea mays
  Clone ID: LIB3150-001-Q1-N1-H10
ttgtctcgctcccctctttgcgccgccccgagatccggcaccgcccgctgctcgaacccgcaccccacgcccgcaggccgggaccggtgggcgcgcgccgggcagtaggagggagaggaagggcggcatggcggcgccgccggcgagggcccgggccgactacgactaccttatcaagcttcttctcattggggatagcggtgttggcaagagttgcctcctgttgcggttctctgatggttccttcactacaagctttattaccacaattggtattgactttaagatacggacaatagaattggatggtaagcgtataaagctacagatttgggatacagcgggccaagaacgcttccgtactattaccactgcgtactaccgtggagctatgggtatcttgctggtttatgatggcaccgatg

SEQ ID NO: 7218 - DNA, 406 bp, Zea mays
  unsure at all n locations
  Clone ID: LIB3150-001-Q1-N1-H2
ttaaaagccacccaacccgtcttaaggccgcccgccgggcccgcctaaatccggccacgccgcccgcctccaccgtcgacctcctgaagaagtccgtcgccggccaggcagcggaggaagaggaggagaagtcagaagaagagagcggggcatctggggatgaggaaagctccgaggatgatattgatgaggaagccggggatcaagaggatgaaatgccgattgcacccgctgcagtggtgtctgaggatcgttccgtgacctatgaggagctgcgagaacgccttcaacgccgcattactgtgcttcgaggcaaccggtgcaccangcctgagttcttgaataagcccacgaaggagaagggtaagacgtcaaaggcgaagaatgaaaaaaggggcaaaggtga

SEQ ID NO: 7219 - DNA, 432 bp, Zea mays
  Clone ID: LIB3150-001-Q1-N1-H4
ctttaaagtcaacccacccgtcttttccggtcctcctttctctccgtagaaacgtttcccgacgggtgtttcccacgccggaatggaccagccggcaccataagcccaagattcgtttgatgagtttgtacgatactggctctacagttaggagaacacatttaatctaccttcactagcattcagtaatgcctttgcctaaatcagacctggggtcataactctttagtagagaaccaagaagatgcaggcatctagggcaaggcttttcaaggagtacaaggaggtacagcgagagaagtcagctgaccctgatatccaattaatatgtgatgattctaacatattcaagtggactgctcttatcaagggcccttctgaaacaccttatgaaggtggtgtgtttcaacttgcattcgcaattccagagca

SEQ ID NO: 7220 - DNA, 388 bp, Zea mays
  Clone ID: LIB3150-001-Q1-N1-H7
tcggtgcagagtgacatgaagctatggccttgcaaggtcatcccaggtcctggtgacaagcccatgattgtagtcaactacaagggcgaggagaagcagttcgctgctgaggagatatcctccatggtcctcatcaagatgaaggagattgctgaagcctaccttggttccaccatcaagaacgcagtggtgacagtgccggcctatttcaacgactcgcagaggcaggccaccaaggacgccggtgtcattgcgggcctcaatgtgatgcgtatcatcaacgagcccactgctgctgctattgcctacggtcttgacaagaaggccaccagctccggcgagaagaacgtgctcatcttcgaccttggcggtggcacgtttgatgtgt

SEQ ID NO: 7221 - DNA, 364 bp, Zea mays
  unsure at all n locations
  Clone ID: LIB3150-001-Q1-N1-H8
ttcccctccgagcctcagttcgcatccacgcgcgccgccgccgcctcgacgctcaccgcgcagccatggcggaacagactgagaaggctttcctcaagcagccaaaggttttcctcagctcaaagaaatccggcaagggtaagaagcctggcaagggcggcaaccgattctggaagagcattggccttggcttcaagactcccagggaagcaattgaagggacctacattgacaagaaatgcccattcactggaactgtttctatcagaggcagaattattgctgggacatgccacagtgctaagatgaacagaactatcattgttcgcaggaactacctncactttgtaaagaaataccagag

SEQ ID NO: 7222 - DNA, 365 bp, Zea mays
  Clone ID: LIB3150-001-Q1-N1-H9
gcctcattggtgagatcatcagccgttttgagaagaagggcttctacctcaaggccttgaagcttgtgaacgtggagaggtcgtttgctgagaagcactacgccgatctcgcctccaagcccttcttccagggcctcgtggactacatcatctctggccctgtggtggccatggtctgggagggcaagagcgtcgtcacaactggccgcaagatcattggcgccaccaaccccctggcttctgagcccggcaccatccgtggcgactttgctgtcgacattggcaggaatgtcattcatggaagtgacagcattgagagtgctaataaggagattgccctgtggttccccgagggccctgctgat

SEQ ID NO: 7223 - DNA, 323 bp, Zea mays
  Clone ID: LIB3150-002-Q1-N1-A10
cccatcggtcttcagtgtgcgcaacattgggaagactctcgtgtccaggacacagggtaccaggattgcctctgatggtctgaagcacagagtctttgaggtttgtctagctgatcttcagggtgacgaggatcaggcttacaggaaaatcaggctccgtgctgaagatgtgcaaggcaggaatgtgctcacaaacttctggggcatgaattttaccaccgataagctcagatctctagtaaagaagtggcagacattgattgaagcccatgttgatgtcaagacaaccgacaactacatgctgcgttttgtctgaatgggtt

SEQ ID NO: 7224 - DNA, 299 bp, Zea mays
  Clone ID: LIB3150-002-Q1-N1-A11
gaaatccatcgagaggccgtcgacaggggaattaatggcgtcgtcgtctagcagcagccaccgccgcctcatcctcgcagccgccgtcctgctctccgtgctcgcggctgccagcgccagcgccgggacctcctgcgtgccggggtgggccatcccgcacaacccgctcccgagctgccgctggtacgtgaccagccggacctgcggcatcgggccgcgcctcccgtggccggagctgaagaggagatgctgccgggagctggcggacatcccggcgtactgccggtgcacggcgctga

SEQ ID NO: 7225 - DNA, 366 bp, Zea mays
  Clone ID: LIB3150-002-Q1-N1-A12
gagatcccctcactgcattccctctgagcgccgccactccctgacatcgagaccggctgcccgaccccggtccggcgatccctctgcacccctttctttgcgctgccagccccaatctctcgcatccctgtcaaccatggcggcgtcagcaggcggaggcgcggtgcgcgcgctgtcccagaaggagcaggacatacagatgatgctcgcggccgacgtccacctcggcaccaagaactgcgatttccagatggagcggtatgtctttaagcgtcgcaccgacggcatctacatcatcaaccctgggcaagaacatgggataagctccagttggcggcaagggttatggttgccattgagaacccg

SEQ ID NO: 7226 - DNA, 332 bp, Zea mays
  Clone ID: LIB3150-002-Q1-N1-A4
ggatgtcagagccgtccaaggtaatccacatgggcaacgtcgggcacgagattgccgagtctgatctccttcagctgctgcagccgttcggcatggtctccaagatcgtcatgttgcgtgccaagaaccaagctcttctgcagatggaagacctccatgcttccgtgagcgcgctgcaatattacacttctgttcaacctagcataaggggaaggaatgtatacatgcagttctcatctaaccaagagcttaccactgactagagctctcatggaaggaatgctgatcaggggtccgaacccaaccgaatactgttagttgctatccaccat

SEQ ID NO: 7227 - DNA, 334 bp, Zea mays
  Clone ID: LIB3150-002-Q1-N1-B10
cagcgcacccgtgtggccgtcaggcgtgggatgcaccacctccgtcgcctcgtccgatctcccctccgccacgtccctccccgcgcggcattctccggcaggccctccgtttcccacggcaacgacgcgtatggtagctcccacgccgccgcttcagacgcgatcgcttgcctcgtcgtcgcaggcggcggaggcctcgaggccgacctcgaccgtctcttctcagccgtcctttcccacgggctcgtctgcagcgtccttcgagcgctcacggaccggggcgtccccgctgagcggttccttcgcggggccctaatccctcgggaggggcttt

SEQ ID NO: 7228 - DNA, 329 bp, Zea mays
  Clone ID: LIB3150-002-Q1-N1-B11
agccgagacaggggatagattgagagagaggcgcgcagatggcgacgccgtcgtcgtcgctttgctccagcttcgcctccctgcggaccgcctccatcggccacccccgtggcatcgcctcctccacgctcaggaaggcattccatgtgagggcatcagctcgggttgacaagttctcaaagagtgacatcatcgtgtccccttcgattctgtctgcaaactttgcgaagcttggtgatcaggtaaaagctgtggaggtggcaggatgcgactggattcatgtcgatgtcatggacggccgctttgtgccaaacataacatttggaccc

SEQ ID NO: 7229 - DNA, 296 bp, Zea mays
  Clone ID: LIB3150-002-Q1-N1-B12
cgttgaagttcctacgtactctaaccctgtgaccactgctctgcaacctagagagcagacctggcaaggcatgagaacaactgctgagttgcggaaggcacacaatatccctaccccacacaacaaggattcagtttacaagcctatcgagcggaaaccacgcaagttcaatcccgtcgagatccccgcaaagctgcaacagttacttccttttaaatctaagcctaaggacacagcgaagcaaaaaaaaagcaccagttgaaaacagggtgcctgtaatcatgcagcctagtgag

SEQ ID NO: 7230 - DNA, 361 bp, Zea mays
  Clone ID: LIB3150-002-Q1-N1-B7
gttggtatcgcaccttatttaattcatgtttagtgcggagactggttgggctgccgccaactgccggggccttcgccgacctcttcgccggcgaagaggtcccatcaggagaaggagtagatcgtcgacccagaaccctcgctgatggcgactttcgcgaaacctgagaacgcgctgaagagagccgaagaattaatccatgttggtcaaaagcagtcagccctgcaggctttacatgatctcattacctcgaaaaggtacaggtcatggcagaagcctctcgaaaagatcatgatgaagtatgtagaactctgtgttgacctgaggaaaggcagatttgcaaaagatggtcttattcagt

SEQ ID NO: 7231 - DNA, 356 bp, Zea mays
  Clone ID: LIB3150-002-Q1-N1-B9
ctttgcttactacacgatcagatgctttggatgatctcaaagattccagggcccacattcaaaatgctcttttaaagtcaaatgtcctcatcgaagtccaaagatctttacatgagaatgcattgcgtgttgaggatctcccaaccaacccgtcttctcaatctgcatcacaccctccagagtcctctcaagacattagttcacaatctttgtcttctgaaatggcaattggaggaccaggtggactatggcatcttatatataaaagcattaacctggaccagttgggtattaaaaatttccttaaccactaggtaccaaaaaccaaagaaaggaatggtccaaagttaaccaaa

SEQ ID NO: 7232 - DNA, 264 bp, Zea mays
  Clone ID: LIB3150-002-Q1-N1-C10
gatggatagaaggaacatatcaatcccaactcatcgacagcactcccccaaaaaccgcagagctgaaacacaaccatgcggagcgcgtcggcgccggggcccgcgcgtacctttacgccgttctagagcatatcgccgccgaggtgctggagctggccgggaacgctgatcgggacaacaggaagaaccgtatcgtgccgtgccacatacagctggcggtgcggaacgacgaggagctgagcaggctgttgtgcactgtgacga

SEQ ID NO: 7233 - DNA, 299 bp, Zea mays
  Clone ID: LIB3150-002-Q1-N1-C11
gttccgtgtggtaacactgttgctatggttggtctggatcagttcatcacgaagaatgctacactcactaatgagaaggagactgacgcttgcccaatcagagcaatgaagttctccgtctctcctgttgtgcgtgttgctgttcagtgcaaggttgcctctgaccttcccaagctagtcgaaggtttgaagcgtctagcaaagtccgatcctatggttctctgtacaatggaagaatctggtgagcatatcattgctggagctggtgagcttcatcttgagatttgcctgaaggatct

SEQ ID NO: 7234 - DNA, 300 bp, Zea mays
  Clone ID: LIB3150-002-Q1-N1-C12
ccgcgccccaccgcttccccgttccccagcccgaccgactgctccccctcccccgcaccagcctcaaggcatcgccggcgccgcaacatcgctgaggaagcccgcacccctgcccggatccgatggccaacagcaacctcccgcggcggatcatcaaggagactcagcggctgctcagcgagccagcaccggggatcagcgcgtcgccctcggaggagaacatgcgctacttcaacgttatggtccttgtgccggcgcagtcgccctatgaaggtggagtttttaaactcgaactctttt

SEQ ID NO: 7235 - DNA, 342 bp, Zea mays
  Clone ID: LIB3150-002-Q1-N1-C3
gttgatgatagttactcagctgacggtgttgaagattcacaactattcctctccgtgccagctttaaaccaagctgcatcttatcttgcccagacagcttcattcctcacccaatgcctccctgtacctggttttgtgggtctatctgaggagggccaagaggttattaacactgccacctgcatcggcttcaggcagactttctgttcagacttcttcagtagagccttccggtaccaattcatcccttggtcagtcagattgtggtggaaacccctctcaagaaaacgctggacagatggtgccttcgcatgtttttcagaatggagcttcactgttcca

SEQ ID NO: 7236 - DNA, 246 bp, Zea mays
  Clone ID: LIB3150-002-Q1-N1-C4
gccgtgcgataaatcaagggagcaaatgcgcctaaaaaaggaactttctaggccgataatcaactttaagaaggttgaagaaaaataactgagggaccaccagaatgcaaactggaagtaaatggtggaggaatatgttgaatcaacctgcagaccctaccttatggatgtcatatactgtgggccaaggggagccacctttgcggaggtgatggaaatgaccgacttatttgaaggaagtgtcat

SEQ ID NO: 7237 - DNA, 290 bp, Zea mays
  Clone ID: LIB3150-002-Q1-N1-C5
acgttaattgttgttatcgcaccttaataaattcatgtttagcaaaaaaaaaaaaagggaaaaaaaaaaaaaaaaaaaaaagaaaaaaaaaaaaaaaaaagaagataataaagaaaaaaaaaaaaaaaaatgaaaaataaaaagtaagtcaaaaaaaaaaaaaagtttatatatacagagggccaagagttagttattacataaaggaggaattgaattaaggcaaaattgggggggtatccttgatataaaagagtcgttaagctttccaattgaaatatttttccatt

SEQ ID NO: 7238 - DNA, 284 bp, Zea mays
  Clone ID: LIB3150-002-Q1-N1-C6
cggagatcccctcactgcattccctctgagcgccgccactccctgacatcgagaccggctgcccgaccccggtccggcgatccctctgcacccctttctttgcgctgccagccccaatctctcgcatccctgtcaaccatggcggcgtcagcaggcggaggcgcggtgcgcgcgctgtcccagagggagcaggacatacagatgatgctcgcggccgacgtccacctcggcaccaagaactgcgatttccagatggagcggtatgtctttaagcgtcgcaccga

SEQ ID NO: 7239 - DNA, 406 bp, Zea mays
  Clone ID: LIB3150-002-Q1-N1-C7
gtccgcgatcggagaagatggtgcgcaaggcaaaggttgagttcgatgagcaggcaccggataacttcgacccgaagaacccatatgcggacccggtggctatgctggagtaccgggaacacctggtgcgggagaagtggatccagatcgagaccgccaagatcatccgggagcgcctccgctggtgctaccgcatcgaggggatcaaccaccaccagaagtgccgccacctcgtggaccagtacctagaggctacacgcggcgtgggttggggcaaagatgcccgaccgcccgagttacacggtccgaatcccttcatgcctcgtcttaccctttgatcggcatgatcgataggtctatatggctgcttcttctctggttcgcagagcccaagaagatcatcgag

SEQ ID NO: 7240 - DNA, 267 bp, Zea mays
  Clone ID: LIB3150-002-Q1-N1-C8
tagggatgctgaagagtgcaagaatggccgtgaccgtcaaaaggatcggaggccacgggcagaagaagtaattgcagatatcgcagagcatctgaccaccatacacttgtcacgatgcggacgaggaaagcgttgcttatacgaaggatctaccccacctgaaggttttcccaacaactggagcggcgcgtcgtactgtacgtcagatctgtccatccacagaaacggcgaattacatatctgggacaaaggttttgacgactaagg

SEQ ID NO: 7241 - DNA, 284 bp, Zea mays
  Clone ID: LIB3150-002-Q1-N1-C9
ccgaggatccacttcatgctttcttcgtacgctccagtcatctctgctgagaaggcctaccacgagcagctctctgtggctgagatcaccaacagtgccttcgagccatcttccatgatggccaagtgcgacccacgccatggcaagtacatggcctgctgcctcatgtaccgtggtgatgtggtccccaaggatgtgaatgctgctgtggccaccatcaagaccaaacgcaccatccagttcgtggattggtgcccgactggcttcaagtgcggcatcaacta

SEQ ID NO: 7242 - DNA, 251 bp, Zea mays
  Clone ID: LIB3150-002-Q1-N1-D10
tgctctccccaattctaagcgagacggggcgacaggaagaggagagcctaaaaccctaaccccccgaatcggatccggccgccggagcgcggaaccccaccccggccgccatggagatgggagggatgagcgacgctgagcggctgttcttcttcgagatggcctgcaagaactccgaggtcgcgtacgagcagaaccccaacgacgccgacaacctgacgcggtggggcggcgcgctgctggagctgtcg

SEQ ID NO: 7243 - DNA, 237 bp, Zea mays
  Clone ID: LIB3150-002-Q1-N1-D11
cccacgcgtccggccacactccgctgctgcgccatggcgatccgctccaaggcctgcatctcgctgctgctcgcgctgaccgtcgctctctccgcccgggcggaggaggagcccgccgccgcggcggagggcgaggccgtgctcaccctcgacgtcgacagcttctacgaggccgtcgccaagcaccccttcatggtcgtcgagttctacgccctctggtgtgggcactgcaagaaa

SEQ ID NO: 7244 - DNA, 258 bp, Zea mays
  Clone ID: LIB3150-002-Q1-N1-D12
gggaaatggggaagggagcgcaagggagcgatgcggcggcggcgggcggcgaggtggaggagaacatggcggcgtgctcgtggtgggcgccggccccatcggcctggtgtcgctgctggcggcgcgggccttcggcgcgccgcgcgtggtggtcgtggatgtggacgaccaccgcctggccgtggccaggtcgctgggcgcggacgcggccgtgcgggtgtcgccccgcgcggaggacctgtcggacgatgtggagcg

SEQ ID NO: 7245 - DNA, 291 bp, Zea mays
  Clone ID: LIB3150-002-Q1-N1-D2
gcgagtagcacctgccctgataaaggaacacgcataactgtgggtgaccgatgtaccctccgagatgaacacgtgcttgatcgaaccagaggactaccagtatttgctggaggcgctgaacaccaacgtggatgggaagcagaagatcatgtttgccatgacctcaatcaagggtgtcgggcgccgcttctccaacatcgtctgcaagaaggccgacatggacatgaacaagagggccggcgagctgactcctgatgagctggagcgcctgatgacggtcgttggccaacc

SEQ ID NO: 7246 - DNA, 111 bp, Zea mays
  Clone ID: LIB3150-002-Q1-N1-D3
tcgtcttcaagaaggaaaaggtgttccttgccggccatgacgagtatatcgtgaggggagtaaaagatctccaccatgtccaaccggaagttctttttggaatcaaacaca

SEQ ID NO: 7247 - DNA, 276 bp, Zea mays
  Clone ID: LIB3150-002-Q1-N1-D4
tttataataaaaaaaaaaaaaaaaaataaaaggggaaaaaaaaaaaaaaaaaaaaaaaaaaaaaaagggtggaaagaccaagaaaatataaaaacgaaacatacaagcgggccaactttccgtgtagggaggtggatttgagcttgggggaattatgggcatagttgtttcctgagtgaaattgttctccggttttattatcacactatgtttgatccggttttgtacagtgttaattctggggtgcttaatgagggggcttacttacattaattg

SEQ ID NO: 7248 - DNA, 270 bp, Zea mays
  Clone ID: LIB3150-002-Q1-N1-D7
ccgtcttcaagaaggaaaaggtgtccctggccggccatgaggagtatattgtgaggggtgggagggatctgttcccgctgttaccggaagctttttagggaatcaaacacatcggcctaatctcctggggctagcagggtcctacgccaggtcataactcgacacactcacttgctgatgctaactcagaagtgcgggctccgactatgacaacgaggaggtggacagctcgtcaggcacccctgacatctgccgtcactcccacacagc

SEQ ID NO: 7249 - DNA, 172 bp, Zea mays
  unsure at all n locations
  Clone ID: LIB3150-002-Q1-N1-D8
tttattaatgggggtattatttttntttataagggaaaaaaataaaaaaaaaaaaaaaaaaaaaaagggcgagttaccaagaaaaaaataaaccgaatcctacaagcggtccacctttcccttttttgaccccactttgtttgttgtgcgaactcatgggcatatttttttt

SEQ ID NO: 7250 - DNA, 253 bp, Zea mays
  Clone ID: LIB3150-002-Q1-N1-D9
tatcctcgtgacggctcctcgccagtcgcggcgtctctccctgccgcgtcgcctcgtctctccctgccgcgtcgcctccagttccgacgccagcgcgcctcccgcctccgccgcgcctgacgaacgcagtgtaggactgtgcaggtagagaggaggagggtccggcgagatggggatgcgagataagaagcggaaccagaagcgagtgctcgcgcgccgtaccgcggtaccgcgcccaggcgagggcaaggac

SEQ ID NO: 7251 - DNA, 276 bp, Zea mays
  Clone ID: LIB3150-002-Q1-N1-E10
gacacagcgctctcactagcctcgcattgcgtccctgcagtgcaggggcaggccggtgaggtctgggagaggaggaggaggaggagatggccggtagggagagcggcgggatggcggcggcgctgcgctgcgctggaaggatcgggatcctggccaccgtcgcagtgaacctcgcgtggatcgcgacgtacatccgccggcgctacttcggcggcgggaaccgatccgacaacaacggtggcggcggggaagtggaaccgtcaaaaaggaaacccg

SEQ ID NO: 7252 - DNA, 270 bp, Zea mays
  Clone ID: LIB3150-002-Q1-N1-E11
ggcagttcgagctggataagatccggcaggagctcaacgctaccagcaagaagatcggcaagctcaaagccagcaaacaagaagaggaagcgaagaagctcatggagagcacagacgaaattaagaaaaggttggcagccaaagaagttgaggtgcaggaggccaagagcaccctcgacgccaaggtcacgacgattggcaacatcgtgcatgagtccgtgccagtcagcgacgacgaggcaaacaataaaattgtacggacatttggag

SEQ ID NO: 7253 - DNA, 336 bp, Zea mays
  Clone ID: LIB3150-002-Q1-N1-E12
acaagttcgagcccattcacatcatcccctagtaccacaatgtttgggcaaacaggtgtttctacactttcagcaagtaattcgccatcattgtttggaaataccaatccaactcctgttacatcatcattatttgccacatcagtgacaaataatccaagtccattcggcactggctcattattcgctaacactcaatcagccccattatttccctcagcatttgctcaaccgacatcaagtacaccggctttctcctctggcagcctatttggctcaactaatccgggcagtctggttaacaacaacggtccttcacttttttcaacaccaaca

SEQ ID NO: 7254 - DNA, 349 bp, Zea mays
  Clone ID: LIB3150-002-Q1-N1-E2
gctttgactgatgaaggcgaagttctctcttgggggcatggtgggcatggtcaacttgggcatcccacccttcaaaatcatagagtcccacttgccatcaaagctttatcagatgagcgaattgtccatatagcctgtggaggatcaacctctgctgctatatcagagaaaggtgacttgtacatgtggggaaatgcaagagactgccagctaggcatccctggtctgccagaagttcagccactcccagtcaaggtgattttcctcagagacgatgatgaagggttgggcccttctcgtgtcatctccgttgcaataggagcctcccatgccatgtgcttggtctcca

SEQ ID NO: 7255 - DNA, 144 bp, Zea mays
  Clone ID: LIB3150-002-Q1-N1-E3
tggggccactttacccaaacgccaacacggggagccccttatacacagagaacatgcgcacaacgcgcagaaagcgcccaacgtgattaatgctcctcacgagaagaagctttacgtggttaagaaggcagcagcgcatcctcc

SEQ ID NO: 7256 - DNA, 408 bp, Zea mays
  Clone ID: LIB3150-002-Q1-N1-E4
cttccgaagtgcaacacgagtgtatccctcaagccattcttggaatggatgtcatctgtcaagctaaatctgggatggggaaaactgctgtttttgtcctttcatccctccaacaaattgaccctgttgcgggtcaggtagcagcacttgtactgtgccacacaagggaactggcttatcagatatgccacgaatttgagaggttcagcaaatatcttactgaagttaaagttgctgtccttctatggaggtgttcacatcaggaagcataaagatttgttgaagaatgaatgccctcatattgtggttggcacgcctggtaggatacttgctcttgccagggataaggatctctccttgaagaatgtgaggcacttcattcttgatgaatgtgacaaaatgctggaa

SEQ ID NO: 7257 - DNA, 94 bp, Zea mays
  Clone ID: LIB3150-002-Q1-N1-E5
tcctgacccgagcaccgacgccgctgtattctgtcggtgccgacccactccccccagaccccaggagggggagccgccttatacacacggaact

SEQ ID NO: 7258 - DNA, 348 bp, Zea mays
  Clone ID: LIB3150-002-Q1-N1-E6
cgctgcgccgccgcctccgacatcgtcccttcgtccccacgagcaaccgataatccgccggcgttgagatgttggtttatcaggatctcctatctggcgacgagctcctgtcggattcattcacctacaaggagctcgagaacggcgtcctgtgggaggtcgagggaaagtgggtcacccaaggtcctgttgatgtggacattggtgccaatccattcgccgagggtggtgaggacgaaagcgttgatgacacagctgtgaaggtggttgatattgttgacaaaattcgtctacaggaggcaccttcttttgacaagaaatcatttgggttttacatcaaaaaataca

SEQ ID NO: 7259 - DNA, 328 bp, Zea mays
  Clone ID: LIB3150-002-Q1-N1-E8
cccgcgcgaggtcgcctgcgtggtggtcgacgggcagtggtacaagatgctgggcgcggccacgcgtgtcgctgtccccgcgctcgtgctgcgcgccgacggcgccgccacgtttctcagcatgctcgccaccccgcgcctccgcgccgacggctacctccccatcaaagaagagcggctggacgaggtggtgccgggcctggagcccctgcgcgtgcgggacctgatccgcgtggacggcagcgacgacgagacggtgctccgtttcatcacccgcaacgccgaggccgtgcaggcctcgtcgtcaggcgtggtgctgaacacgttc

SEQ ID NO: 7260 - DNA, 310 bp, Zea mays
  Clone ID: LIB3150-002-Q1-N1-E9
gcacaggttgggagatacaagagcccagatgagcaccctttctttcctgaggatctgcctgagccccggttgccacctatgcagtacccaagggttttgcatcccattgccgattctatcaatatcaacaaagagatttggaaaatgtattttgatgaacttcttccaagattggtgaaaaaaggaagtgatggtaatgctggatccagtgctctttgtgacacgacctgcttgcaagcgctctccaaaaggatccactatgggaaagttgtggcaaaagctaaagttcaagaatccccggaagcttaca

SEQ ID NO: 7261 - DNA, 157 bp, Zea mays
  Clone ID: LIB3150-002-Q1-N1-F1
ctaggacggtttcagctatgccagttatgaggttatgggcttggatgccactgctctgtcttatggtgaccttgtcaagagggtccttcggtgctttggcccctcggagttttccgttgccgtgaccatcttcggcgggcgtggccatgccgggaca

SEQ ID NO: 7262 - DNA, 270 bp, Zea mays
  Clone ID: LIB3150-002-Q1-N1-F10
attctgtggactttctgttcgagcttacgaatgataatcgtcaactggttttcctttatgagagaggaaaaaagaaactcatggatggtgcccggatagcatttactgacgatgtagatccatcctctatcgccgggaggattgttgaatgctcctggaataaggaagaacagtgttggtcctgtatgcgtattacaatctgataatctactccaaacgacatcaacacataccggaaggggatgaagagtatcacaaataacattaccg

SEQ ID NO: 7263 - DNA, 176 bp, Zea mays
  Clone ID: LIB3150-002-Q1-N1-F11
ccaacaaactactaacctgcccgaagcgggaggcgtacgtcgcgtccgtgggagcacaccctacaactgaccagaaggatgctaccagcactgaggacgactcaaaggctttagctagtgcggcgcacatacttcgcgaagttctccagacctttgacagtgaacgctgtaccggg

SEQ ID NO: 7264 - DNA, 390 bp, Zea mays
  Clone ID: LIB3150-002-Q1-N1-F2
cgcatacgcacccaggagatacagcgagcgagcgaccaaagccatggctctccgcaccctgtcatcgaagaaggtcctatccttcccgttcggcggcgcgggccggccgttggcggcggcggcgtctgcgaggggggtgacgacggtcacactccccgacctctcctacgacttcggcgcgctggaaccggccatctcgggggagatcatgcgcttgcaccaccaaaagcaccacgccacctacgtcggcaactacaacaaggcgctggagcagcttgacactgccgtctgcaagggcgacgccttcgctgtcgtccagctgcagggcgccatcaagttcaacggcggcggtcatgtgaaccattcaatcttctggaagaacctcaaccc

SEQ ID NO: 7265 - DNA, 330 bp, Zea mays
  Clone ID: LIB3150-002-Q1-N1-F3
ctcttcgaaatcaaggtagcgtacaccgctgcagattctagagccctctctgccactcgtgatcccactagtcacaatgcctgccctcgccaagcccgcctcccgcaccgccaagcccgccgcggctccgaagccgaagcctgtcgccgccaagccgaaggcggccaccgctggtgcctcccacccgccttacttcgagatgatcaaggaggctatcacggcgctcaaggagaggaccggctccagctcgcaagcgatcgccaagtatgtgggggacaagcacggcgcgtctttgcctgccaacttcaagaagatgctttccatccagct

SEQ ID NO: 7266 - DNA, 368 bp, Zea mays
  unsure at all n locations
  Clone ID: LIB3150-002-Q1-N1-F4
atcagatctagcagaactctctcgacctcatcggcgttggcggagcgcgtgttgaccggagatggcgccgagcgggtggaggaggagcgcggcggcgcgggtcgcctggcgcccggccacggtttgcctgtggctcgcgctcgccgccgccgcactgacgctcgcccaggcttaaaaggaccttgacggaggttacccacaaggtctactttcgacatcgagatcgacggcaagcccgcaggccggattgtcatggngctttttgggaagactgttcctaagacggcagagaacttccgagctctttgcacaagagaagaaaggggttggcaagagtggcaaagccctccactacaagggaagtaagt

SEQ ID NO: 7267 - DNA, 322 bp, Zea mays
  Clone ID: LIB3150-002-Q1-N1-F5
cgtcgctcgtaaaatggaggtcgcgacagtgacggaggcgtatgcgccggcggcaagcggcggcgcggcgcggcagagccacccgttcccgtggctagacgctgccatctcggagccctactacttcctgcaccttctaggcttcttgtcttactttgcggaccgcagagcggcgctcttcggcaacgacggaggggagctctacgaccgcctcctccgtagggagagccacgcagcgctcgtgttcctggtgctcttcgtagcgaagattgtgaaagaggaaacctgcgaagcagacattgctggctctctgctttatacg

SEQ ID NO: 7268 - DNA, 366 bp, Zea mays
  Clone ID: LIB3150-002-Q1-N1-F6
cttccagaagggaacatcgaggacattgtaagtgaattatgtgctgagacgggagccaaccaggaggatgccctcgcgcgaattgaaaagctttcagaagtaaacccgatgcttggcttccgtgggtgcaggcttggtatatcgtaccctgaattgacagagatgcaagcccgggccatttttgaagctgctatagcaatgaccaaccagggtgttcaagtgttcccagagataatggttcctcttgttggaacaccacaggaactggggcatcaagtgactcttatccgccaagttgctgagaaagtgttcgccaatgtgggcaagacttatcggtacaaaagtggaacaatgattgagatcccc

SEQ ID NO: 7269 - DNA, 189 bp, Zea mays
  Clone ID: LIB3150-002-Q1-N1-F7
cgatggaggcgccggacgaggaggccgggctggggctccctgaaggcgagcggcttctggaggtggccctcatcttcgggcaggggctcaagcccccgtccggcgtgcggcggcggctgcaggcgtaccccgtggcctgggtcgacgcggggcacaagcttcagacccttcccgacgccacgggcgggc

SEQ ID NO: 7270 - DNA, 266 bp, Zea mays
  Clone ID: LIB3150-002-Q1-N1-G10
ctcgcgtacgcgacaaactaggccgaccggcgccgccctacgctcagctgcccacctgccctggtcttcgactcttcgtcgtgcgctttgccggcggcgagcacccatcacaccaggatggcgctaaggggggtctggcagctgcagaagctcgtggtaaactactgcgactggggagggagcagcaggggcatcagggccttcatggaggcacatcttccagcctttaaggaaaagaatccacacttagaggtggtgacagagct

SEQ ID NO: 7271 - DNA, 274 bp, Zea mays
  unsure at all n locations
  Clone ID: LIB3150-002-Q1-N1-G11
ctcatcctgccatccaccagcagcagtgcgaagcagcatatggcgcgccgtgccagcctgctcctcgccgcggcgctgctcgtcgccgtcgctgccgcggcggtgccgccgacgtgcgagcgcatcgagtgcccggcgtacgaggtggtggacagcgccaacgggttcgagatccggcggtacacggacgccatgtggatcaccacggcgcccatcgaggacatctccttcgtcgccgccacgcgcaccggctttctncagctgttcgactaca

SEQ ID NO: 7272 - DNA, 274 bp, Zea mays
  Clone ID: LIB3150-002-Q1-N1-G12
tctcgtttcaaatccatccatcctcgctgcctccgtcccgcagcatgtcaaccccatggccaagatcaagatcgggatcaatgggttcggcaggatcggaaggctggtggccagggtggccctgcagagtgacgatgtcgagctcgtcgtcgtgaacgaccccttcatcagcaacgactacatgacctacatgtttctagtcgacactgtgcacggacagtggaagcaccatgaagtcaatgtgaaagactccaaaacccttctctttggtgag

SEQ ID NO: 7273 - DNA, 290 bp, Zea mays
  Clone ID: LIB3150-002-Q1-N1-G2
gcgatgtaacctaggacaacgccgtacgacgaaacgcatctaggagagcacgcgagggagcgaccatggggcccaacgggaagaagaagagcatgaggaggctcatcagcaagcgcacaaagatgaggcgcacatccaatgtaggcacatcgacgatggactgaggacctgatgacatgcgagggtacatgcatttgttacgatgcatggctacgcctgcagagagattccaccctagcacggaggcacggttcgccttcagctgaacgggatgactgcacttaagacgg

SEQ ID NO: 7274 - DNA, 386 bp, Zea mays
  unsure at all n locations
  Clone ID: LIB3150-002-Q1-N1-G4
ggaagctttcctaaatgttgtcctcgtacataaagcaagtgcaaatggcacactagaagatatatcatcactgtctgctgcaagctgctgtagtcttgaccagctactagtttgtgttgagggagaggcacagaatatatttaatgacatccataatttgttaaccatccaccgaagcgaaatgacgcacttcactcaagaattaagggagagtttccaaataagcttggataggacaaaagaaatgtccacctatattattggggctctttgacaagtacgttgaggaaacctccaaattgcacagtcactcaaataatactcatgaagcacaaatgaaaagcattgaagactntcagatggtttatgaggagcaatcaaaatca

SEQ ID NO: 7275 - DNA, 372 bp, Zea mays
  Clone ID: LIB3150-002-Q1-N1-G6
gtcagccgccgtgcctgttctctctgcctttctaaaagtgcggcgactggttgggctgccgccgactgccggggccttcgccgacctcttcgccggcgaagaggtcccatcaggagaaggagtagatcgtcgacccagaaccctcgctgatggcgactttcgcgaaacctgagaacgcgctgaagagagccgaagaattaatccatgttggtcaaaagcagtcagccctgcaggctttacatgatctcattacctcgaaaaggtacaggtcatggcagaagcctctcgaaaagatcatgatgaagtatgtagaactctgtgttgacctgaggaaaggcagatttgcaaaagatggtcttattcagtatagga

SEQ ID NO: 7276 - DNA, 300 bp, Zea mays
  Clone ID: LIB3150-002-Q1-N1-G7
gcagacccctccccttcgcttcctttcctagcgccgacgcccaccagacgagatggccccgaagaaggacaaggccccgccgccgtcgtcgaagccggccaagtccggtggtggcaagcaaaagaagaagaagtggagcaagggaaagctaaaggagaaggtaaacaacgcggtgctgttcgaccaggctacctacgacaagctgctctcggaggtgcccaagtacaagcaaatcaccccttccatcctctccgagcgtctgaggatcaacggctcccttgttcggagggccatcaagga

SEQ ID NO: 7277 - DNA, 391 bp, Zea mays
  Clone ID: LIB3150-002-Q1-N1-G8
aaaaaatccaaagcgaggatgccaccccacccccaatctcctcggatgtacaaaaatcactaagggaggaggctgataaggctgtgactgcataccacaacaagcgcacactacctgcccatcaagagacttgtgcacattatcgatttagctcttagtatgtttctttccttttcatcctcaggatccatttttctggtatttgtcccaaaccatttctgttaacatattttcactaactactgtattttttgtttatcttgttttcatactttgctacctgtggtggactggtggtaaagtgaaccaggaacaatttgatttcaaatatacagttttggtttgattttatggcacttctccttgatgttttgtttcggttaccattaat

SEQ ID NO: 7278 - DNA, 330 bp, Zea mays
  Clone ID: LIB3150-002-Q1-N1-G9
tctcgtttcaaatccatccatcctcgtttgctccgtcccgcagcatctcaaccccatggccaagatcaagatcgggatcaatgggttcggcaggatcggaaggctggtggccagggtggccctgcagagtgacgatgtcgagctcgtcgccgtgaacgaccccttcatcagcaccgactacatgacctacatgttcaagtacgacactgtgcacggacagtggaagcaccatgaagtcaaggtgaatgactccaaaacccttctctttggtgagaaggacggtgctgtgtttggctgcaggacccctgaggagatcccgtggggttcggt

SEQ ID NO: 7279 - DNA, 311 bp, Zea mays
  Clone ID: LIB3150-002-Q1-N1-H10
gccgccgccgccgccgccgcagcatcaagccgccgccccgccgtcgcctgaggtagacaccaatccgccgccatggggcgtatgcacagccgcgggaagggtatctcatcgtcggcgctgccgtacaagaggacgcctcctacctggctcaagaccgcagcctccgacgtggaggagatgatcactaaggcagcgaagaagggacagatgccgtcgcagatcggtgtcctgctccgtgaccagcacggtatccccctttgtaagagcgtcaccggcagcaagatcctccgcatcctcaaggcccatgggct

SEQ ID NO: 7280 - DNA, 252 bp, Zea mays
  Clone ID: LIB3150-002-Q1-N1-H12
tcgctcgcctgcgatctccgtagcctccgtcgcgtcgagcatcgatcatgtcggcctactgcggaaagtacaaggatgagctcatcaagaatgctgcctacattggcacccctggcaagggtatccttgctgctgatgagtccactggcaccattggcaagcgcctttgcagcatcaatgtcgagaacgttgaggagaaccgccgtgcccttcgtgagctcctattctgctgccctggtgctctacagtaca

SEQ ID NO: 7281 - DNA, 358 bp, Zea mays
  Clone ID: LIB3150-002-Q1-N1-H3
cctctctcccgcaaaccccgcgaccgcagtcccagccgcccctaatctcctctctccacaccccaaatcgccgcccacagatctcgccgacaccagcgcagtgacccagcccccgccttccccatcgtgatagcagcgtctcctagacgccccctccccttggcctcggcgcgatgcctgcacagctcctgtctgccgcgtgaggaggcgccacgacacgtgcttgtgtggctgtcgacgcgaaggcacccgtgatctgcgtcgactctgaggaggagcgccgcctccttgagatccaggaggtcgaggtggctacggcgcgtactcgtacggtggtcgagagtgccgagctcgcgac

SEQ ID NO: 7282 - DNA, 318 bp, Zea mays
  Clone ID: LIB3150-002-Q1-N1-H4
ctcactagtcgctcccccgcggctcgcgcaggcgggcgacacaacgaggctaaatccctatcgcgaggaggcgtgtgaggccagcggctttgcgatgacagcaccagcggacaaggggaagaaggccaagactgatgccgacggcggcgaggagaacgaacagatcgacggcgtcctcgtcctctccatcgagaagctccaggagatacaggacgagctcgagaaggtaaatgaggaagcaagtgacaaggttatggaggtggagcagaaatacagtgagatccgcagacctgtctatctcaagaggggtgacattat

SEQ ID NO: 7283 - DNA, 387 bp, Zea mays
  Clone ID: LIB3150-002-Q1-N1-H6
ggctttgctccaaatcgaggacaagataagggactacagagacgagtgtgagaggttggatcagtgcagtcgcctttatgactcctcaatcttcgaatgtaaattttgagcttgatgcaagtcggattgttcaggaacttggagggaccaccactgtaatggagagagagaaggcttccattcaagagttgatgaatgttgtcaatgaaatgatgtggaacacggaatttgctattaggtcgtatctgatgttgaggccaagattcacccgtacaggtgctggagttgcaaatggtggttcttcaaatccttctgctggtgctccacccaatcagccagtgctagatttctacagtggagtcccaaagcgcccttccatttttatgc

SEQ ID NO: 7284 - DNA, 196 bp, Zea mays
  Clone ID: LIB3150-002-Q1-N1-H7
caattccccatttcgcccaccgatcgaccttcacgccagtctcggtctcttccgaaggcgtcgcgcgcggttgtttgagaggagaggaggaagatgagggagtgcatcttcctccacatcgggcaggccggcattcaagtctggaacgcgtgctgggaactttactgcctcgagcacggcatccagcctgatggcc

SEQ ID NO: 7285 - DNA, 330 bp, Zea mays
  unsure at all n locations
  Clone ID: LIB3150-002-Q1-N1-H9
ctccctccgcgccgccgccgccatgtcctgctcctcgtccgctgtggccgccccgatcgagcacttcgtgctcttcaaggcccgcccggaggcggtggcctcgggcgccgcggcggcgatggtctcctcgctgcaggcgctggccacgctcgtcccgggcctggcctacatccacgcgggaccggtgctccgcctccggtccccggccgcggaggcgctgggccccacgcaccttctncacacccgctacgccaccaaggaggacctggcgtnctacgcggcgcacccggcgcacgtgggcggcgtgcagggccacggtcttcccaaacg

SEQ ID NO: 7286 - DNA, 267 bp, Zea mays
  unsure at all n locations
  Clone ID: LIB3150-003-Q1-N1-A2
ctgtcagaaggcatcacctctgatcttgctgcggcgaattcaaggaaaggtagaatatatggcctgcaaaaaattgggatacaaaaaattcctgagcatgctcggtgccaccaaaagactgagctggagaaggctaaagcaaccctgttattggcaactcttctaagtcattgccttgcagagataaagaaatggatgagatatcaatatttgtaaaggatgcaatctgcaacaaccaatgcctangacgctgcctttatatacatg

SEQ ID NO: 7287 - DNA, 167 bp, Zea mays
  Clone ID: LIB3150-003-Q1-N1-A7
tatcctgatgcaacgccatgtacttgttgatggcaaggtcaggactgacaagacctaccctgctgggttcatggatgtcatttccatccctaagacaatggagaactacaggctgctttatgacaccaagggccgcttccgtcttcacccaatcagggatgaagatg

SEQ ID NO: 7288 - DNA, 131 bp, Zea mays
  Clone ID: LIB3150-003-Q1-N1-A9
gacgagaagctcgacaagcttcgcgccgaggtcgccaagctcgaccagatcagcgagaacgaaaagtcccggttcatcaaccttgtgtcacgctaccttagtggggaaaccggagcaagatcgagtggagc

SEQ ID NO: 7289 - DNA, 260 bp, Zea mays
  Clone ID: LIB3150-003-Q1-N1-B11
gcaagggcttccgctgcatccgcatggtcaacaacacccgcctcaacttcgacgccttccacggcgacaaggaccacggcggcgtgcacgacggcaccggcgtcgtgctctgggagtggtgcaagggcgagaaccagagctggaagatcctgccgtggggtcccgaggccaactccgccggggccacgcgggaggcccgcacgccgtgcgcgtcttctgaaggccgggggcgaggactacagcctacggggcgcacgcac

SEQ ID NO: 7290 - DNA, 255 bp, Zea mays
  Clone ID: LIB3150-003-Q1-N1-B12
gtcgaggtcgacgtgttttgctcagatggaacctttgcaagggcagctgttcccagtggagcatcaactggtgtatatgaagctctggagttgagggatggtggctctgactatttggggaagggtgtctccaaggctgtgaacaatgtgaattctgttattggacctgctctgattgggaaggaccctacagcacagactgagattgataacttcatggttcaacaacttgatgggaccaaaaatgagggggga

SEQ ID NO: 7291 - DNA, 268 bp, Zea mays
  Clone ID: LIB3150-003-Q1-N1-B5
ccggctgcgaagaagccagcggaggaggagcccgctgccgcgaaggccccggcggggaagaagcccaaggccgagaagcgcctcccggcggccaagtcgtccggcaaagaaggcggcgacaagaagggtaagaagaaggcgaagaagtcggtggagacctacaagatctacatcttcaaggtgctgaagcaggtccaccccgacatcggcatctcttccaagggcatgtgcatcatgaactcctttatcaacgacatcttcgagaagc

SEQ ID NO: 7292 - DNA, 165 bp, Zea mays
  Clone ID: LIB3150-003-Q1-N1-B8
aaaccactcaatccagatctctatttaatcaaacattttttttgttatgatgcagttccacacgtgaaatagccatatggatatgtaacaacataaatttgttcaatgggaaataagtttctataatacatttatgcacccaggacctgagatctagaaggacac

SEQ ID NO: 7293 - DNA, 125 bp, Zea mays
  unsure at all n locations
  Clone ID: LIB3150-003-Q1-N1-B9
gaatggcgtcccgcgtcgccttgggccttcttcggcggcgngccggcgccacactaggccttctaaggagttatgcacatgtcagaagctacaacagtcaactttcagctttggtttctgctaca

SEQ ID NO: 7294 - DNA, 217 bp, Zea mays
  Clone ID: LIB3150-003-Q1-N1-C1
ctggcttctcgcccgtgccaccgcacggagaaatgaacgaagagggtggctatggacatgggcctgatcagagacgttgctgggtacgctccttatgagaagcacatcactgagctcatgaaggttggcaaggacaagcgtgccctgaatcttgctaagagaaagcttgtaactcacattagggcacataagaagatagaggagatggctggcgtac

SEQ ID NO: 7295 - DNA, 276 bp, Zea mays
  Clone ID: LIB3150-003-Q1-N1-C2
tgaagtctggggcaggcactaagaagaccaagaagattcgcacatgtgtaacatttcaccagcccaagaccctgaagaatgccagggacccgaagtacccaagaatcagcactactggaagaaacaagcttgatcagtaccaaattctcaagtaccccctcaccacagaatctgcaatgaataagattgaagataacaacactctggtctttattgatgacctcaaggcagacacgataaagatcaaggctgctgtcaagaagatgtatgacattc

SEQ ID NO: 7296 - DNA, 319 bp, Zea mays
  Clone ID: LIB3150-003-Q1-N1-C6
acggtgtccaagctggcggcgccccggcctgcggcgccaccgctccggccggcgtccctccgcgccgccgcaatcgccttcgccccctccccgcgccgggtccgcgtctccgtcgccgggcgggccaggatcccctccgtcattgcgatggcttctgccaaggaaggaaatggtgcaccgaccaagaaaacctcgcttcacgatctctacgagctccagggcctctccccgtggtatgacaacctctgccgacctgtcaccgacttgctgccccttatcgccagcggtgttcgtggagtcaccagcaaccctacaattt

SEQ ID NO: 7297 - DNA, 231 bp, Zea mays
  Clone ID: LIB3150-003-Q1-N1-C9
tatcacccttgaggtcgagtcttctgataccattgataatgtcaaggccaagatccaggacaaggagggcatccctccggaccagcagcggctcatttttgccggcaagcagctcgaggacgggcgcacgctggccgactacaacattcagaaggagagcaccctccacttggtgctgcgtctcaggggtggcatgcagatcttcgtgaagacacttactggcaagacgat

SEQ ID NO: 7298 - DNA, 225 bp, Zea mays
  Clone ID: LIB3150-003-Q1-N1-D2
gatcgtgatggagctgtacgccaacgaggtgcccaagaccgcggagaacttacgcgcgctgtgcacgggcgagaagggcgtgggcaagtacgggaagccgctacactacaagggctccaccgtccaccgcgtaatccgcgagttcatgtgccagggcggagacttcacccgcggcaacggcaccggcggcgagtccatctacggcgagaaggtgcccgacgagaa

SEQ ID NO: 7299 - DNA, 192 bp, Zea mays
  Clone ID: LIB3150-003-Q1-N1-E11
gtcaaccatggcggcgtcagcaggcggaggcgcggtgcgcgcgctgtcccagaaggagcaggacatacagatgatgctcgcggccgacgtccacctcggcaccaagaactgcgatttccagatggagcggtatgtctttaagcgtcgcaccgacggcatctacatcatcaacctggggaagacatgggataa

SEQ ID NO: 7300 - DNA, 345 bp, Zea mays
  unsure at all n locations
  Clone ID: LIB3150-003-Q1-N1-E4
gggggagggggggggggggggggggggaggggaggaagaggggggggggggggagggagaagggggggggggggaggggaaagacggacgagaggggggagaaggggagggggaagnnnggggggagcaagggcaaagcggcggcggcaagggagggcggcaagccactgacgatcgaggaggaggaggaagcgcctccgcaggccaaggaggagcgcgncaagagcgacaaaacgacggcaggggcacagcggagggtaccggagggagggcaagggggagacaggcgtggaggccgggagcgaggggcacgaggccggaggtatcatagagagcggaggagag

SEQ ID NO: 7301 - DNA, 409 bp, Zea mays
  Clone ID: LIB3150-003-Q1-N1-E6
cactccctgacatcgagaccggctgcccggccccggtccggcgatccctctgcacccctttctttgcgctgccagccccaatctctcgcattaagctctgcgccgtcgggacgtcgccgccatggtctccgcgccgccggtcgtctgcaccgccatgccgttgctcgacttcgacaccttcgtctttaacaaggagaaggtctccctcgccggccacgacgagtacatcgtgcgcggcgggaggaacctgttcccgctgcttccggaggcgttcaaggggggcaaggtagatcggatttattggatggggcttgcatgggttctgccaagcccaaaacctgagagattaactggctgaagcctaatgaaaaattgttgtgaagattggtcttcggaaaggatccaattt

SEQ ID NO: 7302 - DNA, 217 bp, Zea mays
  Clone ID: LIB3150-003-Q1-N1-F1
atggatcccgacaagatgggcaccggcgtgcaggcctacatctcctaccgcgtcatcaccaagaccaacctccctgaatttgagggaccagagacaattgttattctacgctatagcgattttgaatggttgcatgatcggcttgctgagaggtacaaaggcgtgtttatacctccccttccgggagaagaatgctgttgaaaaaattccggtttta

SEQ ID NO: 7303 - DNA, 261 bp, Zea mays
  Clone ID: LIB3150-003-Q1-N1-F2
gaagggagcggccgggcgcaaggtcggcgggccaaggaagaagtcggtgtcgaggtccgtgaaggccggtctccagttccccgtcggccgcatcgggcgctacttgaagaagggccgctacgcgcagcgtgtcggcaccggcgcccccgtctacctcgccgctgtcctcgaatacctcgccgctgaggttctggagctcgccggtaatgctgccagggacaacaagaaaactcgcattattccgcgccacgtgcttctggc

SEQ ID NO: 7304 - DNA, 314 bp, Zea mays
  unsure at all n locations
  Clone ID: LIB3150-003-Q1-N1-G11
cagagtccagacgccagacgccctctacttctctctagttagtgtacatttcaaactcttggccgccgcctcgctctctgttngtcgnncccgccgcagaaatggcgctgccgaatcagcaggttgtggattaccccagcttcaagctcgtcatcgttggcgacggtggaactggtaaaaccacatttgtgaagaggcatcttactggcgagtttgagaagaaatatgagcccaccattggtgttgaagttcaccctctggattttagcactaactgtgggcaaattcgcttctattgctgggacactgctggg

SEQ ID NO: 7305 - DNA, 422 bp, Zea mays
  unsure at all n locations
  Clone ID: LIB3150-003-Q1-N1-G12
ctgctctaaggtttttgccaagccgccggcgccgtcgctctgccctcgtatcccctcccacgacaccgagacaccaagatgacggngcnncccgcggaggagctcgccacccagatcgagcagcagaagctcgaggagcagaagaccgaggcagaggaagttgtggtggaggatgaggaggaggaagatgaggacgatgacgatgatgacaaggatgatgatgaactcgatggggatgccagtggcaagtcaaagcaaagcaggagtgaaaaaaagagccgcaaggccatgctgaagcttggcatgaagccaataactggtgtaagccgcgtaactgtaaagaaaagcaagaatatactctttgtcatctccaaaccaaatgtgttcaaaagcccgaattccgacacgtttgtaatattcgg

SEQ ID NO: 7306 - DNA, 203 bp, Zea mays
  Clone ID: LIB3150-004-Q1-N1-A1
cggacacctattattttagattaaaaaatggggggctccaagaaacctgagcatgagattctcactgacactgaaaaagaacggacgttgattgcttcagggcttacaacaacttgaactactaatgctgtttttgagcaatagattgagttacagagtgtcttatttgctgaggacatgcagttggcggctttctttaatga

SEQ ID NO: 7307 - DNA, 416 bp, Zea mays
  Clone ID: LIB3150-004-Q1-N1-A10
gccagtcgctacaccccaaaaacctcactgtcgcgctcgcgacccctcgcgctcgcctcgtcggcacgccagcgagaggggcgcccatccccgtgcctatataaggacgccggattggaggtgcccgtcccttatccacgcggccagatctacctctgttccacgcctccgtcaccgccgcgtcggggcgatcccaccgaggccacaggtataagctggtaccatggcatccaacacaggagcatcaagatggctcaagggtaaggggaaggctgtgacatctggagattgtctactaatcatggggagctcaaaagctgatatcccacctgataagtccatcaccctgtcctaccttatggtcccaaggctggctcgccgcggtggagttgacaagcccttcacatgggaaagca

SEQ ID NO: 7308 - DNA, 362 bp, Zea mays
  unsure at all n locations
  Clone ID: LIB3150-004-Q1-N1-A12
agctgatccttaagtcaccacgcgtcgcggaccgtgggcgacaaactaggtgggtaccgccgacgcgcgcgcgccgccgcccccgtcctactgcangtgcgaggccttcatcggtatcttaacaagcgacgagcaaccaggctggactctaccaagggggggccttccggcaccggttccgggggcttcccggggctcttccgggccaaatcgtgcttggcttgttaaccgaacttcaacttgtttggccggttggcgccttttaatgggcttcggcaaaataagaaccggattcttaacggtcgtgccaaaggtggcactggcgtgcaaaaaagcaacacttgtgatgaatgaaccaaaaa

SEQ ID NO: 7309 - DNA, 188 bp, Zea mays
  Clone ID: LIB3150-004-Q1-N1-A2
aaagtcaacccacccgtccgcccttttctttaaattaaaataaaaaaatgggggggcccaaaaaccccgcgcagtatatttttgctgactacttaaatgaccgtccgccgcatgcttcagtgcatacaacgacttccacatctgttgctgtctttgatcaatcaactgagctacagactgtctaattt

SEQ ID NO: 7310 - DNA, 156 bp, Zea mays
  Clone ID: LIB3150-004-Q1-N1-A5
ccttccggaactttttgttaacattttaaggaaactgggattcgatcctctgggtcggaaatgattctacaattctacttaccaaagtaaggtttatgacgaatatgattgtttaccttacaatgatccattttaactacttgatgatgatttttt

SEQ ID NO: 7311 - DNA, 340 bp, Zea mays
  Clone ID: LIB3150-004-Q1-N1-A6
caaactcttgtgccacatctaaagacaccgcggcggcgatcctcctggtggtgagctactctaccaatctacttgacaaaataaagattatgacgaatatcgtagcttaccttacaatgctccattataactagctgatgatgattatttagtcttcttctatttcacagaaatacccatattatctgcataaattttccactaacctcaagactaacttctgaaatctaacgtcacaagttaggatcaagagcattcccaacatcagcccaatttgtctataactaggtacctggatatcctatgcatgcttagtgctgtccacaatccactactaatt

SEQ ID NO: 7312 - DNA, 338 bp, Zea mays
  Clone ID: LIB3150-004-Q1-N1-A7
gccaccacctctccttctacatcaacgcggcgaaaccctaacgccggagtcccgctccctcctcccactacccatggcgttagatatggcgtacgctccggctatgaacgctgccaaggccgagttcgaagctgtcatgatggatccgcagcacacgatccgcatcacgctctactccaagagcgtgaagaacctcgagaaagtctgcggggatctcgtgaagggcgccaagggtaatgatctcaacgtcaacggccccatgcagatccctaccaacgtgctccacatgaccaccaagaaatctccctgttgctaatgtaccaacacctgagatctct

SEQ ID NO: 7313 - DNA, 401 bp, Zea mays
  Clone ID: LIB3150-004-Q1-N1-A8
gcgcgcacttggtgactaccttggtgttaaagtccatgcatgcgttggaggaacatctgttcgtgaggaccaaaggattctcgccagtggtgtgcatgttgttgttggtacacctggtcgtgtgtttgacatgctgcgtagacagtccctccgccctgataacatcaagatgtttgttcttgacgaagctgatgaaatgctttctcgtggtttcaaggatcagatttatgacatcttccagcttctgccatccaagattcaggttggagtcttctctgctaccatgccacctgaggcccttgagattacccgcaagttcatgaacaaaccagtgagaattcttgtgaagagagatgagctgacccttgagggtatcaagcagttctatgtgaatgtggaca

SEQ ID NO: 7314 - DNA, 91 bp, Zea mays
  Clone ID: LIB3150-004-Q1-N1-A9
aaattttcttagcaacaaataaataagtgggtaaaattaataaaggggcggtaccttaaattatataaacacaaccaatgtttcctctcaa

SEQ ID NO: 7315 - DNA, 250 bp, Zea mays
  Clone ID: LIB3150-004-Q1-N1-B1
ctttaaagtccacccacccttccgttgcaatggtggtcatcccaatggctgtcggggctactaactacttcggcgagaaacacaacactgaccatcttatttccaaggatgataacatcgatgcttcaaacataatttcaggcgatactctcgatgacctcgtcaagtcctttgtttctcattaccctatccacgcgatcgaacatccatatgatcatcgatgactagaacacttatgcctaactcactg

SEQ ID NO: 7316 - DNA, 239 bp, Zea mays
  Clone ID: LIB3150-004-Q1-N1-B11
cgcctttcctgctcctaccgcaactctcggtgaggtttaatgttcgcgatggcggccttcaacaaacttggtggccttctaaggcacattgctctggtcagccgtatcactggtggctcttctcctgcattgttcaatgctgcaccgctcatgtctaccaagctatttattggtggtcttgactggggcgttgaagacttgaaactaaaaaaagcatttaacatctttggacaagttac

SEQ ID NO: 7317 - DNA, 359 bp, Zea mays
  Clone ID: LIB3150-004-Q1-N1-B2
ttttaaattccaccaacccttccgctacattgttgttcaaccccaaggcgttcggtgacaccatcaacctcttcgttgaacgctacattgaccaagggatcaccctagttgctggcgtggaaactttagacttcatttttggtcctactatcactctaaccatcggggctaaatttgtacctttgacgaaaccgaaaaaatttccaccctatatgatctcccaagaatattcttttgaataccgaactgacaagatatagatgcatgtttgaattgtacacgccaaccatctggctcttttattccacaatcttatttccaccggagtaacactcttttcatatgttaaacttattgaa

SEQ ID NO: 7318 - DNA, 369 bp, Zea mays
  Clone ID: LIB3150-004-Q1-N1-B3
ttaaaatccaaccaccccttccgtacaattgttgttaaccccaaaggccttggtgacaccataaacctcttcggtgagcgccacactgaccaaaggatcaccctagttgctgatgtgaaaactatagggttcattttaggtcctactatcactctagccatcggtgctaaatttgcacctttgaggaagccgaagaagttgccacgcgatgtcatctacgaagaatattctatggaatacggaactgacaatatagagatgtatgttgcaactgtacaagccaaccatcgaactctctgactcaatgatcttattgccaccgctcaaacactctgttcaactgtaaaacttattgaacgtatcttaaca

SEQ ID NO: 7319 - DNA, 389 bp, Zea mays
  Clone ID: LIB3150-004-Q1-N1-B5
ctggcttcttctccccctattaccaagtgcggttcggtttatggtaacttagggttttgtggatgggccatggcggcagctgatgtgaagtaccgatgcttcgtcggcgggcttgcctgggcacactcagcaacgagtcgctggagaatgccttcgcctgctaccgcgagatcctcgactacaaggacatcaccgaccgtgagacagggaggtctcgcggcttacgcttagataccttgtactacgagaactccatgctcgacgctatcgacaacatgaacggaaaggaactcgacggacgaaacatcaccgctaaccaagctcagacccgtgacggtggcggtggcggatgtagctacagtggctgtcgcggccgaggctgatatggt

SEQ ID NO: 7320 - DNA, 409 bp, Zea mays
  Clone ID: LIB3150-004-Q1-N1-B7
cgggagacgcgctccccagtccccacccccctctcgtgtcgtggcgacgactgggggggctgtcgctgccgccctacgtcaggtggccaggtcgtattagggcacttcgccggcgacgagtaccacaagtttgcaggcagtggacactttctctggtatcagagggtcaatgtccaattattatgatgactacgatgacattgacgagatggaggatgattatgatatggatgatcccattgatgacatggtagacgaacagcaagggattagggattctgatgcggaagataatgattatggacaaccaaatgataagatcccagatacttcatcagcagatgcaagaaaaggaagggacattcaaagaataccctgggagcagataaacataacctcgaaaaaatac

SEQ ID NO: 7321 - DNA, 212 bp, Zea mays
  Clone ID: LIB3150-004-Q1-N1-B8
ctttctttgatgcttaaaaaaaagcaagacgcttcctcttgttcccatgaaacttccatcgggacccatcaccaaacaccactagagctaggaattaaactacaacttaagtgaatcgtagcccattttattttaaactacgcattggtacccacactttccaaattgtaaaatgcgttcacgaacacaaacacaaacttatctcataaccg

SEQ ID NO: 7322 - DNA, 247 bp, Zea mays
  Clone ID: LIB3150-004-Q1-N1-B9
ctcctttcgctcttacaacaattaacgcgcgcttattttaatgcgactccattctactattgatcctcacatcttattacagctattcaaattaacttatacttcaattgcattatctttaaactacaactcaccctcatctgatctactatatataatgatatgtgcacttacatattattcataatatcactaatacctaatcattttacatactaactttatttacactgtttattactctatt

SEQ ID NO: 7323 - DNA, 179 bp, Zea mays
  Clone ID: LIB3150-004-Q1-N1-C1
accatttcaccatctcgcagatacaatgcgcgagttatatctcctctggcgccatggcgctctatgcgcagaagacctgatatggaccggagtacaagggtaaggatctctaacacgcgaactgctttcgccttaagattgaactgtccgacggagaaatgcccaccctaatggcgtgc

SEQ ID NO: 7324 - DNA, 415 bp, Zea mays
  Clone ID: LIB3150-004-Q1-N1-C11
gcaagtctgaaggtctttgagctggtagctgcatgggctgacgctattgccaactgggactcctgggaggagatggaggatcagggtgttttcaacacaattaaagaagctgtcaatttccaccagagatttgacctcgacggtctcttcctgaaaacgcttccgtcgcagtctgaaaatggttcgcaaagttcaatcatcggccgcgtctctaattttgtgactagggcaattgcagcttacccatccgcaacgtggagggcatgctcgtgcgtccatacactgctgcacgctccaaaattctcccttggagcacaagacattagaaagactattgccgaatcctttgcgcaagcagcgttttcccgcttcaaatctgtatccgacagtcctgcttggctatggaaaccactgg

SEQ ID NO: 7325 - DNA, 442 bp, Zea mays
  Clone ID: LIB3150-004-Q1-N1-C2
ctggattcttttaaagtcaaccaacccgtccgcaaattgctacaaaaagttttcacctcaggaggctgcgcaagcgctaaaccagtctgttaatcttttcttggaaattggtaggttgaacatggctgcaagatacagcaaggacattggtgagatatatcagcaagaacaagatttagagaaggctacagattacctggaaagggcagctgacctttttgacagtgagggacagtcgtctcaatcaaacaccatcaaacagaaagttgcagaaattgctgctcagttggaacagtacccaaaagcaactgagatatttgaagcgatcgctcgtcagtcaatcaacaacaatcttcttaagtatagtgtcagaggaattcttcttaatgctggcatctgtcaactatgtagaggtgatcctattgccatcacaaattcattg

SEQ ID NO: 7326 - DNA, 395 bp, Zea mays
  Clone ID: LIB3150-004-Q1-N1-C5
ggaggttcggctgggagcaagttccgcatgtcactgggtctaccggtggcggccacggtgaactgcgcggacaacacgggcgccaagaacctctacatcatctccgtcaagggcatcaagggccgcctcaaccgcctcccgtccgcctgtgtcggcgacatggtcatggccaccgtaaagaagggaaagcccgacctcaggaagaaagtgatgcccgccgtcatcgtccgccagcgcaagccgtggcgtcgcaaggacggtgtctacatgtacttcgaagataatgctggagtgattgtgaatcccaagggtgagatgaaaggttctgcaatcactggacctatcggcaaggagtgtgctgacctttggcctatgatcgccagtgcagcaaatgc

SEQ ID NO: 7327 - DNA, 376 bp, Zea mays
  Clone ID: LIB3150-004-Q1-N1-C7
attgtcgattgccttgcaaatgatctctgcagcgctgtcaaggggtgatgcaacacttacgccatcaagaataaggacgagattgagcgtgttgccaaggccaaccgttgaactgatcttgtatcctggtgcactctgcgctggaaacttttatgtctctggcagtcgtatcggttcttgatttaccaatgtttagagttttttgagacctatatgcggtttttgctctcattgcacaattaaaattactgagtaatgtagatgattgggaacagaaatgtttggggccttggttaccaaacttcatttatcttgatattattctttattctataggctggattatgtatgcgcatgatttttgagattattcttc

SEQ ID NO: 7328 - DNA, 407 bp, Zea mays
  unsure at all n locations
  Clone ID: LIB3150-004-Q1-N1-D1
gtcgacaccatgagggagtgcatctcgagggacatcggccaagccgggatccaggtcggaaacgcgtgctgggagctttactgcctcgagcatggcattcaggctgatggtcagatgcccggtgacaagaccattgggggtggtgatgatgctttcaacaccttcttcagtgagactggtgctgggaagcacgtccctcgtgctgtttttgttgaccttgaaccaactgtcatcgatgaggtgaggactggcacctaccgccagctcttccaccctgagcagcttatcagtggcaaggaggatgcagccaacaacttcgcccgtggtcactacaccattggcaaggagattgttgacctgtgccttgatcgcatcangaagcttgccgacaactgcactggtctcca

SEQ ID NO: 7329 - DNA, 409 bp, Zea mays
  Clone ID: LIB3150-004-Q1-N1-D11
ggaagaaagagacagtaatccaaagggagggtgcgaaacttttggagcaaactgcaggtgaggaagcagagtatgcagcacttcctactggaccagatgttgcaccaaacaaaaaagccctcacatcagatgaggcgccatcgcttataaagaacatacactggaagaaggttggtcttctttcatttgtatgggtggcattccttgttcttcaggtcacaaagaattacactgctacttgctccccatggtattgggtcttgaaccttctccaggttccagtgtcagtaggagtgacactgtatgaaggatttgggctgatgagtgggaagagggtgttatcatcaaagggaagtggacaaactaccatgaaatttcatcaagtagtcgtatacggtctattcggtat

SEQ ID NO: 7330 - DNA, 320 bp, Zea mays
  unsure at all n locations
  Clone ID: LIB3150-004-Q1-N1-D12
ggggcgggggggccgggggcggcggggggggcgggggggggggcgggggcgcggccaccgcgggggggggggggggggcgggggggggggggggggggggcggggggggggggggggcggggggcggggggggggggggcgggggggggggggggggggggccgcgcgggggggggggcggggggggggggnggaggggcgcggcggcggggggggcggggggccggcggcgcgggggcggcggggggccgggcgcggggcgggggcggggggggcgcgcggcgcgggggggggcgggcgggggggggggcggcgggggg

SEQ ID NO: 7331 - DNA, 442 bp, Zea mays
  Clone ID: LIB3150-004-Q1-N1-D2
cctggattcctttaaagccaaccaacccgtccgacccgttcctgcagctaccctataggattggggggtcttctccaccgatgagtaattttgatccagctaaaatgctcactgattctgggaagctccacaccttggatatgctactacggcgccttcgagttgaaggtcaccgtgtgcttctttttgctcagatgactaaaatgctggacattcttgaggattacatgaattttagaaaattcaagtatttcagacttgatgggtcttctgcaatctcagaccgccgtgacatggtccgagctttccagaacaggaatgatgtatttgttttcttgttaagcacaagagctggggggcttggtattaatttgactgctgctgatactgttattttttatgaaattgactggaatccaacacaagaccagcaggcaatgga

SEQ ID NO: 7332 - DNA, 437 bp, Zea mays
  Clone ID: LIB3150-004-Q1-N1-D4
aagccgaccaacccttccgcccttttcttcctttccgacgccgggggggggaattccgaatcgagggcgagacgggcttgatcgaaaagtcgactatggacggagagaacgaaccctacgttatctccgacctcaacgcctccctccccgcagccgctgcagcccttagcgccgaggaccgcgccggcctcgtcaatgctcttaaggataagctgcaaagcctggcgggccagcatgccgatgtgctaaagacgctttcgcccaatgttaggaagcgtgttgagtttttgagagggatccagagccaacacgattaaattgatggcaagttttttgaagaacgggtagcacttgaggctaagtaccataaagctttatgaaacctttatacacaaagagggtattgaaattggtaaagggagaaaatggaggtagat

SEQ ID NO: 7333 - DNA, 222 bp, Zea mays
  unsure at all n locations
  Clone ID: LIB3150-004-Q1-N1-D9
acaaaaactannatcctctaaaatcnacccactcatcctctgctttttcctcactctctacacctctcgcgcaatttttaatgcccgcccggccccaaaccaatcatatcacatccatattcttatcttatattactcactctatacatcttcatcttctttctccctacatcattttttatttccttccaccttttattattaatacttttaacccctttt

SEQ ID NO: 7334 - DNA, 411 bp, Zea mays
  Clone ID: LIB3150-004-Q1-N1-E1
ctcctgatcctcgttcctgtccgccccgcgtgggccgcgcctccgcccgggtcgcctgtgagatcagctccggcggcacgcggatatgactacttcaaggcgtcttgctgacaggaagagtgcaaagttccagaagaacatcacaaagaggggttctgtgcctgagaccacggtgaaaaagagcaatgactaccctgttggacctatagttcttggattcttcatttttgtggtcattggatcatccttgttccagataatcaggacagcgacaagcggtgggctggcctgaattcactgagctaaaaccagaaatttatctgtccgtgagctgggaggcactatctgcgttgtgtagcaaacttggtcatggatatgtagtgcgaatgtcactacttgtctgtttgcagt

SEQ ID NO: 7335 - DNA, 290 bp, Zea mays
  Clone ID: LIB3150-004-Q1-N1-E10
cccattttcggaacgaacaaattaccatcggatcccaactccggctggagcgggtctagttggactaagatccgtccgatcaccccgcgccgacataaatgaaagaagatggcagatgccgacacattactttgcacctctgattctgcgaacgagggacaccatgacaagctatatgaccaggtctgacatgccggaattgacgcttgacttgctgaagaccgtgacagctaggatgcttgtgatgacctgcaccaataccacacatggacatggtctttggagagatc

SEQ ID NO: 7336 - DNA, 84 bp, Zea mays
  Clone ID: LIB3150-004-Q1-N1-E3
aatcttttaaagtcgaccaaccctttcgggcaagtagtgcaggaagacctaaaaccggggtgtgcggaggcttgcgacgtttac

SEQ ID NO: 7337 - DNA, 412 bp, Zea mays
  Clone ID: LIB3150-004-Q1-N1-E4
ggcctcccggacctttctggttggtcatggcctgacaattgctgacattgcagtttggtcaaatcttgctggaattggtcagcggtgggagagtctaaggaaatcaaagaaataccaaaatcttgttcgctggttcaacagcatagattcagaatacaaagaggcactgaacgaagttgtggctgcatatgttgggaaacgaggtattggaaaatctcctgcacctagccttaaggagaaggtacatgactcaaaggacccatcagctccagaagttgatctccctggtgcaaaagttgggaaagtctgcgttcgttttgccccagagcctagtggttacctccatattgggcatgcaaaggctgcactattgaacaaatactttgctgaaagatatcaagggcgcttaata

SEQ ID NO: 7338 - DNA, 212 bp, Zea mays
  Clone ID: LIB3150-004-Q1-N1-F2
cagggtaccagtaatagtgggcgcttccgggggactgtgccggtcgggtcatgctgtctactcaacatgcgcctctggatagaaagtgccgtggctgcgccgttggctggtatcatggagtctggctccagatttagtggttgtacggggttcgactactaagacggcgttattactcgctgtgaggtctccttttctatctaagatttgac

SEQ ID NO: 7339 - DNA, 195 bp, Zea mays
  Clone ID: LIB3150-004-Q1-N1-F9
gcaatctctagcagcagatcctcgtgcgtggcggatctctagcctgggtactgtcccgatggcccgcacgaatcatactgcgaggaagttcactggcggcaaggcgcctaggaagcagctggccacgaatgtggttctcaagtctgtctcggttactgactgtgtgaatatttttctttgttttcgtcctgtgtt

SEQ ID NO: 7340 - DNA, 439 bp, Zea mays
  Clone ID: LIB3150-004-Q1-N1-G1
aacctggaatctctaaaattcaaccaacccttccggcagaaaacccccaagccacccaataaaagggggtcctttccaaagggggaactttaataaagggaatggcaaggttcaaagtttattggagtctaaatcaaccattaaacaaggtgttcttgcacaaaaaaggtcaaatcttggtggaaatcatttccctgctacaaaaccagctgcaaagaaggctgctgttataccaatgcacaagggggctatcccgtggaacaagccaggtaaacaatgatgttcttttattgcttatgaaaaaatttactgcattcaagggggtgttcaatttattggatcatgcaccttggattatattggctgagaatgattgtgatgctggtgtttacatggaactgccttaactgctctggttatacacacacaagcttataaa

SEQ ID NO: 7341 - DNA, 397 bp, Zea mays
  Clone ID: LIB3150-004-Q1-N1-G10
tcccgtcgcatcccatcccactaccaccggggtggtcgtccggcggggcgagccggttcttccaacccaggggcagtgatggcgacgaataggagcgtgggcaccctcggcgaggcggatctgaaggggaagaaggtgttcgtgcgcgccgacctcaacgttccgctcgacgatgcccagaagatcaccgacgacacccgcatccgcgcctccgtccccaccatcaagttccttctcgagaagggcgccaaggtcattctcgccagccacctgggtcgtccaaaaggtgtcaccccaaagtacagcttgaagcctcttgttccacgcttgtctgagctccttggagttgaagtcgtgatggccaatgattgcattggggaagaagttgagaagttgg

SEQ ID NO: 7342 - DNA, 269 bp, Zea mays
  unsure at all n locations
  Clone ID: LIB3150-004-Q1-N1-G11
agacgacccacgcggccgggaacaaccnggngccggaagggagaaaggggagggcaaacaacggggggggggcgaggcaaaacagangcccaggagaagcaggaggaggcaccaaagaaggcanacgccgcaanggccaaaggcaagaaagaagggcaaggccggcgccggcacacacgacgaggacgggaccggccaaaccagagaagcaggcngccgggcgaggacagacaaagaagggcggacagaaaggacaaaccgggagaacg

SEQ ID NO: 7343 - DNA, 452 bp, Zea mays
  unsure at all n locations
  Clone ID: LIB3150-004-Q1-N1-H1
acctggaatcctttaaagtcaaccaacccgtccggccgccgccgactccttttccggctctctcgggctataatctactccctggctccttccttctaaacccgcacccgcaacaaccgcccgttggggtttgcttcagcccccgaaacccaccccttggattgctctgattccgtgtttgcagtatggcggngtacccggaggacaaccagcacgagttgaacgggtacgacgaggaggtcgacgaagaggagggacaccccgggaggcgggtaggccgggatgggggctctgggtacgctgatgctgtcagaaaggatgggaggggggcgggtggcgactcgttgggaaagatttttgtcggaggcgttgcttgggagacaactgaagaatcattctccaagcattttgagaagtatggggcaataactgattctggaattatgaacgac

SEQ ID NO: 7344 - DNA, 297 bp, Zea mays
  Clone ID: LIB3150-004-Q1-N1-H3
cctggaatcctttaaagtcaaccaacccgtccaatcgcaacggccgccctttttttttttttgtgtggattataaaattgggggtgggtttttttttttttttttctttttttatattttttttggttagaatattttttgaaaaattcacttgggaactatcataccattaataaaaaaagtattaatacatcaatcaaaaaaacgataatataaatgactgttaaaaaaaggtaaaaataaacagttggactatcaccaaaaaatgcatggtctaaaaaagaacaaatgtgaaaa

SEQ ID NO: 7345 - DNA, 266 bp, Zea mays
  unsure at all n locations
  Clone ID: LIB3150-004-Q1-N1-H5
gacccacgcgnccgncncgagcgacgacncgganacagccgccgggcgacgccaggnaccagggcggcgacgggcccnacnccggcaacgagcaccaacaagaaggggggggggaaagaagggcgagcaccaggcactgggacagcagngngaaangaaaacacggcaagcangagcncgcaccgggggaagnggaangaggacaannnggangaaanggagncaaacaaaccggngaggcagaagaaaacagagccaaagacacc

SEQ ID NO: 7346 - DNA, 385 bp, Zea mays
  Clone ID: LIB3150-005-Q1-N1-A1
gtataacatcacatttttccactttgatggtccatgctcaaatttatttatagggatttaaagccacaaaacctgctggtggacaaggagaagggtatactgaagattgctgatctgggactcggtagggctttcactgtgcccatgaaaagctacacccatgagattgtgaccctttggtacagagctcctgaagttttgcttggagcaacacattactcaactggcgttgatatgccgtctgatgaatgcatctttgctgaaatggcccgacggcaggctctctttcctggtgactcggaggtgcaacagttgcttcacatcttcaggttgctgggaacacctactgaagaacagtggcctggagtgagtgatttaaaggact

SEQ ID NO: 7347 - DNA, 359 bp, Zea mays
  unsure at all n locations
  Clone ID: LIB3150-005-Q1-N1-A10
caccaattcacgatctcctttcccgcgaccgcgccccggatcgccggctcgcaattccggagttaaatttccctccaccgcaaccgtcatgggcggctcccacagccgcgaggacgtcgatctcacctcctccgacgaagaggaggaattcgaggacgactatgacgcccgatcacccatcgcggaggccgcagcgagcgcggggcagcgcgacgacgacctcctccgcaccgccacaccttcctcgcttgaggccatcgacgccaagctcaggtcgctggatctcaagtaccagagacctaccgccgccaagctctacctccacgtcggcggngcctcgccttccgcgcgctgggtgc

SEQ ID NO: 7348 - DNA, 365 bp, Zea mays
  Clone ID: LIB3150-005-Q1-N1-A11
aaaacaattgatgggtacatcgggggggttccaaatccaacatgggactaccacatatttattccatactcaaaaccagggaaggttcatgatcaaattgaactatatggagccccaaaagacctggatgatttttgtgaaaaggcacagctggtgaactatgttcaatacataccacttttggaaggatggactttcttcatgtggacaaagtttacaggtgtcctaaattggaaaacgcagaatccttggactggactaaggggccaattctatgatcaccttcaacaccaaacggctgggttttataggtgctggtgtgctgctcaacctattcatgttcaactgaatttggttacctattt

SEQ ID NO: 7349 - DNA, 315 bp, Zea mays
  Clone ID: LIB3150-005-Q1-N1-A12
attacacctgtaccatttattcggggagctactattgttacgacgcctcctattctaatcacctttcttccaaccaacctaactactgtggcgaatactgttgatatgcaccctgaggcgcttcatgacgctcttacgatcaacaatgtttgtttcaacgtgaaaaacaattatctcaatgatctgcatcaagttttctagaacttcaactccaacgtttaccctgccaagtaacatgctaggttcacctacaaggccatcatcatcaaccatctctttcacattggcatcgacatatccctcactgcttgactc

SEQ ID NO: 7350 - DNA, 320 bp, Zea mays
  Clone ID: LIB3150-005-Q1-N1-A3
gtcgtgcatttgaattcaatgtgtagacgcatattgtcccattgacgatctcgcagtaaatgtgacgctggatatcccttacgctggaaatgaggcacactgatgatggtctcctacactccgatgctgtgactactgaaacgagcttatctatgaccgtaaagctgcaaccaggagctcaagagcgacctctaggacctttacatcaacggtgctatccagctggatgttgccgggagcaggaaggctgttgtgatgcccgtcccataccgattgcccaagggcttcatgaagatccatgtcttgatcgatagggagct

SEQ ID NO: 7351 - DNA, 377 bp, Zea mays
  unsure at all n locations
  Clone ID: LIB3150-005-Q1-N1-A5
cacaaacctgctgatttaggtagccgaggtgttgccaccaggaaaccagcgcaacatagttgcgctcagattgaaaatgtggtgccgatgcatgctccagtacaaccaacgacttccacacctcttggcctctttgatcaatcaactgtgcaacagcctgtcacatctgctgcgccgatagatctgtttgctggctttaatgaacagttaccagcttctcataatacagatggtgtatccagtcattttgttgttgctaaagaacctgcccataatgttgttcagaagggcataatgccatcagctgaagcactcgccacatctcatgctgtgcaccaagatttgttcagtctgtcaantttgcaggaaccagcaac

SEQ ID NO: 7352 - DNA, 379 bp, Zea mays
  Clone ID: LIB3150-005-Q1-N1-A6
ccgcccccaagaatgtcagacgaggccaggcgcgggcccgcgggcgccgcgcaggtggtgcttcgggcctccttcgaggaccgcaagccggtgggctcggggtctccgccgccggcagcgaccgcgactgcggttgcgcacaagatccagctcaagagtgccgacatgaaggaggagatgcggcaggaggccttcgaaattgctcgcatcgcattcgagaagcacagtatggagaaggacatcgcggagtacataaagaaggagttcgacaagaaccacggcccaacctggcactgcatcgtcggccgcaacttcggttcctacgtgacgcacgagacaaactactttgtatatttctacatcgactctaaagctgtct

SEQ ID NO: 7353 - DNA, 353 bp, Zea mays
  Clone ID: LIB3150-005-Q1-N1-A7
gttcggcttccttgatataaccgtccatctcgattcgatccgcctcgtcactcacgaacgcacgaattcaccaaccaaactccactgtctccaactctccatcgcgtctgctacgcctctcctgcaggacgaccaatggcttccaggaagttcttcgtgggtggcaactggaaatgcaacggtactggcgaggacgtgaagaagatcgtcaccgtgctcaaccaagccgaggtgccctctgaagacgtcgtcgaggtggtggtgagtccgcctttcgtttttctgcaacaagtcaaggggctgctgcggctggacttcgccgtcgcagcgcagaactgctgggtgcgcaaggg

SEQ ID NO: 7354 - DNA, 366 bp, Zea mays
  unsure at all n locations
  Clone ID: LIB3150-005-Q1-N1-A8
cggacgcgtgggccacatctcagttgaccccggcgtcgtcctcttcccccggcgctactctcccgctccacgttccaaaggaaagatggcgtcccatattgttggataccctcgcatgggccccaagagagagctcaagtttgccttggagtctttctgggatgggaagagcagcgccgatgatttggagaaagttgcctctgacctcaggtctagcatctggaagcaaatgtcagaagctgggatcaagtacattcccagcaacaccttctcgtactatgaccaggtccttgataccacggccatgcttggtgctgtcccagagcgctactnctggactggaggcgagattggcttgagcaccta

SEQ ID NO: 7355 - DNA, 323 bp, Zea mays
  Clone ID: LIB3150-005-Q1-N1-A9
gaaactccagtagagcttccaaagagacttaccatcggtcccccaagtgctgatagaatccaacttcctgatggacgacatctggcttatgaagaacaaggagtctcagctaacagagcaagattttcactgattgctcctcattcttttctttcatcaaggctaacaggaattcctggaattagtgcatctcttctagaagaatttggagtacgacttgtgacctatgaccttcctggttttggtgaaagtgatccacacgtaagccggaatctcaattcttctgcactggacatgctctatctggctaatgctctcaatat

SEQ ID NO: 7356 - DNA, 358 bp, Zea mays
  Clone ID: LIB3150-005-Q1-N1-B10
tgctgctcctggccgtcgaggtcggggcgtacttcaacggctgggacctcgccgcctccgcgctcgccctccccgccatcggcctcgagtcgctgtacgcctcctggctgcgcttccgcgccacctacgttgcgccggggatacagttcctcaccgacgcctgcgtcgtgctcttcctcatccagagcgccgaccgactcatccagtgcctcggctgcttctacattcacatcaagcgcatcaagcccaagcccaagtcgcttgcattgcctgatgcggaggacccggatgccgggtactaccccatggtacttgtgcagataccaatgtgcaacgagaaggaggtgtatcaacaatc

SEQ ID NO: 7357 - DNA, 372 bp, Zea mays
  unsure at all n locations
  Clone ID: LIB3150-005-Q1-N1-B11
cgacagtctctgccgccctacggggggggcccaggtcttcttcggtcccttcgccgtcgacgagcactaccaggaacttgatcttataatacaaacttcaatatgttctctgctccaggcaacaattctatggctcttgtagccccacggccagggatggagctggctaatattcaacatcatccaaatcaggctcctgggcctggaggaaaacaacgcacatctagcctggaggcaccaataatgctacttacaggtcaccagagtgctatctactgcatgaaattcaatcctgcgggaactgtgatagcatcangttcccatgacaaggatatcttcttatggtatgttcatggtgaatgtaagaacttt

SEQ ID NO: 7358 - DNA, 361 bp, Zea mays
  Clone ID: LIB3150-005-Q1-N1-B2
gcggcggcgatgcagcagctgatccgcggcgaggtgcatcggtacatggcgagcgcgggcctgcgcgccggctgcggcgccgttggcgcgaccgacctctgcatgccgcagctggtggacggcgtcatgcgcgctgccgccgaacaggtcggccggatgcagtagccccgcgcccccggcgggggcatcaaaccgtcagtgctcccaaatcgtcgtctagctagggcgaccgcaacgcaacggttgttggagtagcaaacttggttttaaggtggagggaaaaattggctgggctgaaagcagaaagccttgtaatgtacatgaaagaaacggaacggatggcgcgctacaatctgagcta

SEQ ID NO: 7359 - DNA, 390 bp, Zea mays
  Clone ID: LIB3150-005-Q1-N1-B3
gtcttcagaccattagctttatctactggagagcgcagaagaacccgatcgacaccatgagggtgttgctcgttgccctcgctctcctggctctcgctgcgagcgccacctgcacgcatacaagcggcggctgcggttgccagccaccgacgccggttcatctaccgccgccggtgcatctgccacctccggttcacctgccacctacggtgcatctgccaccgccggtccacctgtcgacgccggtccacctgccaccgacggtccatgtgccgccgacggttcatctgccgccgtcaccatgccactaccctactcaaccgccccggcctcagcctcattcccagccacacccatgcccgtgccaacagccgcatgcaagcccgtgcc

SEQ ID NO: 7360 - DNA, 387 bp, Zea mays
  Clone ID: LIB3150-005-Q1-N1-B5
ctgacatcgaggaagggatgagggtcggtgttgatcgcaataagtaccagattcaaatccctcttccaccaaaaattgacccaagtgttaccatgatgactgtggaggaaaagccagatgtgacgtacaatgatgttggtggctgcaaggaacagattgagaaaatgcgtgaagttgttgaacttcctatgcttcacccagaaaagtttgttaagcttggtattgatcctccaaaaggcgtcctttgctatggcccacctggcactggcaagacacttcttgcaagagctgtagcaaatcggactgatgcttgtttcatccgtgtaattggaagtgagttagttcagaagtatgtcggcgaaggtgctcggatggtcagggaacttt

SEQ ID NO: 7361 - DNA, 388 bp, Zea mays
  Clone ID: LIB3150-005-Q1-N1-B6
cgacactgctgctcgaccccaaggcgtgccgtgacaccatcgacctcttcgttgagcggtacaaggaccaagggatcaccgtagttgctggtgtggaagctagagggttcatttttggtcctcctatcgctctagccatcggtgctaaatttgtacctttgaggaagccgaagaagttgccaggcgaggtgatctccgaagaatattctctggaatacggaactgacaagatagagatgcatgttggagctgtacaggccaacgatcgggctcttgtagtcgatgatcttattgccaccggtggaacactctgtgcagctgtcaaacttattgaacgtgttggagcaaaggttgttgagtgtgcttgcgtcattgaattggcagaact

SEQ ID NO: 7362 - DNA, 366 bp, Zea mays
  Clone ID: LIB3150-005-Q1-N1-B7
cttccccacaaaactaaaccctcgcttcggaggcgcgtgaacccaagaccgacaggcgaacgaagcgagggtcctcacaaccaccatcccctgctgcaacgacgccgccggcgatggcgtccatctccggcgcggcggcgccgccatcttccgccgtgtgccggcttcggctgcgccggcaccttctgctccggccctcccacctccgcctccgcgcgccccactccatcgccgacctctcccgctcctccaattccgccccgagcccggcccgcccagcgctgggctccggcccggagaacggcagcggcggcgtccgcgcggtggagaaggacccgatcaagctgtgggagcgctacgtcgagt

SEQ ID NO: 7363 - DNA, 380 bp, Zea mays
  Clone ID: LIB3150-005-Q1-N1-B8
cagaacgccgccggcccgtcgtgcactcgtgtttcccttcctccacttgccttcgtgttcgtgattcgtgatttcgccgccggaaagccgagggagagggagcgatatggggttcgtcggagacacgatggagtcgatccgctccatgcagatccgccaagtgctcatgcagatcatcagcctcggtatgattgttacctctgcattaatcatatggaagggtttgatagttttcacggggagcgagtcaccagttgtagtggtgctctcgggtagcatggagcctggatttaaaaggggtgatatcctgtttttgcatatgagcaaagatcctattcgcacaggagaaatagttgttttcaatgtcgatggtcgtgaga

SEQ ID NO: 7364 - DNA, 363 bp, Zea mays
  Clone ID: LIB3150-005-Q1-N1-B9
agcagcaggcggcgccgagtagcgggtccccacctcgagcttgccaccatggctagaggattgaagaagcatttgaagaggctcaatgcgcccaagcattggatgctggacaagcttggcggagcttttgctcccaagccatcttctggacctcacaagtctagggagtgcctgccactgatcctcatcatcaggaacaggctcaagtatgctcttacataccgtgaggtcatttccatcctgatgcaacgccatgtacttgttgatggcaaggtcaggacagacaagacctaccctgctgggttcatggatgtcatttccatccccaagaccaatgagaactacaggctgctgtacgatacc

SEQ ID NO: 7365 - DNA, 386 bp, Zea mays
  Clone ID: LIB3150-005-Q1-N1-C1
cccacccgtccgcccacgcgtccgagcatattagtactgctggtatggaagcaagtggaacaagcaacatgaaattctctctgaatggttgtgttatcattggcacccttgatggagctaatgttgaaataagagaggaggttggagaagataatttcttccttttcggtgccaaagccgatgaagttgctgggctgaggaaggacagagaaaatggcctgttcaaaccagacccacgttttgaagaagccaagcagtttataaggagtggcgcttttggcatctatgactatgaacctctcttggattcccttgaagggaattctggatttgggcgtggtgattatttccttgttggctatgacttcccaagctacatcgatgca

SEQ ID NO: 7366 - DNA, 376 bp, Zea mays
  Clone ID: LIB3150-005-Q1-N1-C10
atccaccaccaccaacggcgccgcagcccccacgcaatctcaccggaaaaacgcctcctccagttgagctgagcctgagctgcagctgagccgccatgtgcccgcggacccactgagccaaaacccctcgaccccgcccccactgcaggccgttccctttccaagatccgcgctttgatccgtccgccgccgcccgagaccatgccggccacggacctccagggctcctccccgttctcctccttcggccgcaccctcctctccctccgccgcgacgccccggcgtccgcgtccgcggcggctgcgatgccgccgcccggcgtcgacccggagctcgaggagtttcacgcccacgtcgccgcgcaccttgcggacc

SEQ ID NO: 7367 - DNA, 374 bp, Zea mays
  Clone ID: LIB3150-005-Q1-N1-C11
gtctaaaccctccaccgccgcggggggtcagaggcagaggcagagaggcagaggcagaggcagccatggggagccgcctcgggcgccgcgtgatccactttgccaacctcccgctgaaggtcatgctgccccccgcgccgctctcctccgtgcaggagttcgccgtgcggaccgtcccctccgcttccaaggtggacatccggcgctgcctcgagtccatgtacggtttttccgtcgccgaggtccgcacgcttaacatggagggcaagaagctccgccggggcccctttctctccgccaagcccgactacaagaaggcctacgtcacgctccgcgccccgctcgcggtctcgcgcgacctgtttcccatcggg

SEQ ID NO: 7368 - DNA, 371 bp, Zea mays
  unsure at all n locations
  Clone ID: LIB3150-005-Q1-N1-C12
gtcgaagcgaggtaggggaggttcggctgggaacaagttccgcatgtcactgggtctaccggtggcggccacggtgaactgcgcggacaacacgggcgccaagaacctctacatcatctccgtcaagggcatcaagggccgcctcaaccgcctcccgtccgcctgtgtcggcgacatggtcatggccaccgtaaagaagggaaagcccgacctcaggaagaaagtgatgcccgccgtcatcgtccgccagcgcaagccgtggcgtcgcaaggacggtgtctacatgtacttcgaagataatgctggagtgattgtgaatcccaagggtgagatgaaaggttctgcaatcactggacctatnncgcaggagt

SEQ ID NO: 7369 - DNA, 387 bp, Zea mays
  Clone ID: LIB3150-005-Q1-N1-C2
gccgccgccaacgcttaatgctagtggtcctccggcgaggcctcttgctcgtccggcagcccaccacccgcgtccttgccaaaccgtctctccgccctgcttgtctcttcgtccaccacttcgccgtcgacacgatgggtgagggttctgctgctggtaaggacgcgaaggggaaggggaaggggaagaccaaggccgccgccgcggattcggccctggtcgttcgcgacgactcctacctagaggcggtcactcagaagaggattcgcttcttcgaggagatccaggcaaggcaagccgtcgagcggctgaatatcggcggcgaagttatcaaggtaactttgcctgatggcgctatcaaggaaggtaagaaatggattacaaccc

SEQ ID NO: 7370 - DNA, 356 bp, Zea mays
  Clone ID: LIB3150-005-Q1-N1-C3
cgagaagcccagaaggtgagaagatagatagagagagagagagtgatcggtacaaggatcaccgctgtgcctgcgcgtgctgcttcaccgaatcgagtcagaccctgtccgaatccgagccaagggatggcaaccggtagtgaggcctcgaaggcagctgaggctgtggttgactggcataaacaggacagcaagaggatgctccatgcggtttaccgtgttggggatctggaccgtacaatcaagtactacacggaatgtcttgggatgaaactgctgaggaaaagggatgtttctgatgagaagtacaccaactccttccttggctttgggccagagaacaccaactttgcagt

SEQ ID NO: 7371 - DNA, 315 bp, Zea mays
  Clone ID: LIB3150-005-Q1-N1-C4
gttcgtgttcaggttctggttcgtggccgagagggaagagatggcggcgtctgacgttgagtaccgttgcttcgttggcggcctcgcctgggccaccgacgaccactccctcaacaacgccttcagcacctacggcgaggtcctcgagtcgaagatcatcctggatcgggagacgcagaggtcccgcggcttcggcttcgtcaccttctccacggaggacgcgatgcgcagcgccatcgagggcatgaacggcaaggagctcgacggccgcaacatcaccgttaacgaggcctagtcccgcggcggccgtggagg

SEQ ID NO: 7372 - DNA, 378 bp, Zea mays
  Clone ID: LIB3150-005-Q1-N1-C5
agggaacaagcgacatgggcgtctacgacgtttgtgtgccgcaacaacggcggcgagtggaccgccaagcagcactccggcgagatcgaggcttccgccgctaccccatacgagctgcagcgccgcctcgtcgctgccgcctccgcggccgactctgcctacggcgtccagtcgtccttctccatggtcacccccagctccgccgtgttccaggtgatcgtcggtgctgtcggtggtggtgcaatgatggtgagcggaggtggcggcggcggtgctgctgcatctggtggtgctgctgccgaggctcccaaggaggagaagaaggaagaggagaaggaagagagcgacgacgacatgggattctccctgttcgactag

SEQ ID NO: 7373 - DNA, 347 bp, Zea mays
  Clone ID: LIB3150-005-Q1-N1-C9
gcactgatgagtttaagcaatacgacagtctatatgtgggtaacaggagacacatatggtcatgttcttgatcatatattgatgaaaacgttcataattgatgttgctgatcctacattgatgaaaacttcacaagtattatatacccatgctgtatatgacattgcattgttgacacttacctaatagcttttattttcacacttcttttcatcttttgcatgctttgaatcctaattgcctttgtcctttgcatctgctttcctttcccagcttcttcttaaggcctagtgcccagattctaaactcatcaaggtgttactaatggatttacccaaggaggactt

SEQ ID NO: 7374 - DNA, 392 bp, Zea mays
  Clone ID: LIB3150-005-Q1-N1-D1
gccgagtccctgccctccctgggcggtgggcgcggaaacccttcgtctgttcgctaaaccttggcggccggatctcccaccttcagaatccatctggtctcctctataaaagcgctgggaggatctgccgactttgccgtccataggcggcgtctctccggtgtcctgcgtctgcgccgcacacatcccccactcttcttccagtgaaacagttcaggcaaaaactctcctggaattgattgttgaggcatcacagattgcatttgccagtgcaagcaaatttcagagataaggatggcagcacaactacttttctccaatgcttccagttgccactgcccattaggcatttcaaggataaacgttgggaagacacttcttggtgaaagtgc

SEQ ID NO: 7375 - DNA, 245 bp, Zea mays
  Clone ID: LIB3150-005-Q1-N1-D6
tcggcacgacctcggttcacggacgcgcggcggatgcggcggagtacgactgctatctcacctccatcttctgggactgcctccagatcgaggacgccgacgatccgctcgctgcctcccccgccgaggagttcgagtgggaggaggtcgcgtctccatcgggcgccgccggagaagccctggagcccgagtgggaggtgctcgtcgacttgccttccgcctccgtcgatgaggggttcgtgtac

SEQ ID NO: 7376 - DNA, 366 bp, Zea mays
  Clone ID: LIB3150-005-Q1-N1-E1
tcgctagctcctctactcgccagtcgccgtgggcaagattaagatcggaatcaacggcttcagaaggatcggcaggctcgtggccagggtcgccctccatagcgaggatgtcgagctcgtcgccgtcaacgaccccttcatcaccacggactacatgacctacatgttcaagtacgacaccgtccactgccactggaagcacagcgacatcacactcaaggactccaagacccttttcttcggtgacaagccggtcaccgtctttggcatcaggaaccctgaagaaatcccgtgaggtgaggctggcgctgagtatgacgtggagtccaccggcgtctttactgacaaggacaaggctgctgcaca

SEQ ID NO: 7377 - DNA, 218 bp, Zea mays
  Clone ID: LIB3150-005-Q1-N1-E10
tttctttatactgactttattattaattttgtaataaacgcatttaatctggcatcattagactttctctttgatgaactggactcgttttgtcctgtttatgatttatgttgtcttgcgtcttatatcatatgttcatatcatttttcgttgccttaaacaaaaggtgtttttttaactgttttaatttactcacaaattgtatcaaattttgtaca

SEQ ID NO: 7378 - DNA, 329 bp, Zea mays
  Clone ID: LIB3150-005-Q1-N1-E11
ggacgccggagacgtctcgtgagccctgcctttaccgggtccggggggactttttctgctctttctggatgggcgccgttggcggctccgcctatcactttatcaagggcatctacaactccccaaacgggatgcgcctgtcctgaggcgcgcataccgttcgcatgaacgcgccgcgcgtggggggcagcttctctgtttggggcgtgcctcttcttcaccttcgactgcaccatggtgtacgcgcgccagaaggaggacccttggaactccatcgttgcgggcgcagccacggtcgggttcctctctatgcgccagggcatgggggc

SEQ ID NO: 7379 - DNA, 380 bp, Zea mays
  Clone ID: LIB3150-005-Q1-N1-E12
tgagaagcagacccttggctctgcggcctgttatcaaggccagggcggccattgaaccaacctcaagtgatgagctcctagggaagaagtttcgagaacccttgagtatcaatcttgcaacatttgagcatgcacttctgagggtcaccgcagatgatattcagaaagccacggagaatttcagtaaggtgcacattattggggatggtgggtttggcactgtctacagggcagcacttcctgaaggtcggagagtagcgatcaagaggcttcatggtggccatcagttccaaggtgatcgtgaattcctggccgaaatggagacaattggaaaggtgaaacatcctaaccttgttcctctacttggctactgtgtatgt

SEQ ID NO: 7380 - DNA, 373 bp, Zea mays
  Clone ID: LIB3150-005-Q1-N1-E2
gtgtctgccgaggacaagacaacggggcagaagaacaagatcacaatcaccaacgacaagggccgtctctccaaggaggagatcgagaagatggttcaggacgctgagaagtacaagtctgaggatgaggagcacaagaagaaggtggaggccaagaactcgctggagaactactcctacaacatgcgcaacacgatcaaggacgagaagattgcgtccaagctgccggccgatgacaagaagaagatcgaggacgccatcgacgcggccatcagctggctggacgccaaccagctcgccgaggcggacgagttcgaggacaagatgaaggagctggagagcctctgcaaccccatcatcgccaagatgtacc

SEQ ID NO: 7381 - DNA, 259 bp, Zea mays
  Clone ID: LIB3150-005-Q1-N1-E4
tcgagacaaagcgcggacggaccctttgaccgtccaattcgtgagctttggcgtctgtgtattttaatcgggagctgtatgctgtagctagctagagaggtttagagcagcacccaaatggtgagcaaggtggtggaccttcttttatttcatgtctacttagccttttttagttattctttctaccttggcttcattattatgtgacttttattatttctttctcttccttcttttattattttatttttttttgttt

SEQ ID NO: 7382 - DNA, 393 bp, Zea mays
  Clone ID: LIB3150-005-Q1-N1-E5
ctcgcagtggcgtctcgcgctactgatgcccagccggatcgccgcctgcttccgctgcgccgcggcgccgtcctcgggcgcgggcgcgggcgcggcggggcccagcctggcgacctccatctacgagacccacctcggcttggtcgcgctctcctggtcccggacctcgctcggcctctccctccgcgccgtgctccgcctgtcggccacgcccccgcccggctcctcctcctcggcgtccggagcgggctacctcgacgatgacgcggacgaagagattctcgccttccgcgtcagcccatggctattctggcgccgccgcgggtccagacggttccgcgctggcgaccgcctcgtcgacctggcgtgggatctctctcgcgcgcgctttcc

SEQ ID NO: 7383 - DNA, 241 bp, Zea mays
  Clone ID: LIB3150-005-Q1-N1-E8
ccgcctcttcctaatccgcctgccgcggcttattctccgccgtggaggaaggatcaactcgatcgccagtcatgacccggtgagagaaccaggattcccataccgggaacgtcttcgccgcatctgcggcttctcctggaccgaatccggcatcttcggttgccggtaagggcgctgagggccattctgtggtgcggccgctgcagtctgagctgattgctctgattatgggcggagaccc

SEQ ID NO: 7384 - DNA, 389 bp, Zea mays
  Clone ID: LIB3150-005-Q1-N1-F1
gccatggcgaggagaaggcttctcgggcgtcgcctcccggctctacgggaggcctcaggcgacgcagccgtggcggcgacccccgccccggtttctctcctcagctgcgtccggcaccctcgatcacctgaagtcgccgcctttcgcgcgtccggctgcccggaaccccgcctcctatccatgggatcgattcggaggagggcagaagaggaccatgttcatccagacacagtcgaccccgaacccgcagtcactcatgttctatcctggaaagccagttatggagattgggagctctgatttccctaatgctcggactgcgatgacatcccctttggctaagtcgctttttgctattgatggagtaaccagggtattctttggatctg

SEQ ID NO: 7385 - DNA, 362 bp, Zea mays
  Clone ID: LIB3150-005-Q1-N1-F10
gtagttatgtcactgtcacgaggtcctgattcattcttcagcacaggtgttacttcactgaaaccataagatgcattcgatacaaacagggtgaattgtgttgtggataatctgggctacgcaatatacttttcaagagggctgattccattcaataaatcagggaacgccaatccaaaatatccatatcttcttcatcttggaatcgcggtctttgattcaaaatttttgaagatatatccagaacttccaccaacaccattacaaatggaagaggacctatagcaactaaaagttcttgaaaatggctataggatgaatgtgatcatagtggaccatgatgcccatggtgtggatgcacc

SEQ ID NO: 7386 - DNA, 338 bp, Zea mays
  Clone ID: LIB3150-005-Q1-N1-F11
gccagatccagcagaattgagtggcgcgctcaaacacaagctagaagataggtgcttagtgagttaaccagtgggatgtcgctggaagatagtttgaagaagagggtggccaagtgccgcagggagtatgacattatttacaagcagctaccggtgctgctagagaagatggaaattctatttcctacggggaagaagatggagagctccgagccggagaacaaatccgaagcaaagggggagccggtcgacccgctgcgagccatgacgccggcagaaataggggagcgctacaaggatctggcggacaccgtcaagggatttctcaaagatctgga

SEQ ID NO: 7387 - DNA, 385 bp, Zea mays
  Clone ID: LIB3150-005-Q1-N1-F12
cctcacttcgctgtgtctcatcaacgccggcatcaccgcgaggactgggccagcgctccctccctttctcctccctccgcctttattgctgacggcgacgactgggcgagctctgccgccgctctgcgctaggtgcccaggtcttcctcgggcacttcaccggcgacgagcacccatcaggagcgaaatggacgaggctgttcctgctttggctactggccaagcttcaaccgacggcgtgacagagcagcctgtgaatgtgtacatatgggacatggatgagacactcattttgctcaagtcacttctggatggctcatatgctggggcttttgatggcctcaaggatcatgagaaaagtactgaaataggaaagcgatgggag

SEQ ID NO: 7388 - DNA, 366 bp, Zea mays
  Clone ID: LIB3150-005-Q1-N1-F2
accccctttgatccgagcgcagccgggcgagaccatgccggccacggacttccatggctactcccggttctcatacttctgccgaatcctccttttcttccgtcgggacgacccggcgatcacgatcacgacgggtgctatgccgcagcctgtcgtctacctggtgctctaagattcatacgcccacctcgacgcgcacctcgcggacctgatcagtcatcgcgctgatcgtgatgatgagttcatgtccatcaagcagatccagcgcgagttgcactcgcacctggtaacacatgatgagttcccacccgcggatgtcgaggaccgctcgagccgctcctacgcgcttcggcgcccagcattgat

SEQ ID NO: 7389 - DNA, 277 bp, Zea mays
  Clone ID: LIB3150-005-Q1-N1-F3
ggcctacctatcccgagagacctcggggggccccttcttatccgggggcgtcaacattcaccacccctaccactaattcggccgtatcctacataccctacgatgttacgaccacctgacaacaaccgtatcgcttttgtagccccacatccaggtgtacaagaagctaatatatatcctcgtccacatgaaccccctgatcctggatgaaaacaacccacatttagattggatgtactaataaatttacttacagtttatcatagagctatttaat

SEQ ID NO: 7390 - DNA, 384 bp, Zea mays
  Clone ID: LIB3150-005-Q1-N1-F4
ccgtcatcgatctcgtttcaaatccatcggtcctcgtttcctccgtcccgcagcatctcaaccccatggccaagatcaagatcgggatcaatgggttcggcaggatcggaaggctggtggccagggtggccctgcagagtgacgatgtcgagctcgtcgccgtgaacgaccccttcatcagcaccgactacatgacctacatgttcaagtacgacactgtgcacggacagtggaagcaccatgaagtcaaggtgaaggactccaaaacccttctctttggtgagaaggaggttgctgtgtttggctgcaggaaccctgaggagatcccgtggggttcggttggtgctgaatatgttgttgagtctactggtgttttcactgacc

SEQ ID NO: 7391 - DNA, 261 bp, Zea mays
  Clone ID: LIB3150-005-Q1-N1-F7
gctcgccgtttgttcctcgtctcggcaccgttcgctgttgtccatcgttgtgcaacaaaaatgacggctggctacattgttggctcactggtcggatcctttgccattgcatacctgtgtgacacatttatctctgacaagaaggcatttggaggtagcacccccaagactgtttctgagaaggagtggtggcaagccacagacaccaagttccaggcctggccttgcactgcttggccaccggtttgtcatgaaccctat

SEQ ID NO: 7392 - DNA, 359 bp, Zea mays
  Clone ID: LIB3150-005-Q1-N1-G11
cggcgagttcaaatctcacaatgttgttgtagcacaccactggcttggtccaactcggcggcgatgtctgggcgcggcaagggcggcaaggggctgggcaagggcggcgcgaaacgccaccgtaaggttctccgcgacaacatccagggtatcacgaagccggcaatccggaggctggcgaggaggggcggcgtgaagcgtatctccgggcttatctacgaggaaacccgcggcgtgctcaagatcttcctcgagaatgtcatccgcgacgcggtcacctacaccgagcacgctcgccgcaagaccgtcaccgccatggatgttgtgtacgccctcaagcgccagggccgcactctgta

SEQ ID NO: 7393 - DNA, 329 bp, Zea mays
  Clone ID: LIB3150-005-Q1-N1-G12
tagatcgcgagcgggcccttttttggttttttttttttttttttttttttttttttttttttttttttttttttttttttttttttttttttttttttttttttttttttttttttttttttttttaaaaaaaacccacctaaaaaatttttttttttttggaatttttaaaaaaaaaaaaaatttttttttgcccctttttgaaatattttttatttttacggtttttttattacccttaaaacattaaaagctaaatcacattctgcacattttttctgaaaaaccccttttaaaaaaaaccaaattcttttatttccaaaaagctt

SEQ ID NO: 7394 - DNA, 379 bp, Zea mays
  Clone ID: LIB3150-005-Q1-N1-G2
atggccgcctcgccctcttcaccctggacagcgccgccagagccggtgaccccgccgtccccatggaccatcacagacggagccatctctggcacgctcccagcagccgaggccttcgcagtgcactacccgggctacccctcctctcccgcccgcgccgcccgcaccctcggcggtctccccggcctcgccaaggtccggagttccgatcccggcgcccgcctcgagctccgcttccgccccgaggacccctactgccatccagcctttggccagtcccgcgcctccactggccttctgctgcgcctctccaagcgcaaaggagctgcggcaccttgtgcccatgtggtcgctcgtgtccggactgcttactacttcg

SEQ ID NO: 7395 - DNA, 376 bp, Zea mays
  unsure at all n locations
  Clone ID: LIB3150-005-Q1-N1-G3
ccgacatacgcgccgcttaccggaggctcgcgatgaagtggcacccggaccggtgggccancgaccccggcgcggccggcgaggccaatcagcggttccagcggatccaggaggcatactccgttctgtcggacaaggggaagaaggccatgtacgacgccgggctcttcgaccccctcgacgacgacgaccaggatttctccgacttcatgcaggagatgctggtgatgatggatagcgtgaaaaacgagaagccggacacgctggaggacctgcagaagatgctggaggacatcgtgaagggcgacgccgggggcgggagcggcgcatgcgggcgggcgccgacggacggtgctcgacggacgcgcgtcgcgcc

SEQ ID NO: 7396 - DNA, 377 bp, Zea mays
  Clone ID: LIB3150-005-Q1-N1-G4
gcggagaagtcgccggcagccgacgggggggccggtctccttgcccacctcaactcagcgggagaggtccccgactcacgctctttcgcttcctccctcggcgtctcccacctcgaacttgagggcgtcatcaagagcctctcagctttccgcatcgtcgacagcacagacatcatcaaggagacatgggtgctcaccgaggaggccaagggctacgccgccaagggctcccccgaggcacagctcgtcgccgcaatttcaccggagggtgcctctaaggacgcactcaaggcaatattgggagatgctttcgatgttggcatgaaggcagccgcgaggaacaagtggatagggttcgagaaggggaataaggactt

SEQ ID NO: 7397 - DNA, 371 bp, Zea mays
  Clone ID: LIB3150-005-Q1-N1-G5
gactctggcaagtcgaccaccacaggacaccttatctacaagcttggaggcattgacaagcgtgtgatcgagaggttcgagaaggaggctgctgaaatgaacaagcggtccttcaagtacgcgtgggtgctcgacaagctcaaggctgagcgtgagagaggtatcaccattgatatcgctctgtggaagtttgagaccaccaagtactactgcacggtcattgatgcccctggacaccgtgacttcatcaagaacatgatcactggtacctcccaggctgactgtgctgtccttatcattgactccaccactggtggttttgaggctggtatctccaaggatggccagacccgtgaacatgctctccttgc

SEQ ID NO: 7398 - DNA, 113 bp, Zea mays
  Clone ID: LIB3150-005-Q1-N1-G7
acataactttatcctttatatccacccattcttttcttttacaaatcactcatttcgcggaatatatccatgaggagccaggtctcattattatccatatttttactcctcct

SEQ ID NO: 7399 - DNA, 340 bp, Zea mays
  Clone ID: LIB3150-005-Q1-N1-G8
gctctctctactctctcaagacggggcgtctattaataggggggcggggtgggagctctgctaggagtctggagtactcttcaagagtctgaattatctacatgagcataagaaatatcaacagaaagcaggccctaaaagataccaaacctatagttgactcgaaagcaatgtctttggaaaatgaaagcgcactacatacggtgcacgtaagaagaggtggaagaaaatgtcaatcctatgggagctatcttactggaaagacttagaggtccaccacaacatctatgtcattcacttgaaaaagaatgtttgcgggagtttgcttgggacactcatg

SEQ ID NO: 7400 - DNA, 330 bp, Zea mays
  Clone ID: LIB3150-005-Q1-N1-G9
gttcaggtttttaataacattgccgaggatacttcttattttaggatgatttttcacagatagaatgtaaccaatacagttgtgatgattcaaccttcacttatatcctattcatttcaatcatggccagagccagttcttttggatgcaactgcaattgcttctgacatgatccttttattgtactcttattttactgtttgttatattccatggtgttaaccattgtactatctctaaatgcttttcactattatcttgaatgtcttcgaggtctttatttctatttttatatatttttttatgttttattcttttttttattatttt

SEQ ID NO: 7401 - DNA, 394 bp, Zea mays
  Clone ID: LIB3150-005-Q1-N1-H1
agaagatgttatccgtgcacgtaatgaggtgaagtcctctatccaactccaccttgatggttcaactgccgttgttgaggacattggccgtcagctgctgacctatggacgaagaattcctacccccgagctttttgcaagaatagatgctgttgatgcaagcactgtgaagcgtgttgcaaaccgcttcatctttgatcaggatgttgctattgctgcgatggggccgatccaaggacttccagactacaactggttcagacgccggacctacatgctccgttactagattaatcagccggtgtacccatgtttaccgtctgcaaaagacaagataaaatttgcctcttttagcgtcagtatattaaggcctcagcactgcacattacgtgct

SEQ ID NO: 7402 - DNA, 308 bp, Zea mays
  Clone ID: LIB3150-005-Q1-N1-H11
ccgcgtactaagctgatccttaatcacccacctccacacctcctcaactggcgactattcttactgagggcggtataactgctcatccccgctaaaggaggacggaacgacataggtcgtgctcctgctttctgtcgggtcgggctgctggactggcgcaccggcagcgcactttaccagacacaagatacctggcgatgcggcaaggtatggacggggcgcgctggacctgacgctggaccgactcggctcggttccatccaagacgagacctgtcgcaagatcgacatgcagataagctgggccag

SEQ ID NO: 7403 - DNA, 104 bp, Zea mays
  unsure at all n locations
  Clone ID: LIB3150-005-Q1-N1-H12
gacgancaagagcggggggggacggcggagagggggagggggggaaacanccaagacaccgagcagnanaaacggaaacacggcggggcgcgncacaaaggagg

SEQ ID NO: 7404 - DNA, 374 bp, Zea mays
  Clone ID: LIB3150-005-Q1-N1-H2
gcagcattgatggccaaatcttatctgggtagcaaagtccctgagattgtagcattgtggaaaaaggatctccagaaggtaaacccaaaagcagcggagtccctggctgatcctaatgagtacccaaacttatttgaagactggcagattgctctgaatgtagaagctgctgttgccccgaaaagggttatctatccaccggctgaggagtacatgattcatgctgaaaggtcaaatgagaatttagtggaagcttttaaaaacatgcatgtacaggaagagatggtgccagatgataatgaagagtatgttcacgaggttattgaagacggtggagtagaagagagtcaagaagatgctgttgaggttgatgc

SEQ ID NO: 7405 - DNA, 395 bp, Zea mays
  unsure at all n locations
  Clone ID: LIB3150-005-Q1-N1-H3
ggcctacctcgccgcggaggcctacgtgggcgccaccttagccggccgcgccagcaggctccgcgccgagctcccgggcggcagcgaccgcgtcagcctcgccgtcgacgaccacgtcgaggtcaccgacgccttccgcggcgcccggatgcggtggcgcaagacgcggacgctccgccgcggcaacgtgatcgcctggaacccgcgtgaggaggagcgccgcgcctactgcctcaccttccaccgccgccaccgcgcgctcgtcgaggccgcctacctgccgcacgtcctcgccgagggccgcgccgccaccgtccggaaccgccagcgccgnctctacaccaacaacgccagcggggactggggcggcggcgacgacgggccccgcgcctgga

SEQ ID NO: 7406 - DNA, 397 bp, Zea mays
  Clone ID: LIB3150-005-Q1-N1-H4
tttctgggcaagggcggagcaaatcgccaccgtaaggtgctccgtgacaacatccatggcatcaccaagcccgcgatccgtaggctggctcggaggggcggcgtgaagcgcatttcggggcttatctacgaggagacccgcggcgtcctcaagatcttcctcgagaacgtcatccgcgacgccgtcacctacaccgagcacgcacgccgcaagactgttaccgccatggacgtcgtctacgcgctcaagcgccagggccgaaccctctacggcttcggaggctaggctggatgcctcttctccttgctgtcgtggatgccttgttgttgttagggttatttcgtttagttccttgtctggaacgtgttggactattgttagtaagattttttgaaat

SEQ ID NO: 7407 - DNA, 363 bp, Zea mays
  Clone ID: LIB3150-005-Q1-N1-H5
taacattattggaccagcaattgttggaaaggaccccactgagcaggttgagattgacaacttcatggtccaacagcttgatggaacctccaatgagtggggctggtgcaaacagaagcttggagcaaatgccatccttgcggtttcacttgctgtgtgcaaagctggagctatggtgaagaagattcctctttaccagcacatcgcaaatcttgctgggaacaaaactctggtgctccctgtacctgcctttaatgtgattaatggagggtcacatgctggaaacaagcttgccatgcaggagttcatgatcctcccaactggtgcctcctcgttcaaggaagccatgaagatgggagttga

SEQ ID NO: 7408 - DNA, 283 bp, Zea mays
  Clone ID: LIB3150-005-Q1-N1-H6
taacattattggaccagcaattgttggaggggacctcactgtgcaggaggggatttacaactacatgatcctacacctagacaaaacctccaatgagtggaccatctgctaacagaagctcacactaaataccatgcttacgctttcacttgctaagtgcaaaattaaacctatcgtgcagaagattattttttaccagcacattggaaatgtttacttgatcaaaactatcagaatactctgcctctccttaatgcgattaatggaagcaacatgctgaaaa

SEQ ID NO: 7409 - DNA, 381 bp, Zea mays
  Clone ID: LIB3150-005-Q1-N1-H7
attaaaggactacctaaaaggtggtggtgcggatatacatgtcattccaaaaattgaaagtgcagactcaataccaaatctgcagtccattattgctgcttcagatggggcaatggtggcacgtggagaccttggtgctgaacttccgattgaggatgttcctttgctacaggcagagattgttcaaacatgtcgaaacatggagaaaccagttattgtcgccacaaatatgttggaaagcatgattgaccatcctactccaactagggcagaagtttctgacatagctattgcagtcagggaaggtgctgatgccatcatgttatctggtgaaactgctcatggaaagtacccactaaaagcagtcaaagtgatgcacac

SEQ ID NO: 7410 - DNA, 303 bp, Zea mays
  Clone ID: LIB3150-005-Q1-N1-H8
gccatctgtttacccacccccaccgacgcactctagtcaccggcggcccaagcctatctccgaccaccgcatccatgtttttcgccgccgcgctccaccttcaccccaccttcggcacgacgcacccgcacctccaccaatccacccgcaaatcgtacttccttcgcttacagccgtctcgccgtcgcctacccgtcccgcgcctgttcctcacgcccaccaccgccagcaatagcaacagctctcctcccccaccgtccccttcgcccgcccccgccgccccgggttccctgctcgccaact

SEQ ID NO: 7411 - DNA, 216 bp, Zea mays
  unsure at all n locations
  Clone ID: LIB3150-006-Q1-N1-A1
gcgctctctacccctattcctctttacctttncccggggaaagggcgcataggcccaccaggaggaaatttttttttccctacctttttactaccctcaataaaaactccaccccctttgctcattacttatacatccattctggagtcaatttccttttaaattaacaacttaaatattgaacttcttttatcccaactgatctgtaaggacatt

SEQ ID NO: 7412 - DNA, 376 bp, Zea mays
  Clone ID: LIB3150-006-Q1-N1-A10
ccgaagcgcgccttcgccgccgccggggcccccgccgcctctgcgatccccgcaaggtcgcaaacatgtctaccgtgctccagcgcccgacccccggcacggtccagtgcttcggccgcaagaagacggctgtggccgtcgcctacaccaagccggggcgcgggctgatcaaggtgaacggcgtcccgattgagctcatcaggccggagatgctccgcctcaaggccttcgagcccatcctgctggcggggcgctccaggttcaaggacatcgacatgaggatccgcgtccgaggcggcgggaagacgtcgcagatctacgccatccgccaggccgtcgccaaggggctcgtcgcctactaccagaagtacgtcga

SEQ ID NO: 7413 - DNA, 381 bp, Zea mays
  Clone ID: LIB3150-006-Q1-N1-A11
cctcgtgtggccgtcgtctcccgttcgaaacgccaagccccccctccggctaaatggcccccaagcgaggtggcagggcgccggtgccggccaagaagaagacggataaagtgacgaaccctctattcgagaagaggccgaagcagttcggcatcggcggcgcgttgccgcccaagaaggacctgcaccggttcgtcaagtggcccaaggtcgtgcgtatccagcggcagcgccgcatcctcaagcagcgcctcaaggtaccaccggcgctcaaccagttcacccgcaccctcgacaagaacctcgctacgaacctttttaagatgcttctcaagtaccggcctgaagacaaggctgccaagaaggagaggcttctgaaga

SEQ ID NO: 7414 - DNA, 385 bp, Zea mays
  Clone ID: LIB3150-006-Q1-N1-A12
gaaaccctcctgcctcgccgccgctgcctcatcctcccgccgcttagtccctgacccggaccaaccttcgtgaggacgggaattggactaagggggtaggatgccgccaaagaaagcggcgccatcgaaggcggagctggccaagaagcagaaggtcgtggaggacaagaccttcgggctgaagaacaagaataagagcaagaacgtccaaaagtacgtccagtccctgcaccaggccgtccagcccaagcctgactcgaccaagaccgccgccaagaagaagaaggaggaggagaaggcgcgcgagaaggagcttaatgatctgttcaaggttgccgtcagccagcccaaggtccctgttggtgttgatcccaagtcaatattg

SEQ ID NO: 7415 - DNA, 382 bp, Zea mays
  Clone ID: LIB3150-006-Q1-N1-A2
attgttaccgaggacttctttccacttgccagcaaagggaaatctgggaaggatggctggtatcctcctggtcatggtgatgtgtttccctctttgaataacaacggaaaacttgacatcttattggctcagggcaaggagtatgtctttgttgcaaactcagacaacttgggtgctatagtcgacatcaagatcctaaaccatctgatcaataaccagaacgagtactgcatggaggttactccaaagacgctggctgacgttaagggtggcactctcatctcttacgaaggaagagttcagcttttggagattgcccaagtatccgatgagcatgtgaaatgaattaaatcaatcgagaagttaagatattaacactaac

SEQ ID NO: 7416 - DNA, 379 bp, Zea mays
  Clone ID: LIB3150-006-Q1-N1-A5
gttttgctgctctccgaccccgactgcgaggccgcagcatcaggcgcggcccccctcgcgtgtgaccgagatggcgctgccgaatcaggggaccgttgattaccccagcttcaagctcgtcatcgtcggcgatggtggaactggtaaaactacatttgtgaagaggcatctcactggagagtttgagaagaaatatgaaccaaccattggtgtggaagttcatccgttggatttcaccactaactgtggtaagatcaggttctactgctgggataccgcagggcaagagaagtttggtggcctcagggatggatactatatccatggccagtgtgcgatcatcatgtttgatgtaacctcaaggcttacttacaagaat

SEQ ID NO: 7417 - DNA, 388 bp, Zea mays
  Clone ID: LIB3150-006-Q1-N1-A6
cacacagcgaaccgagaaaccaacacagcgacaagcaaagcagcgatccgacatccgagagatggacgcggtgatgttcgggctggagactcccctgatggcggcgctgcagcacctgctggacgtgcccgacggcgacgccggcgcgggcgacaacaagacgggcggcggcggcggcgccacgcgcacctatgtccgcgacgcgcgcgccatggcggccaccccggccgacgtgaaggagctgcccggctcgtacgcgttcgtggtggacatgccggggctgggcacgggcgacatccgggtgcaggtggaggacgagcgggtgctggtggtcagcggcgagcggcgccgggaggagcgcgaggacgacgccaagtacctgcgcatg

SEQ ID NO: 7418 - DNA, 382 bp, Zea mays
  Clone ID: LIB3150-006-Q1-N1-A9
cgccgcctctcctactgcatctccctggctctcgtcgcctcgttcgcttcgcctcctccccgccccgccccgagccgagcaaagcgcagccctagccggagctgggatggcggacgccaagcatcagcagcagcagcagccacagcaggcggcagcggcagccaccggcgtgtggaagacggtcaagcccttcgttaacggcggggcctctgggatgctcgcgacctgcgtcatccagcctatcgacatggtcaaggtgaggatccagttgggtgagggctctgctggtcaggtcacaaggaacatgcttgcaaatgagggtgtccgttctttctacaagggtttgtccgccggattgctgaggcaagcgacgtacacgact

SEQ ID NO: 7419 - DNA, 352 bp, Zea mays
  unsure at all n locations
  Clone ID: LIB3150-006-Q1-N1-B1
gcgacatggagtacagaaagagggtgggggcgttattgtttttctcgttacttctgctcggatactttgctgctcatgcacatgggaagggtcatgccacaaataatatcnntgtttctactccatctaaagaaggaattatgcaaggaaacggagcatgatgcattgtagggtttcctccatgcaaagataacaagtgctactgctgcattgggggggcgaactcatgttcgctactctacgctggctgagtgtagtcatgcctgcttctaaacaaaaattaatatcactgatattacatacattgtactggtaggtaatgctattaataatatatagaaagtttagtttt

SEQ ID NO: 7420 - DNA, 249 bp, Zea mays
  Clone ID: LIB3150-006-Q1-N1-B10
aaaaaaaaaaaaaaaaaaaaaaaagagagaaaaaaaaaaaaaaaaaaaaaaaaaaaaaaaaaaaaaaaaaaaaaaaaaaaaaaaaaaaaaaaaaaaaaaaaaaaaaaaaaaaaaaaaaaaaaaaaaaaaaaaaaaataaaaaataaaaaaatctttttccttttataaattaaaccctattacatttccaaacatcattccatacgaaagtgtaaatttataagtctgttttacctaatgattaaatat

SEQ ID NO: 7421 - DNA, 381 bp, Zea mays
  Clone ID: LIB3150-006-Q1-N1-B11
ggcatctcccacttcacctcccacatgggattcctcgacgtcatgcgctccgtcgtcaaccgccacgacgagtggaagtggcagacgatcgtcatgggctccgccttcctcgccatcctcctcctcacgcgccaaatcagcgccaggaacccaaagcttttctgggtatcagcaggtgctcccctggcgtcggtgatcatctccaccatcctctccttcatctggaaatcccccagcatcagtgttattggcatcctccccaggggagtgaaccctccttcggcgaacatgctcagcttcagcggctcctatgtggcgctgacgatcaaaaccgggatcatgacaggcatcctgtccttaacagaagggatcgcagtgggc

SEQ ID NO: 7422 - DNA, 384 bp, Zea mays
  unsure at all n locations
  Clone ID: LIB3150-006-Q1-N1-B2
cgcgggattggaaaaaagattcctcggcgaaccctaccccatgcgatctctcatcncatggccaccggaccgcggtctctccacgccctcctcggcggcggtgcagttgccgacttgctgctgtggcgaccgatgaatgcctctgcggcagccgtggtgggcgccaccacggtctggttcgtcttcgagcgcgcggggtacagcttcccctccgtcctctccaacgccctgctcctcctcgtcgccatcctcttcttctgggccaagtctgcgttgctgctcaacaggcctcttccacctcttcctaatcttgaggtctcagatgcgattgctgaaaaagctgcaaatcatgctcttgtatggatcaataggctgctggctgtt

SEQ ID NO: 7423 - DNA, 382 bp, Zea mays
  unsure at all n locations
  Clone ID: LIB3150-006-Q1-N1-B3
gccggcgagagagcgactgatatggagacgacggctgctgcggccggcgtgtatctttactcttcnaanccccagatcgcgactcaggcggagatggcggaggcccttgtgcctctctcctaccgcgaccagttctctcacctcctcatcccgctcaacaagtgccacatcaccaagttctacctcccctggaagtgcgagccctagcgccacgcctactagaagtgccagtacgagctcgtcatggagcggatgctccatatgcataagatccgcgaggcgcatgagaccaatgtcaatggcggctccttcattggcctcatcccggccaccgccaaactcgcctgatacgggtcccaacccgatccggttgatttaggtc

SEQ ID NO: 7424 - DNA, 388 bp, Zea mays
  Clone ID: LIB3150-006-Q1-N1-B4
gttcagcggtaggaacaggccgtcacggggtcatccgccaaaggacaatccatttgctcacacaggcacaaacgctgagcgcctgagcctgctctcgcggtctaggagatggcgttgatcacgaatgtctctgactatgaggagcttgcaaagcagaagctgcctaagatggtttatgacttctatgccgggggtgcagaagaccagtggacactcaaggagaataaggaggcattctccaagattctgtttcgaccacgggtgctgattgatgtgtctcatattgacatgtctacaagtatattgggttacaaaatttccatgcctattatggtggctcccactgctttgcacaaactagcccaccaagaaggagaggttgcttctg

SEQ ID NO: 7425 - DNA, 388 bp, Zea mays
  unsure at all n locations
  Clone ID: LIB3150-006-Q1-N1-B5
ctggtctccccagatctcccaccggggagccctacccgagcatcagccatggcgatcgcggcgcgcgtcctgcgccgcctcccgctccacctctacccctcgctcgctcgctctttctgcgcagtttccccggccgccgcctcggccgccccggcgtccgcctcggccgccccggcgtccgccaaggtcgccgatcgcatcgtgcgcgtcctcgccatcgatctcgagggggcgcgccgcgaggtcgtcggcctctccgggcagacactcctccgcgcgctcgccaacgcggagctcatcgagccggcctcccaccgcctcgaggatatcgacgcgtgctccgccgagtgcgaggtccacatcgcgcangagtggctcgacaagctgc

SEQ ID NO: 7426 - DNA, 353 bp, Zea mays
  unsure at all n locations
  Clone ID: LIB3150-006-Q1-N1-B7
gacctttagcgcggcagaacaaatgggggggaaaagcctgcctacggacccttcttctatcccttccgtgccctatccaacaactccacccaatgctacccacacacctcgcttttatcttaaattcagcccctcacaacgataaaaacttcaacctcaattccatctctatctntccacctggacctctgagctaatggtgtctgatagggtggattctgtctactttaacgggaagcttggcccggcagtgccatgctacgtccccgtctcccgcgatgccgactgtctggcttgtttgatcagaattgctgacttgatcaatgccaacactaaggtgctcaaagctgatt

SEQ ID NO: 7427 - DNA, 332 bp, Zea mays
  Clone ID: LIB3150-006-Q1-N1-B8
catgactgccatgtatgagctgcaagggctaaaaacatacataaagagaaatacaaagagatccctacccttcttagagatactgactatggacgcaaaaccaccaaatgactccatatttctgctgcttcttgtgtcgcaaaatccttcttcctcctgtgcagacaaccaggattgcttttacaccactcaccgcttggcgacctggtgcgtgtactgaacctgcaagttcagctgcctgaacgactcccaacagttccatacctagtacaagaacagatcacgcgaaagctccacgagaggcatgtttcactggcacttctgcgactgat

SEQ ID NO: 7428 - DNA, 386 bp, Zea mays
  Clone ID: LIB3150-006-Q1-N1-C1
cggaaacagtagtgctgccagtagagctgtcagaactcgggaaaaaaaatgtcagaggccgccgtgcgtgtgatcggcctatggccgagcccgttcgtgatccgcgtcctgatcgccctgaagctgaagggcgtcgagttcgagttcgtggaggaggtggtgggcaggaagagcgagctgctgctgaggtcgaacccggtgcacaagaagatccccgtcctgctccaccacggcaagcccatctccgagtctctgatcatcgtccagtacatcgacgaggtctggtcctccggcgcgccggcctttctccccgccgacgctcacgcccgcgccgtccagcggttctgggcgcagtacgtcgacgacaagctgtcttgggcgatccg

SEQ ID NO: 7429 - DNA, 382 bp, Zea mays
  Clone ID: LIB3150-006-Q1-N1-C10
gcggcaagaacaccatcgtgctgcacgacacctgtgaggactcgctcctcgccgcacctatcatccttgatctggtgctcttggctgagctcagcaccaggatccagctgaaagctgagggagaggacaaattccactccttccacccggtggccaccatcctgagctacctcaccaaggcacccctggttccccctggcacaccggtggtgaacgctctggccaagcagagggcgatgctggagaacatcatgagggcctgcgttgggctggccccagagaacaacatgatcctggagtacaagtgagccaagtggcgtgccctgcagcgcgaggttagctgctggaagggaactagaaaggcgagattagctgtgggatt

SEQ ID NO: 7430 - DNA, 382 bp, Zea mays
  Clone ID: LIB3150-006-Q1-N1-C11
cgacgaattggaatacggaaagcgagggatgatggatctcgccgacccccagcagcagcagcggctcatcgccggcgcggcgctgctgctggcaaccgcggccttcctcaggctcctcctgggctcccgctcccggggcggcaagcgcctgccgcccaccatcccgggggcgccggtgatcggcggcctcgtcaagttcatgcgcgggcccatccccatgatccgggagcagtacgcccgcctcggcagcgtcttcaccgtccccatcatcacccgcaggatcacgttcctcgtcggccctgaggtgtccgcgcacttcttcaagggcaacgaggccgagatgagccagcaggaggtgtacaggttcaacgtgcccacgttc

SEQ ID NO: 7431 - DNA, 375 bp, Zea mays
  Clone ID: LIB3150-006-Q1-N1-C2
ggctgccgcagactggtagtagccggggcgccgtcaccgtatcctcagatcagcggcgagcatataccacaccactctactgacgcccgacgagcagtgtaacattttccttcagccatgggtaaggagaagactcacatcaacattgtggtcattggccatgtcgactctggcaagtcaaccaccactggccacctgatctacaagcttggaggtattgacaagcgagtgattgagaggttcgagaaagaggctgccgagatgaacaagcggtcattcaagtatgcgtgggtgcttgacaagctcaaggctgaacgtgagaaaggtattacaattgatattgccctgtggaagttcgagaccaccaagtactac

SEQ ID NO: 7432 - DNA, 386 bp, Zea mays
  Clone ID: LIB3150-006-Q1-N1-C3
gtcactgggttcggcaacccggactgggcgaggacgcatgcccccgccggcgccacctcccccgtcgtcctggcggcgctggccgccggcgccatcagcatcggcaagaccgtcatggatgagatggcctacagcataaatggggagaacgcgcactatggcacgccgactaatccgtgcgctcccgatagagtccctggaggatcctccagtggatcagctgttgcagttgctgcaaaactcgtcgacttcgctctgggtcagcagtccctgcaccggctcttctcctggcactgacactggaggtagtgtgagggtacctgctgcctattgtggcatatttggactcaggccttcccatggattggtttctacagaaaatgtca

SEQ ID NO: 7433 - DNA, 307 bp, Zea mays
  Clone ID: LIB3150-006-Q1-N1-C4
cttccccggaagtgcttccgagaataagttttcttatctgattgtctaaaacctataacgggtgtatcgtagtggttgttatcgttaaacttttaacggtcattctatttcaaaagttttgcattttgcactcaaaaaaaaaaaaaaaaaaaaaaaaaaaaaaaaaaaaaaaaaaaaaaaaaaaaaaaaaaaaaaaaaaaaaaaaaaaaaaaaaaaaaaaaaaaaaggggcggcacccacaaaattttaaaacccggtccttctagagttaccagtttccctttttgggggcgtttttaaagttggg

SEQ ID NO: 7434 - DNA, 382 bp, Zea mays
  Clone ID: LIB3150-006-Q1-N1-C6
gtttttgattttagccgccgccgctacgcatctcacatccctcgagaagacgcctgctcctcgccgatcgatacgatggccgtcttctccgacctccacaccgccgacggcctcaagtccctcgaggctcacctcgccggcaaaacctatgtgtctggtgactccattactaaggatgacattaaggtcttcgccgcggtgccgtcgaagcctggcgctgagtttcctaatgccgcccgctggtacgagaccgtctctgcggctgtagcctcaagattccctggtaaggctgttggtgtaaatctgcctgcgggatcatctcctgcggcagctgctcctgcggatgaggctgaggatgatgatgaccttgatctttttggtg

SEQ ID NO: 7435 - DNA, 385 bp, Zea mays
  Clone ID: LIB3150-006-Q1-N1-C7
ccgctgtagccgccatgtcgtccgggggcgccacagcctttgccggagtctccgtcgccaccccgaacctcaccactccatttcgcggtcgcgtgcgccttccgctacgcggggtctccgctgccccacgccgcgccgtcgcttcgatggccgtgtccgcccccaggtccggcgccgccgcctcgttcctggagcgccgcgagtccgagcgcgctctccacttcgtcaagtaccagggcctcggcaatgacttcattatggtggacaacagggattcgtcggtgccgaaggtgacgccggaggaggccgcgaagctgtgcgaccgaaacttcggcattggtgccgacggcgtcatcttcgtcatgccaggggtcaatgatgccca

SEQ ID NO: 7436 - DNA, 258 bp, Zea mays
  Clone ID: LIB3150-006-Q1-N1-C9
cagctcatggcgaaacaaaacccgcgtgcctatactgccccctcgcagactatacacgtgtatctagtgtttttgcctctcctcgcactcctcctgaatcttctatacgttctaggaggatgagaggctttcttctcctcctcatccattgcgtccaccaatgtgcagcttattatgacccatcccatcaaccttattttccgtttccttcagatcaaatcacgcatccttatctggctcttctagcataaagacctt

SEQ ID NO: 7437 - DNA, 384 bp, Zea mays
  Clone ID: LIB3150-006-Q1-N1-D1
attgcgaccacagacagcgcgcgcttgagggccttttttttttgagataacaaggaggagaggaggagatggcggtcacgatcacgtgggtgaaggcgaggcagatcttcgacagccgcggcaaccccaccgtcgaggtggacgtgggccttagcgacggcagctacgcgaggggggccgtacccagcggcgcatccactggaatatatgaggccttggagttgagggatggaggatctgattatcttggcaagggtgttcttaaggctgtcagcaatgtaaataacattattggaccagcaattgttggaaaggaccccactgagcaggttgagattgacaacttcatggtccaacagcttgatggaaccttcaatgagtggg

SEQ ID NO: 7438 - DNA, 385 bp, Zea mays
  Clone ID: LIB3150-006-Q1-N1-D10
ctcatggccaagatcaagatcgggagcgatgggttcggcaggatcggaaggctggtggccagggtggccctgcagagcgacgacgtcgagctcgtcgccgtgaacgaccccttcatcagcaccgattacatgacctacatgttcaagtatgacactgtgcacggacagtggaagcaccatgaggtcaaggtgaaggactccaagacccttctctttggtgagaaggaggttgctgtgtttggctgcaggaaccctgaggagatcccatggggttccgttggcgctgaatatgttgttgagtctactggtgttttcactgaccaagagaaggctgcagctcacttgaagggtggtgccaagaaggttgtcatttctgctcctagca

SEQ ID NO: 7439 - DNA, 387 bp, Zea mays
  Clone ID: LIB3150-006-Q1-N1-D2
gcgcaatcgcgctcccgcatttcgtcgagcaggtgtgaatttgtgatgccgccgtctcctatcgtcctccctgccaccgcgctgccggcggcccgcctcgccagagtggtggccgcctccgaaagcggaggcgcgactcctccgagggcgtcccctcggcgggggcggcgcggcaagcccgggttctctcggcgttcggcaatcaagaagagcttccaccaggagcaggtcgtgttctccactcccgtctccaccgaccccaccgttgccgtcatcggaggcggcgcttccggcctctcctgcgcaacttccctcgccgcccgcggcgtccgctccgtcgtcttcgatacggggatgcatggcctatggggaaggatggcgactagg

SEQ ID NO: 7440 - DNA, 379 bp, Zea mays
  Clone ID: LIB3150-006-Q1-N1-D3
gattgttccagatattcgcagttgaccgggtcctcggagcacgatgaagtttgttgctgcctacttgcttgctgtcctcgctgggaacgccagcccctccgctgaggatttgactgccattctggagtcagttggctgtgaagttgacaatgaaaggatggaactcctgctgtcccaactgagcggtaaggacatcaccgagctcattgccgcgggcagggagaagtttgcttcagtcccatgtggtggcggtggtgtcgctgttgcggcagcttcacctgctgctggcggagctgctcctacagctgaggcaaagaaagaagagaaggtggaagagaaggaagaaagcgatgatgatatgggcttcagcctcttcgac

SEQ ID NO: 7441 - DNA, 342 bp, Zea mays
  Clone ID: LIB3150-006-Q1-N1-D7
accacgtctgtgaccgctgtgtcttgtccagggcctatggggactacgccattgttatcatccacaacccttacaacggcacatcgaggattaagctgccctttggcgcctagaagattgtccccagcagcttccgtgctatgattgggcaggttgttggttgaggcaggactgataagccgatgctcaaggcttgttacgcttaccacaagtaccgtgtgaagaggaacagctgtcccaatgtgcttggtgtggccatgaaccctgtggagcattctcacggatgatgtaaccaccaacacatttgttacgcctttaatgttcagttagacactccccctt

SEQ ID NO: 7442 - DNA, 355 bp, Zea mays
  Clone ID: LIB3150-006-Q1-N1-E10
gtcccttatgatgtccgcgtgcgcagaaaggcattggggatttgcggcagctatgtgcactacctaagggagatgcgcatcgcgcacttcgtggtgaaggagccgatggtgatcgggcacgagtgcgctggcgtggtcgatgaggtgggcgccggcgtgacgcacctgtccgtgggcgaccgcgtggcgctggagccgggcgtcagctgctggcgctgccgccactgcaaggtcgggcggtacaacctgtgcgaggacatgaagttcttcgccaccccgtcggtgcacggctcgctggcgaaccatgtggtgcacccggccgacctgtgctttaagctccccgactgtttgagcc

SEQ ID NO: 7443 - DNA, 386 bp, Zea mays
  Clone ID: LIB3150-006-Q1-N1-E2
atatggacaagctgggtcatggcatatacatgccattggatgtcaatctgcttcctcctctatacctcatctatgccgataaccccagtgactctggcaaggtccacagcactgttagacaaagatggctgtcaggtgatgattttataacatcacgtatgaaggaagtagcgcagctagcgctcgatggccacaaggctttgctgcagaaggattatactgagctagcgagatttatgaataagaattttgatctgcgaagggagatgtttggagatgatgtacttggtgcattgaacataaagatggtggatgtggcacgcagcgtgggcgcagcgtccaagttcactggcagcggaggcgcagtggtggcgctgtgcccagat

SEQ ID NO: 7444 - DNA, 377 bp, Zea mays
  Clone ID: LIB3150-006-Q1-N1-E3
tgcctaccttgtcgccgatagagttggggtgaccaccaagcacaacgatgacgagcagtacgtgtgggagtcccaagcgggcgggtcgttcactgttactcgtgacacgtcaggggagcagcttggcaggggcactaagatcacactgttccttaaggacgatcagctggagtaccttgaggagcgtcgcctcaaggatctggtcaagaagcactctgagttcatcagctaccccatctccctgtggactgaaaagacaacagagaaggaaatttctgacgacgaagacgaggtatagaagaaagatgctgaggaaggaaaggttgaggattttgatgagaaggaagagaaagaatagaagaataagaagatcaagg

SEQ ID NO: 7445 - DNA, 385 bp, Zea mays
  Clone ID: LIB3150-006-Q1-N1-F1
cccaaatatcccccaagcaaggaatacgatgctaagcttcgagatgaagaagctaggaggcaaagagcagctgctaaaggacaggaagctgaagctggacggaggaagcaacttcctgcacccgatggtaatagtggattgcagcaccgccgagttcaggtgaattccaaaaacagcacttacaagttcactccaaaggaggatgtttctggatttccaattgatccttcagcaagagctgcagataatggttacccacagcgtgttcctttgatgcaagctggccgttcttcatccactctgggcagatcaagtggaacggatccaaaggcccaacgatttcacacctcccaaattgttactacagaaatgtccaaccaatcta

SEQ ID NO: 7446 - DNA, 365 bp, Zea mays
  Clone ID: LIB3150-006-Q1-N1-F10
ccattttggaggtgaggcgggggtgggtttgaatgctccaaggatttcatgactctggtttccacgccgagaagccactcctcgtgctgccctcctgcctcctcgccccgttcgtctccgccgtccccatgccaagaagcctgcgcctggggagccaccagcagcacccgccggctctgaagctcagttcctctcagatactgccaattagctgtttccgtcaggtcttccgcctgctgcagtgtttccccctcttgatttggcacaattgttagcgaatatacagaggttaatcaatcaattaactaatcaattcagcgatggtggatggaaaaaatttaatttttataatttttctaatttta

SEQ ID NO: 7447 - DNA, 226 bp, Zea mays
  Clone ID: LIB3150-006-Q1-N1-F2
gcagccgccgcctgctcgctcgcctcggctccggcagcgagctctatctcccgcgacgagcagcagctgccaccgacgcacgcagaccggggaataaatattggtattggtagtgggatatctataagaagtcaagaaggtgaagttcacaactgaagagctccgtgccatcatggacaaaaagaacaacattcggaacatgtctgtcattgctcatgtggaccat

SEQ ID NO: 7448 - DNA, 351 bp, Zea mays
  Clone ID: LIB3150-006-Q1-N1-F3
ctccgaaatactccaaggcacgttatgatgagattgtgaaggaagtctcatcctacctcaagaaagttgggtacaaccctgataagattgccttcgttcccatttctggttttgagggcgacaacatgattgagaggtccaccaaccttgactggtacaaaggcccaaccctgcttgaggctcttgaccagatcaccgagcccaagaggccttcggacaagcccctgcgtctgcccctccaggatgtgtacaagattggtggtattggaactgttaccgttggtcgtgtggagactggtgtcatcaaacctggtatggtagtcacctttggtcccacttgcctgactactg

SEQ ID NO: 7449 - DNA, 371 bp, Zea mays
  Clone ID: LIB3150-006-Q1-N1-F4
gtgaccctccctcagccgcgtcgcgtggggtcctacgatccaaagctctctctgctcgcaggtcgcagccatggcgaagaactacccgaccgtgagcgccgagtacagcgaggctgtggacaaggccaggcgcaagctccgagccctcatcgccgagaagagctgcgccccgctcatgctccgcctcgcgtggcactccgcggggacgttcgacgtgtcgtcgaggaccggcggtccattcggcacgatgaagcatcagtcggaattggctcacggcgctaacgcggggctggacatcgcggtgcggctgctcgagcccatcaaggaggagttcccaatcctctcttacgccgatttctaccagctcgcgg

SEQ ID NO: 7450 - DNA, 297 bp, Zea mays
  Clone ID: LIB3150-006-Q1-N1-F5
attcctccctcctcgttgactgccgcggggagcgatctggtcgtcaccttcctggaccgaccccaggccacggtgcagcagcctgcactctagtccgtgcgtgtcgcgtcgcgtctgcgggcggcattgcgtatcgtttctgtaggagcagaggagcaacttccttaagcaattgttcccgtccccgcagaacggcatgttttcgccttccccttgcgggttcaatggccgccgccaccaccaacagcggcaggaggcggtttcgtccatggaatcccgcggcggcgcgtctggggc

SEQ ID NO: 7451 - DNA, 381 bp, Zea mays
  Clone ID: LIB3150-006-Q1-N1-F6
actcatcattcttacacctatcccgtgcgcgctgttaatggaggtgcgagaatagcctctccacaatgtttttgctatcttccatgaccttgacaactgcatgcacccaatcattgtcctctatccttacctaccaatccctgcgcataatctccgtaacatgtcacagccacttttggtcttaaatcttttccaccatctttaagtcccccaatgcctcttgacagtcttatgaagacatgctgcattgctatattgattccaattacaataataggcgccccaccaccgaggtttaagttacccaactacttatcgcaatactctttgttatacaacttaccatctcaatcaccttaacccttactgaaccatacattc

SEQ ID NO: 7452 - DNA, 386 bp, Zea mays
  Clone ID: LIB3150-006-Q1-N1-G2
gcggctgcggcggagcacggaggcgaaggaggaggagcagcagcagcaggcggcgccgaggagcggcatcccactcagtgcttgcaaccatggctaggggattgaagaagcacttgaagaggctcaatgcgcccaagcattggatgctcgacaagcttggcggagcttttgctcccaagccatcttctggacctcacaagtccagggagtgccttcctctgatcctcatcatcaggaacaggctcaagtatgctctgaactaccgtgaggtcatttctatcctgatgcaacgccatgtacttgttgatggcaaggtcaggactgacaagacctaccctgctgggttcatggatgtcatttccatccctaagacaatggagaactac

SEQ ID NO: 7453 - DNA, 389 bp, Zea mays
  Clone ID: LIB3150-006-Q1-N1-G3
agacgctcgtccgcatcactggtggcatgaaggttaaagctgatcgtgatgagtcctcgccttatgctgctatgcttgcctcacaggatgtcgcgcaaagatgcaaggagcttggaattactgcattgcacattaagctccgtgctactggtggaaacaagaccaaaacccctggccctggtgctcagtctgctcttagagctcttgctcgatctggcatgaagataggccgtattgaggatgttactccagtccccacagacagcacacgcagaaagggtggtagaagaggaaggaggctgtaatttcgagtcctgacgtggtgccctgtcagatgtagcagttcaagtctgtctgcatctaatatactgagttattaggttttgtat

SEQ ID NO: 7454 - DNA, 387 bp, Zea mays
  Clone ID: LIB3150-006-Q1-N1-G7
cgaaaccgaaagagaggcagagcttgggaatggagctcccgtggggaatgctgctgccgctgctgctggtcctctccgtctcgtcctcgtcatcgtcgtcggctgctgccacgctcgccgtcagcgctccgcccccactgcctgttcctcctcctcgtcatgctcaagacgccgaaggcatgctcatcaacggcaacttcgagacggcgccgcggaagctgaacaagaccctgatcgtggggcgccactcgctgccggggtggacggtgcagggccacgtggagtacgtctcgggcggtccccagcccgggggcatgttcttcgcggtgccgcacggcgtgcacgcgctgcgcctcggcagccgcgcgtcggcgtcgcagaacgtga

SEQ ID NO: 7455 - DNA, 368 bp, Zea mays
  Clone ID: LIB3150-006-Q1-N1-G8
ggcaaggccaatcccgatcagtggtgggaaacctttagcgctagcgccggtgaccataacaaagaggaagccgcggtttctctggtatcggcagcagtaagggggagatgtcgttggcgtttaacggcgatgagaccgcccctttgttcggcttccttggcgcctacgatgagctcgtcttcttatgcatgggggcggcgtacggtacagccaagattggcatcggcgtggcgtgcatgggtgtcatgcgcccagagctcgtcatgaaatccatcgtgcccgttgtcatggctggtgtgctcggtatatacggtcttatcatcgccgtcatcatcagcactgggatcaaccacaaggacaagccatac

SEQ ID NO: 7456 - DNA, 348 bp, Zea mays
  Clone ID: LIB3150-006-Q1-N1-H1
gtcttctgctcccccttcggttcgggtgggggttcgtgaggctctccggggttcggtttcgtgggtgagcggatcgagatggcggcgtcggatgttgagtaccgctgcttcgtcggcggcctcgcctgtgccacggacgaccactccctccacaacgccttcagcacctacggcgagggcctcgagtccaagatcatcctcgatcgggagacgcagaggtcccgcggcttcggcttcgtcaccttctccacggaggaggcgatgcggaacgccatcgatggcatgaacagcaaggagctggacggccgcaacattaccgtcaacgaagcccagtcccgcggcggccgt

SEQ ID NO: 7457 - DNA, 361 bp, Zea mays
  Clone ID: LIB3150-006-Q1-N1-H11
caacaatctctctcccctcactccctgtctgcagcgcgcagctttcaaagcgttgggagagatggcagaggagacgcaaccagaggccgccgcatccgccgccgcgcccgccgcggccgaggtagtcgtgaccgaagctgctccggcggaggcggaggtgcctgcggcggcggaagctgaagccgaggccaaggatgagaagaaaggtgacgaggcggagctcaccgccgatgacgcgggggtggggaccggctcgttcaaggaggaaagcaacctggtggaagacctgcccgacccggagaagaaggcgctcgacgagttcaagcagctgatcgctgccgccctcgccgccggtgagttc

SEQ ID NO: 7458 - DNA, 390 bp, Zea mays
  Clone ID: LIB3150-006-Q1-N1-H2
ctcggctacgctgccggcacggccaagggcatggcgccccgcgcccgcgtcgccacgtacaaggtgtgctgggtcggcgggtgcttcagctccgacatcctcaaggccatggaggtcgccgtgacggacggcgtcgacgtgctctcgctctcccttggcggcggcacggcggagtactaccgcgacagcatcgcggtgggcgctttcagcgccatggagaaggggatcttcgtgtcctgctccgcgggcaatgccggcccgggcgccgcgacgctgtccaacggcgcgccgtggatcaccaccgtgggcgccgggaccatcgaccgcgacttccccgcctacgtcacgctcggcaacggcaagaactacacgggggtgtccctgtacagc

SEQ ID NO: 7459 - DNA, 385 bp, Zea mays
  Clone ID: LIB3150-006-Q1-N1-H3
aaaagcttgaagatattgttccttcagggacaactgtgacattccgcatgtgaaccgtactgagtatcagctgattgatatttctgaggatggatttgtgagccttcttacttcagatggcaacactaaggatgatcttagactcccaactgatgagactcttgtggcccagattaaggaagggttcgaaagcgggaaggatcttgttgtgactgtccagtctgcgatgggggaggagcagatctgcgcgttgaaggatgttggccccaagtaacttccttggctttggagacggaaccctactgtatctcaacttaaatcggaaaaaaagtgtatcaccaaaggattgctaccgagacattcacctggcttgagctggcttttg

SEQ ID NO: 7460 - DNA, 386 bp, Zea mays
  Clone ID: LIB3150-006-Q1-N1-H4
cgaatccgccgtgagatccgcccgactggcgctccgttccggcgctctcggtcgggcgaaggctccaccttcctccgacaagatggcggggaagggagccaaggccacggccgccaagtcggcggacaaggacaaggggaagaagaccggcggccccgtctcgcgctcctcccgcgccgcaccccaggagaagtcagctccgaagaaagatgtttatcaattgttcgctgagaaggtcagggataacaaacaactggaatcaagatgggcgatcatgcaagaaacccgcgtggagtatttccgtggaaaagatttcaataccttcgtcaagaatcatccagaagtcagggaaattttggggccagataaagatttagaggtggaag

SEQ ID NO: 7461 - DNA, 63 bp, Zea mays
  unsure at all n locations
  Clone ID: LIB3150-007-Q1-N1-A1
ctcgcctncgtctttccctcccccagctcaggcaggaccgcaggagccagacccaaacccacg

SEQ ID NO: 7462 - DNA, 366 bp, Zea mays
  Clone ID: LIB3150-007-Q1-N1-A11
acgaggtgtacgcgcgggtgtcgctgctgcccgaggacgaggtcgcggagaagcgggcgcaggcgcgggtccgggacgacgaggacgcggatcgccgcgacggcgaggacggcggcgccatgaggccgctcgcacggacgccgcacatgttctgcaagacgctcacggcatccgataccagcacgcacggcggtttctcagtgccgcgccgcgccgccgaggactgcttcccgccgctggactacagccagcagaggccgtctcaggagctcgtggccaaggatctacacggcacggagtggaagttccgacatatctatcgaggtcagccacgaaggcatctcttaaccactggatggagtgcat

SEQ ID NO: 7463 - DNA, 343 bp, Zea mays
  Clone ID: LIB3150-007-Q1-N1-A2
gcaatgaggaagaggaggaagaatctgaagaggatgatgatgatgatgatgaagtcccccaaccacctactaaaaagaggaaatgatcaacggctgcgacgagtggttgcttatacgcaggaatgctgcctgttcgtccctgcgcagcagtttactgtttagtgggtagagttttttagcttggtcgtggacaattcatagcctagtttggaaacgaaaaagaaacatttaattgtgcatgtactattaaaccattcctttaatcatgtatctcaaattgctatcatggtttctaaattgtgtttgcctaagttttgtattgcaatttaacaatgttcttgtg

SEQ ID NO: 7464 - DNA, 194 bp, Zea mays
  Clone ID: LIB3150-007-Q1-N1-A3
gccatattcaatgcacatactttggaggtggattcacagccgtgtgggggtctatccagctcaccacggagtcccgattccctgagcagccacttgtgtgctatcagtgtataaaccactgtatgagataacatatctgcgtactccacgaatagtacaaggagatatacattgacatgaacgccatctagagt

SEQ ID NO: 7465 - DNA, 396 bp, Zea mays
  Clone ID: LIB3150-007-Q1-N1-A4
gctccatctgcttctgaggaacaagctatgatgaataacttttccaagaattctgagacttcacattttcttgatagcaatgctgtggaagtgagaactggaacttcagagcctactgttcaaagttccaatgacgaaggtgactcggatattagtccagaaacagacctagctgtttgcaatgttcctctagtttcatctgagggacaactgaaatctgagagtagggctgatgatcaacaggctgctgaaccaacagtttcagttcgatcagtatccagggaaaagcctagtgttgagatcgccaggtcaaagtccgcagctgggaagaggaagaagaaaaaggaaatgcttgctaaggctgatgctgctgggtcttcagatctttataatgca

SEQ ID NO: 7466 - DNA, 336 bp, Zea mays
  Clone ID: LIB3150-007-Q1-N1-A5
gttcatttcacctcttatattccatgaaagcgtcatgattgcagttgctcgtggtgataacactggggaatcaattcctatgctcctaaggataccccgcttctttgatccatggggtggttatgatatgataggctttggtgacattatcttccctggattgcttgttggattcagctatagatttgacagagcaaacagaaagggtgtcttgagtggatattttctctggctaattgtgggatatgcagttggccttttcattacgtatcttgcgctgttcttgatggacgggcatggtcaacctgcgttgttgtaccttgtgccatgtacatt

SEQ ID NO: 7467 - DNA, 205 bp, Zea mays
  Clone ID: LIB3150-007-Q1-N1-A7
gcgagagacagacgcgtatacgcaggcggcggttgaggaggaggagaagaagaagaagaagatggcttcctccgcgtacgcctcatggtccaagcggtggatccgtcccgaggtgtacccgctgttcgtgccgatggccgtggccctgggtatctgctcgtaccagcttgtgcgcaacatcacgggcaaccccgaagtgcgggtg

SEQ ID NO: 7468 - DNA, 170 bp, Zea mays
  Clone ID: LIB3150-007-Q1-N1-A8
aaacagtcctgatgaagggtttctgtttaggcagtttcctgaaatggtgttttgctctaggacaatctcgcggttattgaaccttaatatatcgtgtccctgggttgtgtttttttgacactttataagtaatttcatttggatgagacttaattctggtttgactcgtt

SEQ ID NO: 7469 - DNA, 99 bp, Zea mays
  Clone ID: LIB3150-007-Q1-N1-A9
ccgacgcgtgggcgcgagccgaggccaccagaataccggagcgcggcatggaggcctaccaactaaccctattgcgagtccgatgacagcttgccgtac

SEQ ID NO: 7470 - DNA, 177 bp, Zea mays
  Clone ID: LIB3150-007-Q1-N1-B1
tcgtctaccactaccagcctactttgtagtagtccccgaagccgcgagtcgcgcatacctttaccgcacgccgagaaaggatggcgtcgtggtcgtcgccctcagccgccgcctcgggcgcccgattcggcccctttccgagcggagggcagcggctcgcgccgtgtccgtcgctcg

SEQ ID NO: 7471 - DNA, 367 bp, Zea mays
  unsure at all n locations
  Clone ID: LIB3150-007-Q1-N1-B10
gcttggataccctgacactggcggtcaggttgtgtacattctggatcaagtccgtgctttggagaatgagatgcttctgaggattaagcagcaaggccttgatatcactccgaagatcctcattgttaccaggctgttgcctgatgctgctgggactacgtgcggtcagcggctggagaaggtcattggtactgagcacacagacatcattcgcgttccgttcagaaatgagaatggcatcctccgcaagtggatctctcgttttgatgtctggccatacctggagacatacactgaggatgtttccagtgaaataatgaaagaaatgcangccaagcctgaccttatcattggcaactacagcgat

SEQ ID NO: 7472 - DNA, 307 bp, Zea mays
  Clone ID: LIB3150-007-Q1-N1-B11
gttcgagaaggacgctgattaagggaggactcgttcattcaagcgcccctgcctgctccacacgctcagggctgaccgttagagagggattaccatggatatagctctatcgaagtttgagaccaccaggtactactgcacggtcattgatgcccctggacaccgctacttcatgaagaacatgatcactggtacatggaatgctaactgtgctggccttatcattgactccaccactggtggctctaagggtgatatctacaatgacggccagacccgtgaacatgctctcgttgcagtaactctt

SEQ ID NO: 7473 - DNA, 328 bp, Zea mays
  Clone ID: LIB3150-007-Q1-N1-B2
cagtaactcgcatcttcctccgtgatccaagttctagcagcgcagcgctcggtttcgacaatatgtcggggcgcggcaagggcggcaagggtctgggcaagggcggcgccaagcgccaccgcaaggtcctgcgcgacaatatccagggcatcaccaagccggcgatccggaggctggctaggaggggcggcgtcaagcgcatctccgggctcatctacgaggagacccgcggtgtgctcaagatctttctggagaacgtcattcgtgacgccgtcacctacaccgagcacgcccggcgcaagaccgtcaccgccatggatgtcgtcta

SEQ ID NO: 7474 - DNA, 249 bp, Zea mays
  Clone ID: LIB3150-007-Q1-N1-B3
gctggcctcaatgtgctgcgtatcatcaatgagccaaccgctgctgctattgcctatggtcttgacaagaaggcaaccagtgtcggtgagaagaatgtcctcatttttgaccttggaggtggtaccttcgatgtctccctccttacaattgaggaaggtatctttgaagtcaaggccacagctggcgacacccatcttggtggtgaggactttgacaacaggatggttaaccactttgtccaggagttc

SEQ ID NO: 7475 - DNA, 392 bp, Zea mays
  Clone ID: LIB3150-007-Q1-N1-B4
ccgtcacgcccccaacacccccacaacccggagcagcgaaagctcccctaaccctctccgcgcatccgatcgcaaggaagaagagggagatgagctactacgggcagcagccccccgtcggcgtcccgccgcagcaaggctacccgggcaaggacggctacccgccagcggggtacccgccggccggcgcagggctaccctccgcagggctacccgccgcagtacgcgcagccgccgcctccacagcagcagcagagcagcgggccttccttcatggagggatgcttggctgccctctgctgctgctgcctcctggacgcctgcttctgagagtgagaggggccgaccgacggattcgacacggcgacaagtgaaactactaggcttctatg

SEQ ID NO: 7476 - DNA, 312 bp, Zea mays
  Clone ID: LIB3150-007-Q1-N1-B5
gcaggcggcaagggtcagccgcccaagaacgccgccggcaagggccagggccagggccagaagcagcagcagcccaagggtggagcgggcggcgccggcgccggcgcgaaagtggtggcgctgccgcactcgcagccgacgccgcagcagctgatgcagatgcagcagcagatgcagatgaacgggatgaagtttgctcatccggagctcatggccatgggcgcaggtcgcatgccgatgccgatgccgttcccggcggcagcgcatgcgcaggcgcaggccgtcgcggccaaagaccccaagaccgtcaag

SEQ ID NO: 7477 - DNA, 385 bp, Zea mays
  unsure at all n locations
  Clone ID: LIB3150-007-Q1-N1-B6
gcgatgcacaaggccaactacgctagtagaatctgccactcctgcaacccaaactgcgaagcaaaagtgacagcagtgaatggtaaataccagattggagtttacacacttcgaccaattgcagaaggcgaggaaatcacttttgattacaattctgtaactgagagcaaagaagagcatgaagcatcagtctgcctctgtggaagtcaagtatgccgtggcagctatttgaatttttctggtgaaggagcctttgagaaggtattaatggaattccatggtgtgctcgataggcatagcctgctgctacaagcttgtgaaatagactctgtctctcaacaagacttaattgactngngtagagcntgtcttggtacctgtttgc

SEQ ID NO: 7478 - DNA, 300 bp, Zea mays
  Clone ID: LIB3150-007-Q1-N1-B7
ctcgccaagagttcttcttgttaggcaaggcaaaagcagaagcaaaaaaagaaaggtcttgttgccgatggggagctcagggttctcgtggacgcttccggaccaccccaagctccccaaggggaaaccggtggctgtcgtcgtgctggacggatggggcgaggccaaccccgaccagtacaactgcatccatgtcgctcagactcctgtcatggactcgctaaagaatggcgctcctgagaaatggagactagtgaaagctcatggaacagctgtgggccttccatctgatgatgacat

SEQ ID NO: 7479 - DNA, 303 bp, Zea mays
  Clone ID: LIB3150-007-Q1-N1-B8
cgtgaacgctgctgtggccacaatcaagaccaagcgcaccatccagttcgtggactggtgcccgactggcttcaagtgcggaatcaactaccagcctcccagcgtcgtccccggcggtgacctggccaaggtgcagcgtgccgtgtgcatgatctccaactccaccagtgttgtggaggtcttctcccgcattgaccacaagttcgacctcatgtacgccaagcgcgccttcgtgcactggtacgtccgtgagggtatggaagagggcgaagtcttacaagctcgtgaggatctggctgcgct

SEQ ID NO: 7480 - DNA, 404 bp, Zea mays
  Clone ID: LIB3150-007-Q1-N1-C10
ggcagcttgaagctcgcgaaccagcggtggcgaatggggacgcggccgtggaggtcggcgggaacggggagcaggaagccgcggcgcgccaggcgtcgacgttcgcggagctgggtatctgcgcggagctggtggaggcgtgcgacgccatggggtggaaggagcccaccaggatccaggccgaggccatcccccacgcgcttcaagggaaggacctgatcgctctggcgcatacggggtccgggaagactggcgcgttcgcgctgcccattctgcaggagctgctcagcaaccgccaggctgaacagtctttttttcgttgcgtgctcttgtcaacgagagagctggcaattcatatcgcatagcagttagaagcgcttggatcaactatttggtttgcggtg

SEQ ID NO: 7481 - DNA, 323 bp, Zea mays
  Clone ID: LIB3150-007-Q1-N1-C2
gctccgcaccccaatctaatcgacacctcgccgagatgggccgcaagttcttcgtcggtggcaactggaaatgcaatggaaccacagatcaggtcgagaagattgtcaaaaccctgaatgaaggacaggttcccccttcagatgttgtggacgtcgttgtcagccctccttatgtcttccttcctgtggtcaagagccagctgcgccaagagttccatgttgcggctcagaactgctgggttaagaagggaggtgctttcaccggtgaagtcagtgctgagatgctcgtcaaccttggtgttccctgggtcattcttggacac

SEQ ID NO: 7482 - DNA, 347 bp, Zea mays
  Clone ID: LIB3150-007-Q1-N1-C3
ggataagacacaaaaacctcctgagcttccgtggatactgtgcggacggacccgagcgcgttctggtgtacgacttcatggcaaactcaagcctgtatgcgcatctccatggaccgcattccgcggagtgtctcctcgactggcggaggcgagcatcaatcgccatcggcaccgctcgggctctcttgtaccttcatcgccacgcaacgcctaagataatccacggaagcgtcaaggccaccaacgtgctgctggattcagacttccgggcgcacgctggcgatttcggtctggcaaggcttattcccgacgacggaacggaccacgcaaagatagccagcaacgag

SEQ ID NO: 7483 - DNA, 361 bp, Zea mays
  Clone ID: LIB3150-007-Q1-N1-C4
ctgcgccaagtgctgccccaaggacaaggcgatcaagaggtttcaggtgaggaacatcgtggaacaggcggccatcagggacgtccaggaagcatgcgtctatgatggctacgtcctcccgaagctgtacgccaaggtgcaccactgcgtctcgtgcgcgatccacgctcacatcgtccgcgtccgatcccgtgagaagcgcagggaccgcaagccgccggagcgcttcaggcgcagggaggataggcctgctggtggacaaggaggcccccgccctggtcctggtgctgctgctacagctccatctccagcaccggttgctgctcgcccataggctttagcttttcgaccgtgttaagtc

SEQ ID NO: 7484 - DNA, 375 bp, Zea mays
  Clone ID: LIB3150-007-Q1-N1-C5
tctaaaggttttgcttaaggtcgaagtggcggtgccattttttcagcagactaaaatcgaatcaaattcctgttaattgggattatgacacctatctagtgagtagtgatctaacgtttttttcaagtaaaaaaaatgagacctttacttctatactagtctagagaccccagcctattctgttcgtgtgctcagcatcatctatgtgacatttatcaatgttttgagtgtccagcttcaacaagaacggcaacatcactatctacctgcatttcactaaattggctggttcttgaatcttgatgatgcttctgtcaaacattttcatgtcatcatcctacaattacaaagaacagatgcagctgttcagttatt

SEQ ID NO: 7485 - DNA, 332 bp, Zea mays
  Clone ID: LIB3150-007-Q1-N1-C6
accaccacaagatccaccgattcgagcagggcgacgtggtggccatgccggccggcgcccagcactggctgtacaacgacggcgacgcgccgcttgtggcggtctacgtcttcgacgagaacaacaacatcaaccagctcgagccttccatgaggaaattcttgctggctgggggcttcagcaaggggcagccccacttcgccgagaacatcttcaaagggatcgacgcccggttcctgagcgaagccctgggcgtcagcatgcacgtcgccgagaagctgcagagccggcgtgaccagcgaggcgagatcgtccgcgttgagccggagcac

SEQ ID NO: 7486 - DNA, 190 bp, Zea mays
  Clone ID: LIB3150-007-Q1-N1-C7
aaaaaaaaaacttaaaataaggggagggttttttaaggaggaagatgcctaacctaaaaaaaaaaaaataaaaatcaacaattcccaaaaagtttatatctttcttattataccaattgaattacatcttttttattgtcgcgttcgtttccctgctcttatacattaacttctatggcattatttttat

SEQ ID NO: 7487 - DNA, 365 bp, Zea mays
  Clone ID: LIB3150-007-Q1-N1-C9
gccgatccagctcctagtgcacggggggagaaaggtgctccagctcttcgcgcaccagttgagaaggctgatccagctcctcgtgcaccagttgagaaggaagtaactaggaagacttatgcatcagttgttaaaatcccgagggaggacacacagtctgccccagctgccagaccctccaagcccaacctaaatataaagatggttcaaaatacggagaaaaatgtgtcctcaccatcgaaacctgctcatgctactgataatgccctaccgggcgataaaggtgttcctaaaaacaaatcacctgatgagccaaggtactcaattttgtttagaatttacctttcaaacaactgttgaaatgt

SEQ ID NO: 7488 - DNA, 347 bp, Zea mays
  Clone ID: LIB3150-007-Q1-N1-D11
ccccaacctcggtcttttccaggcccagccgccaccgtgcgtctgtgcaagtggccttcggcggtgcgcagagcagagctggtgccgtggcccgtggtggtggcccgtggtgcgcgcttccctgcagcctcgaggtctgcacgccgccggcctacctcgtagcaccacgcgccgccggcctccctcgctcactaccggacttcgcacacgccggcgcggcggcggccgaccatcctcggaggtgcagttacgcgcgccgtaggaaggtttttcttccatcatttgtgcgttcgttcaactgagccgccatgcgccagccacggtccgggccggggaagaggcggggc

SEQ ID NO: 7489 - DNA, 305 bp, Zea mays
  Clone ID: LIB3150-007-Q1-N1-D3
gcaggctgaagaaactgacacagttggacctttcagataaccatctcagtgggaacattcctgaggagcttggggagatcgtcgagataaacacgcttgatctgtcacacaatgagctttccggtcagttgcccgtgcagttggggaatctcagactggctcgtttcaacatatcctataacaagctctcagggcctatacccagtttcttcaatggcttggagtaccgagacagcttcttgggcaaccctggcctgtgctatgggttctgccgtagcaatggcaattctgatggcagacagagc

SEQ ID NO: 7490 - DNA, 381 bp, Zea mays
  unsure at all n locations
  Clone ID: LIB3150-007-Q1-N1-D4
atagtgtagagctgtcaaatcgtctacgcgcttttcttgttgcttgccctcctgctggtccagcatcacctgttgctgatttggtggttgccacagctgattttcagaaggatctggctagctggaatatctgcaatataaaagcaggtgttgatgcaaaagagctgttccatttgtacattgtattgtggattgaagacaaacgcaggatgttactggaaaactgcagactggacaaggtcaaatggtcaggagttaggacccagcatatgacaacaccttttgtggatgagatgtatgatttgctgaagaagacattgacagagtatgaagttatcatttgtcgatggccagaatacatanttgttctcgagaatgcta

SEQ ID NO: 7491 - DNA, 339 bp, Zea mays
  Clone ID: LIB3150-007-Q1-N1-D5
aagcatcctcctgtttggatcggcatggaggagacgacgacgacggcgcagccggtttgcgcgcaggagtcgctggcgctgctcaactgcgtcgcctcggccccctacgaccgggataggtgcctcgccctcgtcgacgccctccgtgaatgcatcgtgcgcaagagggtgaagaagttttcgctggcagaaccaaactccaccacaaccaccgaagctctgaagagcgatacgaagccctgagcattctgcaaagaaaattctcttatgtttcggaaactgtatcatctgattgggcgcggttgatgataagtctatgcctgttaatgtagcgttaga

SEQ ID NO: 7492 - DNA, 369 bp, Zea mays
  Clone ID: LIB3150-007-Q1-N1-D6
ggacaagtgtgctctaggaattcagatgaatcttggattaattgaggagtccaaggtttcaaggccattaccttggaggccagcgactaatgttttccgtgttaaagaggatgttcgacctatattctgggccaacagaccaaagagctatcttaaaaggacattaggttgggatcagtatccccatggacggtggggtgattctcggaacccatcatatggagcacttactgaccaccagttcacaagaccacgaggccctggtaagaagctccaacaggaatgtgctgttccacttaaatctgctgaggacattaatgagcgctctacaaacttctgtcaaaggaaactcacaagcactccatggtc

SEQ ID NO: 7493 - DNA, 325 bp, Zea mays
  Clone ID: LIB3150-007-Q1-N1-D8
gattgggttagactaccgtcagccagcgtctagtagttctcaatccgacatgccgcttctcgttctgcgcgtgccgctcgcctcgaccaacaatactagtacatgcagtggcgctgcacctcctgtagctgtagcaccagcggcagagcattccgacggcctactgttcgacggccttgctctgggccacggtgacgacgtcgacgataaggccgaggcggacggcgacgacgcagcgaccgtgaagctggagtggctgaagtcgcagatcatcggcgcggaagcagagttcgcgtcgcccgttcgggacccgacgcattacgta

SEQ ID NO: 7494 - DNA, 276 bp, Zea mays
  unsure at all n locations
  Clone ID: LIB3150-007-Q1-N1-D9
ggacaatcttccttcagctgtcggggcgcggcccacccctccgtcgtctccaccattccgccgttcccaccacgccactcgccagttcgtcactccctcctgtctccccccttgccgagacggcgcggacgccccgtcgcccaccccgatggcttccactctccttcacgccgccaccgcctcgctccagagctcctcccagcccgcacgcgcgggcgccgncaccgcctttcaccccctcgcgttcaccccattcatacgcctcgcgcgcttctc

SEQ ID NO: 7495 - DNA, 265 bp, Zea mays
  Clone ID: LIB3150-007-Q1-N1-E1
gaaaacccccctgtccccgctagggattccccccaaaaccctcccccaaaaccccagagcggagaagagcgcaagatgttcggcttcgggcaccacggccaccacggccagaacccgccggcgcacggcggcgtgcaccagcccaccttcaagatcttctgcaaggccgacgaggggtactgcctcaccgtccgcgacggcaacgtggtgctggcccccgccaacccgcgcgacgagcaccagcactggtacaaggacatgcgct

SEQ ID NO: 7496 - DNA, 385 bp, Zea mays
  Clone ID: LIB3150-007-Q1-N1-E2
atcgagcgccgccgccactcgccctcccctgccatctctcgccggccgccgtctcccgcccaccggccgccgtctcccgcccaccggccgccgcagcgtgttatatttcagcccctcttgatcggccacccgaaacccgcaggagagaggctaaggaacgatggggtggaaggcggcagagaagctcatcaggcactggaaggtcctgcgtggtgacaacgtgatgatcataagaggcaaagacaagggggagtccgggctcatcaagcgggtcattcggtcgcagaatcgcgtcatcgtcgagggcaagaacttggtcaagaaacacattaagcaaggggaaaggcacacaggtggtattttctcggtcgagccccacttcatg

SEQ ID NO: 7497 - DNA, 343 bp, Zea mays
  Clone ID: LIB3150-007-Q1-N1-E3
gcagccctccatccacgaactcccgttctccatttccagccatggcggtgtcgatcgagctcaccaaggagtacggctacgtcgtgctggtgctggtggcctatgtcttcctcaacctttggatgggcttccaggtcggcaaggcccgcagaaagtacaaggtgttctaccccaccatgtacgccatcgagtcggagaacaaggacgccaagctcttcaactgcgtgcagagggggcaccagaactctctagagtggatgcccgttttcttcgtcatactgctgctgggcggtctgcagcacccgaccatcgccgccggtctgggcggcatctacatcgtcgc

SEQ ID NO: 7498 - DNA, 385 bp, Zea mays
  Clone ID: LIB3150-007-Q1-N1-E4
ctcttgtcattgttgggctcgtggcatatgtgaagactccccgtggcctccgcacactcaactctgtttgggcccaacatcttagcgaagaagtgaggagaaggttctacaagaactggtgcaagagcaagaagaaggctttcacaaagtatgctctcaaatatgaaaatgatgctggcaagaaggaaattcagctgcagcttgagaagatgaagaaatatgcttctgttatccgtgtcattgctcatacccagattaggaagatgaagggtttgaagcagaagaaggctcacctgatggagattcaggtcaatggtggtaccattgctgacaaggtggactatggctacaaattctttgagaaagaggtccctgttgatgctgt

SEQ ID NO: 7499 - DNA, 301 bp, Zea mays
  Clone ID: LIB3150-007-Q1-N1-E5
tctcttgtcattgtttgactcatgtcatatgggtatacttcctggggccttcgctcactcaactctgattcaagcccaacatcttatctcataactttcgagaacgttctacaagaactcgtgcatgaccaacaataaggctttcacaatctatgctttcaaatatcaaaatgatctttgcaacaatgaaattcacctagcatttttagaagattaataaataagcttcttttatccacctcattgttcatactcatattaagaacattattggtttgtaccagattaaatctcaccttat

SEQ ID NO: 7500 - DNA, 329 bp, Zea mays
  Clone ID: LIB3150-007-Q1-N1-E6
ctacactggaaaggtggtcattggaatgggtgttgctgcttctgagttcttccgtgagaaagacaagacttatgatcttaatttcaagggggagaacaacgatggctcaaacaaaatttcaggcgacagcctgaaagacctgtacaagtcctttgtttctgagtaccctatcgagtcgatcgaagatccatttgatcaggatgactggagcacttatgccaaactcactgatgagattggacagaaagtgcagattgtaggagatgatctttttcgtaccaaccccaccaaggtcgccaaggccatcaatgaaaagacctgcaatgctc

SEQ ID NO: 7501 - DNA, 327 bp, Zea mays
  Clone ID: LIB3150-007-Q1-N1-E7
cggacgcgtgggcggacgcgtggggggaaactctggttcggatcaccggtggcatgaaggtgaaggctgaccgtgacgagtcgtcaccttacgctgctatgcttgctgctcaagacgtcgcacagcgctgcaaggagcttggcattactgcactgcacattaagcttcgcgccaccggaggcaacaagaccaagacccctggacctggtgcccagtctgccctcagggcgcttgctcgttccggaatgaaaatcggacgcattgaagacgttaccccggtccccactgacagcactcgcaaaaagggccgtaagaggggaaagaagc

SEQ ID NO: 7502 - DNA, 274 bp, Zea mays
  Clone ID: LIB3150-007-Q1-N1-F1
gcttctcctccccctccggttcggggtcgggttcgtgaggttctccggggttcggtttcgtgggtgagcggatcgagatggcggcgtcggatgttgagtaccgctgcttcgtcggcggcctcgcctgggccacggacgaccactccctccacaacgccttcagcacctacggcgaggtcctcgagtccaagatcatcctcgatcgggagacgcagaggtcccgcggcttcggcttcgtcaccttctccacggaagaagcgatgcggaaacgcca

SEQ ID NO: 7503 - DNA, 322 bp, Zea mays
  Clone ID: LIB3150-007-Q1-N1-F2
gcgccagggtttcaggcttccacgaatctccccgccgccctcaattcccctcggcgccgccgcctcctcccctcgcttcggtcctcggttagttaaccatccaggttctgtcaagatgtctgatagccatgagactgacaggaacattgagatttggaaaattaagaaactgatcaaggcattggaatcagccagaggcaatggcacaagcatgatctctctgatcatgcctccacgtgatcaggttgctcgagtggctaagatgttaagtgatgaatatggtactgcttcgaacatcaagagtagagttaatcgtcaatct

SEQ ID NO: 7504 - DNA, 373 bp, Zea mays
  Clone ID: LIB3150-007-Q1-N1-F3
agcaagggaatcacatcgccatggcagccaagatgtttgcattgtttgcgctcctagctctttgtgcaaccgccactagtgctacccatatcccagggcacttgtcaccactactgatgccattggctaccatgaacccatggatgcagtactgcatgaagcaacagggggttgccaacttgctagcgtggccgaccctgatgctgcagcaactgttggccttaccgcttcagccgtgccagatgccaatgatgatgccaggtatgatgccaccgatgacaatgatgccgatgccgaatatgatgccatcgatgatggtgccgactatgatgtcaccaataacgatagctagtatgatgccaccgatgatgat

SEQ ID NO: 7505 - DNA, 346 bp, Zea mays
  Clone ID: LIB3150-007-Q1-N1-F4
tgcaaagggcgcagcctgttctgctggcacatcttctcttatcatatgttgaacagttggagcgtgatgctggtcggctggtcaactgcagggagcgaatgaatttctgtcctcttggtgcttgtgctttggctggaactggacttcccattgataggtttcaaactgctaaagatttgaaatttacggctccaatgaagaatagcattgatgcagtatcagaccgtgactttgtacttgagtttcttgctgccaattcgattgctgctgttcatctttcgcgaattggtgaaaaatgggttctttgggcatcaaaagaatttgggtttctgataccaagtgacaa

SEQ ID NO: 7506 - DNA, 329 bp, Zea mays
  Clone ID: LIB3150-007-Q1-N1-F7
ctggaaatgaaattcatatggtttcatctactcaagctccgcagaagcatcagaagtatgttgcaagtgttcttggtcttccacaatcaaaagtcgtttgcaagactaagcgtattggtggtggatttggtggaaaagaaaccagatcagcaatatttgctgctgcagcatctgtaccctctttctgtctgagaaggccagtaaagcttgttttggacagggacgttgacatgatatcaactggacagaggcacagtttccttgggaaatataaagtgggatttaccaatgaaaggaagatactggccctagacctggaaatttataac

SEQ ID NO: 7507 - DNA, 140 bp, Zea mays
  Clone ID: LIB3150-007-Q1-N1-F8
gaagaatgcacactcccttcctgtgaggccaatccaatggcgccctggctacttgccaccttctgcgcctcacccttactactacccggcagcagccctaggccgatgggcgctgcccccacccgccgttcctgactgca

SEQ ID NO: 7508 - DNA, 344 bp, Zea mays
  Clone ID: LIB3150-007-Q1-N1-G1
ttttgaatggtggaaaacctggaccacccaagattcaaggaattggagctggttttatccctggagtcttggatgttgatctccttgatgagactctacaggtttcaagtgatgaagctattgagactgccaaggctcttgctctgaaagaagggttgttggttggaatctcttctggtgcagctgcagctgcggcagttaggcttgctaagaggccagaaaacgccggaaagctatttgttgtcgtgttcccgagcttcggcgagcgctacctctcatcggtgctgttccagtccatcaagaaggaaacggaaagcattgtggtcgagccctagagcacacag

SEQ ID NO: 7509 - DNA, 256 bp, Zea mays
  Clone ID: LIB3150-007-Q1-N1-G10
tcgcttgtccagtgcccccaaatgctggcgaccacctgcagccggccgccgtgcccgtgcccgtgcgcgcggtcgcggcggctccccgcggcgaccttccgcgctaggcgcaccagtagcgcgaagcgaagggcgcctaggagagcggcggcggcggtgcggtgcgggctgctgcccgtggacccgtgggcgcccacgatggactcccagagcgtggcgtcgcagctcttcgtccgctagctcttccccttacctg

SEQ ID NO: 7510 - DNA, 296 bp, Zea mays
  Clone ID: LIB3150-007-Q1-N1-G11
tcattgtccctgagatgattggaagcattgttggggtctacaacggcaagacgttcaaccaggttgagatcaagcctgagatgatcggccactaccttgctgagttctccatctcctataagccggtcaagcatggcaggcccggtatcggtgccacccactcctcgcggtttattcctctgaaatgagctgttacccgtctctgtagtctcccaagagtccgttggcaatgtccattcagcttttctacttgttttgaacaagttaaatgcccaagacattttgttttgttcaaa

SEQ ID NO: 7511 - DNA, 290 bp, Zea mays
  unsure at all n locations
  Clone ID: LIB3150-007-Q1-N1-G2
gggatagcattacataagatgattagacttatcacaatgggtttaggaggagagggctatcttaatttcatgggaaatgagtttggacatcctgaatggatagattttccaagaggtccgcaaagacttccaagtggtaagtttattccagggaataacaacagttatgacaaatgtcgtcgaagatttgacctgngtgatgcagactatcttaggtatcatggtatgcaagagtttgatcaggcaatgcaacatcttgagcaaaaatatgaattcatgacatctgatca

SEQ ID NO: 7512 - DNA, 365 bp, Zea mays
  Clone ID: LIB3150-007-Q1-N1-G5
ctcctcccttcgacttcctctcccccgtctggccgtgcagccccggaggcgtcactgggcaaggaggctggggtggggacctcaaacgccatggatgtgcagccctaggcaccagatattaggatggatggagtcacacaagctgttgaaaatcttaagaaagaatggggccaagcagtttcacagcttgacgagaacattactgcaatcaaatcatgtggaaaaacagggaaagggacagaggaagcaaattctcttccaaggttgaatggttctgcacaggatgctctgcagttgctgaagtcactgcagttccagcttgatcttctagcacagcagcttcccacttttgatgaagtgcaatc

SEQ ID NO: 7513 - DNA, 252 bp, Zea mays
  Clone ID: LIB3150-007-Q1-N1-G6
gctggcgatcgcgaccccgatcgacaactggccgttcatcgtctcctcctcccgggacaagtccatgctggtgtgggacctgaccaacccggtccactccaccccggaatccggcgtcaccgccgactacggcgtccccttccgccgcctcaccggccactcccacttcgtacaggacgtcgtccttagtattcgactgccaattctgactctgtggctcctaggacggcgagcttaccctctgggacctct

SEQ ID NO: 7514 - DNA, 292 bp, Zea mays
  Clone ID: LIB3150-007-Q1-N1-G9
gccgcatcccccggtgaggtgagcgggccacacctcccctgcctctcgtgtcggagcctccgcctcggcttgtccccaccaacccgcagctcgctcccaccaaacccacacccgaacaatggcgtcggcgtccaaggaggaggtgatcgggaagctcaacgtccgcgtggtgcggggcaacaacctggtcatcgccgacccgctcacccacaccagcgacccctacgtcgtcctccagtacggcgctcagaaagtgaagactagtgtccagaagaagaactccaatccaatg

SEQ ID NO: 7515 - DNA, 306 bp, Zea mays
  Clone ID: LIB3150-007-Q1-N1-H1
gcgcaccatccagttcgtggactggtgcccgactggcttcaagtgcggaatcaactaccagcctcccagcgtcgtccccggcggtgacctggccaaggtgcagcgtgccgtgtgcatgatctccaactccaccagtgttgtggaggtcttctcccgcattgaccacaagttcgacctcatgtacgccaagcgcgccttcgtgcactggtacgtctgtgagggtatggaggagggcgagttctccgaggctcgtgaggatctggctgcgctcgagaaggactacgaggaggtcggtgctgagtttga

SEQ ID NO: 7516 - DNA, 186 bp, Zea mays
  Clone ID: LIB3150-007-Q1-N1-H10
aatcattaaattcacctacaagggggggccttgtctccactggagccgagcccccatcaaaccctaactatctaaaaccccagtttcgctgtccgatggtcgtcggctagacgcgcccttactaccccactcaaagggccccaagatgtccttctcctccaacccagaagccgatgcttgatccca

SEQ ID NO: 7517 - DNA, 369 bp, Zea mays
  unsure at all n locations
  Clone ID: LIB3150-007-Q1-N1-H2
gcagagataggcgtcttcgtactcgcctacctccgcggctcaaacctttcccccttctcccaattcccgccgccgctccatcccgtaacgcgacaccatgagggagtgcatttcgatccacatcggccaggccggtatccaggtcggaaacgcgtgctgggagctgtactgccttgagcatggcattcaggctgacggtcagatgcccggtgacaagaccattgggggaggtgatgatgctttcaacaccttcttcagtgagactggtgctgggaagcacgtgccccgtgctgtttttgttgaccttgaacccactgtcatcgatgaggtgagaactggcacctaccgncagctcttncaccctgagca

SEQ ID NO: 7518 - DNA, 345 bp, Zea mays
  Clone ID: LIB3150-007-Q1-N1-H3
cccacacagaagcggcggcggcggagcaaacgcaggcgaaggcgagggtgtgagggaaggagcaccagccatggtgcacgtcaacttctaccgcaactatggtaagacgttcaagaaaccaaggcgtccttatgagaaggagcgtcttgatgctgaactgaagctggttggtgagtatgggctgaggtgcaagcgtgagctttggagggtccagtatgcactgagcaggatccgtaatgctgcaaggcacttgctcacccttgacgagaagaacccccgtcgtatctttgagggtgaggcacttcttcgccgcatgaaccgctatgggctgcttgctgagggtca

SEQ ID NO: 7519 - DNA, 280 bp, Zea mays
  Clone ID: LIB3150-007-Q1-N1-H4
atcggctaacaagtaataatcctctcgatacccgaatcggtgaaggaaaacaagacgagtccgtcggtcgtgatcggtaccaatggaaggcgcagcggggatcaggacgaggccggcggtgtgcgtgaccggcgcgggcggcttcgtggcctcgtggctcgtcgagcgcctcctcgccggcggccgatacatggtccatggcaccgtccgtgatccgggcgacgccaagaacgcgcacctggcggcgatggacggcgccgcggaccggctgcgcctgttc

SEQ ID NO: 7520 - DNA, 303 bp, Zea mays
  Clone ID: LIB3150-007-Q1-N1-H5
gcgccggccactcccacttcgtccaggacgtcgtccttagttccgacggccagttcgcactctctggctcctgggacggcgagctccgcctttgggacctctccaccggcctcaccacccgccgcttcgtcagccacgagaaggacgtcatctccgtcgccttctccgtcgacaaccgccagatcgtctccgcgtcccgcgacaagaccatcaagctctggaacactctcggcgagtgcaagtacaccatcggcggcgacctcagcggcggcgagggccacaacaggtgggtcttctgcgtta

SEQ ID NO: 7521 - DNA, 213 bp, Zea mays
  Clone ID: LIB3150-007-Q1-N1-H6
taaccggcgcaacgatggtggcgagaactatgaccggcgcaatgatggtggcaagaacttcagccgcaggaatgacagtggtaccgagaacttcaaccgcaggaatgacggtggcggcgagaacttcagccgcaggaacgatggtgttggcgagaacttcaacgtcaggaatgacggcgttggtgagaacttcaacaggggggacaactttag

SEQ ID NO: 7522 - DNA, 317 bp, Zea mays
  Clone ID: LIB3150-007-Q1-N1-H9
aatccccaaagcctccgaccccgttcctctctccctccgccgccgctgcgcacgcagggaacaagcgacatgggcgtctacacctttgtgtgccgcaacaacggcggcgagtggaccgccaagcagcactccggcgagatcgaggcttccgccgctaccccatacgagctgcagcgccgcctcgtcgctgccgcctccgcggccgactctgcctacggcgtccagtcgtccttctccatggtcacccccagctccgccgtgttccaggtgatcgtcggtgctgtcggtggtggtgcaatgatggtgagcggaggtgg

SEQ ID NO: 7523 - DNA, 250 bp, Zea mays
  Clone ID: LIB3150-008-Q1-N1-A1
ctgctccgtctcgtcgttgtcttcccctttttgtcctcagccacctctctccctcgctagagcaaaaaccttgccacgaatcgccgacactccaacccggaagaggcaacgaggtgactccgcgcctcggtaatgggtgacagccaatactccttctcgcttaccactttcagcccgtcgggaaagcttgtgcagatagagcacgcgctcacggctgtcggatccgggcagacctccctagggatcaaag

SEQ ID NO: 7524 - DNA, 272 bp, Zea mays
  Clone ID: LIB3150-008-Q1-N1-A11
agtgaggcagcgagtgggagacaaggggaaatggggaagggagcgcaagggagcgatgcggcggcggcgggcggcgaggtggaggataacatggcggcgtggctggttgccaagaacaccctcaagatcatgcccttcaagctcccgcccgtcggcccttatgatgtccgcgtgcgcatgaaggcagtggggatttgcggcagcgatgtgcactacctaagggagatgcgcatcgcgcacttcgtggtgaatgagccgatggtgatcgggca

SEQ ID NO: 7525 - DNA, 394 bp, Zea mays
  unsure at all n locations
  Clone ID: LIB3150-008-Q1-N1-A12
tcccgatctcgatggcgaaccctcgcgtcttcttcgacatgaccgtcggcggcgccccggcgggccggatcgtgatggagctgtacgccaacgaggtgcccaagaccgcggagaacttccgcgcgctgtgcacgggcgagaagggcgtgggcaagtccgggaagccgctccactacaagggctccaccttccaccgcgtcatccccgagttcatgtgccagggcggcgacttcacccgcggcaacggcaccggcggcgagtccatctacggcgagaagttccccgacgagaagttcgtgcgcaagcacaccgcccncggtgtgctctccatggccaacgccgggcccaacaccaacggctcccagttcttcatctgcaccgtcgcgaccccttg

SEQ ID NO: 7526 - DNA, 301 bp, Zea mays
  Clone ID: LIB3150-008-Q1-N1-A2
gcagcctccaaagccactcccaaacccccgcttccagaaccttctcgaagctccccgccgcctcctccactcgcaccgatggcgaaggaaccaatgcgcgtgctcgtcactggcgccgcaggacaaattggatatgccctggttcccatgattgctaggggtgttatgcttggtgcagaccagcctgttattctgcacatgcttgacattccgccagcagctgaagcccttaatggtgttaagatagagttggttgatgctgcgtttcctcttctgaagggagttgttgctacaactgatg

SEQ ID NO: 7527 - DNA, 315 bp, Zea mays
  Clone ID: LIB3150-008-Q1-N1-A3
cccctcccaaagctcgccccgctcccagctagggtttcctcttcccatccacagccgccggggcgccgccgacgaggacagcgccgccacgatgttggagttgcgtctggtgcaggggagcctcctcaagaaggtcttggaggcgatccgcgagctggtcacggacgccaacttcgactgctccgggaccgggttctcgctgcaggccatggactcgagccacgtcgcgctcgtcgcgctgctccttcgcgccgagggcttcgagcactaccgctgcgaccgcaacctctccatgggcatgaacctcaacaacat

SEQ ID NO: 7528 - DNA, 191 bp, Zea mays
  Clone ID: LIB3150-008-Q1-N1-A4
tcggtaccctaaccctagacctttgcgatgtgagacatcgccaccggaccatccccttcagttgccactcagttggcgcccccttctgcctacccggtcttgttaactgcctatatgtccatctccgcgtacgccgaggaggaagaggacctctaaggccgcctcaaatatgctccaacgccacatggagt

SEQ ID NO: 7529 - DNA, 392 bp, Zea mays
  Clone ID: LIB3150-008-Q1-N1-A6
ggcgcagagacaggcgtcttcgtactcgcctatctccgcgactcaaagcttcttccatttcctaccgccgccgctgcagctccaccccattccgtcgacaccatgagggagtgcatctcgatccacatcggccaagccggtatccaggtcggaaacgcgtgctgggagctttactgcctcgagcatggcattcaggctgatggtcagatgcccggtgacaagaccattgggggtggtgatgatgctttcaacaccttcttcagtgagactggtgctgggaagcacgtccctcgtgctgtttttgttgaccttgaaccaactgtcatcgatgaggtgaggactggcacctaccgccagctcttccaccctgagcagcttatcagtggcaagga

SEQ ID NO: 7530 - DNA, 289 bp, Zea mays
  Clone ID: LIB3150-008-Q1-N1-A7
ccgcgagccagctccggcgaagtcgacagcaccaagcatggcggacacgaaggcgtcacccgcggtgacgctccgcacgcgcaagttcatgaccaaccgcctcctctcccgcaagcagttcgtgctcgaggttctccaccccggccgcgccaacgtctctaaggcggagctcaaggagaggctggctaagatgtacgaggtgaaggatcccaactgcatcttcgtcttcaagttccgcacccacttcggaggcggcaagtctaccggattcggtcttatctacgacaac

SEQ ID NO: 7531 - DNA, 322 bp, Zea mays
  Clone ID: LIB3150-008-Q1-N1-A8
gcctccccttgcacgacgtctccaccactacaccacaagtccacaagtccacaacaccaccagcctcgtcacagccgcttcagcataccacaccgcacgcaaacccaccgcgcgctacgaccaccaccgtcaccatggccgccgcgcgctacgacgtggagaagggcgggaggaataacggggatgggaagccttcgccgccgccgccgccgccgccgccgccgggccacctgtacccgcagcgcgaccgggagagggagtgggtgccgtggttggtgccgctcgtcgtggccgtcaacatcgtgctcttcgccgtggcgat

SEQ ID NO: 7532 - DNA, 261 bp, Zea mays
  Clone ID: LIB3150-008-Q1-N1-B1
ccccgctctcggattcccgacgacgagctcagagctcctcctctcctcccctgctcggtgttcgacgcaacagctgccgccatgtctgccgccaaccagctcgccgccctcgtcagcaacatgtacgccacgggtttgcttgacgatcagttccagcagctccagatgctccagaacgccagtactcctgacttcgtctccgaggtcgtcacgctcttctgccaggacggcgagcggatcatcggaaagctggccaaactg

SEQ ID NO: 7533 - DNA, 307 bp, Zea mays
  unsure at all n locations
  Clone ID: LIB3150-008-Q1-N1-B12
ggcgaggtaagctgcaccatgtaaaagtctgcgtgcgtcgacggcaaaaaagagaaaaaaggatgtgacatcctagaggaggcctttgccatgatgggtgcgctcgcatggcaggccaggtattaataaaaagatgattattgtgtgccgggggaggagatcgcacggnggttgatgtttttggccccggtgtctcctccctcatcttgttccgtgttcctgtatccgttgtttccgcgcctgttggtccgctgcgcacgccggatttttgcatcgagcacggagatctacaacaaaaacatggagc

SEQ ID NO: 7534 - DNA, 206 bp, Zea mays
  Clone ID: LIB3150-008-Q1-N1-B2
cgccttaacagaccgaggctactcccaggcgccgggtcttctttgatatgttccactatctatgctaacggtaatggcgaccgttccatgggatctgatctggctgattgtgaggaagaacaactccttcctggtgaagcattttggcaacttattatgccaaggttcatttcaccaatgagcccaacatcctttacaatttacac

SEQ ID NO: 7535 - DNA, 387 bp, Zea mays
  Clone ID: LIB3150-008-Q1-N1-B3
ttcgcacgttacttggtgcagaacacctgctttgtagagactaatgaacaatggagctatctttataactgcattgacacaccgcctggcagaaaaaattgatagatccagagacccggatattgtgatgcatggtgaattatcacgcactacgagctaagccgcagatcatgaaagacaacgtatgatatatcgaataacctccattcagaatgcgctttcatgtcaattcatcttcggtttgagctggatatgcttgcatatgctgggtgcttcgacatattcacacctgaagaacaagaaatcctgttgaggcatcggaacaaatattttccatttctgttgaggtattggggcaaatattttccaggaaacacacctgactac

SEQ ID NO: 7536 - DNA, 265 bp, Zea mays
  unsure at all n locations
  Clone ID: LIB3150-008-Q1-N1-B4
aggaagtctcatcctacctcaagaaagttgggtacaaccctgataagattgcctttgttcccatttctggttttgagggcgacaacatgattgagaggtccaccaaccttgactggtacaaaggcccaaccctgcttgaggctcttgaccagatcaccgagcccaagaggccttcagacaagcccctgcgtctgcccctccaggatgtgtacaagattggtggtattggaactgtaccngttggtcgtgtggagactggtgtcat

SEQ ID NO: 7537 - DNA, 271 bp, Zea mays
  Clone ID: LIB3150-008-Q1-N1-B5
ctcgctgcctccattcttcactaaccggcactgtgagagaggggcgcggccccttgtacccagatagtgggaattccttcagcggtttcggacctgggccccgctgtcctccatggaccgcaacgtcgccatggaaaacgtcgaccacgacgccttgagatgcgactatgcagtccgtggccagatctacatgaatgctcagggcgtgctgctacaactaccaacacaaccatggaccgttgagtttgacgagagcctggtccgcaacatt

SEQ ID NO: 7538 - DNA, 376 bp, Zea mays
  Clone ID: LIB3150-008-Q1-N1-B6
caccagcagggtgtccccgccctctctagtttctaccccggcccccaacattggcctgatgctgctgccatgtagcccagcgctcccccctcggcttcaccggcggcggcggctacgacggtgaaaactacatcgggtgctagctccgacggtggtgcgtgccctgttgacgatagggcacgcggggcgcgggcagcttgtaagcgttcgatcggccatgtagggcaactatacatctttggcaggtctccatcatcctccgtgggagagaagatggtaatggagtgcgtgtgtatgtatgtgtatgcccagggcgcgcgcgcgcggctcttggcgagtcacagtagagatgcatatcatgtattcagtatctttc

SEQ ID NO: 7539 - DNA, 331 bp, Zea mays
  Clone ID: LIB3150-008-Q1-N1-B7
cagcatcttgccacttcacaacgtcgtcatccgcaaggtgatgatactcaaggcccccaagtccgttcttgggaagctcatggaggttcatggcgactacaaagaggatgtcggtgtgaagctcgagaggcctgtctagggatatgaggctgtgcaggaggttgctgctgcccagttgttggttggctacttctatatctaggctagtctggacattaggtagattaggacgcgaactcagagttgcctactcgtctacatctgcccctaagattgtgactggaaacatagtctaaattaagattattcgcaacaagtgtttaagactact

SEQ ID NO: 7540 - DNA, 348 bp, Zea mays
  unsure at all n locations
  Clone ID: LIB3150-008-Q1-N1-B8
ctgtcgtgtcgcctccgcctctgagttcagctcgccggcagccgccgctcgcaatggaggccctccggaaagcggaggcggagctcacggtgtacgtgcacccctccaacgccaagcgcgtccggcacgccgtctcccgccagctcagcgcgcttctcttcacgtatgtggaccgttttgatggcgtgttgctgatgcatgaagtttcattccttattggcaaagacaaagagggcaaacccatatatgaaaggagtgaccgtaatgatcaaattgctgaacccgtttcttatggcaaaatcatgaatggcttggtgccatatttcagcgtncaagtgcatgccaccc

SEQ ID NO: 7541 - DNA, 337 bp, Zea mays
  Clone ID: LIB3150-008-Q1-N1-B9
gcctcattcatctccattcggggcagggtcgcacccacactctgccttcgtccccagcctaaatccccgcaacgatggctcgcacgaagcagacggcgcgcaagtccacgggcggcaaggccccgaggaagcagctggcgaccaaggcggcgcgcaagtcggcccctgcgaccggcggcgtgaagaagccgcaccgcttccgcccgggcaccgtggcgctgcgcgagatccgcaagtaccataagagcacggagcttttcatccgcaagctgccctttcagcgcctggtccgggagatcgctccaggacttctataccgaccttctctttcagtcct

SEQ ID NO: 7542 - DNA, 126 bp, Zea mays
  Clone ID: LIB3150-008-Q1-N1-C1
gagcacactccacttggagctacagctctacgttgtaagactactgtcgaggagcgaccctctggctatcaatcgggccgggcattcgaattaactccacggtgattgagcagaggaccctactgg

SEQ ID NO: 7543 - DNA, 252 bp, Zea mays
  Clone ID: LIB3150-008-Q1-N1-C10
ataactgtgaatgcacgtcgcacgcgtacctaagatcgtatacagtagagccaagcgtcccatccgctagaaaatgctccatatacggcggtggttaagcgctctgtctccggatctcgcttgtccaccgatctgcgagaggtatgttttcgtacaccaccgtcactgacgcccgccatggccagaacctccacgtataagattcttgcaaatctcctggtatggagtaccacatgtgtaggactctaaacg

SEQ ID NO: 7544 - DNA, 179 bp, Zea mays
  Clone ID: LIB3150-008-Q1-N1-C11
atcgattgctctcattagtcaggtgcggtgcgagcctctcacggcttgtatctcctagatacttcaagatgccatgaagaatatgatgtccaccgcgactgctgtgcttgatgtcagtgaccagaactatgctccacatatggacacgcgtctcaggggctccgttaagctgtcttaca

SEQ ID NO: 7545 - DNA, 385 bp, Zea mays
  Clone ID: LIB3150-008-Q1-N1-C12
cgttcagagtttaccccacttgctcgctttctccccagtagcaacgaccgcgcgtcctccgccgccgcactaaaccctactccatgtacccaggtctgcgtcgggcccttgccggcgatgagaacccgtcagttccaaagatggctcgtcgtggattgatggaacaggacttaagcaaactggatgtgacgaagcttcaccccctgtcacctgaagttatctcacgccaagcaacaatcaatatgggtaccattggccatgtggctcatggaaagtccactgttgttaaagctatatctggtgttcagactgttcggttcaagaatgagctggaacgtaacattactataaagctgggttacccttatgcaaaaatctacaaatg

SEQ ID NO: 7546 - DNA, 417 bp, Zea mays
  Clone ID: LIB3150-008-Q1-N1-C3
ctggattcctttaaatccaaccaacccttccgttttcggttgttccaacctttacccggccaggtgaacccgccgccgctgcagtgtccatagccaccgcaggagactgagatggggggttttgtcaagacccacaagagcaatgcgtacttcaagcgtttccaggtgaagttcaagagaaggcgcgctggcaagacagactacagggccaggataaggctgattaaccaagacaaaaacaagtacaatacacccaaatacagatttgttgtgcgatttaccaacaaggacatcacagcacaaatcatctctgctagtatagcaggtgatatggttcttgcttctgcttactcgcatgagttgccacgatatggtcttgaagttggtctgaccaactatgcagctgcctactgcact

SEQ ID NO: 7547 - DNA, 254 bp, Zea mays
  Clone ID: LIB3150-008-Q1-N1-C5
tcggcgtccggtgtctccggcgaggctcctgtctcggcgcatcgtggaggactgcctcgggctcgtccagctcatgagcgacggcaccgtcaagcgcgcgccggcctgcttggcctctgccgacgatgcggcaccggtcggatgcaaggacgtcgtctacgacgaggctcgcaacctgagcctccgcatgtacgtgccatcgtcctccatggcggggaacggcggcgccgagaagcttcctgtgctggtctact

SEQ ID NO: 7548 - DNA, 175 bp, Zea mays
  Clone ID: LIB3150-008-Q1-N1-C6
cacgctcgtaccctaccgcatattacgatgatcggcactaagccggggaaggtggacttggctctcgtcgtgttttgataaggcgggcggtcctgcagaagaatgggtggttcttacgatcgactgctcctagccagtggaggaaagatcatggagtgcctcgctgaaaatttct

SEQ ID NO: 7549 - DNA, 377 bp, Zea mays
  Clone ID: LIB3150-008-Q1-N1-C7
ggagcgcttccgggcgctcttctccctgcgcaacctccgcggggatgcgccgcgccgcgccctcctccaagctgcaagggatccttctaacttgcttgcccatgaggctgcatttgcacttggacaaatgcaggatgctgaggctattcctgcactggtggcagttctcaaagatctttcgctacatccaattgtccgccatgaggcagcggaagctcttggagctattggcctggaaaagagcatccctgtgttggaggaaagtctaacaactgatcctgctgtggaggtccaagaaacttgcgagctggcactaagacgaatagaggagaataagaaagttaatggggctgagagtacaaccacttcaccctttc

SEQ ID NO: 7550 - DNA, 226 bp, Zea mays
  Clone ID: LIB3150-008-Q1-N1-D1
tgttcatcgagatctgaaatctccaaacttgctggttgacaataattggaatgttaaggtttgtgactttggactttcgcggttgaagcacagtacatttttgtcatccaaatctacagctggaacagtgtgatgtttatagctttggtgtcatcttatgggaactggcaacacttagaatgccatggagtgggatgaatccaatgcaagttgtgggggcagttgg

SEQ ID NO: 7551 - DNA, 377 bp, Zea mays
  Clone ID: LIB3150-008-Q1-N1-D10
gccaagagttcttcttgttaggcaaggcaaaagcagaagcaaaaaaagaaaggtcttgttgccgatggggagctcagggttctcgtggacgcttccggaccaccccaagctccccaaggggaaaccggtggctgtcgtcgtgctggacggatggggcgaggccaaccccgaccagtacaactgcatccatgtcgctcagactcctgtcatggactcgctaaagaatggcgctcctgagaaatggagactagtgaaggctcatggaacagctgtgggcctcccatctgatgatgacatgggcaacagtgaagttggtcacaatgcacttggtgctggtcgaattttcgcccaatgtgctaagcttgtcgatcaagctc

SEQ ID NO: 7552 - DNA, 481 bp, Zea mays
  unsure at all n locations
  Clone ID: LIB3150-008-Q1-N1-D12
acgtcgcatcgcgacgcgtacagtaatgcttgtgatccctctatgagnntcgacccacgcccgtctcgtcccgtcgtcctcggcttgatcccgtaccacgctgcgcttcttttcccctcgtggtccgccgtctacatcgcgcccgtccggaacccctatgcctccatccgccacagggcagcaggggatgggagaaagggatgcctcggagggcgtcgcccccnttgcgcctcgctgcggcaagtcccgctcagcttcaatgccccaagtgtgtcgaacttaagttaccgcgtgagaatgcagctttctgcacacaggattgttttagggcagcatggagctctcacaaatctgttcacccaaagcctggtgcaccggcatcccagcagtctccagaaggttggaaatattgtctgagaaaagggcgggaacgtgcattgcaacttcctcgttttgattggacaggtccattgagaccaca

SEQ ID NO: 7553 - DNA, 293 bp, Zea mays
  Clone ID: LIB3150-008-Q1-N1-D2
actggctaccttggtgctcacaccatatgctatgaacccagcctctctctctccgtctagcagcctattacatttatggaccagatcatgatttgcatcaatgcgcgccattggatctgctggctggcggccagggctgctcctgcatagcgacgacgcagagctcgctctcggaacatacgccttgtcaggacacaataatgtacctcatgctcaagtatgacactggagtcagacactgcaatgaccatgatgcctgtgagtatgactcatataccgtgctcattggccat

SEQ ID NO: 7554 - DNA, 315 bp, Zea mays
  Clone ID: LIB3150-008-Q1-N1-D3
cctttgccgcatccgatattccgatctcgatcccgcgacgcggtgtctccggtcagcgccgccgccttctccctcgccggccgccactgcatcgccgcagtcgccatgaattatatcattggagcattcaagccaccttgtgacatctcgatcacattctctgatgcgaggactaggaagcaggtttcggttaagaaggacaatgggaagacaacgatggtccctgttttccagagcctcgaaactatatctggagaagtatcaatagcaccagttccaggtaaaaggattgaacacacgggtgtcaaaaatgag

SEQ ID NO: 7555 - DNA, 325 bp, Zea mays
  Clone ID: LIB3150-008-Q1-N1-D7
tgagggggggcacgctcgtaacttgttcctctaagtcgacccagctttcgatctgcaaagttgaactggcgcaggtgtgctgtttttggccttgtaacagttggactcgcagttgctgagggagcaaatgctgctggtgcttctcgagttattggcattgacatcgacaattaaaagtttgatgttgctaagaactttggagttacagaatttgtttacccaaaagagcatgactaaccgatacagcttgtcctggtcgttcttacagatggcgtgttggattacactttttagtgcattggaaatgtttcggttattaaaggct

SEQ ID NO: 7556 - DNA, 331 bp, Zea mays
  Clone ID: LIB3150-008-Q1-N1-D9
gtcaaacattatacacttgcaacagggtttgcatgtgcaaaggggtctctgcttgatcggaagccagaaaatgccgctgacacgattaagcttctttacgagcatttgcctgatcagaagaaaccatttgtgaaagatgaactcgagaaacttattgctggatggcctacggaggtggtaaagaggcagaagaaagataagaggaaggcgttggaagaagctttgatgaaggacatcgctacgatggtggactgcctgacaaagtccggcctcgacatccctgtggaactggacaagctttccaccccacagctccaagtggcgtaacaaa

SEQ ID NO: 7557 - DNA, 372 bp, Zea mays
  Clone ID: LIB3150-008-Q1-N1-E1
ctgccttctgcgcctccatttcggcctctgtcccttgcaagttcaatctcacctccaaccatgggtaaagagaagtcccacatcaacattgtggttattggccatgtcgactctggcaagtcgaccaccacaggacaccttatctacaagcttggaggcattgacaagcgtgtgatcgagaggttcgagaaggaggctgctgaaatgaacaagcggtccttcaagtacgcgtgggtgctcgacaagctcaaggctgagcgtgagagaagtatcaccattgatatcgctctgtggaagtttgagaccaccaagtactactgcacggtcattgatgcccctggacaccgtgacttcatcaagaacatgatcact

SEQ ID NO: 7558 - DNA, 257 bp, Zea mays
  Clone ID: LIB3150-008-Q1-N1-E2
ctaatcactcacaacacatcacatatcttttagtaacctttcaataggcgtcccccaagaactagtaaacatggcaaaactgttgagcctgttcttagccctctcctttgtagcagctatgtttgccataggctctcatgctgatggagactgtgagaatgacctccaaagcctgataagtgactgcaagacatacgtgatgttcccagctaatccaaaggtccctccttcggatgcttgctgtggtgtcatcaaga

SEQ ID NO: 7559 - DNA, 388 bp, Zea mays
  Clone ID: LIB3150-008-Q1-N1-E6
ggaagcttcgagttctttttcgttttggcttactgcgcaagaagggtaacgagaggacggcggcgatggcgaagaggctgctcccgtctctgaaccgggtgctggtcgagaagctggtgcagcccaagaagaccgccggcggcatcctcctcccggaaacatccaagcagctgaatgctgctaaagtggtggctgttggccctggtgagcgcgacaaggcaggcaatctgatcccagttgctctgaaggaaggtgacactgttctcctgccagagtatggtggaactgaagttaagcttgcagctgataaagagtacctcctcttcagagagcacgacattttgggcacacttgtggactgattcagagcatcagcaagcctgtcact

SEQ ID NO: 7560 - DNA, 347 bp, Zea mays
  unsure at all n locations
  Clone ID: LIB3150-008-Q1-N1-E7
tcggccactcacatggtgctcctccatcttgcaagtcaccaacgcaaattgcaccaagaaatccatcgagaggccgtcgacaggggaattaatggcgtcgtcgtctagcagcagccaccgccgcctcatcctcgcagccgccgtcctgctctccgtgctcgcggctgccagcgccagcgccgggacctcctgcgtgccggggtgggccatcccgcacaacccgctcccgagctgccgctggtacgtgaccagccggacctgctgcatcgggccgcgccttccgtggccggagctgaagaggagatgctgncgggagctggcggacattcccgcgtactgccggtgca

SEQ ID NO: 7561 - DNA, 331 bp, Zea mays
  Clone ID: LIB3150-008-Q1-N1-E8
agcagttcatgaccattaccggggccggtgagaatgttgcccttcatgcactgaaagctactgattgacacttggaaggagcttttgacttcttctatagccaacctcaggtttctgtggtcaatactcggcatcttgaagatattttcaacagatataaagaacctgatgctgatatgataatggtggaaggaatatctcaattttgcaatgatctacaggttgatcctcaagatattgtcatgcttgtcatatcatggcacatgaaagccgccacaatgtgcgaatttactcgtcaagaattcattggtggactgcattcaattggggt

SEQ ID NO: 7562 - DNA, 374 bp, Zea mays
  Clone ID: LIB3150-008-Q1-N1-F10
cgatctcaagaacgccgcctccccgggtcccgcaccccgtcgccgcgccggtagtctgcccgtcgccgtctcctcctccaggtgaagccgaaggtgaagcagcaggatgggtcggaaggccggtgctttgtacataaacccaaagaagtttggtgctatggcgaagccctgcatgccagaaatggtggccttcctcaactgtctggccttaaacaaacagaacgatgacaagtgtatcaagcagaaagatcttttggttgcatgctctcaggctcagaatgggaggccaaagaacgcagccaagaccatcaattaccatctccagcgacttgggcgaagcaagttcctctagtcgctgtgtgagatcatttcct

SEQ ID NO: 7563 - DNA, 388 bp, Zea mays
  Clone ID: LIB3150-008-Q1-N1-F11
aaataaatttgtcgggcggttaatacaaggcctacaccataatgaacaccctttgtgcgacaggcgaacagctgtctctatctctctctgcagtattatttggttcattatatgcagttgcaggggagaaaacttaggcatgttcactgcagctagaatcacagccgcatcagatgcagcaggcttcttatagtatttgcagcttagaagttggagtggcagctgcagctagctgcagcaaacactcttaacaataatagtggagagagactctcacgctgtttaaatttaggtgatttttgggaattaacttgcagatttattaattattatataggtaaaaagtgtagtatcagttactaagaacaagaacatgccctgatgacac

SEQ ID NO: 7564 - DNA, 386 bp, Zea mays
  Clone ID: LIB3150-008-Q1-N1-F2
acagcccaagccaacaatcttcagacgcggactgtttcagcccatcgaacaagttccttgttcggtcggaacgcagcgcagcggcggcggcgatagggagagaggagagagtctgcaggatccagcaggccgaggaaggagtcagcggcgggccggagaatatgagcggcaacggcgcgaagaaggtggtcgatgcggcggtgaaggccggcaggacgatcatcgactgggacggcatggccaagttgctcgtcaccgacgaggcgcgcaaggagttcgccgccctccgccgcgctttcgatgacgtcaaccaccagctccagaccaagttctcccaggaaccccagccgattgattgggagtactacagaaaagggaatggatca

SEQ ID NO: 7565 - DNA, 397 bp, Zea mays
  unsure at all n locations
  Clone ID: LIB3150-008-Q1-N1-F3
ggagaagctgagcgagcacttctccgcctacggcgaggtaacgcaagccgccgtcatgcgcgacaagatcaccggccgcccccgcggcttcgggttcgtcgtcttcgcggatcccgccgccgtcgacagagcgctgcatgacccccacaccctcgacggccgcacggtcgatgtgaagcgggcactctcgcgggaggagcagcatgcctccaaggccgcgaaccctagcggtggaaggaactccngtggcggaagaggcggctgtggctgcagcgatgcaagtggtgctcggacgaagaagatctttgtgggcgggctgccctctactctgactgaggatgggttccggcagtacttcgagacctttggcatagttactgacgtagttgtcatgtat

SEQ ID NO: 7566 - DNA, 122 bp, Zea mays
  Clone ID: LIB3150-008-Q1-N1-F4
ccaatacattaaaccatcttatgttgggttgcttcgcatggacggcatccgttcaaccaagtggtgaagccaacacacattaaatgggttgcatttgtagcctacttagggcactggtgctg

SEQ ID NO: 7567 - DNA, 297 bp, Zea mays
  Clone ID: LIB3150-008-Q1-N1-F5
tcggttaagcagcagcatgaaccggagcggggtctcttacgcagccatgggtttcgacctcgttgccggtgggaggaacatgaataccaagcgcacagcgcctaattccgacgatgtttatctcaagctccttgtcaagctctaccgtttcttggtcaggaggaccaagagcaacttcaatgctgtcattctcaatacgctcttcatgagcaaaaccaatctcccaccaatcttcatgcgccgactttcaagttcttggaaagaatagagaaaaacattgctgtgattgttggcaca

SEQ ID NO: 7568 - DNA, 156 bp, Zea mays
  Clone ID: LIB3150-008-Q1-N1-F6
tcgctcctctaaaccctttctctcggtccggcgccatcgccaacatggccgtccactacctcctccgtcgcggtgtctccggtggctcactgctccaccctatccgcggactcttctacgtctccaaagagcttgggaggcgtccgttgggctctt

SEQ ID NO: 7569 - DNA, 397 bp, Zea mays
  Clone ID: LIB3150-008-Q1-N1-G1
agcgagaccccgatctccctcgaggagaatggcacggtcgttctcacccctcaccggggccaagacgcctcctccagcttgctgcccatcaacttctctggactcgccaaggcggtgacaccaggggcaacaatattcgtgggacaatacttgttcactggcagtgagaccacctcagtttggttggaggtttctgaagtgaaaggagatgatgtggtgtgtataatcaagaacacagccaccttggctgggtcactgttcacgctgcattgctcccagattcacattgacttgcccaccctgtctgatgaggataaggatgtcattagaaaatggggtactcccaataagattgacttcctttctctgtcctacacaagacatgcagaggatgtgc

SEQ ID NO: 7570 - DNA, 384 bp, Zea mays
  Clone ID: LIB3150-008-Q1-N1-G12
ggcaaccagctgccgagggaggaaccctagcggaacactgtgcaggtgacggctgcgcgctaccggtgacggcggcgcgctaccggtgacgggggatacggtggcatcgtccccctcggcccctctttcatccccggcgcggcggcgccagcagccggcctgcagggcttatattttacggtgagcacattcttttgctgatggagaccactgaacctctacaggatatcatgtgtgagtttcgtgctggtaagatgtctcatgagggaacacgagtggttccagacacgcgcaagggtcttgtccgcgttggtaggggtgaagagggattagtccattttcagtggcttgaccgtggacagaacaatagtgaagatgatcaaa

SEQ ID NO: 7571 - DNA, 271 bp, Zea mays
  Clone ID: LIB3150-008-Q1-N1-G4
cccacgcgtccgcccacgcgtgcggggatgtttagcctgcagtctgtacttgccccaagcatctatggtgcctgttttaaatctcagatcacaatagacgtttgttttaaaaaaaaaaaaaaaaaaaaaaaaaaaatataaaaaaaaaaaaaaaaaaataaaaaaaaaaataaaaaaaaaaaaaaataataaaaaattaaaaaaaaaaatataaataaaaattaaaaaaaaataaattagtataataaataaaataaaagggggggccccc

SEQ ID NO: 7572 - DNA, 354 bp, Zea mays
  Clone ID: LIB3150-008-Q1-N1-G5
cccacgcgtccgatcttttagtaacctttcaataggcgtcccccaagaactagtaaacatggcaaaactgttgagcctgttcttagccctctcctttgtagcagctatgtttgccataggctctcatgctgatggagactgtgagaatgacctccaaagcctgataagtgactgcaagacatacgtgatgttcccagctaatccaaaggtccctccttcggatgcttgctgtggtgtcatcaagaaggcaaacgtttcttgcttgtgctccaaggtcaccaaagaaactgagaaggttgtgtgcatggagaaagttgtgtatgttgctgagcagtgtaagaggccatttgagca

SEQ ID NO: 7573 - DNA, 274 bp, Zea mays
  Clone ID: LIB3150-008-Q1-N1-G7
tcgtgtctgcaagacgaaactagctgtggagtgcataattgcagccctaaaggctgttggatcattcatagaatatgtcaatgatggaggtgacattgtaaaaatgtttcgggattttgttcccagtatcttgaatatatcaagacagtgtcttgctaatggagaagaagatgctgctttcattgcgtttgaaatttttgacgaactaattgaatcttctgcaccacttcttggagactctgtgaggtcaattgtgcaattctcgctggaagtt

SEQ ID NO: 7574 - DNA, 176 bp, Zea mays
  Clone ID: LIB3150-008-Q1-N1-G9
tcgatacaacagtgtcccgtccacatcactggctgctttatcacagtgtactggctatccttatggacaaccaggccatatatgacatctgccgtcgttccctcgacattgtgcgcccaacctacaccaacctcaactggctcgcgtcccacgtcatcttatccctgactgcctac

SEQ ID NO: 7575 - DNA, 354 bp, Zea mays
  Clone ID: LIB3150-008-Q1-N1-H2
gccttacttgcttcatcttcttcagcttgcagtgtgctgctgggttttggaccttttggtaccccggtggatcaagaagtggccgtgcatttttgcttccctggcatgtcttcaatgagtgtcttcatccatgttcttgatgtcggcacaagtgtgactggactcctggagaagtgaatctttatgcatagcgccaaaatgattgatcgcttgtccacagaagccatgtttatgaactccctgggaatgctgctggtgttgttgagcagccttgttattcttgcactcgttagtcctggacccatcatgatcgacacatacagaggctcttctgagtgaaaagaaatgattaca

SEQ ID NO: 7576 - DNA, 263 bp, Zea mays
  Clone ID: LIB3150-008-Q1-N1-H4
ccaagccgtcgtcggtagggactggagctggggcaggagccgacatcgcatggctgtcgctggagcccgacgcgcgcctggcgctctacatcgccatggcgcacgcgggcctcgccaccgcgctgctcgtgctctacggcctttacctgctgctcgccgacttcctccgcccgctgcagtgggcgttgctctgctccgtcccgctccgcgagacgcagcgcgcgctcgtcgccttctgggagcccccgctccgtggcggactc

SEQ ID NO: 7577 - DNA, 82 bp, Zea mays
  Clone ID: LIB3150-008-Q1-N1-H5
gaaacatatgagaaaaccgcttcagaggtgacggaatcctcagcaagagctatcatggattatgagcacaacatgttctact

SEQ ID NO: 7578 - DNA, 61 bp, Zea mays
  Clone ID: LIB3150-008-Q1-N1-H7
gtctgtctctgatcagttcgccaatcgtgacgcgtatggcttcgatgtgtgacttgctact

SEQ ID NO: 7579 - DNA, 337 bp, Zea mays
  Clone ID: LIB3150-008-Q1-N1-H8
gccgtttttcctcgtcctcgatccagccccctgccgcttccagctccgatcgatctgatccctccccaccaccacgcccatggcggaccaactcaccgacgaccagatcgccgagttcaaggaggccttcagcctcttcgacaaggacggggatggttgcatcacgaccaaggagctgggaactgtcatgcgttcactggggcaaaaccctacagaggctgagctccaggacatgatcaatgaggtcgatgccgacggcaacggcaccatcgattttccagagtttctcaaccttatggctcgcaagatgaaggacaccgactctgaggaagagctc

SEQ ID NO: 7580 - DNA, 193 bp, Zea mays
  Clone ID: LIB3150-009-Q1-N1-A10
tcggccgccatagctgcatagatatttaggcctcttacgaccctttctctttgtccagacgcaccatccgaccaccataagacagactgctaaacctgtcctatagctccacttatttactatatactcttaccaaaagagtcttctgtcttacaaaaacaaactttttaacgctgcataatccaacacacat

SEQ ID NO: 7581 - DNA, 300 bp, Zea mays
  Clone ID: LIB3150-009-Q1-N1-A11
cgacggcaacgactggggctaccgtcgctgccgcccgacttgccggttgctcggttcttcttctgcccgttagccgtccacgagcaccaccagagtaaccagatacttcactggcttatcaaggatgtcctggtgcactattgagtctgatcctggtgtgtacactgagctgattcagcatatgcaagtgaaaggtgtacaggtcgaagagctctactctctcgatgtgggctctattagtcaactgctgacagtatatgggctaatttttatctttcagcggatacccgggagaaggat

SEQ ID NO: 7582 - DNA, 402 bp, Zea mays
  Clone ID: LIB3150-009-Q1-N1-A2
atagttctcagaggtggcacaaccatgttggctggcatcgctgaccgtatgagcaaggagatcaccgcccttgccccgagcagcatgaaaatcaaggtggtggctccacccgagaggaaatacagtgtctggataggagggtccatccttgcctccctgagcaccttccaacagatgtggatctcaaaggctgagtacgatgagtcaggaccagcgattgttcaccggaagtgcttctaagctcaagggcccccttcgtccccattctatgtattcctttccttgagagcttctcttataagctactatgtttgagattgccggcctttgagcaagcaatagttgtagatcctgatcttgtggatcactacaatgcatgcgttgctccatcttcttttcatg

SEQ ID NO: 7583 - DNA, 212 bp, Zea mays
  Clone ID: LIB3150-009-Q1-N1-A3
gtcgatgcgagggaaggtccaaccatgttgcttgggttcactgaccaggtgaacaaggggatcaccaccctcgccggccgcagcttgacaacgaaggagaagactacaaccaagaggaccttcagtgtctgcatagaagagttccatgctcgcctacctgaacgccgtgcaccaggtgtaaatctgacagactgagccccatgagtcaggac

SEQ ID NO: 7584 - DNA, 439 bp, Zea mays
  Clone ID: LIB3150-009-Q1-N1-A5
tcgcttaatctccaggatccttctgggctgaggccccggcgaaggctcaggccgaccacgcttccgctgcccaggttgcgccgcttctcatctgcgacggagacaaggggggatacatcaggatccgctcgcttatcatgcagctcattaaagcaaacaaacaaggaaggtgcgtgaatgccacgcaggggggtgggcagacacaatagacgcggaaatcttcgtgagccgaagcatgagtcggttaaaaaggagcaccaacgctaggtaaagccgcgaaccggaatctgccgaaaaagacggcaacaaaccaagcaagaaacaagggagcgaaggaaagaggaggtaaatgtaaatctgctgccggcagagagcgaaagaacgccaaatcgagcaaatggtggcgctaacccacacacactgccactagtacggtgga

SEQ ID NO: 7585 - DNA, 333 bp, Zea mays
  unsure at all n locations
  Clone ID: LIB3150-009-Q1-N1-A6
cgcatgtccactcanatctgaaaagtcaagagaatccgttgccgtcgaggcggtgccgttcccggcgcaaggccacctcaacggcatgctgcacttgtctctgctactcgcgtcccgagggctttccgtgcactacgcggcgccggggccgcacgttcgccaggcgcgcgcgcgcgtgcacagctggggcgacgacgcccaccgccgcatcgagttccacgagctcgaagtccccgcgtacgccaccccgccgtcagacccggtcgagccctcgccgttcccgacccacctcaaccncatgagcgaggccttcgtcgctggcgcgcgcgcccc

SEQ ID NO: 7586 - DNA, 433 bp, Zea mays
  Clone ID: LIB3150-009-Q1-N1-A7
caggcaaccagctgccgaaggaggaaccgtagcgttacactgtgcaggtgacggctgcgcgctaccggtgacagcggcgcgctaccggtgacgggggatacggtggcttcgtccccctaggcccctcttccattcccggagcgagagcgccagcagccggcctgcagggcttatattttacggtgagcacattcttttgctgatggagaccactgaacctctacaggatatcatgtgtgagtttcgtgctggtaagatgtctcatgagggaacacgagtggttccagacacgcgcaagggtcttgtccgcgttggtaggggtgaagagggattagtccattttcagtggcttgaccgtggacagaacatagttgaagatgatcaaatcatctttcctgatgaggcggtctttgagaaagtgacagaaatctct

SEQ ID NO: 7587 - DNA, 354 bp, Zea mays
  Clone ID: LIB3150-009-Q1-N1-A9
gtacgctcgatcctctcacataacccacgcgtactgttccaccgaaggcatgtcaaatattgcgggttcctgtgctggttggatgtctgcagtctcttctactcccacgataccgccacaatgggtcacgaccgacgaataactgtcctttttgcgagtgccgtgtgctaacagtggtctaagtgttactcaactgaagtctgtctcacctaacgatccatcgatggatatcttctcgcatcttacccttataacgcttgtttctccaacaatcatcaacactattacagcaattacctttggtgcatttattggcacaaaacatcatggcacaacaactacaacaacttgtgc

SEQ ID NO: 7588 - DNA, 333 bp, Zea mays
  Clone ID: LIB3150-009-Q1-N1-B1
ctctcactcccgatccctcctccaccaccgcttcctccgcgtcacccctctcgtcgtcgcctcacgaggcgaccagcggcggaccctccgcggcgcaaccatggggctcttcactgtgacgaagaaggccaccacgcccttcgacggccagaagcccggcacctccggcctccgcaagaaggttactgtattccagcagccccattatctgcagaactttgtccaatcaacattcaatgcccttcctgtggatcaagtaagaggtgcaacaattgttgtctctagtgatggccgctatttctcaaaagatgctgttcagatcataacaaaaat

SEQ ID NO: 7589 - DNA, 259 bp, Zea mays
  Clone ID: LIB3150-009-Q1-N1-B2
ctcctccgcccgagcctgcctcctcatcgacttatacgcctccttctcttaactcgacgcactatcctcagccaattgtcgcatttcgtcgctatggggtccacagcggccgtctccgtctccgcctgggcgatcgcgtcccgcggctgcgccagatccgaggctgcgcggcggccaagtggaatccgggtctgcggactccggagcgaggccctcacgtgtcactcgcttcggatctcgcaagcgcccgcgaggctga

SEQ ID NO: 7590 - DNA, 385 bp, Zea mays
  Clone ID: LIB3150-009-Q1-N1-B3
gtcctccgcccgagcctgccttctcatgggcttatgcgcctacttctcttaactcgacgcactatcctcagccaattggcgcatttcgtcgctatggggtccacagcggccgtctccgtctccgactgggagatcgcgtcccgcggctgcgccagatccgaggctgggcggcggccaagtggaatccgggtctgcggactccggagcgaggccctcacgtgtcactcgcttcagatctcgcaggcgcccgctaggctgacggcggcgaggccgccgccgccggcggcggctaccaatggcgcggatgaagggacctgctggttcgactacgatctggtcatcatctgcgcgggcgtcggtggtcacggctcctcgctgcacaccg

SEQ ID NO: 7591 - DNA, 296 bp, Zea mays
  Clone ID: LIB3150-009-Q1-N1-B4
cccagttcccctagtcctttgcgcaagggagaaggagcgccgcagaccgagggacggcgaccaggtatccaatggccgaccctgacgtgatcgaagtgaccttcggcaacgacgtgattaacaccaccgtcacatcctccggccaggctgtggagcgctggatcgcggagatcctcgcgttgcaccgccccggcagcaacggctacagcatcatcgtcgggcttgacgttgagtggcgcccaagcttcggcccgcaccataacccggtggccacactgcagctcttgcgtcgacac

SEQ ID NO: 7592 - DNA, 385 bp, Zea mays
  Clone ID: LIB3150-009-Q1-N1-B7
ccccgtgctacgcgtcctacgggagcttggctgcggcgccatcctccttagcctcaacgagctccgactagccctacaagcgggattcaaccccgccaggtgtatatttaacggaaatgggaagacactccaagatcttaaataggctgctgagagtggagtctctgttaatgtggattgcagaattcgatttagagaatactgccagagctgcaagagctactggaaagaaagtgcctgttctacttagaataaatccaaatgtggatccacaggtacatccatatgttgccacgggaaataaaacatccaaattcgggatccgcaatgagaaattgcaataggttttgaactctatcaagttatactcaaatgaaatcaaact

SEQ ID NO: 7593 - DNA, 309 bp, Zea mays
  Clone ID: LIB3150-009-Q1-N1-B8
gcgtggaccaaccatcacgggagagctcggccgctaccacatgattcctaacactggaagagctctgagcatcatctaaaattcccaacatctggcccatatgacatgctctgtcatgtgtacacggctatctcagacccagtcactgaggtcagaattttcgtaggtagggaagaaaagaagaaggcgcacttgctttctgctgaagatttagagccatcactgatagaatccaagaccattcctgaccctgttgactagatgccggatgacggagatgagagagctataattcctgacccacatgca

SEQ ID NO: 7594 - DNA, 106 bp, Zea mays
  Clone ID: LIB3150-009-Q1-N1-B9
atcctccattatataccgaactccaatatccacactcacaataactttgccaccaacgaatattgcctccatatactacgtgctccttctctatttttccttaacc

SEQ ID NO: 7595 - DNA, 337 bp, Zea mays
  Clone ID: LIB3150-009-Q1-N1-C1
agctcaccgcagctcaaaagccagcacaggcaatcggccgtcatggcctcctccaagatgctgcgcgccgccgtcgtcgtctcggacgtcgacgtgtcctccttagccggcgccgtcctcgccgccgaggccccctcgccgagcccggcctccggcgcgcggggcctcccctcgtagctcttggccgccgacctctgcccggccattgcgctccttctgggcaacctgcgccactgatgacgcctgcctgtctcctagaccgaccagatccgccgtgtgctgtcgcgtgatgttattgtcctctgaatgagtgtgtgcgtgttcctgacctgtgcgt

SEQ ID NO: 7596 - DNA, 359 bp, Zea mays
  Clone ID: LIB3150-009-Q1-N1-C10
caactaccaacatacaaagcacaatagtgtaccaacaatgccacccaaaatatgcgggctccttatgctgcttgggctctatacaagaacatataccgccaccatacttccaaaatgctcgcaagctcctatagcttgccttgttcacccgtaactattaccatcaagagtcttctgtatgtgaaaacccaattcttcaaccctacagaatacaacagaccatcacacctggcatcttacctgtatcacccttgttactccaacaatcatcaaccctattacatcagctacctatggcgcatacattggcgcaaaacatcagggcacaacaactacaacaacttgtgctaacaaacctt

SEQ ID NO: 7597 - DNA, 336 bp, Zea mays
  Clone ID: LIB3150-009-Q1-N1-C2
gtcgcctggcaggacgattgattgataaccgcagcagagggtaccatgtagtccctctagttgaggatcccagaggccatcctgaagtcctcgtggatggggatcggaggggctactctgacattcgtggggttcagcaacgtcggggctaccctgacacccatctgcttgaggaacctatgggctaccctggtgttcgtgtggtcgaccataggggctatcctggcagtcgtggggttgatgaacgcatggcctatcctgagctccatcaaagctcacgcatgagggcggctcctcccccttacccagctgccttcgaggatgagctcgagttac

SEQ ID NO: 7598 - DNA, 272 bp, Zea mays
  Clone ID: LIB3150-009-Q1-N1-C3
gcggcggggtaggtcgagggggtcttaacggcaggcgagctcggctcctgtcacccgtcgttccacacaaccatgtccatgcggaagacctgggagcccaaggtggagaacgctacccttggacccactgtgcgtgaaagagagtttgcctctggtagtcactcacatgcttgcagtacctaatgactcccctattgatgtcactgatttgcatgggagggatactgtgggtcggatcactggtggcatcgaaggctatgctgatcttgatg

SEQ ID NO: 7599 - DNA, 127 bp, Zea mays
  Clone ID: LIB3150-009-Q1-N1-C4
gcacattcgcaggctgcaccgttgtcaacgccaccaggaccaccgccactgtcgccattcctaccttcaccattctcagaccctgaaccagtctacgcacccggacgacaacgacagtgtcgaccat

SEQ ID NO: 7600 - DNA, 407 bp, Zea mays
  Clone ID: LIB3150-009-Q1-N1-C5
caccagactttaacctctgccagctgttctgatcctacacattgacccccttagggagaagtgtccttggtctctgcttcgcattcctaactcaccattgctccccttcagcgacaccctacggctcgtcaaagtgccagacccttcagctgcactgctgccaccaaatcacgcactttgaacccctgaccagcttccacgcgtcatacagcgtggccctgaagtacatcctgcagcaccagccagaacacgagctcacggtcctgatgacgacccaggtatcacaacatctgacggcgatgtgcagactgcacctgatataaccacctccctgtgcttgcaacgcacctgacgccagtgcctactactgacgaaactatacactgttatcataatgtaatggatcc

SEQ ID NO: 7601 - DNA, 331 bp, Zea mays
  Clone ID: LIB3150-009-Q1-N1-C8
tgcgcgcgtctactgatcttaatcaccagcgtcgatcaagtaacctgggtggagcatgtcttgaagctatgttctggaagtcttcagcagactatgtgttctggttttcatacagccacactgggcaggacaatttatgccctagcttgacgcttgcatttgatatgataccctagctttgagtcaaatgcacagcaacggattgcatggaggtctgattatgcaaaaaagatgatctaatgcaatgatgatcaaattttgtgcagaggaatatggtcataaaaagcaactcccaggcacatatgtaagtgagctatacaatactttaata

SEQ ID NO: 7602 - DNA, 302 bp, Zea mays
  Clone ID: LIB3150-009-Q1-N1-D1
atccccaaaccctagctcccggtgctcgatggcgaaccctcgcgtcttcttcgacatgaccgtcggcggcagccccagcgggccggatcgtgatggagctgtacgcccacaaggtgcccaccaccgccgagaaatttctcgcgctgtgcacggacgagaagagcgtgggctagtccgggaagccactccactacattgggtggaccttccatccccgcattccttactgtatgtgccagggcggggacttcaccctcagcaacggcaccggcggcgagtgcatctacggctagaagttcccc

SEQ ID NO: 7603 - DNA, 321 bp, Zea mays
  Clone ID: LIB3150-009-Q1-N1-D10
gtgacccacgcgtacgcactggagtaaacatgccactttttggatcctgcacgtcagcatttaggagcgggggctgggccaggcgtcggtgctgagcaccataacccccggcagagagccctaggatcaccacatcgcgacgctcaacacagtgctgccaccaaatcaggctgtagaacccataaccgttccaggcgacataagctgagtcctgcagtgcttgctcagcatcagccggaggcgagctcgccgtgctgatggcaggccaggtagcgcaacatctgactgcgatatgcggactgcatctgtaacagccaggtc

SEQ ID NO: 7604 - DNA, 299 bp, Zea mays
  Clone ID: LIB3150-009-Q1-N1-D11
cgggattactatatgcaccctcacattgggtctgatgtaatgaagccactgctaattgatcaacttatgaaccacaacgtcgctcatacatctggtggatagctccaaagagcagctatatgcctctgccttggaaagcctgcagatatctatctgattgatgaaccaagtgcttatctcgattccgagcagcgtattgtggcctcaaaggttataaagagattcattcttcacgcgaagaacactgcatcaattgttgagcatgatatcatcatggcaacatacttggctgacaaggt

SEQ ID NO: 7605 - DNA, 346 bp, Zea mays
  Clone ID: LIB3150-009-Q1-N1-D12
tgcacccgtgcgtccactcgtatcctctagcagccagattagctccctcgttacagtgcagcacgccgcctgttatgcggaggaagaggcagccaaaacaaggatgcagatcggctgccgcatcaagaagcagcagcagctaggcgatctgctcctgacgaaggtcaaggtctatatcgtcaacccgcacctgctgctcctggttagcggcgccatcgcctgcgccctgtgcagaacatttatggcgcctcttgagactaaccgcactcacttgattgtccgcttcatcggcgtcaactccatggccccagtgttccaattgatcatgcacaaccaacggtggacc

SEQ ID NO: 7606 - DNA, 320 bp, Zea mays
  Clone ID: LIB3150-009-Q1-N1-D2
ggcgactctaaccatgcaaccgatcggtgccacccgtgctgcggctgcgcagcaagaccctagcaaaggagagaatcctcctaccgaagatggtagcgatctgagggacatcgactcgggctgggtcatcctcaagaactcggatagtcgtttccgcggattcggcagccgccggcgtctgtggcggtcagcgtctaggctcttctacgattcctagctgggcacggtgggttctctgaggtgtggtttacacgctcgcgccgatctacaacagagttaggcatcttgaagacgagacagtgggattcgtggagaatgct

SEQ ID NO: 7607 - DNA, 325 bp, Zea mays
  Clone ID: LIB3150-009-Q1-N1-D4
ggcggatccgacgaacccaccgaccctggggaagtgtaaccctagatccggaccggacatggcctcccgacggattgcttcctcgatagttcgttccgacttcagcctcatagcctcctcctccgtcatgccgagcacgcgcgaagcgccgcaccgcccttccccagccaggtacctctttaaccgcgccggcgtctactcctctaccatcgctgaccaggtggcgcccgtcaccccgacgtcagccacacagaataccggcggtctgcagatcaccgacgagtctaccaagccccacgccatcagtcatgtgtgacacgtgatc

SEQ ID NO: 7608 - DNA, 377 bp, Zea mays
  Clone ID: LIB3150-009-Q1-N1-D6
gcgaccgtcctgactgaaactggcgcgcgggtggtggatgcggacccagaggctcccgccgacgcccctgctgctcctgctgccgacgcaaatccggccaaggccaacaaggccaccgatcctaagaagcacgccagcccgacccacccgccgtacgccaagatggtctcggtggcgatcacgtcgctcaaggagaggacagagtccaacatctacgcgattgccaagttcgtggaggacatgcacaaggccaagcttccgcccaacttacgcaagcttctgaacgttcagctcaagaagctcgtcgccagcggcaagctgaccaaggtgaataactcgtacaagctgtcgttcgccaccaagacgtatcccaagcc

SEQ ID NO: 7609 - DNA, 392 bp, Zea mays
  Clone ID: LIB3150-009-Q1-N1-D7
tcgccgattcgtcactccaccctcggcgcgcggacccctgccgagtccccagccagcctcccagccccgtggtctgctagcggctatccacaacggagagaccaggagccatggtgatccctccaccagcaagggcagcttgagtcacccgtttcctcaagccctacctgtcgaggacacatttctcaaacaagtatgtatctgctcacgtcgtccacaccccaacagcaactgttgcatgttctgcaagctcgcaggagaagctgttgagaccaaacatggagtcgacccgcgacgtcgcagcagctgcaaagattggaaagttgctcggcgagcgcctgctcctcaagggaatacctgcagtgtccatccacatgaagagagaacaaaag

SEQ ID NO: 7610 - DNA, 388 bp, Zea mays
  Clone ID: LIB3150-009-Q1-N1-D8
cgccgacaacagcgtagtgtagggtagtggcggacagggttggggagagtactactgatccgcaatgtcgacggatgaagctgttgtggctgaagtcccgaagaccgaagtgccatcgaaagtcccagcggcccaagtggccgacgcgcccaaggcgaagaaagcgcccaaggagaagaaagcgcctaacgagaagaaactttccgaggcgaaaaagccggcggcgcaccctccctacactgagatgattgtagaagcgatcgctgccctcaaggagaggaaggggtcgagctcagtggccatcagcaagtacgtctaggggaatcatggctgcaagctccccaccaacttcctcaagcagctcactgtgcagctgatgaagctcact

SEQ ID NO: 7611 - DNA, 386 bp, Zea mays
  Clone ID: LIB3150-009-Q1-N1-D9
tcgaccacgggtgcacgcgtaaccctcagactctacctaaacaagtttgcctcaccctcgccatggacgcccccaggggcaacggtgtcctcctctccgctgcgcatcgtgatctgcccgtggctcgcgttcggccacatgctcccgtgcctggagctcgcggagcgtctggcttcgcggggccaccgcgtgtccttcgtctccacgccacgcaacctggcgcgcctcccgccgcagcgccacgacgtgcacctcatgcccctgcccctcccacgcgtggagggcctccccgacggcgtctagtccaccaacaacctgccccccgacaagagagacctccactggaaggccttccacggcctcgccgtccccttcgctgagttcct

SEQ ID NO: 7612 - DNA, 263 bp, Zea mays
  Clone ID: LIB3150-009-Q1-N1-E1
gccgactcgagagccactccaaaacccaggcttccagaaccttattgaagctacccggcgactgctccactcgcaccgacggagaaggaaccaatgcgcgtgctcgtcactggcgccgcaagacatattggctatgccgtggttcccatgatcgctaagagtgtcatgctcggtgcagaccaccctgttattctgcacatgcttgacattgcgtcagcctctgaagccatcaatggtgttaagacggagttggtcgatgctgc

SEQ ID NO: 7613 - DNA, 354 bp, Zea mays
  Clone ID: LIB3150-009-Q1-N1-E10
acgatcactcgccagattgacgccaccgttccctaccaacaatgccgactcgagatgcggaggaagaggcatgctaataggaggagtctgaaagtcttcctaccgaacaaacattagcacatgggcgatctgatcctatagaatgtcttggtcaagatcgcctatcagcacctgcgtctcctgtgtagcagcaccatctccggcgccctgtccaggaccttcgaggcgccgctagagacgatctacactcactagattgtcggctacatcaacgtctactccattgacagggtgtgccattggatcattcagaacgacagatgatcctgtctgttccactgcaacgacttgtac

SEQ ID NO: 7614 - DNA, 402 bp, Zea mays
  Clone ID: LIB3150-009-Q1-N1-E12
gctcaaacaagtgctcctgtcccagaggggcaaccgtcagatgtcaaagttgacgagggaagcaatggtagcgggaaagatactttgtctctgcccgacaagactgctggctctggggtaaatacggactctagtgcctcaactgaagcaccacctcagcctgttgaaaccagtgacaaggcagaagacacaaaggacgaatctagtggagacaaagtggtagttggagaacccaatgaaggcagttgcatgccatctgaagttgagggcaaaacaaaagagggagatgctgaagaaaaggaaaggacagatgaagctggtaatatcgataaaattagcaaggatgacactgggaagaaagatggagatgacactgagaagaaagatggaggtgatgatact

SEQ ID NO: 7615 - DNA, 338 bp, Zea mays
  Clone ID: LIB3150-009-Q1-N1-E2
gcgattaaagtcgccaaatgtatcctgttagatgagagtgtcgtctttagtgatgaaacgaaagcacttctggaggaggcactagacaaagagggtagaaatgggcaaatgacaaagttatatgaagatgttgagatggagaaagcagaggcagctgcacgtgcagctgaagagaaggctagagcagaggcccttgctaaagaagaagaggagaggaagaaggccgaggcaaaggctaaagaagaagctgctgccagggctagccgagcggctattgatgcagtgctgggtcgcaagagggaagcagaaaaacatgataccagtgatggactgaacgt

SEQ ID NO: 7616 - DNA, 273 bp, Zea mays
  Clone ID: LIB3150-009-Q1-N1-E3
gtacactcccggcggcgtcgcatgatcagggttacgggcacccgaagatggtgaaattcctcaagcccaggtaagagccgtgatcctactgcaaggccggctcgccggcaagaaggccgtgatcagacacgtgttctaagatggcacccacgaccgcccctactgccactgtctttgtaacggactctccaattaccccaataaagtagtccgcaaggactctggcaagaatacagcgtataaatcacgcgtcaagtgcttcatcaaactcgt

SEQ ID NO: 7617 - DNA, 182 bp, Zea mays
  Clone ID: LIB3150-009-Q1-N1-E4
gccctttccagctaacctttcaatcctagggttaggtgaccttgggaccgggtggcgcccaatgctcatatcaagccggcggcgtacaatccggtgaagttggtgcccacggccccggcctagaaggccccctgtgcggagatgcccaagacggagaagcgggtcccggccggaaaatcccc

SEQ ID NO: 7618 - DNA, 400 bp, Zea mays
  Clone ID: LIB3150-009-Q1-N1-E5
ccgggagcgacggacgcgtaacgcttgtaacctttataaaccacccaagcgtacgcccactacaccaaacctaaccagtttcgaggccatcatattacggctacgtgcgctctttccctttgaagccaacccagcacatgcgttcattactcccgaaggctcacttgctcctaatcacaataagctacagtcgctggtaccagttccttgacagatcttcgaacacgcaaacttgcatgtctacagactacctctagcacttcttaccagcgcattacaacagacagttccacaggagcttcaacagtcttcggatcatgttaatctacaaaccgttgccagccaacaacgatcccaatatctgccatgaatgaaaaacctacccgatagataccctgta

SEQ ID NO: 7619 - DNA, 390 bp, Zea mays
  Clone ID: LIB3150-009-Q1-N1-F1
gtcgactctggcaagtcgaccaccactggccacctgatctacaagctcggcggtattgacaagcgtgtgattgagaggttcgagaaagaggccgcggagatgaacaagcggtcattcaagtatgcctgggtgcttgacaagctcaaagccgagcgtgagagaggtatcacaattgatattgctttgtggaagttcgagaccaccaagtactactgcactgtcattgatgcccctggacaccgtgacttcatcaagaatatgattactggcacttcccaagctgactgcgctgttcttatcattgactccactactggtggttttgaggctggtatctccaaggatggacagacccgcgagcatgctctccttgctttcacgcttggagtg

SEQ ID NO: 7620 - DNA, 298 bp, Zea mays
  unsure at all n locations
  Clone ID: LIB3150-009-Q1-N1-F2
gttgggcgcccgcgccacactggtgtgatggtggggatggggcagaaggatgcctacgtcagcgacgaggcgcagtccaagaggggtatcctgaccctcaagtaccccatcgagcacggaatcgtcagcaactgggacgacatggagaagatctggcatcacaccttctacaacgagctccgtgtggctcccgaggaacaccccgtcctcctcactgaggcgcccctgaacccaaaggctaaccgcgagaagatgacccagatcatgttcgagaccttcaacacccncgctatgtacg

SEQ ID NO: 7621 - DNA, 174 bp, Zea mays
  Clone ID: LIB3150-009-Q1-N1-F3
gccgatcgcccttgccaatctagattgaaggtggcgatgccgaagccatacgcctacttctgccatacggctcagcccaactagggtctactctcgctaacctacccgatctagcaccgattgtgcaggaacacctacctcatcaactagatgagcaattacaccttctacaac

SEQ ID NO: 7622 - DNA, 397 bp, Zea mays
  Clone ID: LIB3150-009-Q1-N1-F7
gcgacgcgacgcgtaacctcagatcctaatcagtcgatccatgcgtcttatccacaccattggtgctgccgaggatgggggcaatgcgctttctggaatccacgctctctcgtcctgcatgtctacacgggctccaaccgtatatgtaactacatctaagctgactggtaggccagagatgtccccgacctatgctgagaccaacgccgcgccctatgcctcctcctaaacggaggcacactggcatcacctcgtcacgtccatgaggacctacgttctaccgttctacaacgagacagcacatctaatacctctgctgctcctgctgacattgcaccgaacagatactccctgaagctccttgcctgatacgacaccgatttggcatacaactccc

SEQ ID NO: 7623 - DNA, 397 bp, Zea mays
  Clone ID: LIB3150-009-Q1-N1-F9
aagcaacataaaagtgaatccattagcaacaatacagcacaatggcgaccaagatattgggcctccttatgctgcgggctctttctgcatgtgttgctaacacaacaattttccctcaatgctcacaagctcctatagcttcccttcttcccccataccttccatcaatgatagcttcagtatgtgaaaacccagctcttcaaccctataggctccaacaagcaatcgcagcaagcaacatacctttatcacccttgtttcaacaatcgccagccctatctttggtgcagtcattggtacaaaccatcagggcacagcagctgcagcaactcgtgctacctgtgatcaaccaagtagctctggcaaacctttctccctactctcagcaacaacaatt

SEQ ID NO: 7624 - DNA, 340 bp, Zea mays
  Clone ID: LIB3150-009-Q1-N1-G1
caggatgcgacaaatgtcggggatgaagggagtttggcacctaacattctggaaaacacagaaggccttgaactattgaaggcagagcatagataaggctggctacactggaaaggtggtgataggaatggatgtcgctgcttctgagtcctccggcgagaaagacaagacttatgatcttaatttcaaggaggagaacaacgatggctcaaacaaaatttgaagcgacagcctgaatgacctgtacaagtcctttgcttctgagtaccctatcgagtcgatcgaagatacatttgatcaggatgactggtgcacttatgcctaactcactgatgagatt

SEQ ID NO: 7625 - DNA, 313 bp, Zea mays
  Clone ID: LIB3150-009-Q1-N1-G10
taccccctaaacccaatccgcgcgtgtctgaagaggatccagccgctacctacctccgaagatcgcccttcttacaaatggagaagccattctctattatgcttcacttccacaactatctctgcactatcacaaactagatcaaaccctatctggaacgaacatcaccccctagctaggccgacgccatactcctgaccatctcgatgctcctaaacagaaaaacgctacgcaatctctcaatcaacatcgtacgtacctgctccgctcgcacgaccacaaaggacacacgctggttgtcttctacatccaa

SEQ ID NO: 7626 - DNA, 350 bp, Zea mays
  unsure at all n locations
  Clone ID: LIB3150-009-Q1-N1-G12
tacgaggtcggaagcacgcgtgcgtagaactcgtatcctctaaaatacacccacnacattttaatccttctacaacaatcactcatcaattaccaccagcatatttacaaagcttatgctccttgctctttacacattccttcaaacgcaacaattttccctcaaagcacacaagctcctataacttgaccacatgccccataccttccatcaatgatacacaaaattatatcaaaaccaactggtgcaaacttattttctccacctcactaatgaaaacagcgacctaccctcttcacccttctttaaacaatcaacaaccctactatttttacagcaatatacaaacc

SEQ ID NO: 7627 - DNA, 365 bp, Zea mays
  unsure at all n locations
  Clone ID: LIB3150-009-Q1-N1-G2
gggctaccgagcaacgggagtgaaccacttttggggccgaagtctgcaagaaatttactcaagagcgataccttttgaggctatatattcaagatgaagaagtataacggcaggccgagttttcacagtgacggcctgcacactatctcgtgtgaggtgaagatcagttggtcaaaaaaaaaaacaaaaaaaagaggaaaagcataatataccaaaaaaaatagagataggtgtacacagaactgaaaaaaaacaaaaaaaaggcnaaatacaaaaataaaaataaaataaaaaggcaagaggcaacttttgtgctggtactcatgcctttgtgtatgtgtcttagtggttgtttcgatgtacag

SEQ ID NO: 7628 - DNA, 359 bp, Zea mays
  Clone ID: LIB3150-009-Q1-N1-G5
cgacgccacgcgtaacgctccaacccgtctacattcaacgccacgctgtccgctgcgatcaacataacattcattcggaccaccggagatctatgtaactaacttatatctgcctcttctattacttgcaattccattgcttacaaccacgatcatagcgtcagacactcgaacatctactatgcttatcatgccttgcacgttcatcccttctacattgaatgaaggatcaccaacctgacttctggatccgtatgaactacaagatccaatagagtggtaccacctactgttatcaaccttgtttgtacagtcactaggcctatgacaaatgcactctccttagctgacaatgatat

SEQ ID NO: 7629 - DNA, 419 bp, Zea mays
  Clone ID: LIB3150-009-Q1-N1-G8
cttgcaagtcagcattgtcggggacaagaagggacagctcaagatgctttcgcatgcatatgaccgttctcttggtgggagggacttcgatgaggccctcttcaagcacttcgcggcgaagttcaaagaagaatataagattgatgtttaccagaatgcccgagcatgccttaagttgcgtgtggcgtgtgtgaagcttaagaagatgctgagcgccaacccagaggccccactgaacattgagtgcttgatggatgagaaagatgtgagagggtttattaagagagaggagtttgaacacatcaatgcacctgtgctggtacgtgtcaaatgacccttggagaaggccttggctgaagctggcttgacaactgaaaatgtgcactttgttgaggttgtcggatctagttctcgtgttc

SEQ ID NO: 7630 - DNA, 357 bp, Zea mays
  Clone ID: LIB3150-009-Q1-N1-G9
acgcatactatctatactcaactgcaacatttatgctcattattgcacccacaataacatccgaatattgtgccttcttattctcctagctccttctacaagtactatttctccgaccattttcccacaatgcttacaagctcctataacttcccttcttcccccatacctctcaccatcattgtcttacgcatgttaaaacccaattcttcaaccctataggatccaacaggcaatctcagctggcatattacctatatcacccttgttcctccaacaatcatcaaccctattacagcagttacctttggtacatttattggcacaaaacaatatggcacaacaactactacaact

SEQ ID NO: 7631 - DNA, 352 bp, Zea mays
  Clone ID: LIB3150-009-Q1-N1-H1
cttatcatcatccgcccttgggttttctatccgatagaccggggacgcacaggcctctcgccctccgcgcggctccacaggagagcaaaaatggcgaccctctccatggtctccgtccccatcgcaccctcctccttgtccctttccacccggggccgcagctcctccgcatccttccccgctaagaaaggaggaatcggtcacggtggcttgcggatcgagtgcatccgtattggtggtgttgagattccaaaccacaagagggtggagtactcgctgcagtacatacatggcattggacgctcacgctcacgccaagatcctctggacctcaatttcgattacaagatca

SEQ ID NO: 7632 - DNA, 451 bp, Zea mays
  Clone ID: LIB3150-009-Q1-N1-H10
tgggacgccggaagcaaccacgcgtgcgctcgtacgctctaaaaaccaacataaaatgtgtaatacttttcaccaatatagtaacaacggcgaccagcagtattttcaatccttatgcgtgcctgctctttcttcatctattgctaactcgacaattatccctcaatgctcacaagcacctatagcttggcttcttcacccataccttccatcaatgatagcttcagtatgtgaaaacccagctcttctaccctatacgctccaacaagcaatcgcatcaggcaacatacctttatcacccttgtttcaacaatctccaaacctatctttcgtgcaatcattggtactaaccatcacagcacagcatctacagcttctcgtgctatctatgatcaaccaagtaactctttcaaacctttctgcctactctcatcaacaacaatttcttcca

SEQ ID NO: 7633 - DNA, 398 bp, Zea mays
  unsure at all n locations
  Clone ID: LIB3150-009-Q1-N1-H11
atgcacgcgtgcgcccactcgtaccctacacagtcgaccctagcttccgaccggaccccctcttttttttttttttttaggaagagactcgttttattgtgaagaaggacccacacgcgcttgcatgtcaacttattattcggttcaacacaaatatttctatctaaaatgcancacccacaaaggcttcctgtaagaacatgggtcgaatcctcatgggcattcggttcaacatgaatggtaactgctgctgcaccataatcttttatacggcgtcccaacgacattgtggcatcatcatttgcaacattatgctccgcaagaccattggtgacattattctccgcatcatcaatggtgacatcatgttaagcgttatcatctgtggcatcatcact

SEQ ID NO: 7634 - DNA, 308 bp, Zea mays
  Clone ID: LIB3150-009-Q1-N1-H2
agcaattgttggaaaggaccccactgagcaggttgagattgacaacttcatggtccaacagcttgatggaacctccaatgagtggggctggtgcaaacagaagcttggagcaaatgccatccttgcggtttcacttgctgtgtgcaaagctggagctatggtgaagaagattcctctttaccagcacatcgcaaatcttgctgggaacaaaactctggtgctccctgtacctgcctttaatgtgattaatggagggtcacatgctggaaacaagcttgccatgcaagaattcatgatccttccaactg

SEQ ID NO: 7635 - DNA, 232 bp, Zea mays
  Clone ID: LIB3150-009-Q1-N1-H3
catagtctcccccatgctgacccttcccgaacctgagagtaacaactccataggcgagcactttaatcaaaacttcattgaggagcgctcatagtctccgtctctcggagctaataccatcctttcggcttcagttgctacgtacacacttacgatctatcattatcaagactcctctttacaagcacatatcattattaagtcggatcaatactctggcgataactgtacc

SEQ ID NO: 7636 - DNA, 195 bp, Zea mays
  Clone ID: LIB3150-009-Q1-N1-H4
cagaatcggcggcggcggagcaaacgcaggcgaaggcgaaggtgtgagggaaggagcaccatccatggtgcacgtcaacttctaccgcaactatggtaagacgttcaagaaaccaaggcgtccttatgagaaagagcgtcttgatgctgaactgaagctggttggtgagtatgggctgaagtgcaagcgtgagct

SEQ ID NO: 7637 - DNA, 420 bp, Zea mays
  Clone ID: LIB3150-009-Q1-N1-H5
tcgggctcttttcacagactcctcaatctcttgcgttccgtccttccccgaactcgctcaaaaccctagccaaacgccacaaggtcgccgtcggtcgcccggccgaatccgctgccgccgctgccgacggggacgatggcgaagcctctgcgtggccactccgcgtatcgctccacctcgagatcttgcttccgctcgccgtcccactccgtctactccggctccgtctcgtcccgctcccgctccttctcgtcgtcgtcgtcccagtcccggagtcgctcccctcctactgctaagcgcagttcgcctggagcacggaaaggacgatcaccttcaccgtcccctaaaaagggttcaccttcaaaaaaagttcgctcgccatcaccaccccctaaaaaggcttcaccccctacgaaagcg

SEQ ID NO: 7638 - DNA, 236 bp, Zea mays
  Clone ID: LIB3150-009-Q1-N1-H8
tcgctcggtaataacaccctgatcagctcaaacggccgacaggactgccgactgcacctacctcgtaatccgtagaaaaaccgtagaaatctctagatcctgagccacatccgtgagctaggtcttgttccatgtctcgcaggatgcatggctactaccggactcctgagaccggcgatgctcagcggctgcgagagtgtcccatcctgctgttagtggtaccgcgatgccgtgca

SEQ ID NO: 7639 - DNA, 168 bp, Zea mays
  Clone ID: LIB3150-009-Q1-N1-H9
ggaggcggatgccgcagactgttagtacccggcgcggcgtcaccgtatcctcagatcagcggctagcagataccacaccactctactgacgcccgacgagcaacagaacattcttcttcatccatgggtaatgagacaactcacatcaacattgtggtcaatgggcat

SEQ ID NO: 7640 - DNA, 290 bp, Zea mays
  Clone ID: LIB3150-010-Q1-N1-A10
ctcgacatgaaggcgaagctgtaccgattcgacaaagacggtaaccaatggaaggaacggggcacgggcgctgtcaagcttctcaagcacaagcagaccggcaaggtccgcctagtcatgcgccaggctaaaacgcttaagatctgcgcgaaccacctcgtggcctccaccacgaagatgcaggagcatgcgggcagcgacaagtcgtgtgtttggcacgctgctgactttgccgatggcgaacttaaggaggagatgtttgccatcaggtttggttcggtagaaaactg

SEQ ID NO: 7641 - DNA, 197 bp, Zea mays
  Clone ID: LIB3150-010-Q1-N1-A11
cccccccacctcttttattctccttctatgatccaccacaattctatgcttctagacctgttactttcacattctcttcctcctatttttccttctcaactacccccaacatctcttgtcatgaatcactctcttcattactatattaacgcggttattcataattctttcttatttcaatactcaaaccacctttt

SEQ ID NO: 7642 - DNA, 430 bp, Zea mays
  Clone ID: LIB3150-010-Q1-N1-A2
cacacagacacactcacacacaacctacccagacggccagaccccgcgccgccccgccgccacccccacccccaccccaaatcagtcaaacgcgccgccgccgccatgggctcctccgtcagccaggccggggcccctcctccccatccccccacatacgcgtcgactccaccctttgcgcccgctgccgctgacgccgctgacgccgccgccgccccgccgccgaaacctcatgaggaggaggcgactgaggagaaggtggactacctcaacctcccgtgccccgtcccatatgaagagatccagcgcgaggccttcatggcgctgaagccggaccttttcgagggtatgcgcttcgatttgaccaagatgatcaccccgtacttcgctttgactcacaagcgtgccatgggatccattgagatcccgg

SEQ ID NO: 7643 - DNA, 418 bp, Zea mays
  Clone ID: LIB3150-010-Q1-N1-A3
gtttcaggtgaggaacatcgtggaacaggcggccatcagggacgtccaggaagcatgcgtctatgatggctacgtcctcccgaagctgtacgccaaggtgcaccactgcgtctcgtgcgcgatccacgctcacatcgtccgcgtccgatcccgtgagaagcgcagggaccgcaagccgccggagcgcttcaggcgcagggaggataggcctgctggtggacaaggaggcccccgccctggtcctggtgctgctgctacagctccatctccagcaccggttgctgctcgcccataggctttagcttttcgaccgtgttaagtcttctgcccactcagtttcggaagtgtcccctgtgcgtgtgtgaagctgctatattaaaggtactttttgtctaaagtctgaacattttcgaagaat

SEQ ID NO: 7644 - DNA, 146 bp, Zea mays
  Clone ID: LIB3150-010-Q1-N1-A4
gtggctttcaacaacgagaaaggaggcgtagttgagtatctcagggataaaaaattggtgacttggacttaaatcaaccaaatatttcattcaacactgggctagacaccaaggccatgggttcggcctggcttgctaatgctttg

SEQ ID NO: 7645 - DNA, 208 bp, Zea mays
  Clone ID: LIB3150-010-Q1-N1-A5
tggcttctcctccccctcttaccaagtcctcttcgggttacggttacttagggttttgtggaggggcgatggcggcggctgtgttgaataccggttgttcgtccgggggcttggcttggccaacaaccaccagtcgcttgagaattgctttggcttctacggggagatccttgacttcaaagtcatcaccgaccgggagacggggagg

SEQ ID NO: 7646 - DNA, 332 bp, Zea mays
  unsure at all n locations
  Clone ID: LIB3150-010-Q1-N1-A6
gaagctgcaaatcatgatgaccatagtcgacgatcttgtctctgtcgacactctcattgaggactatctgtgcgctgagccagttaacgagtacgtccagagctgcgacatcgttgccttcaacaagatctaggcgtgactttcgatcagtccttcccctggggtgctggcgatggtggtggctgggcaatgcaccagcctaatttttccatagctatatgtctgctttgtgtggccagtgatattgccgtgagtatttttggatcctattcgagtcgaatgtaccagtaccagagttaatttgctttaattcgaaacaccgntccggttgg

SEQ ID NO: 7647 - DNA, 423 bp, Zea mays
  Clone ID: LIB3150-010-Q1-N1-A7
gcgagagcgcatggagagcagagaggaggagaggaagggcagcggtggcgccgccgccggcggcggctcgacccctggggcgaatctaagggacctggtgtcgagggaatactacggccacaagaagaaggtgcactctgtagcatggaactgcctaggcacaaagcttgcttcaggatcgatcgatcataccgcacgtgtctggagcattgatccacatgtccattctaaggttaaagatattgaactgaaaggccacacagatagtgtagatcagctttgctgggatccaaatcatcctgatacagttgctactgcagctgctgacaaatctattcgtctttgggatgctcgaagtggaaaatgtcaagttgttgaacttagtggagaaaacatcaacatcacatataaacatgatggcac

SEQ ID NO: 7648 - DNA, 230 bp, Zea mays
  Clone ID: LIB3150-010-Q1-N1-A8
caacgcttcgctttctcgttgactcgttccaactccaagacgaccggccgccagcgccgccgcgttgatggccgccgaaccggaggagcgcctcgacgtcctaaacgccgttggggacaggatcggcgtctccaacgccaggtcggaggtgcacagggacggcaactatcaccgggcggtgcacgtgtggatctacagcgagagcaccggagagcttgttgtaaagcccc

SEQ ID NO: 7649 - DNA, 418 bp, Zea mays
  Clone ID: LIB3150-010-Q1-N1-A9
ctctccgccgccaagaccatcctcggcatgcgtctcagccagctctgctccagcccagaagcacaccgcgcgccatgcgaccaccgagagggcgaggcggtggtggccggttcggcggaggaggaggccggggccgcggcgggggccgattcggcggtggtggccgcggtggcggcgggggccgcttcggcggcgggttccgcgacgagggcccgcccgcggaggtcgtcgaggtttcgacgttcctgcacgcgtgcgagggggaggcggtgacgaagctcaccaacgagaaggtgccctacttcaacgcgcccatctatctgcagaacaaggaccagatcggcagggtgaagagatcttcgccccatcacgaatcctattctctgtgagatgatgaggggacatgcacatcgacatg

SEQ ID NO: 7650 - DNA, 407 bp, Zea mays
  Clone ID: LIB3150-010-Q1-N1-B1
tgatggttctcaacctggtaatgagggaagagagtatgttctgaggcgcatacttaggcgagctgttcactttggtcatcagaaattgaaggcaaagcaaagtttttttagctcgcttgtaaatgtttttgtccaactgatgggtgatgtatttcccgagtttaaagacacaccgaaaggagatccaatgtgttatattagatgaagaagaaagctttagagacactctatccaagggtatgtaaaatatataagaaagctgcacacgctgttaaggataatggtggaactatacttagtggacaggatgcatatattctttgggacacttatggttatccaattgatttgactgaggtcatggcaatcgactatgggctaactggtgataagaaggggtttaatgc

SEQ ID NO: 7651 - DNA, 406 bp, Zea mays
  Clone ID: LIB3150-010-Q1-N1-B10
gcagcctctcgagctctactccatcggctcgatctcgaagcgcagcagcagcagtcaggcggccatggacgccagcgcagcaggagccggcgggaaggcgaagaagggcgcggccgggcgcaaggccggcgggccgaggaagaagtcggtgacgaggtccgtcaaggccgggctgcagttccccgtcggccgcatcgggcggtatctgaagaagggccggtacgcgcagcgcgtcggcacgggcgcccccgtctacctggccgccgtcctcgagtacctggccgccgaggtgctggagctggccggcaacgctgccaaggacaacaagaagacccgcatcatcccgcgccacgtgctcctggccatacgcaacgacgaggagctcggcaagctgctgtccggcgtc

SEQ ID NO: 7652 - DNA, 421 bp, Zea mays
  Clone ID: LIB3150-010-Q1-N1-B11
gaacgacatctcgctgaacgactacgtggctgtgaacgcgacgaagcacgcgatgtacctgccgcacaccgcggggcgctactccaagaagcggttccgcaaggcgcagtgcccgatcgttgagcgccttacaaactccctcatgatgcacgggcgcaacaacggcaagaaggtcatggctgtccgcatcatcaagcataccctggagatcattcacctgctcaccgatgccaaccccatccaggtcgtcgtcgacgcgatcatcaacagtggaccccgtgaggatgccacccgtattggttccgctggtgttgtgaggaggcaggccgtggatatctcacccctgaggagggtgaaccaggccatctaccttcttaccactggtgccagggagagtgctttccgaacatcaaaaccattg

SEQ ID NO: 7653 - DNA, 219 bp, Zea mays
  unsure at all n locations
  Clone ID: LIB3150-010-Q1-N1-B4
accgccaccgtcacctacgcaacaccaggcgctccagcagaacagcactcggagctcgcctgcccgacggcccaccatgatcatccccaagaagaaccgcaatgagatctgcaagtacctcttcaaggagggcgtgctgtatgccaagaaggactacaacctggcgaagcacccacagattgatgtgcccaacctncaggtgatcaagctcatgcagag

SEQ ID NO: 7654 - DNA, 159 bp, Zea mays
  Clone ID: LIB3150-010-Q1-N1-B5
ggacggacaaggagcaggcggaagaggagttgtgccaaggcacaatgggtatctcgcgtgactcgatgcacaagcgccgagccaccggtggaaagcaaaaggcctggaggaagaagcgaaagtatgagcttggtcgcacagccagccaacaccaagttg

SEQ ID NO: 7655 - DNA, 257 bp, Zea mays
  unsure at all n locations
  Clone ID: LIB3150-010-Q1-N1-B6
cagtcgctcaaaaccctagagctctcgcctgctcgcctccgccgccggagcgagctccccatcttcatccgtcaaccatggcgacccagatcagcaagaagaagaagttcgtcagcgacggtgttttctacgccgagctcaacgagatgctgacgcgggagctggcggaggacggctactctggcgtggaggtgcgcgtcacgccgatgcgcacggagatcatnatncgngccacgcgcacgcagaacgtgctcggc

SEQ ID NO: 7656 - DNA, 309 bp, Zea mays
  Clone ID: LIB3150-010-Q1-N1-B7
cgtcccgcagcatctcaaaccccatggccaagatcaaaaatcggaatcaatggttccggcggatccggaaggtggtggccagggtggccctgcagagtgacgatgtcgagctcgtcgccgtgaacgaccccttcatcagcaccgactacatgacctacatgttcaagtacgacactgtgcacggacagtggaagcaccatgaagtcaaggtgaaggactccaaaacccttctctttggtgagaaggaggttgctgtgtttggctgcaggaacccttaggagatcccgtggggttccgttggtgcttaat

SEQ ID NO: 7657 - DNA, 167 bp, Zea mays
  Clone ID: LIB3150-010-Q1-N1-B8
agcagcacaagcagctgaagaggctgcgatttgactggttcaagtgtattaagcaatagtgttgcatgctaaatgggatcgactgagcgattatgagggagatgaagggatagcagaggtgatccccaacagtgatcgaggttctgacaagttaatcaggcattagc

SEQ ID NO: 7658 - DNA, 243 bp, Zea mays
  Clone ID: LIB3150-010-Q1-N1-B9
cgcacacgtgcaccgacagaccagtgcgggctagtctatcggcagaactaacaggtgttccaattgccttccgccaaggatgaagctccagggaaatgcgctgactccagtgtggtagtgcatcacggttcacgtcctccaagcggcgattcatgtcagagacgcctgctgcaatgcgcactgtatcgagccttgacatgaagatgcatgtcgtatacaaaacaacacgacgaccactagtgg

SEQ ID NO: 7659 - DNA, 228 bp, Zea mays
  Clone ID: LIB3150-010-Q1-N1-C1
tctaaaagcacgaccaccacgatacataacgtgactgctattaaaagagcagccgtcctgaggataacgcatgtggtggcaacataccatacttggatgtgtacaagaagcgtactctctgaaaagactgaagatatgctgattatcaacactggtgaattgaaacgaatacagtagcagacacgtctggatatctggtccaatcacaagagaagactgtatgtacaa

SEQ ID NO: 7660 - DNA, 363 bp, Zea mays
  Clone ID: LIB3150-010-Q1-N1-C11
agaccattagctttatctactccagagcgcagaagaacccgatcgacaccatgagggtgttgctcgttgccctcgctctcctggctctcgctgcgagcgccacctccacgcatacaagcggcggctgcggctgccagccaccgccgccggttcatctaccgccgccggtgcatctgccacctccggttcacctgccacctccggtgcatctcccaccgccggtccacctgccgccgccggtccacctgccaccgccggtccatgtgccgccgccggttcatctgccgccgccaccatgccactaccctactcaaccgccccggcctcagcctcatccccagccacacccatgcccgtgccaca

SEQ ID NO: 7661 - DNA, 399 bp, Zea mays
  Clone ID: LIB3150-010-Q1-N1-C12
gcaagcatcaacccagtggactggggggtgcataaaggcatgctgaggcctttcctgcctcgtaaattaccttttatcccagtgactgatgtggcaggagtcgtggctgatgttggtccaggaatcaatgggttccaagccggagatcaagttgttgctatgctcaactcatttaacggaggtgggcttgcggagtatgctgtggcatcagaaaatctgaccgtcaagaggcctcctgaggtatctgctgccgaaggcgcagggctgcccatcgccgccggcactgccctccaggcgctcaggaccatcggcgccaagttcgacggtactggcaaggccatgaacgttctggtcaccgcggcatcaggtggcgtcggcctctacgccgtgcagctcgcg

SEQ ID NO: 7662 - DNA, 184 bp, Zea mays
  Clone ID: LIB3150-010-Q1-N1-C2
ttcggattgccaccggtctcgccaccactcccggcgcctcgaaccatcaacctgtcgcaagaggtcgcgggcggtccgatcggtggtgccgtgcgcgatggcggcgccgcctaccgtgcggggctacgggccagcgtcgccgtcgtcgtcggtggcgctgcctcgggcgcgatcgcgggtacct

SEQ ID NO: 7663 - DNA, 357 bp, Zea mays
  unsure at all n locations
  Clone ID: LIB3150-010-Q1-N1-C4
gccgccctttttttttttttttttttttttgtttttttttttttttttttttttttttttttttttttttttttttttttttttttttttttttttttttttttttttttttttttttttttttttttttttttttnaannggggnnnnnnnaaaaaaaaaaggggaaaaaaaaaaaaaaaggggggggggnnacaaaaaaatattattnnaaataaaagaaaaaaaaaaaatttttttaaaaaaaaaaatttttttttataaaaaaaaaaagggggttttttaaaagaggtggggggctgggggaagaattttttttccaaggggggggggagttgggaaaaaacaaagggggggg

SEQ ID NO: 7664 - DNA, 229 bp, Zea mays
  Clone ID: LIB3150-010-Q1-N1-C5
gtgctcggccggcgacgaggatgcctggtgtgccgacggacggtggcggcgcaatggtaccttttacaggggagcctggccaaggggcgcccccgccggcacccgtgcggccaatccgccacggcgtgtggcgccccatattttccatatatacgtcttgtggcagagggaaacctttgtacgggtcgtgtgtctcccccccccaaattcacactggcggcggcacaca

SEQ ID NO: 7665 - DNA, 410 bp, Zea mays
  Clone ID: LIB3150-010-Q1-N1-C6
cggacgcgtgggcagccacacccatgcccgtgccaacagccgcatccaagcccgtgccagctgcagggaacctgcggcgttggcagcaccccgatcctgggccagtgcgtcgagtttctgaggcatcagtgcagcccgacggcgacgccctactgctcgcctcagtgccagtcgttgcggcagcagtgttgccagcagctcaggcaggtggagccgcagcaccggtaccaggcgatcttcggcttggtcctccagtccatcctgcagcagcagccgcaaagcggccaggtcgcggggctggtggcggcgcaaatagcgcaacaactgaccgcgatgtgcgggcttgaacaaccgacttcatgcccctacgctgctggcggcggtgtcccccactgaagaaactatgtgct

SEQ ID NO: 7666 - DNA, 326 bp, Zea mays
  Clone ID: LIB3150-010-Q1-N1-C7
gctctgtggagcgccgccccttctccgacgtggcgcctcagtatttgttagggttttctccgggattgaaggcactgctgcaggctgaaacgtttctcgcttgattggcggaagaagggattccagcgatctgtttgctgctagctgcgagagttcaatatgtctcggaccttcaaatcgacgacgggtctctctcggcggtttctgaatctgatcgcggccaaccactcccctggcgtcaagtcgctgcaccgcatcggcctgggtcgcatctttaactcaacgccagggccaataccaaacggagatcgattggagtccgcagc

SEQ ID NO: 7667 - DNA, 298 bp, Zea mays
  Clone ID: LIB3150-010-Q1-N1-D1
agcttgggtctcctatcctccccacccctgtgtcggtctcttccccaccgcgtcttcgtcgtctcgtcttcctgcctccttcgcccgagaaaggagagaatggggagcagcgagaagaccgttaccgcctacggcgagtacacctacgctgagctggagagggagccctactggccgagtgagaagctgaagatttcgattactgggggctgtggtttcattggatcccacattgctcgccgtctgaagacgaggggccatacatcattgcctctgactgggagaagacgagcacatg

SEQ ID NO: 7668 - DNA, 414 bp, Zea mays
  Clone ID: LIB3150-010-Q1-N1-D10
gcgcccccgctcgcttcacttctctagagatggcggtgccgctgctgacgaagaagatcgtgaagaagcgggtcaagcagttcaagaggccccacctcgaccgctacaagtgccttaagccaagctggcgcaggccaaagggtattgactcccgtgtcaggaggaagttcaagggatgcaccttgatgcccaacattggttatggttctgacaagtcgaccaggcactacctccccaacaagttcaagaagtttgtggtccacaacgtttctgagctggagttgctcatgatgcacaacaggacctactgcgctgaaattgctcacaacgtgtccactaagaagcgcaaggagatcgtggagcgtgctgcgcagctcgacattgtggtcacgaacaagcttgctaggctccgca

SEQ ID NO: 7669 - DNA, 424 bp, Zea mays
  Clone ID: LIB3150-010-Q1-N1-D11
gttacttctccctccgccgccactccgctcccattcaccgccaccgccaattccataccgtgctccgccacctctgctgagagcgagaagagatggcaggcaagggtgatgggccggcaatcggcatcgatctcggcacgacgtactcttgcgtcggcgtctggcagcacgaccgtgtcgagatcatcgccaacgaccagggtaaccgcaccacaccctcgtacgtcgccttcaccgactccgagcgcctcatcggagatgcggccaagaaccaggtcgccatgaaccccatcaacaccgtctttgatgccaagcgtctcattggcaggaagtttagtgactcctctgtccagagtgatattaagctgtggcccttcaaggtcattcctgggcccggtgagaagccaatgatagttgttcagca

SEQ ID NO: 7670 - DNA, 413 bp, Zea mays
  Clone ID: LIB3150-010-Q1-N1-D12
aaggaaatcaagttccttattggtgggatcgaatccagccagggtgccttccagtactttggcctgaaagaggaccagacaccccttatcctcatccaggatggtgactccaagaagttcttgaaggttcacgttgaggctgaccagatcgtctcttggttgaaggagtactttgacggcaaattgactccgttcaggaagtctgagcctattcctgaggtcaacaatgagcctgttaaggtggttgttgctgacaacgtccacgacttcgtcttcaaatctggcaaaaatgtccttattgaattctatgccccctggtgcggacactgcaagaagctggcgcccatcttggacgaggcagccaccactctccatagcgacgaggaagtcgtgattgctaagatggacgcgac

SEQ ID NO: 7671 - DNA, 276 bp, Zea mays
  Clone ID: LIB3150-010-Q1-N1-D2
agccgcacgaaaccctaacgccgccgccgcttcacaggtaagccgccgtcatggtctccggttccggcgtatgcgcgaagcgcatcgtggtggacgcgcgccaccacatgctgggccgcctgtcgtcgattatcgccaaggaactgctcaatgggcagaaggtggtcgtcgtccgctgcgaggagatctgtatgtcgggtggactcgtacgccagaagatgaagtacctccgctttctacgcaggcggatgaacaccaagccatcccatgggccca

SEQ ID NO: 7672 - DNA, 289 bp, Zea mays
  unsure at all n locations
  Clone ID: LIB3150-010-Q1-N1-D3
ctccaccacccgcgccccgccgcccgccccgccgccgcctcctacttcgcctcggccgcctcggatccggaccgagcgccggccatggcgctcgccttcgacgagttcgggcgccccttcatcatcctgcgggagcaggagaagaagacgcgcctgcgggggctcgacgcgcagaaggccaacatcggcgcgggcaaggccgtcgcgcggatcctncgcacctcgctcgccccaagggcgcggacaagatgctccagtcccccgacggcgacgtcatcatcacaaatga

SEQ ID NO: 7673 - DNA, 151 bp, Zea mays
  unsure at all n locations
  Clone ID: LIB3150-010-Q1-N1-D4
atccattccataccattctccctagtctcccggactctccctccctccctccctaatcttctcgtccgtcgtctcccatggaacggctcatntccacgcccgccgcctccccgacccaaacccgtatccggggacccctttccctcccctt

SEQ ID NO: 7674 - DNA, 202 bp, Zea mays
  Clone ID: LIB3150-010-Q1-N1-D6
gtccttgtcacgaacgatacacaatctacttctagtccgctcatgattactccaccagatcaaacagcagctatgatgcacggttcaggagtaagatcgacacctccccattcacaaccactgaaccctgcagtgtcacttccccctacagtcagtgcagtgggtgatgagtccaagagaacggcagcagctatggcagata

SEQ ID NO: 7675 - DNA, 278 bp, Zea mays
  Clone ID: LIB3150-010-Q1-N1-D8
cacagcgcccgttgttgtatcttgtcactgatcagtgttgtttgctttgctttgccgtgctaatggcgcccgctccatgtggccgttcgtcgcagagggtgttccacttcggcaagggcaagagcgagggcaacaagaacatgaaggagctgctgggcggcaagggcgcgaacctggcggagatggcgagcatcgggctgtcggtgccgccggggttcacggtgtcgacggaggcgtgccagcagtaccaagaggccgggcgcgcccttccgccgggg

SEQ ID NO: 7676 - DNA, 424 bp, Zea mays
  Clone ID: LIB3150-010-Q1-N1-E10
ccgtcatcgatctcgtttcaaatccgggcatcctcgtttcctccgtgccgcagcatctcaaccccatggccaagatcaagatcgggatcaatgggttcggcaggatcggaaggctggtggccagggtggccctgcagagtgacgatgtcgagctcgtcgccgtgaacgaccccttcatcagcaccgactacatgacctacatgttcaagtacgacactgtgcacggacagtggaagcaccatgaagtcaaggtgaaggactccaaaacccttctctttggtgagaaggaggttgctgtgtttggctgcaggaaccctgaggagatcccgtggggttcggttggtgctgaatatgtcgatgagtctactgatgttttcactgaccaggagaaggctgcagctcacttgaagggtggtgccaagaa

SEQ ID NO: 7677 - DNA, 423 bp, Zea mays
  Clone ID: LIB3150-010-Q1-N1-E12
cgccgccgcaagccgtccgccttgcgcttcactaaagcttggtcctcctccttgtatctccactccccccttcacagatccgttcctccagctagggttagcgttcctctgcagcgatggcgatcaagcggaccaaggcggagaagaagatcgcgtacgacaagaagctgtgcagcctgctcgatgagtacaccaaggtgctcatcgccctcgccgacaacgtcggttccaagcagctccaggacatccgccggggcctcaggggcgactcggtggtgctcatggggaagaacacgctcatcaggcgctgcatcaaggtgtacgccgagaagaccggtaaccacacctttgacccgctcatggacctcctggtcggcaacgtatgcctcatcttcaccaagggagacctcaaggaggtgcgcg

SEQ ID NO: 7678 - DNA, 143 bp, Zea mays
  Clone ID: LIB3150-010-Q1-N1-E2
gcgctgcagcactgggctgtgaccaaatacgacccatctctacaaagttacttgcaaactcatccaggagatgtgatgacttatcacgattaaaaagttcacgctcaccatgaactggctcttctagatcctgactaaccact

SEQ ID NO: 7679 - DNA, 236 bp, Zea mays
  Clone ID: LIB3150-010-Q1-N1-E3
cgagaaggtgcaggacctgctccttctggacgtcaccccgctgtccctgggcctggagactgccggcggcgtgatgaccgtgctgatccctcgcaacaccaccataccaacgaagaaggagcaggtgttctccacctactccgacaaccagccgggggtgctgatccaggtgtacgagggagagcgcgccaggaccaaggacaacaacctccttggcaagttcgagctgtccggca

SEQ ID NO: 7680 - DNA, 130 bp, Zea mays
  Clone ID: LIB3150-010-Q1-N1-E4
gcctactaccggaaaggtgctgcatgcattaatcttgaagaataccaaactgcaaaggctgctcttgagttaggttcttcctatgcaccaggcgattcaagggttacccgtctattgaaggatgtgatga

SEQ ID NO: 7681 - DNA, 301 bp, Zea mays
  Clone ID: LIB3150-010-Q1-N1-E5
caacaacaacatcaccaacaatcacaaggccgtgtgcaacaacacgaacagagccatgagcaacaccaaggacagagccatgagcaacaacatcaacaacaattccagggtcatgacaagcagcaacaaccacaacagcctcagcaatatcagcagggccaggaaaaatcacaacagcaacaatgtcattgccaggagcagcaacagactacaaggtgcagctataactactatagcagtagctcaaatctaaaaaattgtcatgaattcctaaggcagcagtgcagcccctttggtaaat

SEQ ID NO: 7682 - DNA, 371 bp, Zea mays
  unsure at all n locations
  Clone ID: LIB3150-010-Q1-N1-E6
cggtggagtcactcgagcccgcccgggtctcttcctcttccattgattccattcaagatcactactgttaccagccagccagtcgttcgttaagaagagagcgagcgagcaagagagagagagagagggagaagggggaagatcagaacgaagagagggagatgagggggcaaacgcagacagcttccgcggggggccggtggcgaggcgacggcgctgcggcgtggtgttggtggtgggtggccgtggtcctcctgcttggccatttaccgagctgcgcgcgcgcggngctgctggagtccaacccgggcctggcctacaacttctacaagaacagctgccccagcgtggactccatcgtccgcagcgtc

SEQ ID NO: 7683 - DNA, 390 bp, Zea mays
  unsure at all n locations
  Clone ID: LIB3150-010-Q1-N1-E7
cgcagctcaaaagccagcacaggcaaacccccgtcatggcctcctccaagatgctgcgcgccgccgtcgtcgtcgcggccgtcgccgtgtcctccttcgccggcgccgccctcgccgccgaggcccccgcgccgagcccggcctccggcgccgcggccctcccctcgtcgctcttggccgccgccctctgcccggccgtcgcgctcctcctcggcaacctgcgccactgatgacgcctgcctgtctcctagaccgacgagagccgccgtgtgctggcgcgtgatgttattggccctctgatgtgggggggggggttcctgacctgtgcgtgccttgtaccgccaccccgcgcctggattggaactttatcgatcggtccgaggttccana

SEQ ID NO: 7684 - DNA, 393 bp, Zea mays
  Clone ID: LIB3150-010-Q1-N1-E8
cggaaagcctttgtggtgaaaaaaaaaggggaaatgcaattatctgctgaccacctctcattctctatatgatctgatctgatcacagaagaaagaaagaaacactttgacctccctacattattatccgacacagcttggcttcagttaatccccagacctcctccccctcccttttgcaacctatgtgcttactcatttctcttttcgtgtacactacatacatgcagtcatgacttggctggccctgtcaccatggcggcggcggtctcctcgggggagctcgccttgagcagcgccgcaggagcttggatctgcgcgatctccagcaggatcttgttgaaggactgcggctttgaaaagaaagggcagtggtcgccgcccttgatcttg

SEQ ID NO: 7685 - DNA, 72 bp, Zea mays
  Clone ID: LIB3150-010-Q1-N1-F1
gctctatgaaggcctcgacatagtacatggagcggatctctcagaagagccaaggatcataggggcgaaccc

SEQ ID NO: 7686 - DNA, 357 bp, Zea mays
  Clone ID: LIB3150-010-Q1-N1-F2
ataagccctaatcccagcgccacctcgatggcgaccacctctttctttcatccgctcgccgccccgatggaccgcggtagcgtttgttttcgtcgctgcccgttcagcctaaccatccccgcccgtacagcgccccggcgaccggcgccgcttctcgtcgtccgcgctaagcgcgccggcagccagccccctgctgccgccgcctcgcgtcagcccgcgaatcccagcgcggtcccgaagcgggacgtggaagaagaagaagaggaagtcgaagaagagatgccctggatccaggacaaggcgctggacctcgtggagttcactggcaccgtcacacaagccatcccagggccccgt

SEQ ID NO: 7687 - DNA, 309 bp, Zea mays
  Clone ID: LIB3150-010-Q1-N1-F3
gaaacattgtgagggtgaaacattagcagtagctgattctaagcttggaaatgctataaaagaaaagctgaaaattgactgccttcacaatagtgctgtgatggagctgatgagaggactgagaaatcagcttaccgagcttataactgggttgggtgcacaagaccttggtccaatgagcttgggattgtcccacagcttgtctaggtataagctgaagttcagccctgagaaagttgatacaatgatcattcaagccattggattattggatgatcttgacaaggagcttaacacttatgccatgag

SEQ ID NO: 7688 - DNA, 418 bp, Zea mays
  Clone ID: LIB3150-010-Q1-N1-F4
gccgctgcttgcgcctctctcgcccgcatcgccgcagggttcgcaaagatggcagtgccgctgctgacgcagaagatcgtgaagaagcgggtcaagcagttcaagaggccacacctggaccgctacaagtgcctcaagccaagctggcgtaagcccaagggtatcgactcccgtgtcaggcggaagttcaagggatgcaccttgatgcccaacattggatacggctctgacaagaagacgaggcactaccttcccaacaagttcaagaagtttgtcgctcacaacgtctctgagctggagcttgtgttgatgcacaacatgacatactgtgccgagattgcccacaacgtgtccacctcggagcgcaaggagatcgtccaacgtgctgcgcaactggacatcgtggtcaccaacaagc

SEQ ID NO: 7689 - DNA, 423 bp, Zea mays
  Clone ID: LIB3150-010-Q1-N1-F5
gtcctcagttcctcacctagcggtagcgtgcgcgcgggagacgtagatggcggcttcggaggcggcagcggcggcggcaacaccggtgacgccgacagaggggacggtgatcgcgatccacagcctggaggagtggagcatccagatcgaggaggccaacagcgccaagaagctggtggtgattgacttcactgcaacatggtgtcctccgtgccgcgccatggctccaatttttgctgatatggccaagaagtccccaaatgttgttttcctgaaagttgatgtcgatgaaatgaagaccattgctgaacaattcaacgtagaagccatgccaacattcctgttcatgaaggagggcgacgtcaaagacagggtcgttggcgcagcaaaggaagagctagcaaggaagcttgaactacacat

SEQ ID NO: 7690 - DNA, 427 bp, Zea mays
  Clone ID: LIB3150-010-Q1-N1-F6
cgttgttgtatcttgtcactgatcagtgttgtttgctttgctttgccgtgctaatggcgcccgctccatgtggccgttcgtcgcagagggtgttccacttcggcaagggcaagagcgagggcaacaagaacatgaaggagctgctgggcggcaagggcgcgaacctggcggagatggcgagcatcgggctgtcggtgccgccggggttcacggtgtcgacggaggcgtgccagcagtaccaggaggccgggcgcgccctcccgccggggctctgggcggaggtcctcgacggcctgcggtgggtggaggagtacatgggcgccgccctcggcgacccgcggcgcccgctcctgctctccgtccgctccggcgccgcggtgtccatgcccgggatgatggacacggtgctcaacctggggctcaacga

SEQ ID NO: 7691 - DNA, 427 bp, Zea mays
  Clone ID: LIB3150-010-Q1-N1-F8
cgctcgcctgaatcgagaccaccaccgggcccgctctgcctcacctcgccgactagagtttttgccgccgcggatctcgccgtccccgccatggatacgtcgggctcctccgcagccgccggcgacgccccgaccaccggggagcaccggatggggaccaccattgtcggggtctgctacgagggtggcgtcgtcctcggcgctgattccagaaccagcactggaatgtatgtagccaaccgtgcttcagacaagattacccaattgacagacaatgtgtacgtttgtcgctctggatctgctgctgatacacaagtcatttcggactatatacgttatttcctccaccaacacacaatccagcttggacaaccagcttctgttaaagttgcagctaacttgattaggttgctagcttatcagaata

SEQ ID NO: 7692 - DNA, 313 bp, Zea mays
  unsure at all n locations
  Clone ID: LIB3150-010-Q1-N1-F9
ggctgacagagtcatcctatcatcatgtcatctccactggccccgagccccgatgcggctctaccggtcgtcgtgtcgtccctgcggcggctcggcggnacanncgacgaggccgnctnctgtacagccacatttattctacagccacattatgagaatatgtagatatatgttggatgcggaggtccaaaaaccgcagctttcagagttgccaataacaaatgggttcagaatgaacgaggaaactacatggctgtgcataaaaacattccacaagccaagaattgccgtgaggcgagtggccctagcccag

SEQ ID NO: 7693 - DNA, 234 bp, Zea mays
  Clone ID: LIB3150-010-Q1-N1-G1
tcggaaatgtgacccgggccacactccgctgctgcgacatggcgatccgctacaaggcctgaatctcgctgctgctcgcgctgaccgtcgctctctccgtccgggcggaggaggagcccgccgccgcggctgacggcgaggcacagctcaccctccacgtgcacagcttcgacaaggccgtcggcaagcaccgctacatggacgacgagtactacgccccctggagtgcgcact

SEQ ID NO: 7694 - DNA, 300 bp, Zea mays
  Clone ID: LIB3150-010-Q1-N1-G11
tcgcgctcgctcccctcgccctggcgagtagagcattttaaaccctagcgggtcacgccggccggacgttagatgctccaaggttcgagagggaagggtaggttagtggtgcgccatcgactatgggctgcgtcttccgccggtcggctgcgtcgtcctctgcagcgccgaagaagaagtggggcaaggggaggtcgtcccctcagccctaagcggggtcggcctccgcagtcgccgccaccgacagtgacgggaggccgctcgctgttgcttcgtggccgcaaggcgtacggacccacg

SEQ ID NO: 7695 - DNA, 374 bp, Zea mays
  Clone ID: LIB3150-010-Q1-N1-G2
cgctacgccatcatctgccaggagaacggtctggtgccaattgttgagcctgagatccttgttgatggccctcatgacattgatcgctgcgcttacgtcactgagacagtccttgctgcctgctacaaggctctcaacgagcaccatgtcctcctggagggtaccctcctgaagcccaacatggtgactcctggctccgactctaagaaggtgacacctgaggtgatcgcccagtacaccgtccgtaccctccagaggaccgtccctgctgctgtgcctgctgttgtcttcctctccggtggacagagcgaggaggaagccaccctgaatctcaatgccatgaacaagctcagcaccaagaagccatgggccct

SEQ ID NO: 7696 - DNA, 371 bp, Zea mays
  Clone ID: LIB3150-010-Q1-N1-G4
accgacgacgcacgcagagatccggcgtactgcaaattttgaaaactgaactgtaagatggcatcagcagagctttcccgtgaggaaaatgtgtacatggcgaagctcgccgagcaggcggagaggtacgaggagatggttgagttcatggagaaggtagccaagactgttgactcggaggagctcactgtggaggagcgaaacctcctgtctgttgcatacaagaacgtcattggagcccgccgcgcctcatggcgcatcatctcctccatcgagcaaaaggaagagggccgaggcaatgaggaccgagtaacactcatcaaggattatcgtggcaagattgagactgagctgaccaagatctgtgatgg

SEQ ID NO: 7697 - DNA, 236 bp, Zea mays
  Clone ID: LIB3150-010-Q1-N1-G5
ctccttccccatccgcgcccgccgcggctcctccggcagctccgccacgcgcccaaccgcaacctgcccgcacggccaccgctgcctggtagtatctatcaaatcagccacctgtcctctttttcttcaaatcaagtaccgttccctgtcctttctaccctctccctcgactccggcgggcgagggcctaacctacctctccccgtcgccctgatggctcccttcacagctctcgc

SEQ ID NO: 7698 - DNA, 426 bp, Zea mays
  Clone ID: LIB3150-010-Q1-N1-G6
ccaggctccacgcctccacgcactcgcacgcgcgctgacgaggcgaggcggctgcgggtgggtcccacgtgcagcctcacgagccgcgtcacgcccccggatggggtgcctgttcttcccagacgaggagagcgagggagcgagacgagatccattcccaacttcagctgcgcctcgactcgtagcccgaaccctagccaccaagccggaggcgagagagcagccatggcgcggtgcctcgcgctcgtcgccctcctcgtactcggcctcgccgccgccgcctccgcggccgacgcgcccttcgtcgtcgcgcacaagaagatttcgctctcccgccccaagccgggcgtcgagcgcgtcgccgtctccctcgacctctacaaccagggatccgcgactgcctatgatgtgtccattaatgacgac

SEQ ID NO: 7699 - DNA, 384 bp, Zea mays
  Clone ID: LIB3150-010-Q1-N1-G7
ctcctctcgagctctaggggacggaagggatccggcgggggtggggtgcgagcagggggagggagaagagcagccgcccgccccgcgagggggcaacagctgcccaagaacctgaccggaagagttgtgggagcggcggcggaaagatggggcaggccctgcgcaggctcttcgactccttcttctccaccagggagatgagggttgtgatgcttggtctggatgcagctggtaaaacaacaatactgtacaggcttcacatgggagaggttctttcaacagtccctacagtcgggtttaatgtcgagaaggtcaatataaaaatgtggcattcactgtgtgggatgtgggtggacaaaaaaaacttaagtcacttgggaagat

SEQ ID NO: 7700 - DNA, 419 bp, Zea mays
  Clone ID: LIB3150-010-Q1-N1-G8
cccgcacaacggcacgattcttctcctgcgtccgcgtagctctgggtttcggcgatctcgcggcacggcaagggcggcaaggggctgggcaagggcggcgccaagcgccaccgcaaggtgctgcgcgacaacatccatggcatcacgaagccagcgatccctacgctggccaggaggggcggcgtcaagcgcatttatgggctcatctacgaggagacccgcggcgtgctcaagatcttcctcgagaacgtaatccgcgacaccgacacctacaccgagcacgctcgtcgcaagaccgtcaacggcatggatgtcgtctacgcgctcaagcgccaaggacgcacgctctacagctacagcggctaggccgcctccccttctgatgctttgatgtgacggccgtggtcggttgtgtgtct

SEQ ID NO: 7701 - DNA, 375 bp, Zea mays
  Clone ID: LIB3150-010-Q1-N1-G9
cgctcgctcccctcgccctggcgaggagggcagcagaaaccctagcggctcaggccgggcgggggttagatgctccaaggttcgagagggaagggtaggttagtggtgcgccatcgactatgggctgcgtcttcggccgggcggctgcgtcgtcctctgcagcgccgaagaagaagtggggcaaggggaggtcgtccccgcagcccgaagcggggtcgccctccgcagtcgccgccaccgacggggacgggaggccgcggcggcggctcgggggccgcagggcgtcgggacccaggcagggttgcgtccccgcggctgccgcggcggagcagctcgccgccggttggccaccgtggctcgttgcagtcgctgggg

SEQ ID NO: 7702 - DNA, 85 bp, Zea mays
  Clone ID: LIB3150-010-Q1-N1-H1
gtactcgttttcccttccaaggcacccgttgcgagggcggaagcgccgattgccggggccggggccggtgcgggagccggggccg

SEQ ID NO: 7703 - DNA, 159 bp, Zea mays
  Clone ID: LIB3150-010-Q1-N1-H2
gagagacagagaagcagagaacccctcctggacctcggacttttctgttactgcttcggtcccaaaatcctaagggtttgctcgccggcgcgcgatggaagccaacttgtcagcgtcgatcgctccgcaaacgtgggaactggagaacaacatttccgc

SEQ ID NO: 7704 - DNA, 230 bp, Zea mays
  Clone ID: LIB3150-010-Q1-N1-H3
tcgggtctcgacgtctcgtctcgtctcgtctcgcctgcccgcagccccttggcttcgttccatccggcttctcggcggcggcggagaggagggggatggcgcaccggctgctgcgggacgcgcaggcggacgggtgggagcggtcggacttccccatcatctgcgagtcatgcctcggcgacaacccctacgtccggatgttaagagctgaatatgacaaagaatgcaaa

SEQ ID NO: 7705 - DNA, 217 bp, Zea mays
  Clone ID: LIB3150-010-Q1-N1-H4
gttggcttctcctccccctccggttcgggttcgggttcgtgaggttctccggggttcggtttcgtgggtgagcggatcgagatggcggcgtcggatgttgagtaccgctgcttcgtcggcggcctcgcctgggccacggacgaccactccctccacaacgccttcagcacctacggcgaggtcctcgagtccaagatcatcctcgatcgggagacgc

SEQ ID NO: 7706 - DNA, 422 bp, Zea mays
  Clone ID: LIB3150-010-Q1-N1-H5
gcagcccatccgaccccccgcctcctcctcctcctcctcccgggttcgcgtgaggctgtgtgctgctgggaggcggcgccggcgccggcgccatggaggcggagaagaagccgccggcggtgtccgacgtgggcgcgtgggcgatgaacgtcgtcagctccgtcagcctcatcatggccaacaagcagctcatgtcctcctccggctacgccttcgccttcgccaccacgctgaccgggttccacttcaccgtcacggcgctcgtcgggtggatctccaacgccaccggctactccgtctccaagcacgtcccgctctgggagctcgtctggttctcgctcgtcgccaacacctccatcaccgggatgaacctcagccttatgctcaactccgtcggattctaccagatctccaaactgagc

SEQ ID NO: 7707 - DNA, 367 bp, Zea mays
  Clone ID: LIB3150-010-Q1-N1-H6
cgaaggccctggcgcagaacagcagggtggtccagcaggagaacgccgcgctgatggccgagaacgcgtcgctccggcacgccatactgaccgggtcctgcctcgcatgcggcggcgcgacgacggcggcagcgcccgccgagctgccgccggagagcaggcgcctggtggcggagaacgcgcggctcaggggcgagtacgcgcgcgccaccgcgctgctcaaccagattctgctctcggtctcggcgccggcgcccccaggcccagcagcagcggcagtcgtcgtcttctccagctccgtcgcccgccccgtggccgaccgcgccgttcggttccgcggccacgcggaggccgccatggacctgtt

SEQ ID NO: 7708 - DNA, 90 bp, Zea mays
  Clone ID: LIB3150-010-Q1-N1-H7
tttctaacgccctctcacacaacacctatggcgtccatcttaacagcggcgggctcatctccaataacacctctctccttaattccatac

SEQ ID NO: 7709 - DNA, 398 bp, Zea mays
  unsure at all n locations
  Clone ID: LIB3150-011-Q1-N1-A10
gctcccggccgcctcttgcttctccaatccaccccgttcccgaaccctagcagctcggcatccgccgctcgagcccaatccttccgcgtaccacccctccgcctctcgctattccgacgcatggctgggcgctcgctgacggtgatcgcatgcgcctccggcggctccgaacgagatctcagcgcctncgcagtctccgtggaggccctggactccgtcgcctccgattctgacttatagacgaaggagcccaatgtgtcgacgatgctgacgagcttcgagaactcgttcgacaagtatggggctctgagcacaccgctgtaccagaccgccacctttaagcagccgtcagctacagattatggaacttatgattacactagaagtggtaaccctac

SEQ ID NO: 7710 - DNA, 385 bp, Zea mays
  unsure at all n locations
  Clone ID: LIB3150-011-Q1-N1-A11
cagagcagccgcatccacaacctgcctctctcgtcccctggcggcgtccgcggcaggatggcggaatctacggcgaggacggtgaatgatgtcaacccgcacgagttcgtcaaggcctactccgcccacctcaagcgctccggcaagatggagctccctgagtgggttgacattgtgaagactgcgaggttcaaggagcttcctccttatgatcctgactggtactacatcagggctgcatccattgcaaggaagatctacctaaggcaaggcatcggtgtgggtggctctcagaagatctacggtggccgccagaggaatggctnccgcccaccacacttntgcaagagcagtggtgctgttgcacgcaacatcctgcagcagc

SEQ ID NO: 7711 - DNA, 206 bp, Zea mays
  Clone ID: LIB3150-011-Q1-N1-A12
cggtcgactccagtgactgtgcccgctcccgctcccgctccctcgcctgcgcccttggacccgggggctacagccggcacggccaagaagtcggcgtccaacaggggcagtgattacggccacgaaaagccccgcggcggcgtcaccgatgattgtgatcgaaattccgtcgtcacctgatgcctccacaggtggggggcgctcga

SEQ ID NO: 7712 - DNA, 311 bp, Zea mays
  Clone ID: LIB3150-011-Q1-N1-A9
gttggatgaagcctaccgttccataacactctaactggagcgtagccctgatttgactgatcgcatcttggtgcactctcataatctggagccttctaatactgactggtgccggactgaatgaccagagaggcgaggagaacaattacttcggtcgctgctgctacgtagtgaatcacccggtattattcgcgggagcggtactaggcctccccatgctcgcgctaggcattgtatactatgtcccgctgtaatcatgcaaagggcctcctgcggcgcttgtaggaccccagaatcattgcatacatata

SEQ ID NO: 7713 - DNA, 305 bp, Zea mays
  Clone ID: LIB3150-011-Q1-N1-B10
gttggcttctcttgccccttcggttcggggtctggttcgggagggtatccgcggttcggtttctcgaatcagcggatcgagatggccgcgtatgatgttgactaccgctgcttcttcggcggcctcgcctgggccaccgacaaccactctcttcacaacgccttcagcacctacagcgaggtcctacagtgcaagatcatactcgatcgggagacacaaaggtcccgcggcttccgctacatcaccttcttcacagaggaagctatgccgaacgccatcgaaggcatgaatctgaaagagctgga

SEQ ID NO: 7714 - DNA, 358 bp, Zea mays
  Clone ID: LIB3150-011-Q1-N1-B12
gttttgctgctctcggaccccgatctccgaaggccgcagcatcatgcgaggccgcgctaccgtgtgaccgagatggcactgccgaatgaggggaccgttgattaccccggcttcaagctccatgtcctcggcgatggtggaactgggaaaactacatttgtgaagaggcatctcactggagagtttgagaagaaatatgaaccaaccattggtgtgggagttgatccgctggagttcacgactaactggggtgagatgacgtcctactgctcgaataccgcagggcaaaagaaggctaccggcctcagggcgggatactatatccatggacagactgcgatcatgatgtttgacatga

SEQ ID NO: 7715 - DNA, 144 bp, Zea mays
  Clone ID: LIB3150-011-Q1-N1-B9
ggggcttgcagctggagcatctatggtccgagttacttcctctttcctccaaggcaaggctcctacaacttgcgctcactgtttctgtacagatccttatctactactctcgtacttcgtcgtcgccaacttcttcacgtgatc

SEQ ID NO: 7716 - DNA, 144 bp, Zea mays
  Clone ID: LIB3150-011-Q1-N1-C10
ctccaccgattgaccaaccaaaaccctcaagcccattatgtacttctactcggactccacctccgcgatgcattacatggaactcacctttcctctaactaccggaggactgtcccggttgcggccggcgttttcatctcatcc

SEQ ID NO: 7717 - DNA, 404 bp, Zea mays
  Clone ID: LIB3150-011-Q1-N1-C12
tcgcgctcccagtctccacgcggaagcagcgcctcgcaccgctcctacccaatggcgccgacgtcgaagctgtcgatgggcatcaagcgcgcgtcgcggtcgcacgcgtaccaccgacgtgggctctgggccatcaaggccaagaacggcggcgtcttccccaatgtcgagaaacccgccgcctgcgtggaacccaagttctaccacgtcgactacgtcgagcctagcggtcccagtacccgcaagcctaattccaccaagctcaggtcgagcatcacgcctgggacggtgctgatcctcctcgcggggcgcttcatggggaagagagtggtgttcctcaagcagatcaactacagcctgctgctcgtctctggtccattcaagatcaatggagtaccgatccg

SEQ ID NO: 7718 - DNA, 403 bp, Zea mays
  Clone ID: LIB3150-011-Q1-N1-C9
gttcaccgaaggggtgaaaaagttggactatttgatgaagagctggtacatggtgttcatctaaccagtccttgtgttcagtcaccattggtgccaagtggtgtcaaagaaacacctatagtggatcataacaagagacctgcatccagtgacatactggacatagttgaatgcaaacggctgaagcaggaagatcaaatcgttactaaggaagacaaccatacatctgctgaggaggattttcatgactaccccacatacacgacttgcgaaagaagctttgactcaccactatatgagagtgaggaaagtgaagatgagggtgtagattcacctctccattgttcacatgctcgcccctatgttgaagatggtctatggcctagcagctttcatcaatctg

SEQ ID NO: 7719 - DNA, 218 bp, Zea mays
  Clone ID: LIB3150-011-Q1-N1-D10
gctccccgtcctggacgacctcgtggcggacaaggagcagcacgggtcgttcgacttcgccttcgtggacgccgacaaggacatctacctcaactaccacgagcgggtcctgaagctggtgaggcccggcggcctcatctgctaccacaacacgctgtggaacggctccgtcgtgctccccgactacgcgcccatgcgcaagtacattcgcttatacc

SEQ ID NO: 7720 - DNA, 306 bp, Zea mays
  Clone ID: LIB3150-011-Q1-N1-D11
ggagccgcccgaggggaccaagcagaacgtcgagctgaaggtcagccgcgtgcttgaggtcggcgaggtcgatgccgccgtctacccgctgcccaagggcaaggtcaaactcacgctcgagaagctcagggacgtcgttcatctccgttcgcgcaccaacacgattggagcggttgctaggattaggcaccagttagcctatgcatcacacaggttctttgatgagaatggatttctctatgtacatacaccaataataactactagtgactgtgaaggtgctggtgagatgtttcaagtgacaac

SEQ ID NO: 7721 - DNA, 286 bp, Zea mays
  Clone ID: LIB3150-011-Q1-N1-D12
ccagcctctccttcaggaccagcctaccaatacatgggctatatgcctggtggcccaagtccaaggactggattctcgccgatgcagcatccaatgcgacaacccttctttcagcatccaacgacacagatggatggttctttcccatcagtcccttcgcttccacctaatttcagactccagctgccccctcgtgcagtctcaagggaatctgatgatgcatctggctcccagtcagtccagccaatttcttcaactcctgctacagccacaaacaacgaggaag

SEQ ID NO: 7722 - DNA, 368 bp, Zea mays
  unsure at all n locations
  Clone ID: LIB3150-011-Q1-N1-D9
gcgccgccgccgccgccgccgtgacggaaggaagaggaggagcaaggagcacgacgcgatgggccactccaacgtgtggaactcgcaccctaagaactacggccctggctcccgcgtctgccgggtctgcgcgaaccctcacggtctgatcaggaagtacgggctcatgtgctgcaggcagtgcttccgcagcaacgccaaggacattggtttcatcaagtaccgttgaagaggccactgtgctgctgtggagaacttcctacattaaagaaatgggtccttcattagaaggcctaatttatgcgctttagctntttgttcagaacttgagactcatgtgttaaactcgactngttaaaagtttgatg

SEQ ID NO: 7723 - DNA, 282 bp, Zea mays
  Clone ID: LIB3150-011-Q1-N1-E11
ggacactcgtgttcagttccaccaagatcaaatgcactttcttgttgtgcatgaaacccagattgccatctatgaaactacaaaactagaaccagtgaagcagtggcctgttcgagagaattcacctccaatcacacatgctgcattctcgtgtgacagtcaactgatctatgcaagctttatggatgccactgttggcatatttaatgcatcgagtttgagacttcaatgtcggattcttccagcttcgtatctccccccatatatcagtccgagtgttca

SEQ ID NO: 7724 - DNA, 281 bp, Zea mays
  Clone ID: LIB3150-011-Q1-N1-E12
ccctccctcagccgcgtcgcgtcgcatcctacgatccaaagctctctctgctcgcaggtcgcagccatggcgaagaactacccgaccgtgagcgccgagtacagcgaggctgtggacaaggccaggcgcaagctccgagccctcatcgccgagaagagctgcgccccgctcatgctccgcctcgcgtggcactccgcggggacgttcgacgtgtcgtcgaggaccggcggtccattcggcacgatgaagcatcagtcggaattggctcacggcgctaacgc

SEQ ID NO: 7725 - DNA, 267 bp, Zea mays
  Clone ID: LIB3150-011-Q1-N1-E9
gaagctggttttccactagggtttgcattgctttgtgctgctggcttctttggttatatgcttgggatgctccaacgccggcttttaggaatgtcatcaacaacagatgatcctcaagcgcctccaagacccagcattgcaagtatccctccatcataccagaagcctttaaatccttatattcgtcatccattcatcccgagagaagaaactgcaaaacaggaaaccgaagaggggttcttcaccacagctggcaaactcatggga

SEQ ID NO: 7726 - DNA, 298 bp, Zea mays
  Clone ID: LIB3150-011-Q1-N1-F10
gtgagacatccacgtcgcagccatgggcgccagccggaagctgcagggcgagatcgaccgcgtccttaagaaggtccaggagggcgtcgacgtcttcgacagcatttggaacaaggtttccacacccagaattccaaccaaaaggggaaattcgaggcccaccctcagaaggggatcaagaagcttccgcgcttccgggaccggatcaagacgttggtcccatctatcgagagtaatgacaagaaggctctgatggatgcccgaaagcagattgtacgagagatggaacgatttaaag

SEQ ID NO: 7727 - DNA, 326 bp, Zea mays
  Clone ID: LIB3150-011-Q1-N1-F9
gctgcctccgcctctcgagtctcgtccacccgtcgtcctcctagctcctctactcgccagtcgccatgggcaagattaagatcggaatcaacggcttcggaaggatcggcaggctcgtggccagggtcgccctccagagcgaggatgtcgagctcgtcgccgtcaacgaccccttcatcaccacggactacatgacctacatgttcaagtacgacaccgtccacggccactggaagcacagcgacatcacactcaaggactccaagacccttctcttcggtgacaagccggtcaccgtctttggcatcaggaaccctgaagaaaat

SEQ ID NO: 7728 - DNA, 389 bp, Zea mays
  Clone ID: LIB3150-011-Q1-N1-G10
aaaaggcagcagcagcacagagcaagaccgcaaagaaagcaagcgggctgcgggcaagcctccttcaccattaccgcgcatgtgctctgcgccggtcatctgccttcggtgtaggacctcttgtctgttgcttggtcatggacaggcacacctgcaagctctgctcccgtcggttccacaatggccgcgcgctgggcggccacatgcgctcccacgtcatggccgcgtcgtcggctgcagcgtactactcgccgccgccgccgctctccctggcgtccacctcgtcgacagagatggacgacgacgacggtccggcgcggcagaagccacccacgccgtgcgttgcacgcgaagaaggcgccaagaaagcgttcggctttcccgaactc

SEQ ID NO: 7729 - DNA, 342 bp, Zea mays
  Clone ID: LIB3150-011-Q1-N1-G11
cggacgcgtgggcggacgcgtgggcagtatcctccccttggtaggtttgctgtccgcgacatgaggcagacagttgctgttggagtcatcaagagtgtggagaagaaggacccgaccggcgccaaggttaccaaggcagctgccaaaaagaaatgatgcaacctgtcgttaatcctgtatctgcttttgcaatacctgacttgtcactccatcccgaagttttgtatgcggttgttactgttattgtgtactgttaagctctgctgcggcgtgccctgttgtttgggtagcgtcaacgtcgagcgccacttgcgggtgtgcctttgtctgctatcagtagcg

SEQ ID NO: 7730 - DNA, 322 bp, Zea mays
  Clone ID: LIB3150-011-Q1-N1-G9
tcgcgccgtctgccttctgcgccttcatttcggcctgtgtcccttgcaagttcaatctcacctacaaccatgggtaaagagaagtcccacatcaacattgtaggtattggccacgtagactctggctagtcgaccaccacaggacacctgatctacaagcttggaagcattgacaagcgtgtgatcgaaaggtttgagaacgatgctgctgaaatgaacaagctgaccgtcaagttcgcatgggtgctcgacaagctcaaagctgaacgtatgataggtatcaccatcgatgtcactctgtggaagttttagaccaccaagt

SEQ ID NO: 7731 - DNA, 376 bp, Zea mays
  Clone ID: LIB3150-011-Q1-N1-H10
cgatagagtagcatcagcaagcggcgccgagtatcggctccccacctcgagcttgccaccatggctagaggattgaagaagcatttgaagaggctcaatgcccccaagcattggatgctggacaagcttggcggagcttttgctcccaagccatcttctggacctcacaagtctagggagtgcctgccactgatcctcatcatcaggaacaggctcaagtatgctcttacataccgtgaggtcatttccatcctgatgcaacgccatgtacttgttgatggcaaggtcaggacagacaagacctaccctgctgggttcatggatgtcattttcatccccaagaccaatgagaactacaggctgctgtacgatacca

SEQ ID NO: 7732 - DNA, 71 bp, Zea mays
  Clone ID: LIB3150-011-Q1-N1-H11
gaaacattctcccggagctatgctatgcgtgggtataatcgcatccgagtaggtctctcatattgagaatg

SEQ ID NO: 7733 - DNA, 262 bp, Zea mays
  Clone ID: LIB3150-011-Q1-N1-H9
aagaaaatccccatccccgaaaggaactttacctcgcctcccaacatgattgttattcgttcctttgatgttaacaagcctggttcagaggttgacgaaattagaggtggtgtagctggtggcagtatcctcaggggagttcttagggtgaaccagaagattgaagttcgccctggcattgttatgaaagatgagaatggaaacattaaatgcacgccaatctacttaaggattgtctcactctatgctgagcagaatgagc

SEQ ID NO: 7734 - DNA, 222 bp, Zea mays
  Clone ID: LIB3150-012-Q1-N1-A1
cggagcggatctgaggcgacgatggctggaggcggcgggatctcttggtctgcagtcctgcttcacctcgatggatgatgtctctgcgctgataattattggatcaatttcgataattattagtagatctatgagatatgccgcctggaagaagcgaggtaagctgcagcatgtaaaagtctgcgtgcgtcgacagccaaaaagagaaaaaaagatgtgaca

SEQ ID NO: 7735 - DNA, 307 bp, Zea mays
  Clone ID: LIB3150-012-Q1-N1-A10
gtgatgcgtctgtccagagtgatatcaagctgtggcccttcaaggtcatttctgggcctggtgagaagccaatgattgttgtccagcacaagggtgaggagaagcagtttgcagctgaagagatctcctctatggttcttatcaagatgcgtgagattgctgaagcttaccttggtagcacgatcaagaatgctgtggtcacagtccctgcctacttcaatgactcacagaggcaggccacaaaggatgctggggtgattgctggccttaatgtgctgcgtatcatcaacgagccaacagctgcagc

SEQ ID NO: 7736 - DNA, 221 bp, Zea mays
  Clone ID: LIB3150-012-Q1-N1-A11
gcccattattagcccaaccagacataaaagcacgggcgattaatgacccttcccgacttggggataaataaggtgtagcgctgcttgacacagaggatgagaggcgcagaacgtattgcgggacatgatgtatacgtctacgaaacagtcgtgagcgtggataacctgcctgaacgtgctgaccaacgagaacctggagggggtggacacctcactgataa

SEQ ID NO: 7737 - DNA, 425 bp, Zea mays
  unsure at all n locations
  Clone ID: LIB3150-012-Q1-N1-A12
gcgaggcaaaagcattgcgaccacagacagcgcgcgcttcaaggcctttttttttttgagataacaaggaggagaggaggagatggcggtcacgatcacgtgggtgaaggcgaggcagatcttcgacagccgcggcaaccccaccgtcgaggtggacgtgggccttagcgacggcagctacgcgaggggggccgtacccagcggcgcatccactggaatatatgatgccttggagttgagggatggaggatctgattatcttggcaagggtgttcttaaggctgtcagcaatgtaaataacattattggaccangcaattgttggaaaggcccccactgagcaggttgagattgacaacttcatggtccaacagcttgatggaacctncattgagtggggctggtgcaaacagaaagcttgaaca

SEQ ID NO: 7738 - DNA, 417 bp, Zea mays
  Clone ID: LIB3150-012-Q1-N1-A2
ggcaatttcgccctcgattcgaccccgattcgtccgcccgcgaccgggattccctccgccaagcgcggatctgaacgctgcgctccgtgtcgtcgctcgaatccgccatgaagggggccaaatccaagggcgccgccaaggccgatgccaagctggcggtgaagagcaagggggcggagaagcccgccaagggcaggaaggggaaggccggcaaggaccccaacaagcctaagagggctcccagcgctttcttcgtgttcatggaggaatttcgcaaggagttcaaggagaagaaccctaagaacaagtctgtcgctgcggtgggaaaagctgctggcgacaggtggaaatccctgagcgagtcggacaaagctccctatgtagccaaggctaacaagctcaagctagagtacaaca

SEQ ID NO: 7739 - DNA, 354 bp, Zea mays
  Clone ID: LIB3150-012-Q1-N1-A3
caatgttgccagtcaagttccaccaaacattccaacagctgtgcatgctgggcagactcaggtgacaattgacatgccaaggttgggtcaagacagtggtcctcaaagcatacacaacatggagatgcagccaatgtctccaaacgtgcaaagccaatccttgcaggggttaccccttgtgccggcttccagctcagctgatatggccggagttcctgttcctcacaacgctgtgaaaagcgaagaagttagccgagttactgcatccctggcacaatactttggaaatactgctttcggcgctggtacggttggattacaaccgtcgcagccgaatatgaacgcaagcctgat

SEQ ID NO: 7740 - DNA, 304 bp, Zea mays
  Clone ID: LIB3150-012-Q1-N1-A4
ggccaagatcaagatcgggatcaatgggttcggccggatcggaaggctggtggccagggtggccctgcagagtgacgatgtccagctcgtcgtcgtgaacgaccccttcattagcaccgactacatgacctacatgtttaagtacgacactgtgcacggacaggggaagcaccatgaagtcaaggtgaaggactccaaaacccttctctttggtgagaaggaggttgctgtgtttggctgcaagaaccctgaggagatcccttggggctcggatggagctgaatatgttgttgagtctactggt

SEQ ID NO: 7741 - DNA, 203 bp, Zea mays
  Clone ID: LIB3150-012-Q1-N1-A5
tcggttggcttctcctccccctacggctcaggttcgggttcgcgaggttctcccgggttcggtttcgcgggtgaacggatcgagatggcagcgtcggatgttgagtaccgctgcttcgactgcggcctcgcctggaccacggacgaccactccctccacaacgccttcagcacctacggcgaggtcctcgagtccaatatcat

SEQ ID NO: 7742 - DNA, 115 bp, Zea mays
  unsure at all n locations
  Clone ID: LIB3150-012-Q1-N1-A6
tcgcccacccgcccgctgccttcgccggatctcgtcggactcggatccgcccgaccaccccgngccgtcgacgcgcagcagcagcagcagatcagagaaaatggccggactcgac

SEQ ID NO: 7743 - DNA, 251 bp, Zea mays
  Clone ID: LIB3150-012-Q1-N1-A7
catcaatgttgacatgaagcacctgagcctgatcgcagactttatgaccttggatggcggataccggcctatgaacaggctggggattggccagttcaacacctcgccatttggcaagatgacgttcgagacagcaacaaagttcattgtggatgcagccacacatggggaggcagattttctggagtgcccctcagcgagtgtctgccttgggaaagccccgaaagttgggactgggatctttgggctac

SEQ ID NO: 7744 - DNA, 232 bp, Zea mays
  Clone ID: LIB3150-012-Q1-N1-A8
cccgcctccactcccccctcccaggtgctgcccaggtaagtcggcggcggcgatgacaacgcgcttcaagaagaaccgcaagaagcgcggccacgtgtccgccgggcacggccgcatcggcaagcacaggaagcacccgggaggtcgcggtaacgccggtggcatgcaccaccaccgtatccttttcgacaagtaccatccgggctacttcggcaaggttggcatgcgttac

SEQ ID NO: 7745 - DNA, 309 bp, Zea mays
  Clone ID: LIB3150-012-Q1-N1-A9
atcgagaaggacgtatacgacaacgtcgcgcacgcgttcgtgaagatcctacgcgacgagggcccgtcggagctgtaccgtgggctgacacccagcctgatcggcgtggtgccgtacgcgggctgtaacttctacgcctaccagacgcttaaacgggtcttccggctcgcgaacgggccgggttccggcgccgacgtgggccccgtggcgacccttgttattgggttcgtggcgggcgccattggcaggttggccacgtttccgcttgatgtgggcctcaagcaaattccagttggcgcttttggccgg

SEQ ID NO: 7746 - DNA, 331 bp, Zea mays
  Clone ID: LIB3150-012-Q1-N1-B1
ctcgatccatcgcctcgccgcagcacacacgaggccggcggcgccatggccatgaagctggacatgtgcgcgctcgagaccaacttcgccaacctgaccgccttcgccggcgacgacacgtacttatgcgccgaggcccccgacgtgccgtccatggtgctccccatctgccacgacttcgacggctttcaggcgggcaccaaagatatggtgaagaataagaaggggacgaccacgcttgccttcatcttcgacaagggcgtcattgtcggctctgattccacggccagcatgggcggttatatattctcacaaaccgtgaggaaaatta

SEQ ID NO: 7747 - DNA, 391 bp, Zea mays
  unsure at all n locations
  Clone ID: LIB3150-012-Q1-N1-B10
ggaacagctgtgggcctcccatctgatgatgacatgggcaacagtgaagttggtcacaatgcacttggtgctggtcgaattttcgcccaaggtgctaagcttgtcgatcaagctcttgcctccggaaagatttatgatggagatgggttcaactacatcaaagaatcttttgaaagtggtactcttcaccttattgggttgttgagtgatggtggtgtccactcccgtcttgatcaactgcagttacttctgaaaggtgtcagtgagagaggggcgaaaaaaatccgtgtgcacatccttactgatggacgtgatgtcttggatggaagcagtattggtttcgtggagaccctagagaatgatcttttgagcttanagcgaagggtgttga

SEQ ID NO: 7748 - DNA, 286 bp, Zea mays
  Clone ID: LIB3150-012-Q1-N1-B12
ctggacgcaaacactgggccgcgttgcttctccgtcccactgaaccatcgccgtcggctagccgcatgagaagttcccgccgcgccgacgccgaaaccgccgtcgcgtgttttgaagctctcgaaaaaagggcgcgcagcatgagagcggccgtgaactcgccacctccgcactgctactcgcgccgccgcgccagcgccacgctgctggatgcgcgccatgtgttcgaccacgtgccgccgcagcgcctaccgaacctggccgcgggactccgcgtgcggcccat

SEQ ID NO: 7749 - DNA, 371 bp, Zea mays
  Clone ID: LIB3150-012-Q1-N1-B3
ctagaactccaaaaccttcagccccacgctatggccctcgcactgcgcctccgtcgggtcctcgcggcggccttcaccgcggcacccctgctccgcccgtccacctcggtcgaccggccttgcccgctcgttcccctcgcctacccggtcgcgccgctcccgctgccgccgtggcgattcctgcccggcggcggcgccgggttcaggtccacggcggctgcggctgcgcggagcgggaccgactatgggacggacgacagcaagatctcccccgacgagatcctcttcgagggctgcgactacaaccactggctcatcaccatggacattccggaccccaaaccgtcgcgcgaagagatgatcgaaacata

SEQ ID NO: 7750 - DNA, 235 bp, Zea mays
  Clone ID: LIB3150-012-Q1-N1-B4
cgagagagcgattctggtggcaatggcgaagagcgagggtccggcgatcgggatcgacctctgcaccacctactcgtgcgtcggcgtgtggcagcaccaccgggtggagattatcgccaacgaccaggggaaccgcaccacgccgtgctatgtcggcttcaccgacaccgagcggctcatctgcgacgctgccaagaaccaggtcgccatgaaccccaccaacaccggcttcgat

SEQ ID NO: 7751 - DNA, 180 bp, Zea mays
  Clone ID: LIB3150-012-Q1-N1-B6
cgatccgaatctgtgcctcgggccatttggatccaatggcgccgacgtcgaagctgtcgacgggcatgaagcgcgcttcgcggtcgtacgcgtaccattgccgggggctgtgggccctcaaggccaagaacgggggcgccttccccaaggccgacaaggcacgcgccgccgtggaaccca

SEQ ID NO: 7752 - DNA, 352 bp, Zea mays
  Clone ID: LIB3150-012-Q1-N1-B7
caccctcctcgccgcctcactccctctgaggtcgcagatccgtccggttagacgaagccgcccgcacccatggcctccggtgagctcgcctgcacctacgccgacctcatcctcagcgacgacggcatcgccatcaccgacgcgaagatcgccaccatcgtgaaggcggtcaacatcaagctcgagtcctactggccggcgcttttcgctaagctcctgtagaagcgcagcgttgaggatctaatcctctccgttgatctgatggtggcgctgctacatgtgctgatatcgaccaagctgggggtgctgcacctgctgatgcccttgctgcacagaagaggaaggaggaccc

SEQ ID NO: 7753 - DNA, 364 bp, Zea mays
  Clone ID: LIB3150-012-Q1-N1-B9
aagaagtcattttttgtggcagcattctgttctattgctatccaacaagccatgccagtataatgttctattgctattcaacaagtagtcatgttagctgtagcagtcatcttagctgaagcatgaagcagacatttttttgttcattttactttattgggagacaatagatagctcgctgtttttttggtttgtttaattttaagaacatcctcttcaagactatgcaatattacaatgaccagttagtactctgcatgttaagctgatagatgtatcttgctttcttcaagtatcaccagtttttgaatcatatacaaattgaactaagcctgactgagcagtttggatacagatattggat

SEQ ID NO: 7754 - DNA, 371 bp, Zea mays
  Clone ID: LIB3150-012-Q1-N1-C1
ccgatccatccaagccaagccaaggcagagaagaagaagaagaggaggaagaagaagcatcggcagcatgtcggaggggactgccaactgcgtggacatcctgatcgccatcatcctgcctccggtgggggtgttcctcaagtacgggtgcggccacgagttctggatctgcctcctcctcaccttcctcggctacatccgcggcatcatctacgccatctacgccatcaccaagaacaactagctagtcatccttgccgacgacgatccatgtctctgtatctgcgtctgttcatatgcctgatgccgacttgtgctgtatgtagttgcttgaattcagtcgtgttttgctaccgtacccaccccatgca

SEQ ID NO: 7755 - DNA, 359 bp, Zea mays
  unsure at all n locations
  Clone ID: LIB3150-012-Q1-N1-C10
cttcgaaataatgacctcaaccaagatgatcctatctcggaggttgaaactgaggccaatgatggtgacgagagcaagttacctttgcagttggcaattgtgggacgtcctaatgttgggaagtccacccttttaaataccttgttgcaagaacagagagttcttgttggtccagaggcaggcctaacaagggactcgattcgggctcaatttcaatttgatagtcgaaccgtgtatttagtggatactgctggttggatggaaagatcagggaaggagaaagggccagcatctttgagtgttgtgcagtctangaagaacttaatgagagctcacatttgtgctcttgtgctggatgc

SEQ ID NO: 7756 - DNA, 153 bp, Zea mays
  Clone ID: LIB3150-012-Q1-N1-C11
gcggaagccaccaccaccgacctgtgaagcgctatgggagcacctgaggccaagccagatggtgcttgctcatgttggttaccatatctgctgcgctctgtcgcacatacctactctgcgacttgtagcctgacaggtggctaagacctgcat

SEQ ID NO: 7757 - DNA, 371 bp, Zea mays
  Clone ID: LIB3150-012-Q1-N1-C12
catctcgctctcgcggagatcgaagagaagctgaggcctagcgccgcacccgccgccgtatcagccatcagccatggcgctggccgctcgcctcgtcttacgctcccgtcagctacattcggttcaagcagctcttgcgaatggcggtgttactcaagtgcgctcctttgccaatgatgcagctccagctgaccgtgctcctgttagtggggatgatctcctgtagggcatattctttgaggtaaagaagaagtttgagacagctcttggcgtccttaaaaaggaaaagatcactattgatccagacgacccaacggccgattctcaatatgcccaagtcatgaatactgtgacggaaaaggcggatcttc

SEQ ID NO: 7758 - DNA, 271 bp, Zea mays
  Clone ID: LIB3150-012-Q1-N1-C2
tgaaagccaacttactggcgtaagcactgtgaaacctcctgtccggggtgaaataaatggcaaaagtaaagtgcctgttgctgctggtgctggaaacaccaacatatgtggtggtattattcaattcgattggaattctattcttgaaaggtgcttggatacaaatgatcaagttcgccagagtgcacttaagattgttgaagatgtacttctcagggtttagttcaccctattacctgtgtggctcaccatatagcacttgaaatggacc

SEQ ID NO: 7759 - DNA, 348 bp, Zea mays
  Clone ID: LIB3150-012-Q1-N1-C3
gccgcgccatggagcaagcagccatgccgcaggttccccgcgtcaagctcggcatccaggggcttgaggtgtcgaagctggggttcgggtgcatggggctcacgggcacctacaacgcgccgctcggcgacgaggccgtggccgccgtcgtcgcgcacgccttccgccgcgggatcaccttcttcgacacctccgatgcctacgggccccgcaccaacgagaccctcctggggaaggcgctcaagcagctgccgagggagcaggtgcaggtggccaccaagttcgggataggtcagggcgccgctggcatgaccgtgtgcggcacgcccgagtacgtacgcgcctgct

SEQ ID NO: 7760 - DNA, 380 bp, Zea mays
  unsure at all n locations
  Clone ID: LIB3150-012-Q1-N1-C4
atttctagggagctacagtgtactgctgattcaaggttggatgctcttcccaagaaccagttctctcctgccattaatctgccagaagctttatacaagcctggcagtcagattgaaggtgtctccaccagctatgaaggaaaccaagctccagaatctgtgaacggagtggaaacgaaagagagaaagaaaaaagacaagaaagataaaaagcggaaacgtgatgaaaaacgattaaagaaagatgacccacagtatctagagaaaaagcgacttaagaaggagaagataatggagaaagagttggcaagaaagcagctagaaagtgaaggaagagctacccctgagcagccgaaaacagtgaaaccttcangttcact

SEQ ID NO: 7761 - DNA, 368 bp, Zea mays
  Clone ID: LIB3150-012-Q1-N1-C5
ggttcctatgagagaactggttatagtgctcagggaacgggatctactttgattatgccagtcctggacaatcaactaaaatcaccaagtcctctattgctccctgccagggatgctgtcacaccattgtcggagtcagaggccatcgatctagttaaggatgtgtttgcatctgcaactgagagagacatctacactggagacaagttggaaattgtagtcatcaacaaagtcgggactaagcgcgagtacatcgacctgaggaaggactaagccaacgcttcagttgtgctgcagctgtcatttgcttcggacatgttcctagtctggggattatgtctaaggccgttgtttcataaaacatatgt

SEQ ID NO: 7762 - DNA, 344 bp, Zea mays
  Clone ID: LIB3150-012-Q1-N1-C6
ctcgccgtcgtcttctgcggttctgccgtctacgcctccaatttggcctctctcccttgcaagtttaagcttcaccttcaaccatgggtaaggagaagtcccacatcaacattgtggtcattggccacgtcgactctggcaagtcgaccaccaccggccacctgatctacaagcttggaggcattgacaagcgtgtaatagagaggtttgagaaggaggctgctgagatgaacaagcggtccttcaagtatgcttgggtgctcgacaagctcaaggctgagcgtgagaggggtatcaccattgatattgctctgtggaagtttgagaccaccaagtattactgc

SEQ ID NO: 7763 - DNA, 278 bp, Zea mays
  Clone ID: LIB3150-012-Q1-N1-C7
cacacgttcacggtagcgagagcttatcgtcgtcggcggcgaagatggtgtctctgaagctgcagaagcggctcgccgcgagcgtcctcaagtgtgggaaaggcaaagactggcttgaccccaatgaagtcagcgagatctccatggctaactcccgccagaacatccagaaattggttaaggatgggtttatcatcaggaagcctcacaaggttcactctaggtcccgtgcaagaagggcacatgaggccaagcagaagggaaggcactctggatac

SEQ ID NO: 7764 - DNA, 228 bp, Zea mays
  Clone ID: LIB3150-012-Q1-N1-C8
cggatgtcagtgagtagaagtttcaaccaaattacagtggatggtgatactagtaccaatgactgtgttattgctatggcaagtgggttgtctggtttatctggaattcaaagtcttgatagcattgaggctcaacagttccaagcatgcctagatgcagtaatgcaaagtcttgcaaaatccatagcatgggatggtgagggtgcaacatgcctaattgaggttact

SEQ ID NO: 7765 - DNA, 293 bp, Zea mays
  Clone ID: LIB3150-012-Q1-N1-C9
gtgaccaggagcgagcagccaaggaaacgagtcaagcaatggagaaggccgtcgacaggcagcgggtcctgctgcggcacctcaaccccgccgcggcggggagccccgccccgcccgccatctccgcaagcgcgtgcgcggcgggggacagcgcggcgtaccaccggaggccggccttcgccgacgacgtcgtgatcgtcgctgcttacaggacggcaatctgcaaggccaagagagggggtttcaaggatacctttgctgaggacctcttggttcctgtcttcaaggctttg

SEQ ID NO: 7766 - DNA, 414 bp, Zea mays
  Clone ID: LIB3150-012-Q1-N1-D1
gtgatcagctcggtcggatccgacggtcgctcgctgctgcagcgggcgcttgctgtgcgtcgcgtgggctcggccggagcccggagggaggcggagccttccccgggtctcgaagatggcggcgccgccggcgagggcccgggccgactacgactacctcatcaagctgctcctcatcggcgatagcggtgttgggaaaagttgtctccttttgcgggtctcagatggctctttcaccactagctttatcaccaccattgggattgacttcaaaataagaacagttgagcttgatggtaagcgcgtaaagttacagatatgggatactgctggtcaagagcggtttcgaactattacaaccgcctactacaagggtgcaatgggaattttgcttgtctaatgatgtaccgatga

SEQ ID NO: 7767 - DNA, 373 bp, Zea mays
  Clone ID: LIB3150-012-Q1-N1-D10
gccagaccccgacgaccttctcttctccggccgcgaccgcgcggcgctctggtcggactcgtcctccgacggggagaggcccgaggtcgaggtcgaggtcgaggttgaggccgccgatcaggtggagcgggccggggtcacggcggcggctgacgcgggcgagggggccgtggcgaagggaggagagccggcccagtggtggcggctgccgctggacgtgctgcgggtgtgggcgctgcgcgcggccaggagcgtctggtcggtgccgctcgccgtcgcgctgctcgggttcgccgtgctcgggcgccggctgtaccggatgcgccgccagagcaaggccgtcgcgcgcgttcgacttgtcctcgacgagaag

SEQ ID NO: 7768 - DNA, 276 bp, Zea mays
  Clone ID: LIB3150-012-Q1-N1-D11
gtcgccgagacttcagtttactggagcacgcaccgaaacgtctgccccttctgctcattctccgtccctccgtcggaagggctggcgctaagggacgatccctgcgtccgcccgtccgttcgacgggacctcggttggtttcgtcggtcgctgggaggacaagtgacggaacggtgatatgaggcagcggttatgttgtaactgccactatgacgacgaggaagatgacgcacgccaaggaacaggccaaagctcacagcaataagaccgactcca

SEQ ID NO: 7769 - DNA, 372 bp, Zea mays
  unsure at all n locations
  Clone ID: LIB3150-012-Q1-N1-D12
ccattcccaacttcagctgcgcctcgactcgtagcccgaaccctagccaccaagccggaggcgagagagcagccatggcgcggtgcctcgcgctcgtcgccctcctcgtactcggcctcgccgccgccgcctccgcggccgacgcgcccttcgtcgtcgcgcacaagaagatttcgctctcccgccccaagccgggccttnaagcgcgtcgncgtcttcctcgacctctacaaccagggatccgcgactgcctatgatgtgtccattaatgacgactcttggccaacagaagtgtttgagcttgtcactggagagaaatcgaagacattggaaaggcttgaccctggtgccactgcttcgcacacatatgtc

SEQ ID NO: 7770 - DNA, 134 bp, Zea mays
  Clone ID: LIB3150-012-Q1-N1-D2
cggggcttatgagatactgtcttcggtgggaaacagtggcaaactcgatgaaaatagacacgctgataaagagcacgcattacgtcttgcgcgagcactggcagaacatgatgatcttttgggcgaaaatgggg

SEQ ID NO: 7771 - DNA, 279 bp, Zea mays
  Clone ID: LIB3150-012-Q1-N1-D3
cggacgcgtgggcggactcgtgggcggacgcgtgggcgccgacgcctacctattcggcgggcccatcttcaacgactacagctgcgtcggctaatccctgctgctaaagcgggagaaggccggcatagagcagccggaccgtatggaggtcggagacggacagcagatcgggtgaatccatatgcccgagttcctgcgcgcgctcgccaagcgcctgatgcgcaacagcactgagtacgacaactatcgacggatcatagtactcgaccgcgagccgat

SEQ ID NO: 7772 - DNA, 117 bp, Zea mays
  unsure at all n locations
  Clone ID: LIB3150-012-Q1-N1-D4
atccgtctncactcctgggtcacttcgcctgtccctcggcctctctctctctctctctccttgcttctgggcctctcccctccaggctccaagggccctaccggcggaccggggccc

SEQ ID NO: 7773 - DNA, 272 bp, Zea mays
  Clone ID: LIB3150-012-Q1-N1-D5
acgatgaggccgagttgtggatcatgaatttggttagaagctcaaaactggatgccaggatcgattcagtatcaggaactctcatcatgacaaccaatcacgtcaatgtccatgagcagattgttgagagcttgaagggccttaatatgaggacctacatgctcgcaaagaacatcgttgagccagctcaacaggcaactcggtgaggatagcagacttcacagttttgagacgccaaggactagtttagagacaactgtaacttttcgagc

SEQ ID NO: 7774 - DNA, 319 bp, Zea mays
  Clone ID: LIB3150-012-Q1-N1-D6
gttggcttctcctccccctccggttcgggttcgggttcgtgaggttctccggggttcggtttcgtgggtgagcggatcgagatggcggcgtccgatgttgagtaccgctgcttcgtcggcggcctcgcctgggccacggacgaccactccctccacaacgccttcagcacctacggcgaggtcctcgagtccaagatcatcctcgatcgggagacgcagaggtcccgcggcttcggcttcgtcaccttctccacggaggaggcgatgcggaacgccatcgagggcatgaacagcaaggaactggacgggcgcaacatca

SEQ ID NO: 7775 - DNA, 352 bp, Zea mays
  Clone ID: LIB3150-012-Q1-N1-D8
ggccctgcctggcgcctgctttcaccgtttccgcccgtcgccttccacctctcgcactacagctcaagcacagcgcggcaccctacgtccccgcgactccccccttcttccactccactactcgccgcgctccccatgcccttcccgtgacgccgaaaccaaatgcttttcgctcttccatattactgtcgcggcggcggaagatgtccgcggcattgcgagatatggagaaagagaggaagcaagggttcttcgccgcgctcaaagaggaagtcgtacgggggcttgtcccggcaaggaccagaaggaagtccccggcgccgaggagcgcgtcatccgcgaagatgctgat

SEQ ID NO: 7776 - DNA, 250 bp, Zea mays
  unsure at all n locations
  Clone ID: LIB3150-012-Q1-N1-E1
cctaaccctagcagtcgcgctccctgcttgtctcccggccgccgccgactctatctctcccttccctctcaccacctcctcgtcatcctcagcgtgcacgctgcgcgtggccgtagtggggggtggccccgcggcgcgtccgctgccgaggcgctggcctcgccgagggcccggatgcaggtgctcttccctttcaacctcgccgatgacttgtcccgcgcgctggcgcccggggcacccatncccatgc

SEQ ID NO: 7777 - DNA, 168 bp, Zea mays
  Clone ID: LIB3150-012-Q1-N1-E10
cgccggtgctcctcttctcaatgaaacgagggttgctgcctcggttcggtctgagctcccatagactgacgcttccccccctgaagagaacatgcgccctttgttggaacgaaccatggaacgcacctctataatcgagcaacctccacagcggcagcggagcctgat

SEQ ID NO: 7778 - DNA, 354 bp, Zea mays
  unsure at all n locations
  Clone ID: LIB3150-012-Q1-N1-E11
ccgcagcccagcaccggccgctctacgcctccacgccggcacgtcctcgtttctgtccgaggtcatcgcctccgcaacttcgtggccggtgaggtcgcaccaccatggcgtcgctcctagcccggcaggcagcgcaggcgctccgcgcgaggcaaacggcgcagctcgggccggccgcgtctgcgatgcaagggcacctacgtacctacatgaacgcggggattcccaagcggttcaaagaggatgaggagaaagaacagcttgcaaaagatgtcgcanaagattggagtgctgtgtttgaaacgagcatcaatacattgtttttgacctaaattggtccgggcttggatgcta

SEQ ID NO: 7779 - DNA, 299 bp, Zea mays
  Clone ID: LIB3150-012-Q1-N1-E12
gcgcagtcgagcaccgggcgatctacgcctccacgccggcacgtcctcgtttctgtccgatgtcatcgccttcacaacttcgtggccggagaggccgcaccaccatggagtaactcctagcccgggatgcagcgcaagctctccgcgcgaggcaaactgcgcaactcgggccggccgtgtcagctatgcctgggcaccttcgtacctacatgaacgctgggattcccaagcggttcaaataggatgacgagaaagaacatctcgcacaagatgtcgcaaaagattggaatgctgtgttt

SEQ ID NO: 7780 - DNA, 67 bp, Zea mays
  Clone ID: LIB3150-012-Q1-N1-E2
gttctgtaaaaggtgacagcgccgacgctgtgccgctggatcagctgtaacgggccgtctggtccgt

SEQ ID NO: 7781 - DNA, 382 bp, Zea mays
  Clone ID: LIB3150-012-Q1-N1-E3
gctatccaagctgtcctttccctgtatgccagcggtcgcactacaggtattgtgctcgattctggtgatggtgtgacccacaccgtgccaatctacgagggatacgcgctccctcatgccattcttaggctggatcttgctggccgtgatctgactgactgcctaatgaagatcctcacggaaaggggttattccttcaccacgacggcagaacgggaaatcgtgagagacataaaggagaagctggcctttgtggccctagactacgagcaggagctggagaccgctaatagcagctcctccgtcgagaagagctacgagctgcccgatgggcaagtcatcacgatcggcgcggagaggttcagatgcccagaggtgcttt

SEQ ID NO: 7782 - DNA, 276 bp, Zea mays
  unsure at all n locations
  Clone ID: LIB3150-012-Q1-N1-E4
gctcatcaacaccgtctttgattccaagcgtgtcatcggaatgaaggtcagggacgcgtttgtccagattgatatcaagctgctgcccttaaaggacatgtatgagcctcgtgtgatgccaatgatagtgggcatcacactggtcaggatatgcagtctgcattaaagagatctcctctataggtcttataagatgcgtgagattgctgaagcttaccttgttagcacgatcaaggatgctgtggtcacagtccntgtctacttcaatgactcaca

SEQ ID NO: 7783 - DNA, 307 bp, Zea mays
  Clone ID: LIB3150-012-Q1-N1-E5
ctcccttaaaacctcctctcccctcgttctcctccgcctcctcctcccacctccccacacgggcacacctgccctccccgtcgccgcggacccactcccatggcaaagctcccgcgtctaccctgctcgtttgccgttctcgcgctcatgtgcatcatcccgctcacagcgccgcggcctgcactgtcctcgcgcgcggccccaagggacggtgtctccttcgccggcgcaggcaacacgatacatcaacttcttaaagatcacggccttcccggaggactgctcccgcgcggcgtggagtcgtaca

SEQ ID NO: 7784 - DNA, 384 bp, Zea mays
  Clone ID: LIB3150-012-Q1-N1-E7
gccatcctcgccgccgacgcagcctgctgagctccgctccactggtggcggtagggagtgcagcggatccatcccgtgtcccgatccgatccgttcgctgctagtatcgagccttgccatcgtgctcaccgaagaggacttcatcagcgaagaattgctttagcaacacttacaatataaggaaagagggttcacgttggatacaatccggtcctcccttgacgctaaatagggtaaagtttgatggcaagaggacatcctgttctgttgcaacagagccgccgcctgctaccactgatgaaccaagcatcgatgtgcccaacgagatattcttgaaagattacaacgcacctgattatactttgacacggtggattacatttc

SEQ ID NO: 7785 - DNA, 394 bp, Zea mays
  Clone ID: LIB3150-012-Q1-N1-E8
cggacgcgcagcactgcggcggttcggcgtccccggtgcgcggcctccatggcggctcgggcgcgcgaccccggcgaggcggcgcaggcggccatgcatacgcgtgatccccagcccagccccggtggcggagcggtccacagccacggcccccccgacgggtgcgcggatgcggccccgagcagcgacgcgtgcgcgggcggctccagccagccccggcgggcgcgcgtgcgcgacaccctgggcgtgacccctcgacggctcgtgggcgtagcccccggcggcgccggcgcagaggtccctggcgggcgtcttgcccgcgggtgcgcggccttggaggcgcgctggcaaacagccccgcccaggcacacaagcgcgaccccccgcatgggtg

SEQ ID NO: 7786 - DNA, 400 bp, Zea mays
  Clone ID: LIB3150-012-Q1-N1-E9
cgcctctcctcctctcctcccccacccgtgcatcgccccctccctccggtctgcgctcccacagcctcacccctgcgcccccgccgattcgcgtcgccctttgttggaaggaacgatggagcagaccttcatcatgatcaagcccgacggcgtccagcggggcctgatcggggacatcatcagtcgcttcgagaagaaagggttctacctcaaggggatgaagttcatgaacgtggagaggtccttcgcgcagcagcactacgctgacctttccgccaagcctttctttccccgggttggtggagtacatcattttccggccccgtggtgccaatggtggtgggaggggaaggacgtcctgttgactggccgcaggatcattggggccaccaggccttgg

SEQ ID NO: 7787 - DNA, 345 bp, Zea mays
  Clone ID: LIB3150-012-Q1-N1-F1
ggaaaaggctcaagcaatcatgcttatagctgcagctgcagcggcagcggcagctaccaaaagcagtgctgcccctactgttaagcctccaatggtgcctgcagccactgttgccccagcagctgtcgtttctcctgtgcttacacggtctccatcactgcagagcacttctgtagcaactgggcaacctcaggttgttgctgaacctagctcgatatgcaaacttcaggctgatctccccattgccaggaggcactctcttcagcgtttccttgagaaacgccgtgacagggtcgtgagcaaagctccatacagcaccgacaagtcgtccgatggcatggagtc

SEQ ID NO: 7788 - DNA, 399 bp, Zea mays
  Clone ID: LIB3150-012-Q1-N1-F10
gtccgctactccgctccccctcagtcctcagttcctcacctagcggtagcgtgcgcgcgggagacgtatatggcggcttcggaggcggcagcggcggcggcaacaccggtgacgccgacagaggggacggtgatcgcgatccacagcctgtaggagtggagcatccagatcgaggaggccaacagcgccaagaagctggtggtgattgacttcactgcaacatggtgtcctacgtgccgcgccatggctccaatttttgctgatatggccaagaagtacccaaatgttgttttactgacaggtgatgtcgatgaaatgaagaccattgctgagcaattcagcgtatagggcatgccaacattcctgttcatgagggaggacgacgtccaagacagggtc

SEQ ID NO: 7789 - DNA, 408 bp, Zea mays
  Clone ID: LIB3150-012-Q1-N1-F11
ctgcacgcccatgtgtcattttctttgatgagcttgattccctcgctcctgcacgaggatcctcagcagattctggcggtgtcatggacagggttgtttcccagttacttgtggagatcgatgggttgagtgacaacagccaggaccttttcattattggggctaccaataggcctgaccttcttgattctgcccttcttcgccctgctcggatcgacaagcttctttatgtcggtgtaaatactgatgcatcatacacggaaaggatccttaaagcacagacacgcatgtataagctgcacatgaacgtttctctcttgtcagttgcgcagcgttgtccaccatacttcactggtgctgatatttacacgctgtgtgcggatgcatggtttcatgcagcaaagcgat

SEQ ID NO: 7790 - DNA, 302 bp, Zea mays
  Clone ID: LIB3150-012-Q1-N1-F12
ctgcaccccccggccccgtccgttcacaggcagttgcgtctctcattcagggcccgtgctcagtcgccgatgttgcagtgagatcgagcgaggtaagcttacatctgagctgttgctatcgcgcgtcgcagggaaagctgactcgaccttgactttatcatgctttcctgttgttcctggctccgtgttcttgctctagcatgacactgagagacccgacacgttttatattccgggcttcagatctgctgcatcttacacggaaaggatctagatctcacagagtcctagtactaagctgt

SEQ ID NO: 7791 - DNA, 412 bp, Zea mays
  Clone ID: LIB3150-012-Q1-N1-F2
cggacgcgtgggttgcaatgcattttagcggtggaatttgtctacatcggttaaatttttagaaataaccattgaaattgcttgctgttgcaccaaggtgctgtgaactattttttttttgttttatgcatacatttttggtttacaaaagaaacatccccctctcatcatctgcatacattattagtcactattgtcaccagaaagtcgtgaaggttgtcttttttttatgactgcagcttatagttaactaaattgacattgctgggaaggatgtgattgagggagttggaggctctactgcagtaatttgcattgccttgtcatgcactagatattaatcagttctttaagtgacatgcagccccacccccaccaaatgatatgacagtgagacaagtcgctgacaaac

SEQ ID NO: 7792 - DNA, 268 bp, Zea mays
  Clone ID: LIB3150-012-Q1-N1-F3
cacaaacgctgacagttaccccataagaacgggagggtcttcagcggctctagggaatgtagaccaaccttcagctcgtgctaaaagtatgatgtgcatgcaacaaagacgaaaagcttacagtcaactaccttctggatcatagccatgagattgacgagcagcaccaatcgaccttcggtggatggaggaaaccattgcagatgctgaacaacaagtgtcgttcttatcctatgctgctgactatctatgatttccatatatattt

SEQ ID NO: 7793 - DNA, 304 bp, Zea mays
  Clone ID: LIB3150-012-Q1-N1-F4
acgggtgattcttcatcatggttctgatggggttctgattcgtgaggatactcatggatcctgtccgataacgagcgcatcgagatggcttcgctacctgttaaccactactcgttagcacatggactgagtttgcctaataagcatcactcactgcataaatcattgactacctaaactgaagcactagaatgcaagatcatcctgaattgcgagacgcagacggcccgcgtactaggtttccctatcttgtgtacggtaaaagctatgcgtaacgatattcatagcttgaacctgtatgaaa

SEQ ID NO: 7794 - DNA, 310 bp, Zea mays
  Clone ID: LIB3150-012-Q1-N1-F5
agcaatgcttctaatggacaagctaggtagaaaagtgcttctttcagggagttttcttgggatggcttttgcaatggggcttcaggctgttggagcaaaccgtcagtatcttggttctgcatgtgtatatctttcagttggtggcattctgttgtttgtcttgtcattttcactaggagcaggccctgtcccaggacttcttttgcctgagattttccctaataaaatccgagctaaggctatggctctctgcatgtctgtacattggatcgtgaacttctgtgttagtttgatgttcttgcgtcttctg

SEQ ID NO: 7795 - DNA, 274 bp, Zea mays
  Clone ID: LIB3150-012-Q1-N1-F7
gcgcttctgcgacgccaccaccacacgttcacggtggcgagagcttatcgtcttcggcggcgaagatggtgtcgcttaagcttcagaagccgctcgccccgagcgttcttaagtgtgggaaaggcaaagtctggcttgagccccatggaatcaggcagaacttcattggttacttccggccgaccatccggaattgggttaaggttgggttattattcaggaaccctcaaaaggttcattttaggtcccgtccaggaagggcacatgaggccaa

SEQ ID NO: 7796 - DNA, 305 bp, Zea mays
  Clone ID: LIB3150-012-Q1-N1-F8
gtcgtactaaaccgcacacagacaagcagacatacgagagttgatttgtacttgacatgacgaccgtgacaataaagctcactatgccactggaggtgaacgctgtcaagtataacatgcgcaatgaatatccagacaatgacgaatactctgctatctgtatgtctgactgatcagatgacatagctcaaggagttcattgtgtttccattattgaaacccgtactatggtttactgtaggaactaagcactatagggatatgatactatacagaactgcaggcactgtgaataccctatgcgc

SEQ ID NO: 7797 - DNA, 346 bp, Zea mays
  Clone ID: LIB3150-012-Q1-N1-F9
cgaaatcctgaacaacgctctgaagctggttgtgtctgagtgcaagccaaaagcaaagattgttgacctttgtgagaagggtgactctttcataagagagcaaactgggaatgtctacaagaatgcaaagaggaagattgaaaggggcattgctttcccaaccttgtgtttcggggaaaacaaaagtctggccctttctcccgcttaccacaaatgatgcaattcttgaagaaaatgacatggttaaaattgacatggggtgtcatattgatggctttattgctgtggtggcacatacacatgtaattgcaaatgggcctgtcacaggaagagcagctgatgttct

SEQ ID NO: 7798 - DNA, 357 bp, Zea mays
  Clone ID: LIB3150-012-Q1-N1-G1
ccaaggtttggagacagggatgagtaccgtggtggtcctcgtggtgcttccggtgactttggtggcgataagagtggagctcctgctgagttccagccatctttcaggagttctggcgcgaggtctggctttggccgtggtggtggcagcggctttggcgctggcccgacctcttcttccatggagtgaacagtgaagctgcccttagtttggacatgatgtttcccctcccgtgaggcgtttaattttgaaggacggttattatgtactagtaatgctttccggatcggctagtgctgacatgcaaaaaaaaatgttccatatttatacattggttccagtatagtagtcttttgc

SEQ ID NO: 7799 - DNA, 410 bp, Zea mays
  unsure at all n locations
  Clone ID: LIB3150-012-Q1-N1-G10
gtcgaagcgaggacgtggaggttctgctggtaacaagttccggatgtcactgggtctaccagtggcagccactgtgaactgtgctgataacactggagccaagaacctttacatcatttctgtgaagggaatcaaggggcgccttaacaggcttccttctgcctgtgttggtgacatggttatggcaactgtgaagaagggaaagcctgaccttaggaagaaggtgatgccagctgtcattgtgaggcagcgcaagccatggcgccgaaaggatggtgtctacatgtactttgaagacaatgctggagtgattgtgaacccaaagggagagatgaaaggctctgccatcactggacccatcggaaaggagtgtgctgatctgtggcctangattgccagcgcggcaaatg

SEQ ID NO: 7800 - DNA, 226 bp, Zea mays
  Clone ID: LIB3150-012-Q1-N1-G11
gcccaatacacaccatgctcaccaacgggcggccgcggcggaggagcggagcagagagcaaccatggcgtggaagcagatggaagagatacaacggaagctatacctgctggagtacccacgggcaaacgcccccgtgcaatccctactgttcgccggcgtatagcgctaccggctactcgagtggctcttcttacggctactaggcgacagatcagcactcacgc

SEQ ID NO: 7801 - DNA, 426 bp, Zea mays
  Clone ID: LIB3150-012-Q1-N1-G2
cggacgcgtgggtgcatattgtgtcaagggtggtccagaaaaagagctaaaagcaatgcagtacttggagagaagagagtgtgagtacgaccagaagatatccattgatttctacaaggaaggagatcccctgaaaccagctgtgatgggcgtcttagtgttcgtttccactccagatccaattggcaacaagtactatcttggccctgctcctttgcaggatatggcaaggcaaattgctacactacagccaatggccctactggctataatagggattacctgttctcaatggagaaggcattagccagcattagtccccaaactcgacgcgcaggtacgagaattagccaccagccgacgggatctcgatggcgagctccgcgtagcagaaggacaagagcagcaccgtcaggtccccaaacc

SEQ ID NO: 7802 - DNA, 376 bp, Zea mays
  unsure at all n locations
  Clone ID: LIB3150-012-Q1-N1-G3
cggacgcgtgggttctcctncgcctactggtgccacctacccacacgggcacacctgccctccccgtcgccgcggacccactcccatggcaaagctcccgcgtctaccctgctcgtttgccggtctcgcgctcatgtgcatcatcccgctcacagcgccgcgggctgcactgtcctcgcgcgcggccccaagggacggtgtctccttcgccggcgcaggcgacacgatacatcaacttcttaaagatcacggcctgtccggaggactgctcccgcgcggcgtggagtcgtacaccctgaacgagtcgaccggcctgctggaggcgctgctgtcggagccccgctacgccacgtacgacaaccgggaactggactac

SEQ ID NO: 7803 - DNA, 382 bp, Zea mays
  Clone ID: LIB3150-012-Q1-N1-G4
cggacgcgtgggtcccgctcccagctcgtgttccgcttcttgcagccgtcgccgcgaagcgctccagagaacttccgtcaacatggggaagacacgtggtatgggagccgggcgcaagctcaagacccaccgcaggaaccagcggtgggctgacaaggcatacaagaagagccatttgggcaatgagtggaagaaacccttcgctgggtcatcccatgccaagggcattgtcctggagaagattggtattgaggccaagcagcccaactccgctatccgtaagtgtgctcgcgttcagcttgttaagaatggcaagatgattgctgccttcgtgccaaatgacggttgtttgaactacattgaggaaaatgatgaggtcttg

SEQ ID NO: 7804 - DNA, 352 bp, Zea mays
  unsure at all n locations
  Clone ID: LIB3150-012-Q1-N1-G5
gcggagaaagcaacagcttgcaacatgctgtgctgctatgctgatgagcttaatgagggtttcttcccatggattgatcaggttggcccaactttggttccactgctgaagttttacttccatgaggaagtcangagagctgctgttgcggccatgccggaacttctacgctcagcataattggctgttgagaaagggcatgctcaaggccgtgatgagtcttatgtcaaacagttgtctgactacataattgcagcacttgttgaagcactgcacaaggagccagaaacagaaatgtgctcatccatgctggattctttaaacgagtgtatgcagctttcgggtcttttgc

SEQ ID NO: 7805 - DNA, 76 bp, Zea mays
  Clone ID: LIB3150-012-Q1-N1-G6
ccgatcgacaccatgagggtggtgctcggtgccctcgctctcctggctctcgctgggagcgccacctccacacata

SEQ ID NO: 7806 - DNA, 239 bp, Zea mays
  Clone ID: LIB3150-012-Q1-N1-G7
cggacgcgtggggtcggcatggcgctcgtattgcatagtggggctggaaacaagaatgccttcaaagcacttattgctgcagaatacagtgggatcaaggttgagttgaccaaggattttgagatgggtgtgtacaacaagacccctgagtttcttaaaaagaacccccttgggaaagttcctgttctggagactcctgatggccctgtttttgagagttatgctatcgcacgctatgt

SEQ ID NO: 7807 - DNA, 237 bp, Zea mays
  Clone ID: LIB3150-012-Q1-N1-G8
ccgacacctatcgtgtgtaaggtgcttgtattgtatactgctgcgggtaacaagatttcatccacatggcttattgcaagatcgggctctgtgggcaaggcagggtcggccagctattgtccgatgggggcctgcaaagtgactacggagttcctgaagacgaaaacgattcgcaaagtagctgtgattacatctcctgcatgtccaagttctacgatgtatgctgtcagacgctgt

SEQ ID NO: 7808 - DNA, 336 bp, Zea mays
  Clone ID: LIB3150-012-Q1-N1-G9
gtcgaagcgaggacgtggaggttctgctggtaacaagttccggatgtcactgggtctaccagtggcagccactgtgaactgtgctgataacactggagccaagaacctttacatcatttctgtgaagggaatcaaggggcgccttaacaggcttccttctgcctgtgttggtgacatggttatggcaactgtgaagaaaggaaagcctgaccttaggaagaaggtgatgccagctgtcattgtgaggcagcgcaagccatggcgccgaaaggatggggtctacatgtactttgaaaacaatgctggagtgattgtgaacccaaagggagagatgaa

SEQ ID NO: 7809 - DNA, 290 bp, Zea mays
  Clone ID: LIB3150-012-Q1-N1-H1
ccttgaggggcacgtcctagatcggtggcgcctgcctgtcgccgccgatacggggcctctcgcggtctcgctccccctcgcaggtcttttggtttttttagttcctgcctttgcttcttggaggtgtttgatggcggctcacccccagatcttgagacatgcaaagccagatagtgtgccacgggtgcaggacccttctgttctacccgagaggtgcttcgagcgtatgttgtgcggcatcccatggggtcaccaatggaccgcctccagcaatggagatggctcgactt

SEQ ID NO: 7810 - DNA, 418 bp, Zea mays
  Clone ID: LIB3150-012-Q1-N1-H11
cctggatctacagtgtgccctgacccatcaaaatacatctcatgggatggcctacacttcactgaggcgagttacaaagttgtcattcaaggagtactaggggggtatgccaagcctcccctttcagaaacctgcaagggtgcggaattcaaagtttctcagcttcaccaatgtacagataatccaacaaacactgtatcatacgatgctttgagctcttttatttgatctgctcgtaaaagaagtgcatttagagttacagtgggcagcatagatgatgttgcaggaccgaacatcttggacactttctcaaagccgagaagagatccatcgatgtagggtcattcagttctacattccacttcgctgctgggaggatgagaaaaatgggaggggagtttgtagtgctgaaatttgc

SEQ ID NO: 7811 - DNA, 296 bp, Zea mays
  Clone ID: LIB3150-012-Q1-N1-H12
gcatgcgcgcgctcgtaactgagagttctgcaagcatccacgcgttactcgagggctgaccggatatagctcattggctattacaaagattaggaccgaaatcccctccgtcattgacgctcgccgatggctacaaggccaggcgactgtgtttccccccaactatcgatctggatacaccaccactcgacgcataaaaagtctattgcctcgccatggccatgagttagtatgagagagagtacacgagcgttgccgtccggagagtgctcaacggagacgagtactggacgttc

SEQ ID NO: 7812 - DNA, 357 bp, Zea mays
  Clone ID: LIB3150-012-Q1-N1-H3
cccaaaccaatccgtcgcagacactcaaggtcgcaggatgccgccgccgcgtgagcaccaccagccccaggacgaagaggacgacgataccgcaggcgttgtcaagctcatcagcgccgagggcttcgaattcgttgttgacaggaaggccgccatggtctccaacaccctccgcaacatgctcacatccccaggcggcttctctgagacgcgccagggcgaggtccgcttcccagagatccccaccaacatcctcgagaagatctgccagtatttctattggtcgctccattactccagtgggaaggagacagcggagtttccaatcgaaaccgagataaccctggagcttatgat

SEQ ID NO: 7813 - DNA, 296 bp, Zea mays
  Clone ID: LIB3150-012-Q1-N1-H4
caccgctgcagtttctagagccctctctgccactcgtgatcccactagtcacaatgcctgccctcgccaagcccgcctcccgcaccgtcaagcccgccgcggctccgaagccgaagcctgccgccgccaagccgaaggcggccaccgctggtgcctcccacccgccttacttcgagatgatcaaggaggctatcacggcgctcaaggagaggaccggctccagctcgcaagcgatcgccaagtatgtgggggacaagcacggcgcgtctctgccggccaacttcaagaagatgctt

SEQ ID NO: 7814 - DNA, 281 bp, Zea mays
  Clone ID: LIB3150-012-Q1-N1-H5
agaagtcaagatggtgaagttgacagctgaagagctccgtgccatcatggacaaaaagaacaacattcgtaacatgtctgtcattgctcatgtggaccatggcaagtctacgcttacagattcccttgtggcagctgctgggattattgcccaggaagttgctggtgatgttcgcatgactgatactcgggcagatgaagcagagcgtggcattacaatcaaatctactggtatatctctttactatgagatgactgacgagtcactgaagaactacaagg

SEQ ID NO: 7815 - DNA, 135 bp, Zea mays
  Clone ID: LIB3150-012-Q1-N1-H6
aaagcattagaaccctatcctcgctgcgtgcgcccacgctgcgcacggagggaataagcgacgtgggcgtatacacctttgagtgcctcaacaacggcgggaagtggaccgcggagcaacacttcggcaagatct

SEQ ID NO: 7816 - DNA, 372 bp, Zea mays
  Clone ID: LIB3150-012-Q1-N1-H7
ccttcccaaaaaaaatcccccattttcttcgaggcgaggagagcgtgaaagacagggcaccggcagcgacgatgtcggggcgcggcaagggcggcaaaggtctgggcaagggcggagcaaagcgccaccgtaaggtgctccgtgacaacatccagggcatcacctagcccgcgatccgtaggctggctcggaggggcggcgtgaagcgcatttcggggcttatctacgaggagacccgcggcgtcctcaagatctttctcgagaacgtcatccgcgacgccgtcacctacaccgagcacgcacgccgaaagactgttaccgccatggacgtcgtctacgcgctcaagcgccagggccgaaccctttacggtt

SEQ ID NO: 7817 - DNA, 54 bp, Zea mays
  Clone ID: LIB3150-012-Q1-N1-H8
gtcggatctgagacgagacgagttaccatcttatcccaactccggaaggaacaa

SEQ ID NO: 7818 - DNA, 279 bp, Zea mays
  Clone ID: LIB3150-012-Q1-N1-H9
gaggggaggtgcgccaccggaagcggaaacctcgggtgtcgccgaccaacctcgtcgatccggttgcgacgcggtgtgctagaataactaccgaccatggcggaggaggagatcaccgagggcttgaagaacctcaccgtcaccggagacacggcggcttcgggcggagaatggcaaaggaggggcggcggcatcagcagctaccgcatacaggtgtccaacaccaagaagcccctcttcttctacgtaaacctcgccaagaggtatatgcatcagcac

SEQ ID NO: 7819 - DNA, 242 bp, Zea mays
  Clone ID: LIB3150-013-Q1-N1-A1
gagaccgtggacggcacgaccgatgacgttctgaacctgttgtgactgaagccccagaacatgatgtcgcatctatttaagatgatgctgtttgggatcgccaagcccttccatgacatgcggagccccagttgcacagggcggatactgttccctcaactatactcagaatgcaccgtggcaggtgctgaacaacgtatccgatgttcgcaatttacaggtggagcttccatcagcagatg

SEQ ID NO: 7820 - DNA, 393 bp, Zea mays
  Clone ID: LIB3150-013-Q1-N1-A10
ctcgcgtctctttcctattcgcgccgccgccgctgccgctgctgcaagcgccagctcgccgtcgtccgaatagtacactctaacgccgccatggggcgtatgcacagccgcgggaagggtatctcgtcgtcggcgctgccgtacaagaggacgcctcctacctggctcaagaccgccgcctccgacgtggaggagatgatcacaaaggccagcgaagaagggacagatgccgtcgcagatcggcgtcctgctccgtgaccagcacggtatcccccttgtcaagagtgtcaccggcagcaaaatcctccgcatcctcaaggcccatgggctggcacccgaaatcccggaggacctgtacttcctcatcaagaaggcggtggcgataaggaagca

SEQ ID NO: 7821 - DNA, 339 bp, Zea mays
  Clone ID: LIB3150-013-Q1-N1-A11
ggcgtccagaggggcctcattggtgagatcatcagccgttttgagaagaagggcttctacctcaaggccttgaagcttgtgaacgtggagaggtcgtttgctgagaagcactacgccgatctcgcctccaagcccttcttccagggcctcgtggactacatcatctctggccctgtggtggccatggtctgggagggcaagagcgtcgtcacaactggccgcaagatcattggcgccaccaaccccctggcttctgagcccggcaccatccgtggcgactttgctgtcgacattggcaggaatgtcattcatggaagtgacagcattgagagtgctaat

SEQ ID NO: 7822 - DNA, 424 bp, Zea mays
  Clone ID: LIB3150-013-Q1-N1-A2
tctccatctccctgctcctccgcctccttcttgatccagccaagccagggatcgccatgtcggactcggaggagcaccacttcgaatcgaaggccgacgccggagcgtccaagacctacccgcagcaggctggcaccgtccgtaagaacggcttcatcgtcatcaagaaccgcccctgcaaggttgtggaggtttctacctcaaagactggtaagcatggccatgccaaatgccactttgttgccatagacatattcaacgggaaaaagctcgaagatattgttccttcgtcacacaactgtgatattccgcatgtgaaccgtactgagtaccagctgattgatatatcagaggatggatttgtgagccttcttacttcagatggcaacactaaggatgatcttagactcccaactgatgagac

SEQ ID NO: 7823 - DNA, 443 bp, Zea mays
  Clone ID: LIB3150-013-Q1-N1-A3
ccgtccttctcgctgcccgtaaaccctagcccagccctctacccccgccgtcgttgcccgtgcgctgtcgtgctcgggctgcccccgcggcgccgcgagccaaaccctagccgcctcctccagatcccgattccgcagggaagccggagaggtgagggccgccccgccgcagatggagcccgcgggggcgcgcaaggagtggcgcgccgtccccgactcctcgctccgctccaatggcgccgaggatgccgcggagcatgggaagctggggcagtcggaggaacgagctatctacgaggaaggggcgggtggactgggcgacttctgtaccatcactattgatgggagcggagggctcagcgaggacatcctgcagcagcgcctgcaaagtgtcgcacggcagcgggaggagctgcagcatgtcgagatcgagttgcgtgcgc

SEQ ID NO: 7824 - DNA, 381 bp, Zea mays
  Clone ID: LIB3150-013-Q1-N1-A4
gtcgaatatgctaccaaggccgtcgacaacagcgggactgttgttgggatcaagtgcaaagatggcattgtcctgcgtgttgagaagctggtaacctcaaagatgatgctggaagggtcaaaccggaggatccattcagtgcaccggcactctggcttggctgttgctggtttagcagcagatggcaggcaaattgtttcaaggacgaagtcagaagctgccagttatgaaaaggtctatggagaacccattcctgttaaggaattggctgatcgtgtggcaaggtatgttcatctttgcacgctgtactggtggctcaggccttttggctgcagtgttattcttcgaggttatgatagggatgggccacagctctacatg

SEQ ID NO: 7825 - DNA, 339 bp, Zea mays
  Clone ID: LIB3150-013-Q1-N1-A5
gccgccgccgccgccgccgcagcatcaagccgccgccccgccgtcgcctgaggtagacaccaatccgccgccatggggcgtatgcacagccgcgggaagggtatctcatcgtcggcgctgccgtacaagaggacgcctcctacctggctcaagaccgcagcctccgacgtggaggagatgatcactaaggcagcgaagaaaggacagatgccgtcgcagatcggtgtcctgctccgtgaccagcacggtatcccccttgtcaagagcgtcaccggcagcaagatcctgcgcatcctcaaagcccatgggctggcaccagaaatccccgaggacctgtac

SEQ ID NO: 7826 - DNA, 373 bp, Zea mays
  Clone ID: LIB3150-013-Q1-N1-A8
gctcaatcatttcctttatatttttctatcgccagcgcctgccaaggcgcggattggcaggagcggggatcgcactattattgtttggctccccactatgtcttttccaatcaagcgccaggcgatggacctcatgaagcttatgatgagctacttcatggtgagtatggtgtacgaccggatgcatgtatcttttgcagaaattcgagtgcctaacgaagacttttatcaaggaacgcttatccgaaggcataagtctaatagcagacacatattcttactaatccacatcgattcgctacatcagtacgatatattacccgaatatcactgaaaagattgtatgagactgtctggatgttattaaccagac

SEQ ID NO: 7827 - DNA, 436 bp, Zea mays
  unsure at all n locations
  Clone ID: LIB3150-013-Q1-N1-A9
ggttggacaaagttcagcagactgtacaaaatgttttccaaaaattcaacttttttaagacccctgtagatttgtcagaggcttctcatgttcgtaaggagtatgatgatgctagctcaaagctttcaaaaattcagtctaagatatccagtctagctgagaagctaaaacatgattttggtaatgacaaggagttctattccttttatgatcagtgttttgagaccaaggaagggaagtatacttacaaggtctgtgcatataagaaagcatcacaggctgaagggcacagttctaccaacctggggcggtgggacaaatttgaagattcgtacagagtgatgcacttttcaagtggagacaaatgctggaatggtcctgaccgaagcctaaaggtangcttagatgtgggctgagcaatgagcttaatgatgta

SEQ ID NO: 7828 - DNA, 434 bp, Zea mays
  Clone ID: LIB3150-013-Q1-N1-B1
cctctctcgtctctccagcgacggcagcgggcgagggttacgcgaaggcgaagcggagtagtggaagcagaggcggcagccatggccgtgatggagaagctcaagatctttgtcgttaaggagcccgtagtcgcggcctcctgcctcatcgctggattcggtctctttcttccagcagttgtccggccaatcctggattcatggcagaccgcggaacaagttcctccacctcttctaaatgatgtggttgcaggtgtcaccggcaagaaaaagtagtgaacttgcattgttttctcatgccaatgttgccccacattttcttccccgtgttttttctggcgaccagattggaaggcttttcccaagagtcacgggcttgaactctagatggtatccgcggaataatcattgtacctgaatcatatactgcaatg

SEQ ID NO: 7829 - DNA, 338 bp, Zea mays
  Clone ID: LIB3150-013-Q1-N1-B10
aaaggctcctcccgaccgcaacgcccgtgatctacctcgaccccgacatccccgacccgatggcgcccaacgcggagaacaagccggcggataagaagccggcggccgaggagaaggcggagaagacgaccgcacggaagaagcccaaggccgagaagcggctgcccgagtgcaagtccttcggcaaggagggcggccagaagaacgggaagaagaacgccaacaagagcgtgcagacctacaagatctacatcttcaaggagctgaatcacgtgcaccccgacatcggcatatgctacaaggccatgtacatcatgaactccttcatcaacgacatc

SEQ ID NO: 7830 - DNA, 431 bp, Zea mays
  unsure at all n locations
  Clone ID: LIB3150-013-Q1-N1-B11
aatcaagaacacagccaccttggctgggtcactgttcacgctgcattgctcccagattcacattgacttgcccaccctgtctgatgaggataaggatgtcattagaaaatggggtactcccaataagattgacttcctttctctgtcctacacaagacatgcagaggatgtgcgccaggcacgggaattcctgtcaaaattgggcgatctaagccagactctgatttttgccaaaattgagaatgtcgagggcttgaaccaatttgatgaaatactggctgaggcagatggtatcattttatcaagagggaacctgngaattgatcttccacctgagaaggtctttntgtttcaaaaatctgctcttcacaagtgcaacatggctgggaagcctgcttgtgtcactcgtgtngtggacagtatgactgaca

SEQ ID NO: 7831 - DNA, 311 bp, Zea mays
  Clone ID: LIB3150-013-Q1-N1-B12
cggacgcgtggacggacgcatgggcggggaggtgtacgaggacgaccgttaccggacgtggggtggctccttcgccctgaccgtccgggaccccggggactcatggatcaccgcgctcagcaaccaccttggctggctaagtgccacctacgccgtggtcatgttccaatcgctccacgtcgggaaaggcgccttggacagggacgacacctgggtgggcaggatcgacagggcgcccgagcacgactgcggctgcgtactaatgagggcagtcagcggcgaggcgttccgctataccagatgcgtcgtca

SEQ ID NO: 7832 - DNA, 369 bp, Zea mays
  Clone ID: LIB3150-013-Q1-N1-B2
ccgccacctgccccagcgcgccgccgccgcagccaccatgggtcgcgtccgcaccaagaccgtgaagaagacctccaggcaggtgatcgagaagtactactcccgcatgaccctcgacttccacaccaacaagaaggtgctcgaggaggtctcgattctgccctcgaagcgcctccgcaacaaggtggctggcttcagtacccacctgatgcgccgcatccagcgcggcccagtccgcggcatctcgctcaagctgcaggaggaggagcgcgagcgccgcatggacttcgtgccggagaagtccgcgctcgaggtcgaagagatccgcgtcgacaaggagaccatggagatgctcgctgccctcggcat

SEQ ID NO: 7833 - DNA, 334 bp, Zea mays
  Clone ID: LIB3150-013-Q1-N1-B3
aagacattgcaaaccaatataaagatattttccttgatgcctcctatcccccaaaatgattgctcctccttcattgacattggagaaacacataactctgttttttcctgaacgggggatttagaagcatcatgaagggtgtatgtgtagtgagaagctatagatggtgaaggagatagatataggtaatagcagtatggtgtgacaatatgggcggaacaaatgtacaatgtagctatagatatatgtggaatgaacttccgatccttttttttcagttcagctactgttaacaagtactaccaataaattataccgcaatgcatatatatgt

SEQ ID NO: 7834 - DNA, 347 bp, Zea mays
  Clone ID: LIB3150-013-Q1-N1-B4
gcaccgtccaagccggctttcgcctttgcctacggggagaccacgagttctgacgagcggggtatcctgtcagtgtctcgtgctgctgctgccttctctctgaacgggatgtccgcgtccgagttccagccaagatagaatggaagaattaattacaatcacggaagacacggtacaaatatagatacggttcgtggctcgtggccatttgtaatggaagtttacgtcaccaatttttttttccaaattatcaccactatttttccccatcgggataaagttgggaagttgtgctgttgttcacggttcactagggtatgtttgggacagtgaatggcttatgaaag

SEQ ID NO: 7835 - DNA, 395 bp, Zea mays
  Clone ID: LIB3150-013-Q1-N1-B5
gcttctcctccccctccggttcgggttcgggttcgtgaggttctccggggttcggtttcgtgggtgagcggatcgagatggcggcgtcggatgttgagtaccgctgcttcgtcggcggcctcgcctgggccacggacgaccactccctccacaacgccttcagcacctacggcgaggtcctcgagtccaagatcatcctcgatcgggagacgcagaggtcccgcggcttcggcttcgtcaccttctccacggaggaggcgatgcggaacgccatcgagggcatgaacggcaaggagctggacggccgcaacatcaccgtcaacgaggcccagtcccgcggcggccgtggaggcggcggcggcggcgggtaccgtggtggccgtggaggcggcggc

SEQ ID NO: 7836 - DNA, 425 bp, Zea mays
  unsure at all n locations
  Clone ID: LIB3150-013-Q1-N1-B6
gggctattcctcctttggtagccccaactgcccggccacctgctccagctgttaagctggcagataaaccgccaaccgcagtttatgttgggaagatcgccccaacagtggacagtgatttccttctttcacttcttcggctttgtggatctgtcaagagttggaagcgtgcccaagatcctagtaatggaaaacctaaaggttttgggttttgtgaatttgaatctgctgaaggcatccttcgtgcgacacggcttctcaacaaattgagcattgatggtcaggaactggtgattaatataaatgatgccaccaaggaatacctgaagaaacatgttgagggaaagaagagagcacangagaaggaaaaagaaacagaagatgcaagcggggatggaactacaagctgtgctgaaaatgaatca

SEQ ID NO: 7837 - DNA, 431 bp, Zea mays
  Clone ID: LIB3150-013-Q1-N1-B7
ctagaagcatcactcaacaaaccctaggttgcctgatcggttgatcgctccatggcgatcatctccgacttcaaggacgacgaggcaccggagcagcagctggcggccggccacggcgtcgaggtggccctcgtggcggcgttggagaggagcggcggcgcgctccccttcctacaggcggctatggatgtcgcccaccgcaggtccggcctgttccgcgacccttcggcggtgagcaaggtcaccgcgatggcggcggccgtcagggcgcagatcgaagccgacgagagggtgaccagtgaggcggaggccaagaggaaggcggaggatgacgagaggaacgcggaggccgatgcgcatagggctgccaaggaggcggtaatggcgaccgcagacgagaaaccatagagcacggtggagaacgacagcat

SEQ ID NO: 7838 - DNA, 408 bp, Zea mays
  Clone ID: LIB3150-013-Q1-N1-B8
ggaggcagttagggcataaccttctttctgcattgaagtacacatacaagattgataagagggattcacatcttaggccaacgaaaggatatgcgtttcagtcaacttctcaagttggtggtctatggaatagcaaaggattgagatatttccggcaggagttcgatgtacgtggtgctgtgcctttgggattttatagtgctgctctcaacgttggtgtaggagcgggtgtcattttaccgcttgcagggggattcatgaattcgacttcatcagtgccagagaggttttatcttggaggtaattcttctccagtgtgcagcttgggcggaccgtcatctctgctgggtttcagattaaggggagttggcccaacagaggcgcggaggcatgtccttaataactcgg

SEQ ID NO: 7839 - DNA, 270 bp, Zea mays
  unsure at all n locations
  Clone ID: LIB3150-013-Q1-N1-B9
ggtgattccaccggtcatggcggctccgatccgagcacctccggcatgggcgggcgcgggttcctccccggcggcgaggccctagcagcggcctctcctggtgggcacggcctgccccggcgacgcggtagcagccgtcccggcccgtgcgcgggtgcggcggtcaaagggcgagcaggaccgacctggctcgggcggcaccagccactgccggcgcggngcacggcctttcgcttatgcccctggaggctcggcctncagcgtgggcac

SEQ ID NO: 7840 - DNA, 167 bp, Zea mays
  Clone ID: LIB3150-013-Q1-N1-C1
cgtcatgaagaccttcccgctgtccaggggaagcaccatctccctagccctcttctccgacgtctccaacagccgggagctcctggacttgatgcagtcagggaagctggagccggcggtcgctctcctcaacgcgtcactggtgccggatgtgttccctgtcctcg

SEQ ID NO: 7841 - DNA, 409 bp, Zea mays
  unsure at all n locations
  Clone ID: LIB3150-013-Q1-N1-C10
gattgagaggtccaccaaccttgactggtacaagggcccaaccctacttgaggctctggacttgatcaatgagccaaagaggccttcagacaagcccctgcgtctcccccttcaggatgtgtacaagattggtggtattggaactgtccctgttggacgtgttgagactggtgtcattaagcctggtatggttgttacttttgggcctactggtcttactactgaggttaagtccgttgagatgcaccatgaggctctccaggaggcccttcccggtgacaatgttggcttcaacgtgaagaatgttgctgtgaaggatctgaagcgtgggtatgtggcctccaactccaaggatgaccctgccaaggaggctgctagcttcaccttccangtcatcatcatgaaccac

SEQ ID NO: 7842 - DNA, 437 bp, Zea mays
  Clone ID: LIB3150-013-Q1-N1-C11
ggcagctggagttggcagtgctggccgtgttcgactcctgggagagcccgagggcaaagaagtacaggagcatcaaccagatcaccggcctcagaggcaccgccgtgaacgtgcagtgcatggtgttcggcaacatggggaacacctctggcaccggcgtgctcttcactaggaaccccaacaccggagagaagaagctgtacggcgagttcctggtgaatgcccagggcgaggatgtggttgctggaatcagaaccccggaggatcttgatgccatgaaggacgttatgccacaggcctaccaagagctagtcgacaactgcaggatactggagagccactataaagaaatgcaggacatcgaatttactgttcaagagagcaggttgtggatgttgcagtgcaggacagggaaacgtacgggcaaaaagcgccgt

SEQ ID NO: 7843 - DNA, 426 bp, Zea mays
  Clone ID: LIB3150-013-Q1-N1-C12
gcctgcccggtctcgtggctttgtgctgctcccgctgtggtgaggaaccctaggatggcgggggtttcgatggcggcggcgcctgagggggtgctgcaccgccggattgagtttcatcttgcacggagaccgcatggctctgtggcggtgggcggcggcgggttccggatggagacgctgaacccggacgccgctggtaaggtggggcccggggaggcggtcgggagcagcgagggggatgcgaggaggccggagaagggagacagtggcgggatcgatccggagctcagcgtcgcaaggatctacctcgggagaattggtgctggattggaaaatcttgggaatacctgctatctcaactcagttctgcaatgcttgacgtacacggaggccgtcgctgcctatttgcagagcgggaagcacacg

SEQ ID NO: 7844 - DNA, 437 bp, Zea mays
  Clone ID: LIB3150-013-Q1-N1-C2
gcggcgccggcctacaaccgttttcgtgctcacacacccaaaccttagtcgcgatcaggccccaaggactcgagatgaagtcgagggcacggtccaccgccggcgactccaggctctcggtgaggaagaccaaggctgagaaggacccaaacaagcccaagaggcctccgagcgcgttcttcgtcttcatggaggagttcaggaaggactacaaggagaagcaccccaatgtgaagcaagtctccctgattggcaaggctggtggtgacaagtggaagtccctgtctgatgccgagaaggctccctacgtgtctaaggcagagaagctcaaggctgagtacaccaagaagatcgacgcttacaacaacaagcagtctggagaccccacggcgtctggtgattccgacaagtccaagtccgaggtgaacgacgaggac

SEQ ID NO: 7845 - DNA, 438 bp, Zea mays
  Clone ID: LIB3150-013-Q1-N1-C3
ggcggccaagaccgccgacatgaaggagaagggcgctgatccctacgacctcaaacagcaggagaatgttttggctgagtcaaggatgatggtcccagactgccacaaacgacttgaaactgcactggctgacttgaaagcaacactggctgaactgaaggagtcaaatgagcaaggtgccgagattggagaagctgagagtacaatcgcagaagttgaagcagttgtcaagccagcagaagattaaactaaaaaaactcttggtttgctgaactgttagcgcacatcctattttcgcatattgagcccttgtgagcctattacgagatgtttgaggcgtgaaatcctgtaccattatcatcacttctatcttgaaatttgagtttctgttcccaagttctaagcgttactgtttgttgtctgggagagcgcacattc

SEQ ID NO: 7846 - DNA, 400 bp, Zea mays
  unsure at all n locations
  Clone ID: LIB3150-013-Q1-N1-C4
ctctcctgtacaaaaacaaaggaaggaacagaagccatgactagcaacaagaacactgccggggcgacggcgacggtggcggtgttggtactagtagcggcgacgctcctggcaacggtggtgaatgcacggccttgcttggacggcgtgctgcctccgtcgacgacgtcacatggcgtggttggggatctgctgccgcgcaagatcatcccgccctctgggcccagcgacttctggagccccgacgacgagccgtcgccgccaccgcctgcggaggcgacagtcgaccgcggtaattgagcgtgaggaggagtggtgatgaatgagaaatgctgatgtataatgccatgtgcaagaacgagctngaataatcaacaagagggcagggtcttcttgatca

SEQ ID NO: 7847 - DNA, 415 bp, Zea mays
  Clone ID: LIB3150-013-Q1-N1-C5
attgaggagagcccaggatgtgaggaaacaacttctcactatcatggacagatacaaacttgatgttgtctccgctgggaaaaacttcacaaagataaggaaagctatcactgcaggcttctttttccacgccgccaggaaggatccccaggaaggatacaggaccttggtcgaaaaccagccagtgtacatccaccctagcagcgcattgttccagcgccagccagactgggtcatctatcacgagctggtgatgacgacaaaggagtacatgagggaggtgactgtgatcgatccaaaatggcttgttgagctggcgccaaggttttactagggtgctgaccccaccaagatgagcaaaaggaaaaggcaggagaggatcgagcctctatatgatagataccacgagcccaac

SEQ ID NO: 7848 - DNA, 378 bp, Zea mays
  Clone ID: LIB3150-013-Q1-N1-C6
aggaggtgcagcggccggcgcgcgacatccccgccggcgtgtccggctccgtcgtcgtcgtcaccgtgctctactgcctcatggccgcctccatgtccatgctcctcccctacgacgcggacggtactcctctctgctctgctctgctatgctctctgaaacttgactttgaagagatgccgagatcctgccgaatagggctgctatatttagagctcatctttggttgcgtaggttgccaccgcaagctagctgcatctgattccggcacccgcttctgtttgtccgcctcagcttcttcttcttttctgggattgtatgggatgttgatttgggtggggggatgaaatgaatctgccgtacgtcccgatcccaaac

SEQ ID NO: 7849 - DNA, 433 bp, Zea mays
  Clone ID: LIB3150-013-Q1-N1-C7
gaaccccaaaccccaaaccctagcttcgctcgttgcggcgagccggcgatggcgaagtctctgcgatccaaacgcgagaagcggcttcggacgttgcgccgggagatagcggagccgttctacgacaagaaggaggccgccaagctcgccgcgcaggccgcagccctagctgctgccccgctcccggtccgcgggcccccgccgtcccaggatgccggcacctcccgcgcagctagctcggcctcggctatggatgtggagatgtctggtgcagggaacagcaggtctaagaccttcctgaggccacttggcagcattagcaagaagaaggtgcagcttcatttgaagatcaagaaagacaagagaaaagctaggaagaagggaaagttttcttttagaagtagaggagtgtatgataattcatgcagttttg

SEQ ID NO: 7850 - DNA, 423 bp, Zea mays
  Clone ID: LIB3150-013-Q1-N1-C9
gggtcactcgctcgtcgctcccaagtcccaccaagctgtcccccgaccactccgccgcccgctccaatggcggcgccggccagctcctcatgcttccacccacgcgcgaccgccagcccgccgtcttctctcagcgtcggcaccaaggtcttcgtcgggctcagggcgcagaccaagctcggttcgtcggagtcgtcatgcccgaatgtcagcgctgggttccacactgcggtcaaccggagaatctctctcaggttgtccaaaaagaaggcgaccagagcccgcatctcgatgatgcctattggtactccacgtgtgccttaccgaacacctggtgaaggaacctggcaatggcttgacatatggaacgctctgtaccgtgagcggattatcttcattggggacaatatagatgaagaattc

SEQ ID NO: 7851 - DNA, 424 bp, Zea mays
  Clone ID: LIB3150-013-Q1-N1-D1
cgctctctaccgtccgagaccccaagcaccagcgcggcggcgggggcgggggcggcggcgaccatggctgtcggaaagaacaagaggatctccaagggaaagaagggtggcaagaaaaagaccgtcgaccctttctctaagaaggattggtatgacatcaaggcaccgtcggtgttcagtgtgcgcaacatcgggaagactctcgtatccaggacacagggtaccaggattgcttctgagggtctgaagcacagagtctttgaggtttgcctagctgatcttcagggcgacgaggatcaagcttacaggaaaatcaggctccgtgctgaagatgtgcagggcaggaatgtgctcacaaacttttggggcatgaattttaccactgataaactcagatccctagtgaagaagtggcagacattaa

SEQ ID NO: 7852 - DNA, 389 bp, Zea mays
  Clone ID: LIB3150-013-Q1-N1-D10
tctcccccctgctgcgcgctactcgcccgatctcgcggtgctggtagcggtgaaaatatctgagatcgagtgaagctagcttttcatcgatatggcgcttgtactgcatgctggcagtagtaacaaaaatgcattcaaagcactaattgccgcggattacagcggcatcaaggttgagttggtaaaagactttcaaatgggggtttccaacaaaacaccagagttcctcaagatgaaccctattgggaaggttcctgtcctggagacacctgatggtcctgtctttgagagcaatgcaattgcaagatatgttactcgcttgaaggctaacaacccactttacggatcttcactgattgattatgcccatattgagcagtggatggact

SEQ ID NO: 7853 - DNA, 414 bp, Zea mays
  Clone ID: LIB3150-013-Q1-N1-D11
gttggcttctcctccccctccggttcgggttcgggttcgtgaggttctccggggttcggtttcgtgggtgagcggatcgagatggcggcgtcggatgttgagtaccgctgcttcgtcggcggcctcgcctgggccacggacgaccactccctccacaacgccttcagcacctacggcgaggtcctcgagtccaagatcatcctcgatcgggagacgcagaggtcccgcggcttcggcttcgtcaccttctccacggaggaggcgatgcggaacgccatcgagggcatgaacggcaaggagctggacggccgcaacatcaccgtcaacgaggcccagtcccgcggcggccgtggaggcggcggcggcggcgggtaccgtggtggccgtggaagcggcggctacggcggtggcggg

SEQ ID NO: 7854 - DNA, 439 bp, Zea mays
  Clone ID: LIB3150-013-Q1-N1-D12
ggactgtcatctctcagttgcaattgcaaaaaaaatacagagagagagagagagagagatccctaccctgcaaagagagactgacaatggacgcaaaaccggcgagtgtctgcatcttcctgctgcttcttctggcgcagaatccttcttcctcctctgcagacgaccagaagtgcttttacaccactgaccgggtggcgacctggtgcgtggactgggcgtgcaagttcggctgcctgatcgacgccaagcagtaccataccaagtacaagaacagctggtgcgaaggctccaggagaggcatctgtcactgccacttctgcgactgattctcacgaacagtcatctcgaaataaacaaatcatgtaataaaagccccgtggtcgtacgatataattttaaaaaacaccgattatagggatggagtccgatggaaaat

SEQ ID NO: 7855 - DNA, 441 bp, Zea mays
  unsure at all n locations
  Clone ID: LIB3150-013-Q1-N1-D2
ctcccctgaccttgctccgcctccgatcaaggaaaaggaagatgagctactacggccagcagccccccgtcggcgtcccgccgcagcaaggctacccggggaaggacggctacccgccgcagggctacccgcagcagggttacccacagcagggctacccgccgcagtacgcgcagccgcctccacagcagcagcagagcagcgggccttccttcatggaaggatgcttggctgccctctgctgctgctgcctcctggacgcctgcttctgacggaaccatccgtgccgggtccaacacggctgcaagtgaagcaaccagcttacggaagagctggaactgggccgtgctattctagctttgtcctgcgttatcgccctctnttctttntttttctctctctctctctctctggtatgagactactggtactctgtcgatg

SEQ ID NO: 7856 - DNA, 392 bp, Zea mays
  Clone ID: LIB3150-013-Q1-N1-D3
gaataatcatataacatcattcatttaactttattatatcatcatagagaaatagagacaatatcgaattataaatgtaccttcggcttggaaggagatgaaaatacaagtgtgacgcaaaagcagatgccaagttaacttgaacagtacgggggcactgttcacctatttataggcacggggtacaactcatacaaaattacatacatgccctttacatttggtgataattctatagcactctatcgaggtctaaatgtccttttcatctttaagtcggttcccttttctgcgaacatgccgaagctttcctgcttcacagcttcggcgctgtgtcaacctttgtagcttttccctttctgatacgagtccgaagatacctgctcacacat

SEQ ID NO: 7857 - DNA, 399 bp, Zea mays
  Clone ID: LIB3150-013-Q1-N1-D4
ggccaaccgacacgtggataacctggacgtggtcgataggctcatcgacgatgcggaggctcagtacaggaacttccagcaccccgatccctacattgttccatgggcaccaggcggcactaaattcacaagaaacccccctccacctcaagggatcgagatcatctacaattatggcaaggaggaccagtaaacaagagtcctgcaagcggggggcagaacttccacagttccaaatcacttcctgtttaatcgagttgttgtacgagaaataagaatggaaattactggactccatccatgcttctcatttgcttgttctgataatcatgtgctcttcatctagtgcatattgaagtcatgtttcctgtcataaaatggaactgtactatctttgtc

SEQ ID NO: 7858 - DNA, 431 bp, Zea mays
  Clone ID: LIB3150-013-Q1-N1-D5
gtgccagcgccggtcccggagacggcgccgacgcccctcaccacctcgatcgaccccaccccctccggcggcgaggagagcgaaagcgatgactcctcgtccgtctggtcggcgccctcctccgcgcccgtccccgcccccgcccccgcccccgcggcgccctcccccgcggccaaggacatcctccacatctccttcaaccaggactacggctgcttcgcagcgggcaccaagtcgggcttccgcatctacaactgcgaccccttccgagagatcttccgccgggacctcgccgccgagggcggagtcggcgccgggggagggggtatcggcgtcgtcgagatgctgttccgctgcaacatactcgcgctcgtcggcggcggagataacccccactactcgcccaacaaggtcatgatctgggacgatca

SEQ ID NO: 7859 - DNA, 358 bp, Zea mays
  Clone ID: LIB3150-013-Q1-N1-D6
ccaagtcccaacacccgtcggcgtcgagcagcggcggcgatgacgacgagcctgaagaagaaccggaagaagcgcgggcacgtgtcggcggggcacggccgcatcggcaagcaccggaagcacccgggaggccgcggcaacgccggcggcatgcaccaccaccgcatcctcttcgacaagtaccacccgggctacttcggcaaggtgggcatgcgctactttcacaggctccgcaacaagttccactgcccgtcggtcaacgtggagaggctctggtcgatggttcccgccggcaaggccgcggaggcggtcggcgcggaccaagccccgctcctcgacgtgacgcagttcggctact

SEQ ID NO: 7860 - DNA, 434 bp, Zea mays
  unsure at all n locations
  Clone ID: LIB3150-013-Q1-N1-D7
gttgttctaaacccccaaaccctacgtcctaacctctgcgccaccgccggagccgcagccatgaacgccttcaggttcctcggggacatgacccacctcttctcggtcctcgtcctcctcctcaagatctacgccaccaagtcctgctcaggggtgtcgaggaagacgcaggagctgtacatgttggtgttcgtggcgaggtacctggacctcttcacggattatgtctcgctctacaactcggtgatgaaggtggtgttcatcaccagctcggcggccatcgtgtggtgcatgcgccgccacccgcaggtacgaagaacgtacgacaaggagcaggacaccttccgtcacacggtgctcgtcgccgccgcattcctgctcgcgctgatattccacgagcggttcaccttncgcgagatatgctgggcattttc

SEQ ID NO: 7861 - DNA, 426 bp, Zea mays
  Clone ID: LIB3150-013-Q1-N1-D8
agccagtctacctggtggagatccaggccccagaaaatgcacttggtggtatctacggtgttctgaaccagaagagaggtcatgtctttgaggagatgcagaggccgggtaccccgctctacaacatcaaggctttcctccctgtcatcgagtcctttggtttctccagccaactgagggccgcaacctctggtcaggcgttcccccagtgtgtctttgaccattgggacatgatgggctcagatcctttggaggccggctcccaggctgctcagctggtgctggatatccgcaagaggaagggtctcaaggaacagatgacccctctttctgagtttgaggacaagctctaaaatttttggctgttggtgatactgtttcatctgccggtttaatcatcaattcgtctactgtaatagcagcgac

SEQ ID NO: 7862 - DNA, 431 bp, Zea mays
  unsure at all n locations
  Clone ID: LIB3150-013-Q1-N1-D9
agcacggaggcgaaggaggaggagcagcagcagcaggcggcgccgaggagcggcatcccactcagtgcttgcaaccatggctaggggattgaagaagcacttgaagaggctcaatgcgcccaagcattggatgctcgacaagcttggcggagcttttgctcccaagccatcttctggacctcacaagtccagggagtgccttcctctgatcctcatcatcaggaacaggctcaagtatgctctgaactaccgtgaggtcatttctatcctgatgcaacgccatgtacttgttgatggcaaggtcaggactgacaagacctaccctgctgggttcatggatgtcatttccatccctaagacaatggagaactacaggctgctttatgacaccaagggccgcttncgtcttcacccaatcagggatgaggatg

SEQ ID NO: 7863 - DNA, 418 bp, Zea mays
  Clone ID: LIB3150-013-Q1-N1-E1
ctgatgcagatgcagcagcagatgcagatgaacgggatgaagtttgctcatccggagctcatggccatgggcgcaggtcgcatgccgatgccgatgccgttcccggcggcagcgcaggcgcaggcgcaggccgccgcggccaaggaccccaagaccgtcaagttcgacctcccggggggcgaggagttcggggacgacggcagcgacctcgacgacgagttcgacgaactagacgacgtggatttcgaggacgacggcctcgacgacgacgacgacggcgacctgtacgacggccccgggatggtgatgaagcccatgggcatgcccccggccgctgctgccggtggcggcaacggaaacggcggcggcaagaagggtggcggcgggaacgaggtcccggttcagatcaatgggaacg

SEQ ID NO: 7864 - DNA, 421 bp, Zea mays
  Clone ID: LIB3150-013-Q1-N1-E10
aacgaaacgccgagagaggcgtgcgagcgggagcaaggagatggagcgggcggcgccggtgaggagctcccacacctccacggccgacctactcgcgtggccgcagccccagggccccgccccagcaacgccgtcgccgccgcgccggcccggtcagccgtcggaggctatcaggaaggtggtgttcgggggtcaggtcaccgaggaggaggccgacagcctcaccaagaggaagccgtgctccgcgcccaagtggaaggagatgactgggagcggcattttcgctgccgggagcaatggagacgctggggaggcagctgctgccgcgaagcccgcccgaacctcctcgcgccaggcgagcagtactgtaagccacatctcgttcgctgaggatggaaccgatccttccaaaaagcccaca

SEQ ID NO: 7865 - DNA, 421 bp, Zea mays
  Clone ID: LIB3150-013-Q1-N1-E11
cactgattggagcaggtgcagcagaaggtgcgattgatgctgctaatattttgaagccagctcttgcaagaggtgaactgcagtgcattggtgccacaacactggatgagtataggaagcatatagagaaagatcctgccttggaaagaaggtttcaaccagttaaggttcctgagcctactgttgatgaaacaatacagatcttaagagggctccgtgagagatatgaactccatcacaaactgcgatacacagatgatgctttaattgctgctgcacagctgtcttatcagtatatcagtgatcgtttcctgcctgacaaggccattgacttgattgatgaagctggatcccgtgttaggctgaggcatgcccagctccctgatgaagccaaagagctggacaaagagctgcgacagat

SEQ ID NO: 7866 - DNA, 393 bp, Zea mays
  Clone ID: LIB3150-013-Q1-N1-E12
gctctccagaaccccgcgcgtcccctcgcatcgtccctctctccgccgactccaaaccctaacccgcgcgcttacctcctcgtcccctcaggccatggcgtcgtcccctacccccaagaaggtgctggtcccgatcgcgaatgggacggagccgatggaggcggtcatcaccatcgacgtgctccggcgcgcgggggccgatgtcgccgtcgcttccgtcgagccgggggcgacgtccgtagctgcctcatggggcatcaagcttaccgccgacgcgctcctcgccgacctcgcggacgatgagttcgatctcatctctctaccgggaatgcctggttcttcgacttttggagagtgcaaagttttggagaaaatggtcaaaaaacatgtaga

SEQ ID NO: 7867 - DNA, 434 bp, Zea mays
  Clone ID: LIB3150-013-Q1-N1-E2
ccaagatcaagctgctgttgagtcacatagaaaggctgctgccgcagcagctgctggtaaattcaaagaggaaattgtgccagttcatacaaagattgttgatccaaaaactggtgaggaaaagaagatcgtagtctctgcagatgatggaatccgagtggatacttctcttgcagtcctgtcaaaactcaaaccagcattttcaaaggatggcagcactactgctgggaatgcaagccaagtgagcgatggcgctggggccgtcttgctaatgagacgggatgttgctatgaagaagggtcttccagttcttggtgtctttaggacctttgccgctgttggagttgatccagctgtcatgggtattggtcctgccgttgcaatccctgcagcagtgaaagctgctggccttcagatggatgatattgatcttt

SEQ ID NO: 7868 - DNA, 425 bp, Zea mays
  Clone ID: LIB3150-013-Q1-N1-E3
tctgaatgatgtgaaggctgtatggcttcgcagcccaaaggaggttactgatgaagaatactcgaagttttaccactcactagccaaggacttcggtgatgacaagcctatgggttggagccacttcactgccgaaggagatgttgagttcaaagctttgctctttattcccccgaaggctccacatgatctctatgagagttactacaacagtaacaagtcaaacctcaagttgtatgttaggagagttttcatctctgacgaatttgatgatcttcttcccaagtacctgagctttttgaagggtattgttgactcagacacgctgcccctgaacgtgtcacgagaaatgcttcaacaacatagcagtctcaagaccatcaagaggaagctgatccgcaaagcccttgacatgatcaggaaac

SEQ ID NO: 7869 - DNA, 378 bp, Zea mays
  unsure at all n locations
  Clone ID: LIB3150-013-Q1-N1-E4
cgaagactgggatcacggcaacaaacagaaagtgtcagaggaggaagagctctccatcggggaagatgtgatgtttccagaggatcttgcgggaacagatggcgcaaacgcaatgccggcagataatcccgagaagcatcagaatgtggagactgacagtgacaggtcggctgcggtggttgcagatgctcctccgcagcaggaaatggtagcagcaaacggaacgggccaaccgcagctggtggtggacgaacacaagacgattcttgaagaggtccccggagaagaaaacggcaccctttctgccgccgattatgctggtaatggcagcatcgacgacgacgacgacactcccttgtatcanggaggtgatgtgct

SEQ ID NO: 7870 - DNA, 402 bp, Zea mays
  Clone ID: LIB3150-013-Q1-N1-E5
ccaagattcaggttggagtcttctctgctaccatgccacctgaggcccttgagattacccgcaagttcatgaacaaaccagtgagaattcttgtgaagagagatgagctgacccttgagggtatcaagcagttctatgtgaatgtggacaaggaagactggaagctggacacactgtgtgacctgtatgagaccctggccattacccagagtgtcatctttgtcaacacccgccgcaaggtggactggctcactgacaagatgaggagcagggaccacaccgtttctgccactcatggtgacatggaccagaacactagagacatcatcatgagggagttccggtctggctcctcccgtgtgctcatcaccactgacctgcttgctcgtggtattgatgttc

SEQ ID NO: 7871 - DNA, 424 bp, Zea mays
  Clone ID: LIB3150-013-Q1-N1-E7
tgactcgtctcccttctcgtctacagcgacggcgaaggcgaagcggaggagcgggagcagaaacagaagaggcagccatggccgtgatggagaagctcaagatcttcgttgtgaaggagcctgttgtcgcagcttcctgtctcatcgccggattcggtctctttcttccagcagttgtccggccaatcctggattcatgggagaccgcagaaaaagttcctccaccacctctaaatgatgtggttgcgggtgtcaccggcaagaaaaagtagtgaacttgcattgttttctcatgtcgatgctgtcccacattttcttccccatgtttttctggcgtccagattggaaggctctccaaagtcacggtctccaaagtgacagcttgcttgatttaaacagtgtcgacagtgttttgtctctacac

SEQ ID NO: 7872 - DNA, 424 bp, Zea mays
  unsure at all n locations
  Clone ID: LIB3150-013-Q1-N1-E8
cttgatttggatggacttgttgtcattggtggtgatgattcaaacaccaatgcctgccttcttggtgaatactttaggtcaaggaacctgaagactcgtgttattggttgcccaaagactatcgatggagatctgaaatgtaaggaggtaccaacaagctttggatttgatactgcttgcaagatatactccgaaatgattggcaatgttatgactgatgcaagatccacaggaaaatactaccactttgtgaggcttatgggtcgtgctgcttctcacattacattggaatgcgctttgcaaacacaccccaatgctgcactcattgnggaagaggttgctgcgaagaaagaaacccttaagaatgtcacanactacattactgatatcatctgcaagcgtgcagatcttggttacaactatg

SEQ ID NO: 7873 - DNA, 428 bp, Zea mays
  Clone ID: LIB3150-013-Q1-N1-E9
gtcgtttgatgcgattccggcggcgatcgtcagcgcctccaacaccacccgctcccccgtcctagcgtgcgttcgggcgatctcccctctcgcggcggtcatggctggcgttggcggcggggcgcgcagctcagacagggcgggggcggcgcgctcgcccaccaccaccaccaccaccaccacggcgatccagtccaccatccagtcgatcaaggaggtcgtcgtcggccactccgacgccgacatcttggacaccctccgcgagtctaacatggaccccaacgagacggcgcagaagctgctgaatcaagatccatttcacgaagtgaaaagaaaaagggacaagaagaaagagagtgctggccagaagagctttgctgatagtactggacaagttgaccagaaccctcaatggatgaggccacata

SEQ ID NO: 7874 - DNA, 373 bp, Zea mays
  Clone ID: LIB3150-013-Q1-N1-F10
atctgcgtacacggtctccctcttcctgtcagtagtagagtgagagtgaggcagcgagtgggagacaaggggaaatggggaagggagcgcaagggagcgatgcggcggcggcgggcggcgaggtggaggagaacatggcggcgtggctggttgccaagaacaccctcaagatcatgcccttcaagctcccgcccgtcggcccttatgatgtccgcgtgcgcatgaaggcagtggggatttgcggcagcgatgtgcactacctaagggagatgcgcatcgcgcacttcgtggtgaaggagccgatggtgatcgggcacgagtgcgcgggcgtggtcgaagaggtgggcgccggcctgacgcacctgtccgtggg

SEQ ID NO: 7875 - DNA, 342 bp, Zea mays
  Clone ID: LIB3150-013-Q1-N1-F12
gtgcgctccatgctagtaggtttggactcgggagccatcgcgtggttccacaacgcagcttccgaattggacttccgtgaatagtcatagccaccttcgaacaacaaacctaaggctgattctgcgaaaggtactgcagtggggattgccacggacctgacctagaccaccaagtagtacggaactacacttgataccatgggagcccgacacttcataaacaatctcactactggatcggctcaagctgactgtgctggtgttatcattgactaaaccactgggggtgttgaagcttggatctccatagatggccagacggatgagcatgttcggcttgct

SEQ ID NO: 7876 - DNA, 427 bp, Zea mays
  unsure at all n locations
  Clone ID: LIB3150-013-Q1-N1-F2
cccttttccttttgctccttccttcctcgggaagcctagggcttaggctttaagcgccgcgatgtacggcggcggcggcggcggcgggcactacgacggaggcagcggtggcgccgggaacgctaacgcgctcttcggcggcgggggcttcatgccctcacagtccacggtggtcccggagaacagcggcctctctaagggtcggagcgcgcagacgctgctcccgctcaccgtgaaacagaccatggacgcggcgcaaaccagcggtgacaggtctaatttcgccatcaacggcgttgaggtgtctacgattaggcttgttggacgcatgctangtaaggttgagcgtgtcacagatgttgtattcactcttgatgatggtactggcaagatagatgtgaatcgctggaaaatgaggctccgatgc

SEQ ID NO: 7877 - DNA, 437 bp, Zea mays
  Clone ID: LIB3150-013-Q1-N1-F3
agcagacacctccgccacctccaccctcgaatcgttccccaccatggcgtcgcagggatcctccgtcttcgccgcactcgagcaggccccggaggaccccatcctcggagtgaccgttgcctacaacaaggatcccagccccgtgaaggtcaacctcggggtcggcgcctaccggaccgaggaagggaagcccctagtgctgaacgtggtcaggcgccgagcaaatgttgatcaataatccgtcacgtgtcaaggagtacctaccaatcaccggtctggctgaattcaataagctgagcgctaagcttatctttggcgctgacagccctgctattcaggagaatagggttgctaccgtgcagtgcctatcgggtactggttctttaagagtcggaggtgaatttcttgcaggcactatcacgagcgcactatctaca

SEQ ID NO: 7878 - DNA, 410 bp, Zea mays
  Clone ID: LIB3150-013-Q1-N1-F4
ctcccctgaccttgctccgcctccgatcaaggaaaaggaagatgagctactacggccagcagccccccgtcggcgtcccgccgcagcaaggctacccggggaaggacggctacccgccgcagggctacccgcagcagggttacccacagcagggctacccgccgcagtacgcgcagccgcctccacagcagcagcagagcagcgggccttccttcatggaaggatgcttggctgccctctgctgctgctgcctcctggacgcctgcttctgacggaaccatccgtgccgggtccaacacggctgcaagtgaagcaaccagcttacggaagagctggaactgggccgtgctattctagctttgtcctgcgttatcgccctcttttctttttttttctctctctctctctct

SEQ ID NO: 7879 - DNA, 425 bp, Zea mays
  unsure at all n locations
  Clone ID: LIB3150-013-Q1-N1-F5
ggcggcgcgggcggacaaggagcaggcggaggaggagctgtgccaagccacaatgggtatctcgcgtgactcgatgcacaagcgccgggccaccggtggaaagcagaaggcctggaggaagaagcgaaagtatgagcttggtcgccagccagccaacaccaagttgtcaagcaataagacagtgaggagggtccgtgttcgtggaggtaatgtgaaatggagggctcttcgccttgatactggtaactactcatggggaagtgaagctgttacccgcaagacccgtatcctcgacgtggtctacaatgcatcaaacaatgagcttgtgaggacacaaaccctngtgaagagtgccattgtgcaagttgatgcttgcccattcaagcagtggtacctcactcactatggagttgacattggtagga

SEQ ID NO: 7880 - DNA, 350 bp, Zea mays
  unsure at all n locations
  Clone ID: LIB3150-013-Q1-N1-F6
gtgatctacaagcttggaggtattgacaagcgagtgattgagaggttcgagaaagaggctgccgagatgaacaagcggtcattcaagtatgcgtgggtgcttgacaagctcaaggctgagcgtgagaaaaggattacaattgatattgccctgtggaagttcgagaccaccaagtactactgcactgttattgatgccccgggacaccgcgacttcatcaaaaatatgatcactggcactttccaagctgactgagctgntcttatcattgactcaaccactggtggttttgatgctggcatcttcaaagatggccagacccgtgagcatgctctccttgctttcacact

SEQ ID NO: 7881 - DNA, 419 bp, Zea mays
  Clone ID: LIB3150-013-Q1-N1-F7
cagcgctcaagttctcgcgcccacagccaaatttttctccactcaatcgcggcataagctgcactgcagccatggacgccagcggagccggtagcaaggcgaagaagggggcggctgggcgcaaggctggcggccccaggaagaagtcggtgtcgcggtccgtcaaggccgggctgcagttccccgtcggccggatcgggcgctacctcaagaaggggcggtacgcgcagcgcgtgggcaccggcgcccccgtctatctcgccgccgtgcttgagtacctcgccgccgaggtgctggagctggccgggaacgcggcgaaggacaacaagaagacgcgcatcgtcccgcgacacttgctcctggcgattcgtaacgacgttgagctcggcaagctgctgtctggcgtcaccatcgcgcac

SEQ ID NO: 7882 - DNA, 362 bp, Zea mays
  Clone ID: LIB3150-013-Q1-N1-F8
tcagcgctcaagttctcgcgcccacaggcaagtttttctccactgcgatcgcggcataagctgcactgcagccatggacgccagcggagccggtagcaaggcgaagaagggggcggctgggcgcaaggctggcggccccagtaagaagtcggtgtcgcggtccgtcaaggccgggctgcagttccccgtcggccggatctggcgctacctcaagaaggggcggtacgcgcagcgcgtgggcaccggcgcccccgtctatctcgccgccgtgcttgaatacctctccgtctaagtgctatacttggtcggtaacgctgctaatgacaacaagaagactcgcattgttcctcgacacttgcttc

SEQ ID NO: 7883 - DNA, 382 bp, Zea mays
  Clone ID: LIB3150-013-Q1-N1-F9
gtcatcgatctcgtttcaaatccatccatcctcgtttcctccgtcccgcagcatctcaaccccatggccaagatcaagatcgggatcaatgggttcggcaggatcggaaggctggtggccagggtggccctgcagagtgacgatgtcgagctcgtcgccgtgaacgaccccttcatcagcaccgactacatgacctacatgttcaagtacgacactgtgcacggacagtggaagcaccatgaagtcaaggtgaaggactccaaaacccttctctttggtgagaaggaggttgctgtgtttggctgcaggaaccctgaggagatcccgtggggttcggttggtgctgaatatgttgttgagtctactggtgttttcactgacc

SEQ ID NO: 7884 - DNA, 287 bp, Zea mays
  Clone ID: LIB3150-013-Q1-N1-G1
gttagggcagcgatccatacccacccgagccaacggcccatgggcgacgagacgccgcgtctcctgcttgaggacgggggccttaccctcgacgaacttgccgccggaggatcgccgtctgtgggggtggagccgccagtgctgcaagaccaggtcgagctcctgctgattgcaaggagccggacttcgcggactgaatggtctgcgtgcggacgatgatccactagaacacggagctggtatacgaggagctgcagacacagctagctcgtgcgccgggagctcca

SEQ ID NO: 7885 - DNA, 256 bp, Zea mays
  Clone ID: LIB3150-013-Q1-N1-G12
gactcatgccggttatttacaacgggatcaaggaatggtgcgcccggagctactactactagcggagcaacctgcaccgcgtcgacgcgacacagcgtgggcgcccgtactgtcgaaagcccggagccacatgctgaaaaccacggggagtgcgcttccgactggggcagggcgcgcgctgaccgggcagaggctctggtcaatcgcaatcagcgctcacacgggctgctgccagcatagtcggacggctcggctt

SEQ ID NO: 7886 - DNA, 156 bp, Zea mays
  Clone ID: LIB3150-013-Q1-N1-G2
gggacagcaaccaagcacgcgtccctacctgccgaacatcccagccagcggtagccggttagtccaaatgatcttcagtagccagcccgtcagccggattgcgatgggctctagtccgacgcgatggaaggactcataaaggttcgccactggcat

SEQ ID NO: 7887 - DNA, 350 bp, Zea mays
  Clone ID: LIB3150-013-Q1-N1-G4
cgatggtccagtttactcgaatgggcatcagataccaactgctagtggcacatcttaccgttccaattcgtcttctatgagaagtcagagccagcatccaacaacaaacctcatgggtatacatgcacagatgccttcgtctggaatgggtctgacctcacctagatatccttctaggatgtacccagacaacagattatatgggcagtatggtcagtatgggaacacactgaagggtggccttggttttggatcaaacatgtatagctcgagaaacaatgggaggtggggagttcgggataccaaatacaagcccagaaggcgtgcaccttttggctttagtggtgaga

SEQ ID NO: 7888 - DNA, 310 bp, Zea mays
  Clone ID: LIB3150-013-Q1-N1-G5
cggacgcgtgggccgccaacagccccgcgacctgcagcaggcgactccatgcccctacgctgctgccggcggtgtcccccactgaagaaactatgtgctgctgtatagccggtggctagctagctagttgagtcatttaccggcgatgattgagtaataatgtgtcacgcatcacaatgggtggcattgtcagtgtgagcaatgacctgaatgaacaattgaaatgaaaagaaaaaagtattgttccgtagcacggaacgatttctcgtggggggacgcctcgtaccaccagaaaacgctggagaaccta

SEQ ID NO: 7889 - DNA, 407 bp, Zea mays
  Clone ID: LIB3150-013-Q1-N1-G6
gttcgttcggagcgcacacacacacaaccagatctcccccaaatccacccgtcggcacctccgcttcaagatgcagatctttgtgaaaaccctgaccggcaagactatcaccctcgaggtggagtcgtctgacaccattgacaacgttaaggccaagatccaggacaaggagggcatccccccagaccagcagcggctcatcttcgctggcaaacagcttgaggacgggcgcacgcttgctgactacaacatccagaaggagagcaccctccaccttgtgctccgcctcaggggaggcatgcagatctttgtgaaaaccctgaccggcaagactatcaccctcgaggtggagtcctctgacaccattgacaacgtcaaggccaagatccaggacaaggagggcattc

SEQ ID NO: 7890 - DNA, 387 bp, Zea mays
  Clone ID: LIB3150-013-Q1-N1-G7
ctgctgcagcgcctccgccgccgctgccgcatctaacgcagttccctccgccgcagcccgaggcaagatggttctccagaacgacattgatctgctcaacccgccggcagaactcgagaagctcaagcacaagaaaaagagactcgtccagtcgcccaactccttcttcatggatgttaagtgccaggggtgcttcagcataaccactgttttcagccactcccagactgttgttgtgtgccctggctgccaaactgtcctctgccaacccacaggaggaaaggcaaggctcactgaaggctgttctttccgcaggaagggagactagagcggatgtggtcttcaagttttgctctatgccagatactagcgtcatgaactgccttt

SEQ ID NO: 7891 - DNA, 407 bp, Zea mays
  unsure at all n locations
  Clone ID: LIB3150-013-Q1-N1-G8
ccagaagtgaacagcctcaaacacaaactagagaagataggtgctagcttagtgaggttaacccgtaggatgtcgctggaagacagtttcaaggagagggtagccatgtggcgcagggaacatgacattatttacaaccagctcccagtgctgctagagaagatggacatcctatttcctgcggagaacatggaaaactcggagcccgagaacaaatctgaaacaaagaatctggtcgccccgctgccagccgtgacgccggaggaaataggggagcgctacaaggatctggaggagagcatcaggggattcatcaaggatctggacgaggccganaaggaggaggaagaagacggaagcacgagcgaggcggcatcgccgtcttcagtggacgatgagtaataatc

SEQ ID NO: 7892 - DNA, 414 bp, Zea mays
  Clone ID: LIB3150-013-Q1-N1-G9
cgccgcccctccggccacgcgagctcgccgaaatggtcgcccacaggttccatcagtaccaggtggtgggtcgcgcgctgccgaccccgaccgatgagcaccccaagatctaccgcatgaagctctgggccactaacgaggttcgcgccaagtcgaagttctggtacttcctgagaaagctgaagaaggtgaagaagagcaatggccagatgctcgccatcaacgagatcttcgagcgcaacccaaccaccatcaagaactacggcatctggctgcggtaccagagcaggacggtgtaccacaacatgtacaaggagtaccgcgacacgaccctgaacggcgccgtggagcagatgtacaacgagatggcctcgcgccaccgcgtgaggtccccctgcatccagatcatcaaga

SEQ ID NO: 7893 - DNA, 403 bp, Zea mays
  unsure at all n locations
  Clone ID: LIB3150-013-Q1-N1-H1
cccacgcgtncgcaacgtttgtcatgcatacctactatctctttctcacacaagtctcttctccgttttcactctcttgctagctcctctttgtccttcagatcagatctctcagaagagtagagtgcctgccagtgccatgtcgctgccagtcacacagcccattgcatgagcagaagggcaaggaagcttgggagggtgtaagctgaggatcggtgacgtgcaaatgcggccacggngaacctctctgcaacaaagctccgcatctgctctcggcgacggcgatgcggcgctaccgaagaagaagaggaaccggccaggcaatccgaaacctgatgcggaggtgatcgcgctgtcgcctcgaacgctgctggcgacgaaccggttcgtgtgcgaggtgtgc

SEQ ID NO: 7894 - DNA, 357 bp, Zea mays
  Clone ID: LIB3150-013-Q1-N1-H10
ccgtatacatctagagtcaagcgacccgtccagacttaagccaagctgtcgcatgccgaagggtattgactcccgagtcaggaagaagttcaagggatgcaccttgatgcccaacattggttacggctctgacaaatcaaccaggcactacctgccgaataagttcaagaagtttgtggtgcacaatgtctctgagctcgagttgctcatgatgcacaacagaacctactgtgccgagatcgtccacaacgattgaaccaataatagcaaggagattgttgaacgtgccgtgcagctcgacattgtggtgatcaacaatgctcgccaggctccggcgccagcacgatgagtagtgtg

SEQ ID NO: 7895 - DNA, 171 bp, Zea mays
  Clone ID: LIB3150-013-Q1-N1-H11
tcatgaacatggggcagcaactactcaaggcgcggatatggacagcaacggcttggccatgcagccatcccatcatgcatatcgggatgtggactatgactgctctgaaaagcacacaagcaccttctttgacgctggcgttcaacttctatatgatatatatggggagga

SEQ ID NO: 7896 - DNA, 377 bp, Zea mays
  Clone ID: LIB3150-013-Q1-N1-H2
gcgacgcgtcgagccccatcccgttcccgcgcctcgccgagagatctgcaccgtcgtcggcaccaacccgtcagtccgtacgtcgtccgcgccggcgaacgagtagagatggaggagacggcggcagcggctacggctgagaaggcgtcgtcgtacaggtactgggtgcgggaagccaccggcgacgccgcgccgctccccgtcccgcgcaagctcgaccccgccgccaatgggaacgggaacccgccgcccctcggctccgtctggaatcaggctggaacttgggaggaaaagaacctcaactcatgggctaatagtaggataaaggatttggctgggctctctaggttcattgaagttccctacagggaatgcat

SEQ ID NO: 7897 - DNA, 397 bp, Zea mays
  Clone ID: LIB3150-013-Q1-N1-H3
tagaaagtcaagaaggcaatactcaaagaaattcagatcacttggacttgaagttactgaggaagagatttttacatcatcgtttgcggcagccatgttcttgaagttaaataattttcctccagaaaagaaggtttatgttgttggtgaagatggaatcttggaagagctcaagttagctggttttgaatgttttggtggtccggaggatggcaagaaaaacataaagttggaggcggatttctactttgaacatgacaaaagtgttggagctgtcattgttggacttgatcagtacttcaattattataaaatgcagtatgcaagaacatgtataagtgagaaccctgactgccttttcattgcgaccaaccgtgatccaaccgggcatatgaca

SEQ ID NO: 7898 - DNA, 369 bp, Zea mays
  Clone ID: LIB3150-013-Q1-N1-H4
gccaagatccatggccgttcttgtgctcgtgttcgtcgtcttgtgccgagtgggggaggcggcgacgttcacgttcgtgaaccggtgcacggacacggtgtggccgggcgtcctgtccaacgccgggagcccaaggctggagcccacggggttcgagctcccgccgggcgcggcgcgcgcggtgccggcgccggcgggctggtcaggccgaatgtgggcgcgcacgggctgctcccaggatggcggcacggggcggctcgtctgtgccacgggcgactgcggctccggctcatccgagtgctcgggcgcgggcgcggcgccgccggccacactggccgagttcacgctcgacggcagtggcgggctgga

SEQ ID NO: 7899 - DNA, 291 bp, Zea mays
  Clone ID: LIB3150-013-Q1-N1-H5
agagggagctgacgcggcgccatggacgaggaggagcacgaggtttacggccaggaaatccctgaggacggcgacatggacggtgctgacgttgatatggatgcctgcggggatgacgcgacgaagctgcaggagctcgacgagatgaaacgcaagctgaaggagatggatgaggaagccgccgccctacgcgatatgcatgccaaggtcgccaaggagatgcatggatgtgaccctagtgcatctacaactgaggcaaacgagcaggtggatgcccgttctctgtatgtt

SEQ ID NO: 7900 - DNA, 357 bp, Zea mays
  Clone ID: LIB3150-013-Q1-N1-H6
cgcgatggcatctgcggctgacggggagtgggaggcggatgattcggaatgtgctggcggctctcaagccctgcttcaggctacctacggcctgcccaacgctgctacccgtgctcctctacctgcgcatggacgcatgtttgctttgacatgcacataaacaccttctttcccgatgccgatcacataccatatgttgaatgtggggattgcgtggctttcaacaacgagaaaggaggcgtaattgaatatctcaaggatgagaaaatcggtgacttgaactcaaatcacccgaatatttcatccaccactgtgctagacaccgaaagcatggattcgtcctggcttgctaatgct

SEQ ID NO: 7901 - DNA, 365 bp, Zea mays
  unsure at all n locations
  Clone ID: LIB3150-013-Q1-N1-H7
ctcgtttcaaatccatccatcctcgtttcctccgtcccgcagcatctcaaccccatggccaagatcaagatcgggatcaatgggttcggcaggatcggaaggctggtggccagggtggccctgcagagtgacgatgtcgagctcgtcgccgtgaacgaccccttcatcagcaccgactacatgacctacatgttcaagtacgacactgtgcacggacagtggaagcaccatgaagtcaaggtgaaggactccaaaacccttctctttggtgagaaggaggttgctgtgtttggctgcaggaaccctgaggagatcccgtggggttcggttggtgcttgatatgttgntgagtctactgggtgttt

SEQ ID NO: 7902 - DNA, 403 bp, Zea mays
  Clone ID: LIB3150-013-Q1-N1-H8
atccgacctcaattccgaatccctcccccatctcccggcgtccccaacgccctccgccatgccggacgtgcagccgctcgtcagcgacttcgtcctcaagcttaagcgccggaaggtggaggggtcgcacgcggtggcccggcagacggcggaactgctacggtcggttgtgtcgcagcatcggatgggtagcagcgccaaccaggcagccgcgcttgccgatgctgtacgcgctgtgggggagcagctcatctccgccaatcccattgagcttgctgttggaaacattgtgagacgtgttttacatataataaaggaggaggatatatcttccacagcagttggaattgaaggtctttctgttactggtgacagggatgatgaatatgacagtgaacatgat

SEQ ID NO: 7903 - DNA, 426 bp, Zea mays
  Clone ID: LIB3150-013-Q1-N1-H9
cttgaagccatgaagaaagccaagggggtgaagaacgacaccgacctcaccgccaccggcctcaaagagctggtgagccagtacaaggacgtctacgtggaggctaagggagagccattcccctcagaccccaagaggcagctggagttggcagtgctggccgtgttcgactcctgggagagcccgagggcaaagaagtacaggagcatcaaccagatcaccggcctcagaggcaccgccgtgaacgtgcagtgcatggtgttcggcaacatggggaacacctctggcaccggcgtgctctttactaggaaccccaacaaccggaaaaaaaaagcttgacggcgagttcctggtgaatgccccaggcgaggatgtggttgctggaatcagaacccggaagatcttgatgccatgaaggacgttatg

SEQ ID NO: 7904 - DNA, 327 bp, Zea mays
  Clone ID: LIB3150-014-Q1-N1-A1
ccctagccctcgcgccgccgccgccgtgcccagcgctcgagctcctcgcctgccgcgagctcgcgccgcaacgccaccatgaagttcaacatcgcgaacccgtctaccgggtgccagaagaagctggaaatcgatgacgaccagaaactacgtgccttttatgaccgaaggatctcccaggaggtcagtggtgatgctctgggtgaggagtttaagggttatgtcttcaagatcatgggtggatgtgacaaacaaggcttcccaatgaagcaaggagttctgacttctggtcgtgtacgccttctgctccacagaggcacttcctgc

SEQ ID NO: 7905 - DNA, 318 bp, Zea mays
  unsure at all n locations
  Clone ID: LIB3150-014-Q1-N1-A10
gaaaggacaagggtggaatcaacttcacatcaacagtgacgaacacacatttggaccttgatacagtaaaagcaatctgtagcgagtacaggatacataatgctgatgtctccctgagatatgatgctacagcagatgatctcatagatgttattgaaggaagccggatttacactccttgcgtatatgttgtcaacaagattgatcagataacactcgaggagctggataatctggacaaacttncncattactgcccggntagtgctcatctngaatgggaatctgatgggactctggagaanggtatgggaatac

SEQ ID NO: 7906 - DNA, 415 bp, Zea mays
  unsure at all n locations
  Clone ID: LIB3150-014-Q1-N1-A11
gcccatccctcccgcccgccaggtcccgcgagatctctcacagccccctcagatccgcctaccctcgccgccggcgcgctcgcgcgctttccgcacgcccgccgccatgtcgcacaaccacggcgacacgatcccgctccacccctcgtcggcgcagtccgacatggacgagatcgagagcctgatccacgccgcgccatccccggccaccgtgctccccgcgcggtcaccgtctccgacgcgggcctccatacccgtatcttcctctccggccccgtcggccgtccccacgaagccgactgtccccgccgcttacatcccaatctccgtctgcgtctcccccgttcccgttcccgcgtacgtctccgtccccatcggcgccgacaggtttgggtctncgnccaacacgctcacg

SEQ ID NO: 7907 - DNA, 399 bp, Zea mays
  Clone ID: LIB3150-014-Q1-N1-A2
ggcggcggaggcagcgcctcttcctcgcaccaccaccgtcactcaacacagcacaggcagttcgagagagagagagagagagagagagataaagatgtcgtggttcgggcaccaccaccacaaccagccggctcccccggcgtcgggccccaaccaggtgttcaagatcttctgccgcgccaacgagaactactgcctggccgtccgcgacggcgccgtcgtgctggccccggtcaaccccaaggacgaccaccagcactggtacaaggacatgcgcttcagcacccgggtcaaggacgaggaaggcatgccggcgttcgcgctcgtcaacaaggccacggggcttgccatcaagcactccctcggccagtcccacccggtcaagctcgcgccttttaa

SEQ ID NO: 7908 - DNA, 417 bp, Zea mays
  Clone ID: LIB3150-014-Q1-N1-A3
gcattttatccttcctggtgctctgtccacctctctcgctctgggccgccgccgccgccctaagccacgtgctgaggctttcgttggtctcttcgccggcgacgagcacccagcagttctgtagaaatggctgatggtgaggacatccagcctcttgtctgcgacaatggcactggaatggtcaaggctggttttgctggcgatgatgcaccaagggcggttttccctagcattgttggccgtcctcgccacactggtgtcatggtagggatgggacagaaggacgcatatgttggcgatgaggcacagtccaagagaggtattcttacgctcaagtacccgattgagcacggtattgtgagcaactgggatgacatggagaaaatctggcatcatactttctacaacgagcttcgt

SEQ ID NO: 7909 - DNA, 286 bp, Zea mays
  Clone ID: LIB3150-014-Q1-N1-A4
gatcagcaaagcggcagtgcgtagagaggatcgtcgaacagaacagcatgaagatggtcatcgttctcgtcgtgtgcctggctctgtcagctgccagcgcctctgcaatgcagatgccctgcccctgcgcggggctgcagggcttgtacagcgctggcgccggcctgacgacgatgattggcgccggcgggctgtacccctacgcggagtacctgaggcagacgcaatgcacaccgctggcggcggcgccctactacgccgggtgtgggcagacgagcgccatgta

SEQ ID NO: 7910 - DNA, 416 bp, Zea mays
  Clone ID: LIB3150-014-Q1-N1-A6
cgccgcagtgcgcgctcctacaacccatcgctcaccaccacctgctcctccagcggcggcgtccagggtgaacccgaatccccaacaccatggcggggggcaagatccagaagaagcgccacggcgcggcgggaggcgcccggctgcagggcggtatcccgttcgagaagtccaaggggcagcacatcctgcggaacccggcgctggtggactccatcgtcgccaaggccggtctcaagcccaccgacaccgtcctggagatcgggccgggcacaggaaacctcaccaagcgcctcctcgaggctggtgtcaaggccgtcgtcgccgtcgagctcgacccgcgcatggtgctcgagctcaaccggcggttccaggggcacccgctctcctcgcgcctcaaggttatccaaggagat

SEQ ID NO: 7911 - DNA, 395 bp, Zea mays
  Clone ID: LIB3150-014-Q1-N1-A8
gtgggtcttcggctacggctccctcatctggaacctcggcttcgacttcgacgacaaaatcctcggcttcatcaagggctacaaccgcacctttaatctcgaggcacagcggagcatccggcgaggacctgcacgcttgaaaccgacgacgaggcgacgacgaggccatatgctggggaattgcatattgtgtcaagggtggtccagaaaaagagctaaaagcaatgcagtacttggagagaagagagtgtgagtacgaccagaagatatccattgatttctacaaggaaagagatcccctgaaaccagctgtgatgggcgtcttagtgttcgtttccactccagatccaattggcaacaagtactatcttggccctgctcctttgcaggatatg

SEQ ID NO: 7912 - DNA, 402 bp, Zea mays
  Clone ID: LIB3150-014-Q1-N1-A9
cggcaaccgccgccatcgatcgatcgcccggaaactgacctctaccgatgtctggagccggcgaggaggataagaagcccgcggagggcggcgcccacatcaaccttaaggtcaagggacaggatggcaatgaggtgttctttcgcataaagaggtccacccagctgaagaagctgatgaacgcctattgcgaccgccagtctgtggacatgaatgccattgcattcctgtttgatggccgcaggcttcgcggcgagcagacccctgatgagctggagatggaggacggcgacgagatcgacgccatgcttcaccagaccggaggcagcgttcctagcaccacctaaaagcagcagctgcggagcctcgttttgctctccgccctgcgtagtactaaacaaa

SEQ ID NO: 7913 - DNA, 409 bp, Zea mays
  Clone ID: LIB3150-014-Q1-N1-B1
gggatcccagccaccgccgctagaagaagagctcggcgattcccaggtcccgcgagaagatgccgaagcagatccatgagattaaggacttcctcctcaccgcgaggaggaaggatgcccgctcagtgaagatcaagaggagcaaggatgttgtcaagttcaaggtgcgctgctccaagtacttgtacacgctctgcgtcttcgatgctgagaaggcaaacaagttgaagcaatctcttcccccaggtttgaccgtcgaggaggtctgattggatacatggcaacgtcgggttgaactaccaaagcttctttatcagtagcagagtatgctactctatgtacttttggaacctaagctattagacctgtcagtgttggatgtgtggatcttgcatttttggagaaaata

SEQ ID NO: 7914 - DNA, 400 bp, Zea mays
  Clone ID: LIB3150-014-Q1-N1-B10
atcgccatggcagccaagatgtttgcattgtttgcgctcctagctctttgtgcaaccgccactagtgctacccatatcccagggcacttgtcaccactactgatgccattggctaccatgaacccatggatgcagtactgcatgaagcaacagggggttgccaacttgctagcgtggccgaccctgatgctgcagcaactgttggccttaccgcttcagccgtgccagatgccaatgatgatgccaggtatgatgccaccgatgacaatgatgccgatgccgaatatgatgccatcgatgatggtgccgactatgatgtcaccaataacgatagctagtatgatgccaccgatgatgatgccaaacatggtttcaccaatgatgatgccgagtatgatgc

SEQ ID NO: 7915 - DNA, 309 bp, Zea mays
  Clone ID: LIB3150-014-Q1-N1-B11
cgctgagctcgatcgggctactacatccatggcgaggtagcgcaaggcctccgactccgccgcgggtatcgacggcgtccactcgctgccaccaccgctggctctggcttcaacagacgcgtgtgcatgggcatcgtccgacggtactagcatggccgcggcggctgaggcagcggcagcgcaacaacagcggcggggaaggaagcggttcgtgtgtgtgcggcagcgaccgtcgggacggtgggtggcggagataaaggacaccatccagatgatccgcgtgtggctaggcaccttcgacacggccga

SEQ ID NO: 7916 - DNA, 297 bp, Zea mays
  Clone ID: LIB3150-014-Q1-N1-B12
cgctgggcttgatcgggcttctacatacatggctcggtagcacatggccttgcactccgccgtgggtatcgacggactccactcgccgcgaccaccgctggctctggcttgaacagacgcgtgtgcatgtatcatcgtcgggcggtactagcatggccgcggcagcttatgcggctgtggctcaacagcagcggcggggaaggaagccgttcctgtgtgtgcggcagcgtgcttcgggtcggtgggtggcagatatacatgccaccatccagaacatccgcgtgtggctaggcacct

SEQ ID NO: 7917 - DNA, 197 bp, Zea mays
  Clone ID: LIB3150-014-Q1-N1-B2
actgaccgcggtggcagcgcctctttctcgcaccaccaccgggactcaacacagcacatgcagctcgagagagatagagagagagagagagataaagatgtcgtgtgttgggcaccaccaccacaaccagccggcatgccccggcatgcttcccaaaccaggtgttgaagatactatgccgtgtccacgagaactac

SEQ ID NO: 7918 - DNA, 398 bp, Zea mays
  unsure at all n locations
  Clone ID: LIB3150-014-Q1-N1-B3
gggttttgctgctctccgaccccgagctccgaaggccgcagcatcaggcgcggcccccctcgcgtgtgaccgagatggcgctgccgaatcaggggaccgttgattaccccagcttcaagctcgtcatcgtcggcgatggtggaactggtaaaactacatttgtgaagaggcatctcactggagagtttgagaagaaatatgaaccaaccattggtgtggaagttcatccgttggatttcaccactaactgtggtaagatcaggttctactgctgggataccgcanggcaagagaagtttggtggcctcagggatggatactatatccatggccagtgtgcgatcatcatgtntgatgtaacctcaaggcttacttacaagaatgttcctacgtggcat

SEQ ID NO: 7919 - DNA, 414 bp, Zea mays
  Clone ID: LIB3150-014-Q1-N1-B4
cttccaaatgctatgaatgccgctgagatcactgataagcttggactgcattcacttcgccagcgtcattggtacattcaaagcacttgtgctacaacgggtgagggattgtatgaaggcctggactggctgtccagcaacattgcaaccaagtcctaaattgtcaagcaaggtttggatcatctaggagcttttggatgatgatgatggtgctggatatttagggttgggttggtatttccgtatgtaagatgtatgcccctgagctcggcagtttttgagctctgcttaagattctcacagttaaattggtttatgtaatttgggccttgaaatgtttctgaaccaaacagctaaaagagttcagttgagttaactggttgccattattacattatgagattctttgatgct

SEQ ID NO: 7920 - DNA, 391 bp, Zea mays
  Clone ID: LIB3150-014-Q1-N1-B5
cagcgatctaggccgccgcctctcctactgcatctccctcgctctcgtcgcctcgttcgcttcgcctcctccccgccccgccccgagccgagcagagcgcagccctagccggagctgggatggcggacgcgaagcagcagcagcagcagcagccacagcaggcggcagcggcagccaccggcgtgtggaagacggtcaagcccttcgttaacggcggggcctctgggatgctcgcgacctgcgtcatccagcctatcgacatggtcaaggtgaggatccagttgggtgagggctctgctggtcaggtcacaaggaacatgcttgcaaatgagggtgtccgttctttctacaagggtttgtccgccggattgctgaggcaagcgacgtacac

SEQ ID NO: 7921 - DNA, 417 bp, Zea mays
  Clone ID: LIB3150-014-Q1-N1-B6
cctttatcgccgccgcctccgccgccgttgctgtgttccgtctcttcgccgatggcttcggccaagttcggtgctgcccagcaggtggagaaccgaggcgcgctgtccaaaaggtcacgtaacgacgtgtctgtaagggagggggactggaattgtcctcagtgtggtaatgtcaacttcagttttagaaatgtttgcaaccgtggagcctgtggtgcaccccgtccatcaccgagtccaagtccaagaatgatgccaggacctcctgcttctggatatgaccggtcacctctattttacggaggaggtggtggcgccccacctccaattccgcttggaactggtagctatggtgctccatatccacaccttgggatgcgatatggctatggtccaccagtaggacctcctggttca

SEQ ID NO: 7922 - DNA, 417 bp, Zea mays
  Clone ID: LIB3150-014-Q1-N1-B8
aaaaaccctagaactccaaaaccttcagccccacgctatggccctcgcactgcgcctccgtcgggtcctcgcggcggcctccaccgcggcacccctgctccgcccgtccacctcggtcgcccggccttgcccgctcgttcccctcgcctccccggtcgcgccgctcccgctgccgccgtggcgattcctgcccggcggcggcgccgggttcaggtccacggcggcggcggctgcgcggggcgggaccgactatgggacggacgacagcaagatctcccccgacgagatcctcttcgagggctgcgactacaaccactggctcatcaccatggacttcccggaccccaagccgtcgcgcgaagagatgatcgagacatacctccagactctcgccaaggtcgtcgggagttatgagga

SEQ ID NO: 7923 - DNA, 401 bp, Zea mays
  Clone ID: LIB3150-014-Q1-N1-C1
gctttatgaacctttatacacaaagaggtatggaattgtaaatggagaagtggaggtagatggtgtttgtgatgaaccggccagtgagaatactgttgagggaaaagaaccagacgctaaaggagttccagacttttggcttactgccatgaaaacaaacgaggttttgtctgaggagatacaagagcgcgatgaagccgctttgaaatatctaaaagatatcaagtggtctagaatcgaggatcctaagggtttcaagctggattttttctttgatacaaacccattcttcaagaattctgtcctgacaaaaacgtaccacatggttgatgaagatgacccaattttggagaaagctattggaactgaaatcgagtggtatcctgtgaaaaacctaacac

SEQ ID NO: 7924 - DNA, 373 bp, Zea mays
  unsure at all n locations
  Clone ID: LIB3150-014-Q1-N1-C10
cacacctcccgaactccgaactacaagtttcgcttctcgtcgcgacgactgggcgagaccgccgccgccgcctgagttctttagaaatggctgatggtgaggacatccagcctcttgtctgcgacaatggcactggaatggtcaaggctggttttgctggcgacgatgcaccaagggctgttttccctagtattgttggccgtcctcgccacactggtgttatggtagggatgggacagaaagatgcgtatgttggcgacgaggcacagtccaagagaggtattctcacgctcaagtattcgatcgagcatggtattgtgagcaactggtatgacatggagaaaatntggcattacactttctacaacgtgct

SEQ ID NO: 7925 - DNA, 410 bp, Zea mays
  Clone ID: LIB3150-014-Q1-N1-C11
ctcctcgcttccactccgctcgtctgacatctcgtcccgtcctttcgtttcgaagcctcgcgagccccgacgatggccaccgccgcggtgtcggtcgacgagaagctcgacaagcttcgcgcctaggtcgccaagctcgaccagatcagcgagaacgagaagtccgggttcatcagcctcgtgtcacgctacctcagtggggaagcggagcagatcgagtggagcatgatccagacccctaccgatgaggtggtggtgccctacgataccgtcacgtcgcctcccgaagatctcgaggagacgaagaagctgctggataagctcgttgtgctcaagctcaacggacggctcggtacgaccatgggctgcactgtgcccaagtctgtcattgaagtccgcactgggttcac

SEQ ID NO: 7926 - DNA, 222 bp, Zea mays
  Clone ID: LIB3150-014-Q1-N1-C12
tcgctcctctcttccactccgctcgtctgacatctcgtcccgtcctttcgtatcgaagcctctcgagccccgacgatggccaccgcctcagcgtcggccgacgtgaatctcgactagcttcgcgccgaggtcgccatgctataccagatcagcgagaacgagatgtccgggttcatcagccttgcgtcacgcttcctcattggcgaagcagatcagatcgag

SEQ ID NO: 7927 - DNA, 311 bp, Zea mays
  Clone ID: LIB3150-014-Q1-N1-C2
ggcggctgaggcaacgcctcttcctcgcaccaccacgggcactcaacacagcacaggcagttcgagagagagagagagagagagagagataaagatgtcggggttcgggcaccatcaccacaacgagccggcttccccggcgtagggccccaaccaggtgttcaagatctactgccgcgccaacgataactactgtctggccgtacgcgaccgtgcccttatgctggccccggtgaaacttaaggacgaccaaccacacttgtacaaggacatgcgcttgagctcccgggacaaggacgaggaaggtatgc

SEQ ID NO: 7928 - DNA, 328 bp, Zea mays
  Clone ID: LIB3150-014-Q1-N1-C3
aacaaaaaataaaaaaaagaaagaaaaagagagaaatgtcagagacacatgagaatgcacgacccgtaggcggaggcgcgactagcgcgctttacggacgcgccgcggtcatgtcgcacaaccacggaggcacaaaacgcgctccaccaatcgtcggagctaactgacatggacgagatcgataggctcatccatgcggcgccatctcgggccacggagctacacgcgcggccaccgaatggaacacttgtctacatacaaggatagttatctgcgggacagacgctcgtaccgacaaagctgactttgcctggcgattacataccaa

SEQ ID NO: 7929 - DNA, 408 bp, Zea mays
  Clone ID: LIB3150-014-Q1-N1-C6
ctctactgtcccgattgctgcggaggttttcaagaaggctggtacttatgatgagaagaagctgtttggtgtgactactcttgatgttgttcgtgctaaaacgttttatgctggaaaggctggcgtgccagttactgaggtgaatgttcctgttgtcgggggccatgcgggtattactattctgccactcttctcacaggccactcctgcaagcaattcgttgtcccaagaagacattgaggctctcaccaagaggacacaagatggtgggacagaggttgttgaagcaaaggctggaaagggctctgcaacattgtccatggcatatgctggtgctgtttttgcagatgcatgcttgaagggtctgaatggagttccggacattgtagagtgctcttttgtgcaatc

SEQ ID NO: 7930 - DNA, 240 bp, Zea mays
  Clone ID: LIB3150-014-Q1-N1-C9
acgatcgatctcgtttcaaatccatgcatgctcgtttcctgcgtaccagctcatcttatccccaatggccttaacaatatgcggaatcatgggtttggctggatccggaggctggtggccatggtggccctgctgagtgacgatttcgagctcgtcgccttgaacgtcccctttatcaggaccgactacatgacctacatgttttagttcgacactgcgcactgacagttttgcaccatg

SEQ ID NO: 7931 - DNA, 242 bp, Zea mays
  Clone ID: LIB3150-014-Q1-N1-D1
gggtaggtttctactaatcctcaggctcggtatatggtactggaggttgtcaggtgtttttcatcctggttcagcatacatagattgtgggtgacatatgatacgacagtgaattactatggaggaaacacctgctcacgcgtaatggtataaccatcaatgccttcatgaaacgaaaagcattgtactccctaattatttcatgctgaacatgctaacagcatgatggtctctatttaaac

SEQ ID NO: 7932 - DNA, 196 bp, Zea mays
  Clone ID: LIB3150-014-Q1-N1-D10
gctctcccacacagaaaaccctagccgccgtcaccgtatcggcctcccaggtaagcaagatcgtcgagtccgtcgccgtcatgaatcgcaatccccgcgtcacgtgctatcgccggaagtgccgcatggctcactttattgcatcgttctctgtccgtcgagttctcatgtatgtggagctgtcgactgatctcct

SEQ ID NO: 7933 - DNA, 203 bp, Zea mays
  Clone ID: LIB3150-014-Q1-N1-D11
acgctcgcgacccatcgtgcatacacacgccagcctttttgttctccccgcgtgcgctccttttctgtatctactggcgactactccgtcaccgccgccgatctacatcgtgacgcccacgtcttcgacaaccacgagtcatcgttttcgtgaggatgaaatagcaaccgaaacaatggcagtagattcccgctctcgcagac

SEQ ID NO: 7934 - DNA, 251 bp, Zea mays
  Clone ID: LIB3150-014-Q1-N1-D12
cggacgcgtgggccggagtcagacacgcctgccccgtcgcgcgcatgtctgcctaagcgccgctccgcccctgccctacgagagcactctgcggccaaggttgcaggctgcagccaccaggcctctacggtggaggagaagaatggaggatgctgccaaacggttgagatgagactccgcttcacaagacagtctccacagtgaatctgcaatgggtagctcactgcagtctgatggacataggagagatg

SEQ ID NO: 7935 - DNA, 200 bp, Zea mays
  Clone ID: LIB3150-014-Q1-N1-D3
tcgggatattggtcgtctccgaactctcgctccgaaggctgcaggattacgagctgtccctatagcgtgtgacataaatgcttctggtgaatatggggatcgctgattactgcatgtaaaagctcgccattcacaatgatggacaaactgctaaaactacatatgaaaagaggcatctgacgtggccaattttgtaagaa

SEQ ID NO: 7936 - DNA, 390 bp, Zea mays
  Clone ID: LIB3150-014-Q1-N1-D4
aaagatctcttaatggattttcaggcgctataaattcgagtgataaaggacaggtttcttccagccgtgtccgccatgcattggctatgggtgacatggaatacgtctctgaattactagggaggaaacaccgtcttttgctaatggttaaccaacactgccttcatgaaaagaaaagcattgtactccctaattcttgcatgctgaacatgccaccagctgaaggtctctatgaaaactgcgaccttgttaatggagggtatcttggaccatgtagagtgatcatcaactctgatactatcatcattgagatgaaagatgataacagtttatccctaaatcctattcaagaagttcagttagggattgagtttggatgaagttatatac

SEQ ID NO: 7937 - DNA, 382 bp, Zea mays
  Clone ID: LIB3150-014-Q1-N1-D5
ccgtcatcgatctcgtttcaaatccatccatcctcgtttcctccgtcccgcagcatctcaaccccatggccaagatcaagatcgggatcaatgggttcggcaggatcggaaggctggtggccagggtggccctgcagagtgacgatgtcgagctcgtcgccgtgaacgaccccttcatcagcaccgactacatgacctacatgttcaagtacgacactgtgcacggacagtggaagcaccatgaagtcaaggtgaaggactccaaaacccttctctttggtgagaaggaagttgctgtgtttggctgcaagaaccctgaggagatcccgtggggttcggttggtgctgaatatgttgttgagtctactggtgttttcactga

SEQ ID NO: 7938 - DNA, 328 bp, Zea mays
  Clone ID: LIB3150-014-Q1-N1-D8
cccgatcgacaccatgagggtgttgctcgttgccctcgctgtcctggctctcgctgcgagcgccacctgcacgcatacaagcgggggctgcggctgccagccaccgccgccggttcatctaccgccgccggtgcatctgccacctacggctcacctgccacctacggcgcatctgccaccgccggtccacctgccgacgccggtccacctgtcaccgccgatccatgtgcacgacgccggttcatctgccgccgacccatgccactaccatacttaaccgtcccggacttagatctatacgcagtcacacgcatgcccgtgccaacag

SEQ ID NO: 7939 - DNA, 279 bp, Zea mays
  Clone ID: LIB3150-014-Q1-N1-D9
gacatctctgataagctgcaatggctgctaaagctggtcctgccaagaagggtgatgcctagacccactccttgtaggttgccacggctgcaaagtctggggcagccaacactatgaccaataagatccgtacgtctgtgtcatttcaccgccccacgaccctgaacaatgcttgggaccccaactacccacgaatcagcactaccggaaggaacaagcttgatcagtaccacaatctcacgtacccccttaccacataattagcgatgaagaagattg

SEQ ID NO: 7940 - DNA, 332 bp, Zea mays
  Clone ID: LIB3150-014-Q1-N1-E1
tgctattattcgtgtctatcgtcatggcgggaaggaggcaaagaggaaggaagcgcctggggagctccagacagacagacgaaccgcgcaccatggctacttgaaaacgacagacgaaaaccttagctacggcgcgcgaccgggcagatgaggcgcttctgggcgatgtcgaatgcggcagcaggagggtcaatgactaggcggagaatggaagacgaggaagcagcagcgatataagaggcagatgcagggcacagcggcaggtgcgaagctgatgatgacgaggtcaaaaacatctactacacattggacgaagaaggctcgaaagacta

SEQ ID NO: 7941 - DNA, 57 bp, Zea mays
  Clone ID: LIB3150-014-Q1-N1-E11
atcggatcgagatgggcgcaggagagacagagtgcgcgggcttccatcgatggcctc

SEQ ID NO: 7942 - DNA, 349 bp, Zea mays
  Clone ID: LIB3150-014-Q1-N1-E12
gtcggggccagacaggcatattcagggcagcaaacatgaaactcagttgctggaagccaacctggctataccagccaaccgcccactactgctgcagcaactgacccacctcaaggctcagctccatttggatatgacgcttgaccataccagtctggctatggcacccaaccaccacaggaaggcgtatatggacagggcgcttatgggcagccttctccacagggccagaaacctcctgcattgtcaccttaaggacaggctcagactcctggttgtgctgaagctggatactggcagtatggatacaaccaacctgcttacggagcaccaccagtttaccctggtg

SEQ ID NO: 7943 - DNA, 374 bp, Zea mays
  Clone ID: LIB3150-014-Q1-N1-E2
gccgccgcaagccgtccgccttgcccctcgaaggcttggtcctccttgtatcccgacctcctccgccacagacccgtttccccgctagagttatcgttcctctgcagcgatggcgatcaagcggaccaaggcggagaagaagatcgcgtacgacaagaagctgtgcagcctgctcgatgagtacaccaaggtgctcatcgccctcgccgacaacgtcggctccaagcagctccaagacatccgccggggcctcaggggcgactcggtggtgctcatgggcaagaacacgctcatcatgcgctgcatcaaggtctacgccgagaagaccggcaaccacacctttgacccgctcatggacctgctcgtcggcaacg

SEQ ID NO: 7944 - DNA, 417 bp, Zea mays
  Clone ID: LIB3150-014-Q1-N1-E3
ctccctcagattgccatggcggaccagctcaccgacgaccagatcgccgagttcaaggaagcattcagcctcttcgacaaggacggcgacggctgcatcaccaccaaggaacttggaactgtgatgcgctcgttggggcagaaccctactgaggctgagcttcaggacatgatcaacgaggttgatgctgatggcaatggaaccatcgacttccctgagtttctcaacctgatggcacgcaagatgaaggacaccgactctgaggaggagctcaaggaggccttccgcgtgttcgacaaggaccagaacggcttcatctctgctgctgagcttcgacatgtcatgaccaacctatgtgagaagctgacggacgaggaagtggatgagatgattcgtgaagccgacgtggacggtgat

SEQ ID NO: 7945 - DNA, 334 bp, Zea mays
  unsure at all n locations
  Clone ID: LIB3150-014-Q1-N1-E4
ctcttcaagaggggatcatcagattgggcttattattccttattactccaggcaaggatcggagttgctctgaattgactgaaccatggcggcgacaatggcagtgacgacgatggtgacgaggagcaaggagagctggtcgtcattgcaggtcccggcggtggcattcccttggaagccacgaggtggcaagaccggcggcctcgagttccctcgccgggcgatgttcgccagcgtcggcctcaacgtgtgcccgggcgtcccagcggggcgcgacccgcgggagcccgatcccaatgtcgtncgggcggccgacaactgcgacatcgcgcgc

SEQ ID NO: 7946 - DNA, 136 bp, Zea mays
  Clone ID: LIB3150-014-Q1-N1-E5
ggccaatcgagctccctggattatcgaggatcatggtgcagatctgcacgcagatcgtatttggcctcgtgtagatcatggctctgatcgctggcaccgccgatgtattataaatggtgatgacggacccgaatct

SEQ ID NO: 7947 - DNA, 407 bp, Zea mays
  Clone ID: LIB3150-014-Q1-N1-E6
cccagatccaattcgcgagttcttcctcctctgccgccatggcgctctctgtggagaagacctcgtctggacgggagtacaaggtcaaggatctctcgcaggcggacttcggtcgcctcgagattgagctggccgaggtcgaaatgcccggcctcatggcgtgccgcgccgagttcggcccgtccaagcccttcgccggcgctaggatctcggggtctcttcacatgaccatccagaccgccgtcctcatcgagaccctcaccgcgctcggcgccgaggtccgctggtgctcctgcaacatcttctccacgcatgaccacgccgccgccgccatcgcgcgcgactcggccgccgtgttcgcctggaagggggagacccttgaggagtactggtggtgcaccgagcgc

SEQ ID NO: 7948 - DNA, 409 bp, Zea mays
  unsure at all n locations
  Clone ID: LIB3150-014-Q1-N1-E7
accaaaactgttattgagaagtattgggattgggagctttcaaatgagacacaacctatttggcttcggaaccccaaagaggtttcaactgaggaatacaatgattttttcaagaaaaccttcaatgagtacttgggccctttggcatcatcacacttcactacagagggtgaggtagaatttaggtcaattctttttgttcctgctacaaggaaggaagatgtaactgctgatagtaggaagaccaagaatatcagactatatgttaagcgtgtattcatatcagatgactntgatggagaattgttcccaagatatttgagctttgtgaagggtggttgtgactcaaatgaccttccattgaatgtttctcgtgagattcttcaagaaagtcgaattgttcgtataa

SEQ ID NO: 7949 - DNA, 413 bp, Zea mays
  unsure at all n locations
  Clone ID: LIB3150-014-Q1-N1-E8
ggaggggccagtcaggcatctccagggcagcaaacatcaaacccagctgctggaagccaacctggctataccagccaaccgcccactagtgctgcagcaacttacccacctcaaggttcagctccatctggatatggcgctccaccatcccagtctggctatggcacccaaccaccacagcaaggcggatatggtcagggcgcttatgggcagccttctccacagggccagaaacctcctgcattgtcaccttatggacaggctccgcctcctggttctgctcaagctggttacgggcagtatggttacagccaacctgcttacggtgcaccaccagcttaccctggtgcacccattgcaagccaccanggctatggccagcagcagtcttatggcgatgcttatggtagtgc

SEQ ID NO: 7950 - DNA, 203 bp, Zea mays
  Clone ID: LIB3150-014-Q1-N1-E9
gtacaaggcatgcagtatttgtacgaaccatagcgccagagcaccctcgagaatgggtgtggacctctcgtcccccgggaggtattagatgaccatgcgcgctgcgcccaaatgcgtccatgtgtaccttaggcttctcgtcacagctctacccgtttctatgtaccgacgaccaagcatcttttcaacgctgtcattctgaa

SEQ ID NO: 7951 - DNA, 419 bp, Zea mays
  Clone ID: LIB3150-014-Q1-N1-F1
gcgcctcactggatcgcaccaaccctctcccgctcatcggacggcgatgcaggtcggggacggcggtggggactcggcggacttgcggggccgccaccggatccaggccgagctcaagaagctcgagcaggaggcgcgcttcctcgaggaggaacttgaagagctcgataaagcggataaggtatcatctgcgttgcaagagtttctaatagcaatggaaaaaaaagctgaccctctacttcctgtatctgctggacctgtgaatcagtcctgggataggtggtttgaaggtcctcaagatctgcgcggatgcaaatgctggtttttgtgatcctgggcaatattatcaagagaaacagcaagaggcgattattgctacaattcaagtgtacatcgttttttttgtcccccgcagtata

SEQ ID NO: 7952 - DNA, 428 bp, Zea mays
  Clone ID: LIB3150-014-Q1-N1-F10
gacatgccatcctcccttaccttagatcctatactgtagagccaacccacgcgttcgacgtcgcgttggcggacgcgtgggcgaatgtaagaaattaggtgatactgacaatcctgaagtaagtgagcttttgaaaatggctgtttgctgcctgaaggaaagacctgttctgttcaagtattgtgcagaggaggttgccaacatgaggcaccatgccttattcaggcggtttataagtgctcttactagaggtggacctggagggttcccaagaccaatagaagtgcatgcccatgatcctcttcgctatgtaagcgaaatgcttggttggctacatcaagccctggcatctgaaagagagcttatagttgtcttgcttgatcctgatgcaatgactgacagtggtccaacttttcgacgtcagtctg

SEQ ID NO: 7953 - DNA, 220 bp, Zea mays
  Clone ID: LIB3150-014-Q1-N1-F11
attagctttatctactccagagcgcagaagaacccgatcgacaccatgagggtgttgctcgctgccctcgctctcctggctctcgctgcgagcgccacctgcacgcatacaagcggcggctgcggctgccaaccaccgccgccagttcatgtaccgtcgccggtgcatgtgccacctccgggtcacctgccaccttcggtgcatttgccaccgccggtcc

SEQ ID NO: 7954 - DNA, 263 bp, Zea mays
  Clone ID: LIB3150-014-Q1-N1-F12
acggcgggcgctacgtattccagcgcgcgcacgtacgcaagcgtcccaacgtcgccgttgctggctccgctctctcacgcggctgtcgctgcgagcgcatactacaagcatacaagcggcggctgttgacggctaccaccatctcccgtacatgtaccacgctcggtgcatctgccatctccaattaatgttgctacacaaaagtatttatcacagcatgtccagatggaggctacggaacatctacatacgctcatccatga

SEQ ID NO: 7955 - DNA, 418 bp, Zea mays
  Clone ID: LIB3150-014-Q1-N1-F3
ccggcctcctcttctcttcacccacacgctggtcatagagatgtcggctgcagaggcgaaggcggcggcggtcccggagtctgtgctgcggaagcgcaagcgggaggagcaatgggcagcggacaagaaggagaaggcgctcgcggacaggaagaaggcgctcgagagccgcaagatcatcttcgcccgcgccaagcagtacgccgaggagtaccacgcccaggagaaggagcttgtgcagctcaagcgtgaggcccggttgaagggtgggttctatgtgagcccagaggccaagcttctgtttgtggttcgcatccgtggtatcaatgccatgcaccccaagacccgcaagatcttgcaactcctgcgattgaggcagatcttcaacggtgtcttcctcaagttaacaaggcaacca

SEQ ID NO: 7956 - DNA, 52 bp, Zea mays
  Clone ID: LIB3150-014-Q1-N1-F4
aaaagctttttttcaaaatgtgcatttgcatcctaattgtctttttaagggc

SEQ ID NO: 7957 - DNA, 413 bp, Zea mays
  unsure at all n locations
  Clone ID: LIB3150-014-Q1-N1-F5
tgaagctaatacacagtatggaaggtggtagtactagagaaataaagcaagtttctgacggggacgaaagaagtggctcttccctaagggcagaaaacctgaagggcatgcttagtgacatatcaaatgctgaatctgagtcggatgttgatgacgttggtttaacagttgtccaaaagagtacggaccacagtttactaaccccagttcatgaagaagtcaaggggtcagatacttcgatattttgtagttctagcagtaagcatctcctagatacaactcctggatctcctcangccacccctcaaatggagatgcccattcagttgacttgccgtaaatattttcctacctttgggtggctaaataatttaaggaatgcttacattagtttgcatggtacatccgctgga

SEQ ID NO: 7958 - DNA, 312 bp, Zea mays
  Clone ID: LIB3150-014-Q1-N1-F6
ctttgatcaccttgatctggcgctaggtttttgccacaccggtcttgtccttcgcgaagatgccgaataacaagggtaagggaggcaagaaccggacgcgtgcaaagaacgaggctgacgacaacaagcgcgagctcgtctaaaaggaagacggtcatgagtatgcgcacgtgacccggatgctcgaaaacggtcggtgcgaggacaactgcggggactgtacacgccagctctgccatatccggggcaagatgcacaataacgtgtctatcgcggccggtgacatggtgctcgtgcgacatcttgactacc

SEQ ID NO: 7959 - DNA, 308 bp, Zea mays
  Clone ID: LIB3150-014-Q1-N1-F9
cccaaatgttgttttcctgaaagttgatgtcgatgaaatgaagaccattgctgagcaattcatcgtagaggccatgccaacattcctgttcatgagggagggcgacgtcaaggacagggtcgttggcgcagcaaaggaagagctagcaaggaagcttgaactacacatggcctcgtagatcagtgatgccgtaatgtagtattcgtctaaataagaggacgcctcgcctcaactctgagaaaactagtgcttctgtgatggtaattcgtatgacagagtgccccctttggtggtacttcttcgtatgt

SEQ ID NO: 7960 - DNA, 318 bp, Zea mays
  Clone ID: LIB3150-014-Q1-N1-G1
cgtcgacaagccaacagcccagcacgcaaagggcactgtgccgttacggcgcggcggagccggaaactcccgagtcgcgtgacagtaaacgaaggcacgaacgcgactcttgcatccaactgtcgaagcaaccgaatcggggacaaccgagggcgagggcggccggcatggggatcgtggaggcgtggatgccggagaagcccatccgcaccttactagcccgactcgcccagcgccgggcggcggatgccgacgacttactcgcttccccctctgtcaccacggtcatcgatggcgaaggcggcggcgaccggagca

SEQ ID NO: 7961 - DNA, 305 bp, Zea mays
  Clone ID: LIB3150-014-Q1-N1-G10
acggcttctagctaagcacggggaaggtaaaatgatcaggcggtggagacgtacgcttactcaccggcgacgggacgcggccgaggaatcctactggccggggaccccaagacggacacgatcgcctactgcaccgggcggagcgtcatcattcgccggctcgatgcgcccctcgacacttgggtctaccgtgaccacgcctaccccaccaccgtgggccgcttctacagcaacggcgagtgggtagtctccaccgacgcctactgctgcgtacgagtctggggccgatactgagaccgcgcgct

SEQ ID NO: 7962 - DNA, 255 bp, Zea mays
  Clone ID: LIB3150-014-Q1-N1-G11
agcccccgctctcggattcccgacgacgagctcagagctcctcctctgctcccctgctcggtgttcgacgcaacagctgccgccatgtctgccgccaaccagctcgccgccctcgtcagcaacatgtacgccacgggtttgcttgacgatcagttccagcagctccagatgctccagaacgccagtactcctgacttcgtctccgaggtcgtcacgctcttctgccaggactgcgagcggatcatcggagagctg

SEQ ID NO: 7963 - DNA, 116 bp, Zea mays
  Clone ID: LIB3150-014-Q1-N1-G12
gaggggtattactaaaatggtgaaagcattgggtgaccacctggttctgggtaacttagctaatgcgacactgatcatggggaatcgggatgacactcctgaaacgtccagctcgg

SEQ ID NO: 7964 - DNA, 411 bp, Zea mays
  Clone ID: LIB3150-014-Q1-N1-G2
ctggctcagctctgtgcctctgtcgcccttctccttcctctcggtgtcccctctgtcggtccatgctcgtctgctggctcctgcttgttgcttaggcgttcttggtcaggtgagcagcactggcggcgatggcgaaggagacggagtactacgacgttctcggcgtctgccccgccgcatccgacgaagagatccgcaaggcctactacatcaaggcgagacaggtgcatcctgacaagaatcccaacgacccacacgcggccgagaacttccaggctcttggagaggcttaccaggtgctgagtgaccctctgcagaagaaggcctatgacggctatggcaagaacagcgtatctagggagaacatactggatggtactgtggtgtttacccttcttttcgggagcgagc

SEQ ID NO: 7965 - DNA, 416 bp, Zea mays
  Clone ID: LIB3150-014-Q1-N1-G3
ggcgcacagaagaacgtcgggccctccggcgtcaccatcgccatcgtgcgcaaggacctcatcggcgccgctcagcccatcacgcccgtcatgctcgacttcaagacgcacgccgacaacgcctccctctacaacaccccgccctgcttcgccatctacgtttgcggtctcgtcttcgaggacctgctcgcgcagggcggcctcgccgaggtcgagaagaagaacgcgcgcaaggccggcgccctctacgacaccatcgacgccagcggagggtactacgtctgccccgtcgacaagtccgtgcgctcgcacatgaacgtgcccttcaccctggccaagggcccggacttcgagaagcagttcatcgccgaggcggccaaggagggcatggtgcagctcacggtgcacaggtctgt

SEQ ID NO: 7966 - DNA, 407 bp, Zea mays
  unsure at all n locations
  Clone ID: LIB3150-014-Q1-N1-G4
ctctgaacagcgaagcacccatggccctcgccaccacagccgtctccctccaccttttcctcacccggcccgcctccgtgctccgcgtaggccgcggcctcccatgcctcctcctccgagccacttcgtccacctccgcctccccggacttcaacatcaccttcgcggagcccgcgccgtccgaaaaggccccgtccgcgcagccgctggtcccgtggatcgtccgcggggaggacggcaagccccgcctcagcacctccccgccgccggacgtaatccangccatcgcgctcgcggaggcggaggccaagaaggccgccaagaaggaaaccctcaaaggccagaatggcgcanttgccgccgccgccgcggctgcttccaatgccagcgtcaagggcaaggaaagg

SEQ ID NO: 7967 - DNA, 380 bp, Zea mays
  Clone ID: LIB3150-014-Q1-N1-G5
ggcgaggcaaaagcattgcgaccacagacagcgcgcgcttcaaggcctttttttttgagataacaaggaggagaggaggagatggcggtcacgatcacgtgggtgaaggcgaggcagatcttcgacagccgcggcaaccccaccgtcgaggtggacgtgggccttagcgacggcagctacgcgaggggggccgtacccagcggcgcatccactggaatatatgaggccttggagttgagggatggaggatctgattatcttggcaagggtgttcttaaggctgtcagcaatgtaaataacattattggaccagcaattgttggaaaggaccccactgagcaggttgagattgacaacttcatggtccaacagcttgatgg

SEQ ID NO: 7968 - DNA, 406 bp, Zea mays
  Clone ID: LIB3150-014-Q1-N1-G6
gaacaacagttgctggaagtgaggaaggaactggatggtgcctaccacaccatagcaaatcaggaagaacaggcttctgtgagggagataaagtgggacgcttttaggaagtacacggaggatcgtctggaagctgagcagcagcgtgctgaggagctggaactacaagtagcagctcttaaacaacagctccaagaagctgagatccattataagcaaaaggaagaacaagtttctctaagggaggttcaatgggaagcggatcaaaaccattcgctggatgagcttaacgctcagcgtcagtatgccacagacttggagaaacaaatcgaagatctgacacagaagttaacatcagctgatgcacactacaagcagaaagtgacagaagagagggacaaacttg

SEQ ID NO: 7969 - DNA, 410 bp, Zea mays
  Clone ID: LIB3150-014-Q1-N1-G8
ttcacgggcctgtccaccgagttcgtgtcgcgcgcgtgggatctgccggagcccgacgccgcgaggctggtgtcgagccagccggcctcgggcatcgtcaagctgcccgcctccgctgccgcgctcccggcgccctcgccgcaggaccgcgccggggtggcgctcaactgcctggaggcgccgctggacgtggacatccccggcgggggccgcgtcgtggtgctcaacacggccaacctgccgctggtgcgcgaggtcgggctcggcgccgacctggtccgcatcgacgcccactccatgtgctccccgggcttctcgtgcgactcggcgtaccaggtcacgtacatcgtgcgcggcagcggccgggtgcaggtggtcgggcccgacgggaggcgcgtgctggagacccg

SEQ ID NO: 7970 - DNA, 375 bp, Zea mays
  Clone ID: LIB3150-014-Q1-N1-G9
cggccttggtatattctccacgcgagtctccccatcttcttctcctcgcttgccctaattccgcatccccggctgaggcagcagcggcggcgccggcaccggcaccggctcaccagcgataccgggaagaatggggaggtacagtcccgcgtacagccccccgaggagaggacatggcggcaggggaaggagcccacctcccaggagaggatatggcggtggccgtggtgaccatggctctgtcagcctcctggtccgcaacattccattgagatgcaggcctgatgaactacgtgtccctctcaacggttcgccctgtcaggatgttacctgcagagatatacactgggagcaagagattgggtcgtgagtcgt

SEQ ID NO: 7971 - DNA, 343 bp, Zea mays
  Clone ID: LIB3150-014-Q1-N1-H1
gttctggaacttaaacgcccaccgcgtcatgtacggtatcaggggcagcgccagggtccaggtcgccagcgacaacgggacaacggtgtttgacgaccttctgcgagcggggcatctacttatcggaccacaaggctacctcgatgctaccaaggcgcaaggagaacgttatcattacattgacttagagacgaaacatgacaccatggtcagtcatatatgggcgaagaaatctgatctgagcgacttgctacacgttgctatcgacagctattattacatctgcatgcaagaagctgaacatctcaggaacggaaggaagcctgatcttggtgggcatact

SEQ ID NO: 7972 - DNA, 368 bp, Zea mays
  Clone ID: LIB3150-014-Q1-N1-H10
tgcgccgcctccgagacagccgccgcaaccatggccaccaccgccgccgcgtctaccgcgctcactggcgccactaccgctgcgcccaaggcgaggcgccgggcgcaccttctggccacccgccgcgccctcgccgcgcccatcaggtgctcagcggcgtcacccgccatgccgatggctcccccggccaccccgctccggccgtggggccccaccgagccccgcaagggtgctgacatcctcgtcgagtccctcgagcgctgcggcgtccgcgacgtcttcgcctaccccggcggcgcgtccatggagatccaccaggcactcacccgctcccccggcatcgccaaccacctctttcgtcacgagca

SEQ ID NO: 7973 - DNA, 284 bp, Zea mays
  unsure at all n locations
  Clone ID: LIB3150-014-Q1-N1-H11
ccggagcggaaggtggccatcctgggcgctgcgggcggcatcgggcagccgctctccctcctcatgaagctcaacccgctcgtctcctccctctccctctatgatatcgccgggacccccggcgtcgcggccgacgtctaccacatcaactcccccgccctggtgaaggggttcatgggggacgaccagctcggggaggcgctcgagggctccgacgtcgtcatcatccccgccggngtgcccaggaagccccgcatgactagggacgacctcttaacatcaac

SEQ ID NO: 7974 - DNA, 348 bp, Zea mays
  Clone ID: LIB3150-014-Q1-N1-H2
acacatcgacgctaaaaaccctagagcgaggaggcgtgccaggccagctgtttgcgatgacggcaccggtggacaaggggaagaatgccaagacttatgcctacggcggcgaggagaacgagctaatcgacggggcccttgtcttttccatctagaagcttcagtagattcatgacgagcttgagaaggtttatgtggaagcaagtgacatggttattgaagtggagcagatatacattgagattcgcagaccttgttatctcacgaggggtgacatttttaagaccatccttgactttttgctcacagcgtttttgagccatcctctactaaatgagctttttactg

SEQ ID NO: 7975 - DNA, 399 bp, Zea mays
  unsure at all n locations
  Clone ID: LIB3150-014-Q1-N1-H3
tcgcgagccttggttcagagaaacagggcactgggtttagagcccttcggatctagtattgtcgttcaccggcggcgaccaggccaaaccctatatcctgggcaagatgaggtggctgcaagcggtgcacaccctagcctaccgctccttgaagtcagcggaagcctttcactggctcttctcggcggactccaaggcgccggctcctcgctcccatggcctacaccgtcgactcacccgggagctcatccgacttcaccaagcgtatagagcgcgcctggctaatctcccagcaaccaagaccagtttcttgctcttcctgtcaatctgctggccacgttgagtgcaagtggtgtgcangaacaggcttctttatccttggtgacaacatattgtgtg

SEQ ID NO: 7976 - DNA, 116 bp, Zea mays
  Clone ID: LIB3150-014-Q1-N1-H4
ggttaatcaaccacccatgcatgggggggggcttcttgagtgtctacgtgcagatgttgatggggcttgtcgactacgtggtccgtgtaggccgcatcatttcatgtatgcagata

SEQ ID NO: 7977 - DNA, 334 bp, Zea mays
  Clone ID: LIB3150-014-Q1-N1-H5
gcccacgataccctgcctcctgccgccgcgcctctctcctacccgaagcgaagcgccggaggtgtccctccgtgcgatgcagacgccggcggcgaccatctgcggggcccacggggcagccttcaccccatgcccccgtcgccccacccctcctggaagcctccggaagcctttcactggctcttctcggcggactccaaggcgccggctcctcgctcccatggcctccaccgtcgactcacccgggagctcatccgacttcaccaagcgtatagagcgcgcctggctaatctcccagcaaccaagaccagtttcttgctcttcctgtcaatct

SEQ ID NO: 7978 - DNA, 419 bp, Zea mays
  Clone ID: LIB3150-014-Q1-N1-H6
ccctttcctaccttcttccctccgtctcccagctcgcgcaggcaggcgacacagcgacgctaaaaaccctagagcgaggaggcgtgccaggccagcggtttgcgatgacggcaccggcggacaaggggaagaaggccaagaccgatgccgacggcggcgaggagaacgagcaaatcgacggcgcccttgtcttctccatcgagaagctccaggagattcaggacgagctcgagaaggttaatgaggaagcaagtgacaaggttatggaggtggagcagaaatacagtgagattcgcagacctgtctatctcaagaggggtgacattatcaagaccatcccggacttttggctcacagcgtttttgagccatcctctactaagtgagcttctgactgaagaggatcagaagatattcaag

SEQ ID NO: 7979 - DNA, 364 bp, Zea mays
  Clone ID: LIB3150-014-Q1-N1-H7
cgagccttggttcagagaaacagggcactgggtttagagcccttcggatctagtattgtcgttcaccggcggcgaccaggccaaaccctagaaccttgccaagatgaggtcgttgcgagcggcgcagaccctagtctcccgttcccttttctcagcgcgccatctaagcggcgcatcctcccccgccacggccgccgccgcgggcgcgcggtggtgcgcagcgccggcgccaccgccccgttcgccgcttccatactcgagggtgatgcctgccggggttgccggcgcagaatccttatcccttaccttcactactgtagcggctgctgatgccaaggccaatgatcgaccgcaaccggatctt

SEQ ID NO: 7980 - DNA, 397 bp, Zea mays
  Clone ID: LIB3150-014-Q1-N1-H8
atcccgtcgcatcccatcccactaccacccatctcgtcgtccgccgattcgatccggttcttccaacccaggggcagtgatggcgacgaagaggagcgtgggcaccctcggcgaggcggatctgaaggggaagaaggtgttcgtgcgcgccgacctcaacgtcccgctcgacgatgcccagaagatcaccgacgacacccgcatccgcgcctccgtccccaccatcaagttcctcctcgagaagggcgccaaggtcatcctcgccagccacctgggtcgtccaaaaggtgtcaccccaaagtacagcttgaagcctcttgttccacgcttgtctgagctccttggagttgaagtcgtgatggccaatgattgcattggtgaagaagttgagaagttg

SEQ ID NO: 7981 - DNA, 170 bp, Zea mays
  Clone ID: LIB3150-014-Q1-N1-H9
acgctcactctccgctggtcgctcactcttgcagcttcacccttcactcaggcttagtctcttattaactctaggctctagctagccgcgccactccttcgtgtggccataagccttctgatcgacaccaatggccactgacgaggtccagaccccgtccgtcgtggcgg

SEQ ID NO: 7982 - DNA, 302 bp, Zea mays
  Clone ID: LIB3150-015-Q1-N1-A1
ggcgttcgcctgagcccgccgccaggagagtgcatgagagtttcgagaagctgaaatggctcctaaagctgctcctgccaagaagggtgatgccaagacccaggccttgaatgttgccaacgctgtgaagtctgggtcacgtaaaaaagaccaagaagatccgcacgtccgtgacatttcaccgccccaagaccctgaaaaaggctagtgaccccaaatgcccaagaatcaacactaccggaaggaacaagcttgatcagtaccaaattctcaagtatcccctcaccacagaatcggcgatg

SEQ ID NO: 7983 - DNA, 272 bp, Zea mays
  Clone ID: LIB3150-015-Q1-N1-A12
acgcaactgatgtgagcactagggttggaggaacgagtaagatacctggctgacgaatactctgtgagggggcatgtgacgaacaaatcgtatatctatagtatcggcgtcttgctactgtaaattgatgctgatatatgtaactacaacaatatattgcctgactgagacaataatgttgtcgagaagacatgggcatactacctgcagaaaaagctagataaggtcataaacgccgaaccatggtaggacctgaactgtgaggatgcatg

SEQ ID NO: 7984 - DNA, 294 bp, Zea mays
  Clone ID: LIB3150-015-Q1-N1-A2
atcgatttgtagtggggcatgtaagcttgtgggagaggaaagcagcaggagacgaaggtagtagacaaggaaaagtatgccaaagaaaatgagagaacaaccttcttagcttctcctccagtctctctccaccaccgctctatctcctcggtaggaagaagagcaagcaagagaggagcaagctagctagcggtacaagggagagtgagcggcgaatgggacggacgaattgaagaacactgccagtccgatcgagcgggtggtgccgccaggataaatcgggaggtatatgat

SEQ ID NO: 7985 - DNA, 352 bp, Zea mays
  Clone ID: LIB3150-015-Q1-N1-A3
acggccaaaccctagccgccgtcagcttcggcgacggcatggtcgccgtcaaccgacccctcgtatacgtgaaagccctacaaggcgacatggtaaccgacgcccccagcatctccttaccgcccgttttaggggcgccgttccgccccgacgtgatcaggttcacccacaagctgatgtcctgcaacaagcgccaaccctacacagtgtcccgacgggcccgccaccatacatcagccgagtcctggggtaccagccgcgccgtgtctcatattccacgcgtacgcatgtgcggcacccaccgtgccggccagggagcgttctggaacatagtgccgggcgggcgcatgtt

SEQ ID NO: 7986 - DNA, 260 bp, Zea mays
  Clone ID: LIB3150-015-Q1-N1-A4
gctcgactcacgcaatcagcaagaagcggaagttcgtggcggatggcgtgttcttcgcggagctgaatgagatgctgacccgcgagctcgcggaggatggctactccggcgtcgaggtccgcgtcacccccatgcgcaccgagatcatcatccgtgccacccgcactcagaacgttctccgcgagaatggccggaagatcaaggagctgacttctgtggttcagaagcgcttcaacttcccggagggtggtgttgagctc

SEQ ID NO: 7987 - DNA, 390 bp, Zea mays
  Clone ID: LIB3150-015-Q1-N1-A5
ctaaccgcctgcctgccttttcttctctcgtccaccctaggtctcagtctctgctcgcgctcttgtggagctactaggtgaccgtcgcgaccgccctacgccacgtgctcgatccagcctcgtcggcttcttcgcacccgtcaccggcggtcagcacccaccaggttcataaatggcagagacggtgttcaccccctctttggaaggtatgaagcatgtgaaggcagtaaacggagtcattctcaccaagcccttccttgatgtctgcaagcaaatcttgcctgtcctggataaatttggagctgctatggcaattgtaaagaatgatatcagcggcaatatcacacggctggaaaacaagtattcttcagatccatcaaagtatggaca

SEQ ID NO: 7988 - DNA, 286 bp, Zea mays
  Clone ID: LIB3150-015-Q1-N1-A6
cccctatccacataagtttccggttggcatctctgtagtggaatacattgagaagtacaagaccttgaacaatggggagaagcttacagatgcgactgaatgtttagctgggaggatcatgaacaagagaacatcatcatctaagctattcttttatgatctttatggtggcggcatgaaggctcaagtgatggctgatgccaggacctcagagctggatgaagctgaattctctaagtaccactcgagtgtgaagcgaggtgatattgatggcatatgtggttat

SEQ ID NO: 7989 - DNA, 256 bp, Zea mays
  Clone ID: LIB3150-015-Q1-N1-A8
accccgtcatcgatctcgtttcaaatccatccatcctcgtttgctccgtcccgcagcatctcaaccccatggccaagatcaagatcgggatcaatgggttcggctggatcggaaggctggtggccagggtggccctgcagagtgacgatgtcgagctcgtcgccgtgaacgaccccttcatcagcaccgactacatgacctacatgttcaagtacgacactgtgcacggacagtggaagcaccatgaagtcaagtg

SEQ ID NO: 7990 - DNA, 271 bp, Zea mays
  Clone ID: LIB3150-015-Q1-N1-A9
gttcttcgtctgaaaaagcctcctggatgcaccgggagaggtcggagaggctgaactgtctcctaactcttctcttgtcaagatggtagatgctaaatctcattctgaggaagtcgccaatggtgaaaaatgtggctcactctaaaagaccaacaacatccgcacgtgcgggacatgggaacgaatggagatcctgctgaaggatcgggatcaccaatgaccattaataaggattatcggactgaacaagcttgatcagcactaaatagtc

SEQ ID NO: 7991 - DNA, 314 bp, Zea mays
  Clone ID: LIB3150-015-Q1-N1-B1
ggtctttgacggtgagcgcagtctgaccaaggactgccagcttctcgacaagttcaaccttaacagcattgctccagctccaaagggcacaccccagatcgaggtgaccttcgatgtggacgccaacaatttcctgaacgtgaaagcgagcgacaagatcccgcgcaactcacataagatcacgatcacaaactagaaagggctgctgacccacgatgagatcgaccgcatggtgccggaggcaacagacttcaccaaggacgacaagtcagtgatggagcggatcgacacccgcaaccaaatagaaacgtaca

SEQ ID NO: 7992 - DNA, 303 bp, Zea mays
  Clone ID: LIB3150-015-Q1-N1-B10
ctcacggcaacctgaagccgactaacagattcctgactggtcctgatctcactccaaagctggtggattacggcctgcacaggttcatgactccaagtggcgccgccgagcagatactgaacctaggagcgctagggtaccgagcaccggagctggcgaacgcggggaaggcggcaccgacgttcaaggcggacgtgtacgctttcggggtggtggtcatggagatgctgacgcggaggagcgcgtgagacatcatctcggggcagtccggcgcggtcgacctgaccgactgggtccagatgt

SEQ ID NO: 7993 - DNA, 440 bp, Zea mays
  Clone ID: LIB3150-015-Q1-N1-B12
gccgcccaaatcacagccaccgccgccgtggcaggctccagccgccctctcgtctccgtgaaagccctggagggcgacatggtcacggacgcccccggcatcgccttgccgcccgtcttcggtgcgccgatccgcccggacgtggtccgcttcacccacaagctgctgtcctgcaacaagcgccagccttacgcagtctcccgccgcgctggccaccagacgtcggccgagtcctggggtacgggccgcgctgtgtcccgtatcccccgcgtccccggcggcggcacccaccgcgccggccagggagcattcggcaacatgtgccgcggcggacgcatgttcgcgcccaccaagatctggcgcaagtggcaccgccgcgtcaacgtcaacctccgccgcgtcgccgtcgcctcggcgctcgccgccaccgccgtcccggc

SEQ ID NO: 7994 - DNA, 283 bp, Zea mays
  Clone ID: LIB3150-015-Q1-N1-B2
ccgcaagacccacaggggtctccgcaaagttgcttgtatcggtgcatggcatccggctagggtctcctatacggttgcccgtgctggtcagaatgggtaccaccaccgcactgagatgaacaagaaggtgtacaagatcggcaaggctggacaagagacccacgatgcctccacagagtttgacaggactgagaaggacatcactcccatgggtggcttcccccattatggtatcgtgaagggtgactacctgatgatcaagggctgctgtgttggaccaaaa

SEQ ID NO: 7995 - DNA, 395 bp, Zea mays
  Clone ID: LIB3150-015-Q1-N1-B4
cgcatccgcagcctctcgagctctactccatcccctcgatctcgaagcgcagcagcagcagtcaggcggccatggacgccagcgcagcatgagccggcgggaaggcgaagaagggcgcggccgggcgcaaggccggcgggccgaggaagaagtcggtgacgaggtccgtcaaggccgggctgcagttccccgtcggccgcatcgggcggtatctgaagaagggccggtacgcgcagcgcgtcggcacgggcgcccccgtctacctggccgccgtcctcgagtacctggccgccgaggtgctggagctggccggcaacgctgccaaggacaacaagaagacccgcatcatcccgcgccacgtgctcctggccattcgcaacgacgaggaagctcgc

SEQ ID NO: 7996 - DNA, 301 bp, Zea mays
  Clone ID: LIB3150-015-Q1-N1-B5
cccagcacgaccaaaacccataacctgagaatggcacacttccttcgcggcaaggccgccaccgccgtcaccgggtcggcggcgctgcgcgcgtcgtgtccgacgccatggctgcggaccgcctcctcgtcgtaccaccacacgatccaggctgtaccgcgggagacagccggcccgcgcgccgaggcgcgcgagcgccgtcactgccgagtcccggcggtgctgctcactctcgatgtcgccgcgccagggaacggtattgcccaccgggacctccttaccgtcgacaggaggcagctcg

SEQ ID NO: 7997 - DNA, 397 bp, Zea mays
  Clone ID: LIB3150-015-Q1-N1-B6
gtcttctgtgctattgtttctcacccggctgtcaaccttgtgtctttcctgaacaatgccaagggagctacagtgggagatgctgttaagaagcttggtctctggggtctcttcactagaggacttcctcttcgcatcgtcatgattggtacccttactggtgctcagtggggaatttacgatgcattcaaagtgatggttggactcccaacaacgggaggtgtttcacctgccccagcagcagacgctgaattgaaagccagtgcttgatttttttttctgtgttccctgagatcatatttggaggagtggaattgtatcagactgtcgagagcttagttcccgaatcttttttaatcttaacggaagatttgtccgacatccttctgatgagagg

SEQ ID NO: 7998 - DNA, 396 bp, Zea mays
  unsure at all n locations
  Clone ID: LIB3150-015-Q1-N1-B8
ctcctcccggcttcctcacacggcactccagccgctagccctcactcaaccagacaaccagtacaccaccgccaccaagcccgggccgaataactctgccgggcaaccgccgcccttcgccggcaaagaacgcccaccagatccaccccggcctgctatggagtccgcggtgaacccgaaggcgtacccgctggctgatgcgcagctgacgatgggtatcctcgatatcatccagcaggccgccaactacaagcagctcaagaagggagcgaacgaagcgacgaaaaccctgaatagggggatatcggagttcgttgtgatggcggcggacacggagcctctcgagatcctgctccacctccncttgttagccgaggataagaacgtnccatatgt

SEQ ID NO: 7999 - DNA, 444 bp, Zea mays
  unsure at all n locations
  Clone ID: LIB3150-015-Q1-N1-C11
cccaacccaacccaacccaccactgcctccctcggcgttccccagtccccaccccgaccggctggtcctcctcctttccccgcgccatcctcgaggcatcgccggcgccgcaacttcgttcaggaggaagcccgcacccggccccgatccgatggccaacagcaacctcccgcggcgtatcatcaaggagacgcagcgactgctcagcgagccagcgccggggatcagcgcgtcgccctcggaggagaacatgcgctacttcaacgttatgatccttgggccggcgcagtcgccctatgaaggtggagtttttaagcttgaactctntttacctgaggaatatcccatggctgccccaaaggttaggtttctgaccaagatttatcatcccaacattgacaagcttggtaggatatgcctcgacattctcaaggacaaatggag

SEQ ID NO: 8000 - DNA, 326 bp, Zea mays
  Clone ID: LIB3150-015-Q1-N1-C12
ggttctccctcgctccagatctccctgggcagccgggcagggaccccttcacagcgcgggatatggcttatcaggatgccccactagcagttgaggctccaaccccagttctcggagagccaatggacttgatgactgcgctccagctggtagatgaagaagtcaagtgctcatgatggacttgtgaaagacctacgcgaggctgacaaagccattgacaagcatgctgctcatctttgcgtacttgctgatgacttagaccagccatattatgttaagctcgtgacggcgctctttgctgaacacaatgttcaccttggcactgt

SEQ ID NO: 8001 - DNA, 285 bp, Zea mays
  Clone ID: LIB3150-015-Q1-N1-C3
ttcaagctatgtttccttttggcttactgcgcaagaagggtaacgcgcggacggtgatcattgctaataggcttctcccgtgtttgaaccgggtgctggtctagaaacttgtacatgccattatgactcgactactgatcctactcccaggaacatgcaagcagctgaatgctgctcaagtggtggctgttggccatgatgatcgccacactgctggcaatctaatcccacttgctcttaatgaaggtgacactgtcctcctgcctcattatgatcgcactgaac

SEQ ID NO: 8002 - DNA, 127 bp, Zea mays
  Clone ID: LIB3150-015-Q1-N1-C5
tcccgagtcaggagaggtcaagggggctacggctgagctcccccttctcgtccgcgtctccatcgccgcctccgcttatctcccatggctctcgcccgtcgctgtggatcgaggcagtctatgcacc

SEQ ID NO: 8003 - DNA, 204 bp, Zea mays
  Clone ID: LIB3150-015-Q1-N1-C6
ttactcccaagtgccgtcttatatggggccggggactttctaaaacccttacccctctacctctcaagatggctttacctcccacggctcccgccgcatccggaggcccaagctactctgcgtcctgaccgcctccatcggcgcaagtggtgggcaaaacctcattgcattattactacaacatgctgcaccagtcgcctgaac

SEQ ID NO: 8004 - DNA, 373 bp, Zea mays
  Clone ID: LIB3150-015-Q1-N1-C7
caaacaagtagcgacagctcgacaaagatttgtgagagtgatccggcgctgagaagagatggctaagatcgccgcagccgccgcggcggcggcggcgctgtgcttcgcggccctggtggccgtggccgtctgccaaggcgaggtcgagcggcagaggctcagggacctgcagtgctggcaggaggtccaggagagcccgctcgacgcgtgccgtcaggtcctcgaccggcagctaaccggcggcggcgtcggcggcccgttccggtggggcaccgggctccggatgcggtgctgccagcagctccaggacgtgagccgcgagtgccgctgcgccgccatccggagcatggtcaggggctacgaggaggccatg

SEQ ID NO: 8005 - DNA, 276 bp, Zea mays
  Clone ID: LIB3150-015-Q1-N1-C8
tggaagtgtcgggctagttagtacgcgttgcgcgcattatgaaccagttatcaaatcattcactttccctagtcgcagtcgaagtgcatgaaacgcacaaacgatttgaagtactcacagctggactcaaagcacacaactatgccatgtgccatcaactgctacacctgctgctggaacagatctactgcgctacctagttcatcgaacatcttcagcactgccaccgcatgatactaatgcccacactagccattcaacaaatagtgtgacacc

SEQ ID NO: 8006 - DNA, 277 bp, Zea mays
  Clone ID: LIB3150-015-Q1-N1-D1
ctcgccttgcgcttcctcgccgccccagttccccacccgctgctcacccacccgtcccctcctgctcgcccatggctcccatcgctgtcggcgacgccctccccgacggccagctcgggtggttcgacgagaacgaccagctgcagcaggtctccgtccacgcgctcgccgccggcaagaaggtcatcctcttcggcgtccccggcgccttcaccccgacctgcatcaaccagcatgtgccaggcttcatcacacatgctgagcagctcatagccaa

SEQ ID NO: 8007 - DNA, 286 bp, Zea mays
  Clone ID: LIB3150-015-Q1-N1-D2
gaacctccgccagcgtctgccgctgtagtccttgatacccctgatgaatcattaatcagttacttcagtggcgctgctagcattggaagtgtatcaaacgcacaaccgtctggaagagtgcacccatctactgagagcatcccatcttcccatgtgccattgatcgttccatctgctgcttcaacacatcaactgcccccttcagtagcttcaacagcttcaccattgcccgtccatggaactaatgcccacactagccggccaacaaatcttgtgacaccagatt

SEQ ID NO: 8008 - DNA, 295 bp, Zea mays
  Clone ID: LIB3150-015-Q1-N1-D3
aaaaagttgaaaatgcacttcagaaaggtactgatttctctaatcaaggttccatcctggaggaggatccatagtaccagcttattgttgactgcaatgctttatcagtagatattgagaatgaaataatcataatccataatttcataccggacacgtataggctgaagtttcctgaactggagtcccttgctgatcacccaatcgattatgcccgtgttgtcaagaagattggaaacgagatggatttaacactagtagatctggaaggacttttaccttctgcaattataat

SEQ ID NO: 8009 - DNA, 412 bp, Zea mays
  Clone ID: LIB3150-015-Q1-N1-D4
gctggtttctactgaggctgaggcccagcgactggtgcttgtgtacatagggggggacaaagggtaagagcctgcagtaacagagattggctctttctggtacttgcaatttctatcccttcaactctttcttccgcccccgtgtttcaggaataatgttctggagatgaagaaacgcttgcgtgggcgtgcctgcaggcacgcgtgtagtagctgcggtattagtatatatgcttagatgttcagtcactttctttaagtacaatttggcgctggacgtgtaccttattttactatgtatccgtgacaacagctatgtgtctgctccttttattttcttggctttgcttcaaaaaaaatgctctgaacattgcgagtttgttctttgtagacaatatatatatgtgtgtgt

SEQ ID NO: 8010 - DNA, 199 bp, Zea mays
  Clone ID: LIB3150-015-Q1-N1-D5
aaagcctaaaccccaatcgcacaggagagaccgagagagaggttttccatccatggctcccggcgtcgcttccgtgctggtcccgcaggagcccgtcctcctcaaggacatcctcgcctcaccgtccccctgcgggaacaccgctgtctccgtccgccacctcttcggcaacggagtcgcgccgccacgctcctcggac

SEQ ID NO: 8011 - DNA, 442 bp, Zea mays
  unsure at all n locations
  Clone ID: LIB3150-015-Q1-N1-D9
ccggaaactcaggncagaaaaacatggtgacagcccttttcagtttcgaccctaaccaaaacacgggcatggtggtgcanaaatgtaggataggtgccacttctcatttacagcctgttcgtaaaaacttcccaacatatcttggcaggccctggaaggagtactcgaggactgtggtaatgcaatcaacaatcagtgacgtgattcaacctgctggttggcacgagtggagcgggagtttcgccctgaaaacactgttttatgccgagtaccagaacaccggggctggtgcctcaacttctgcgagagtgaaatggggagggtacaaggtgatcactagtgcaagtgaatctcatgcttttactcctggcaggttcattgctggaggaagttggttaagctctacaagctttcctttcgcttttgggttgtaataatttta

SEQ ID NO: 8012 - DNA, 427 bp, Zea mays
  unsure at all n locations
  Clone ID: LIB3150-015-Q1-N1-E1
gttttcgcgccgccgccgcatccgcaacaatgccgtcgcacaagaccttccggatcaagaagaagctggcgaagaagatgcgccagaaccgccccatcccctactggatccgcatgcgcactgacaataccatcaggtacaacgccaagcgcaggcactggcgccgcaccaagctcggcttctgagcgtcgggattggccggctgctgcgtcggaaggctagggtctaagagctatcttctgttttatcattgtctctgtttctgtaagctagcaagtgatgctgtgatgcttttattaagattctgatgagtggggacgttaagagaaaattggcagtactgtgttgtaccccaagattccttgcagcattgctatgctaagtaaccgaacccttatctcttttttaaaaaaaagatgggnggggg

SEQ ID NO: 8013 - DNA, 164 bp, Zea mays
  Clone ID: LIB3150-015-Q1-N1-E10
ttacccaggccacttatcactccaaaaaccactcacgtacatgattgtagtattctaacacaccatctacattgatcatacatactcatttttaaaaactactgttacaatccactcctctgatgacatgaatattcaccatcattactaaaacattccttacc

SEQ ID NO: 8014 - DNA, 280 bp, Zea mays
  Clone ID: LIB3150-015-Q1-N1-E11
ccaacttcatacttcgagcggcggggaactatcccatagcgatctcatactccaccaacgatttcaagaagccatccgagggcttctaccacatcaaccttaacgcaaatggacaccatggacatctgttgttcttcatcattatgaagtactcccaactaaccaaccattttaacgcttatagcaaccttcactctatggtcatgaatgccaaatccatcctgatccattgccacaaccttaacggcaaccatacccccacttacctccatattcaata

SEQ ID NO: 8015 - DNA, 317 bp, Zea mays
  Clone ID: LIB3150-015-Q1-N1-E2
gagcaacggtcgcagatgaatttgtcaagaggcggaaagagaccgaatggttcgttgagggggattttgatacatatgtatcccatattagggagccacatgtgtggggaggcgagccagaattgttcatggcgtcccatgttcttcagatgccaataacggtttacatgcgcgacgaggatgctggcggtctgatagcaatcgcagagtatggccagcagtatggtaaagaagacccaatccaagtcctgtatcatggttttggccattacgacgctctacagatcccagcaaaggttggatcgaagaggaaactg

SEQ ID NO: 8016 - DNA, 287 bp, Zea mays
  Clone ID: LIB3150-015-Q1-N1-E3
gacccacccgcccggtggcttctgccaatatggtgagagtcacatactgccgaccacaccgagccgccgccacgcatcaactccagattatcaaacaacatggccggactcgacacccacctctttacctcgcagtccgtgaactagggacaccctgacaagctctgctacccgatctgaaatgctgctctggacagctcgccttgctgaggaccccgacagcaatgttgattgtgagacctgcaccaagaccaacatggtcatggtctttggtgagatcaccacca

SEQ ID NO: 8017 - DNA, 225 bp, Zea mays
  Clone ID: LIB3150-015-Q1-N1-E4
cagagcctgagggttaatccaagaccaggttcggaaatgcaccaggacggagaatggtcttgcaacattatgtagagagcggagcatagttacttgagcttgatggatatgctctcgattcagtactatgagatggcctgaattctctcaaaggtggctaagactgcaaacgtgctagagcactatgctggagaaagagtgcgtctaaatgttgattactacatt

SEQ ID NO: 8018 - DNA, 172 bp, Zea mays
  Clone ID: LIB3150-015-Q1-N1-E5
gacgaggacgcaccggccgccggcggcagcgccgctggccccaagatcgaggaggtcgactaagtgcttccacctgtggtcgtgttatcgtggtagaagttgaattgcttctgtttctgtgggaacagtgaactctgaggttgcggatgatctgatgatacttctctaattg

SEQ ID NO: 8019 - DNA, 232 bp, Zea mays
  Clone ID: LIB3150-015-Q1-N1-E6
ccctatttgacggttagtcacagccgatgaggggaaacgcacaaggagcgagaacaacactctacactgttgccgagaatcgaaatggttaccttgagcttgatgtcaatgctagcctgcaggcactatcaaatgcccataattctctcaatggttcatagcgactcatacgtggtacttctcatgactgatctacccatactgtgatatatatggtactttactggaatct

SEQ ID NO: 8020 - DNA, 319 bp, Zea mays
  Clone ID: LIB3150-015-Q1-N1-E7
cccacgcgtccggctctggggaacatcccgaccattgccttttgtgacactgactctcccatgcggtacgtcgatatcggcatcccagcgaacaacaaggggaggaacagcattggatgtctgttctggcttctgtccaggatggttctgcaaatgaggggcactatccttcctgggcacaagtgggaagtcatggtcgatctgttcttctacagagacccagaggaagcaaaggagcaggaggaggaagctgccgcggcccctgagtttgccgcaatcactgattaccaaggaactgatcagttgggtggtgatcagt

SEQ ID NO: 8021 - DNA, 336 bp, Zea mays
  Clone ID: LIB3150-015-Q1-N1-E8
tggtactgcacgggaatgttactgtcacacgtcaccttggtgccggcacattggtggcacatgaaggggtggctattgagatagctgaagctgtcattggagctctgaaaggggagcttgcagcttctgcagtgaacgcgccgatggttcctgctgaggtgctgtcagagcttgcaccttttgttgtgctcgcagaaaagcttgtgcgcttggctgtgcaactagttgctggtggtggtggtatcaaatctgtgaaagtgacctatgcatctgcgcgggcccctgatgatcttgacacgagacttcttcgtgcaatgatcaccaaaggattgattg

SEQ ID NO: 8022 - DNA, 190 bp, Zea mays
  Clone ID: LIB3150-015-Q1-N1-E9
aatcctacaccaacaccttccagattatacgcaaggcattctacctcaccaccaacgacacacacaagcgccagttacttcttttgacggacactgacatgccctactgatacctacatctccaccacctacgaaaacacatacctaaccacaatttcataatttacgaatacatctggagccatcacga

SEQ ID NO: 8023 - DNA, 324 bp, Zea mays
  Clone ID: LIB3150-015-Q1-N1-F10
cactctatactcaaaccaaatttccattttaaaacataacaacctttaagaccgctaccgtgtgcccattacatctttgacaaccactccccatcctaatttaaaaaattcactatataactcccacatcaaaaataattttgatatcccctccacaaaagacaacccatacttctctactcacctctctgcacataacgcccaaaaggagacacataacactcactacttgcagttttagcacacactaaaagccccactaattgacaagtttctgaccattctttgctggaactcttttaacagataaatcaccctctatca

SEQ ID NO: 8024 - DNA, 247 bp, Zea mays
  Clone ID: LIB3150-015-Q1-N1-F11
atccattaaccttttctattatcataatctttttccatcttcgcttccatcaccatttagacccgttttcgtataaattcaaccttatctcaatctccgatatcaaacttcatcaaatccactatgccactcctttgatacgacgaccatctactctttctacaactgtaactctctatccacttttttctccaacctatcctttaacttatcacaaagatataattgtttataccctattctaccc

SEQ ID NO: 8025 - DNA, 388 bp, Zea mays
  unsure at all n locations
  Clone ID: LIB3150-015-Q1-N1-F12
ccatcttaatttttattctcatggataaccactttccataccgttacctgttccatttcatgtctaacaaccactcccnatcctaatctgaaaagttcactattaaatcccacatcaaaattaattttgatatcctctccagaagattcaacccatacttctttattcacctctctgtccataatccccaaatagagacacataacactcgttgctctaatttttatcatacactaaaagcccaatttatctataatttgtttaccatttttttttgcatttttttcaataattaaatcaccctctataaatcaatgtacattcctaactcgtttaaaaaaatatcttcttaaatgctctatttttcttccacatttccaattttttt

SEQ ID NO: 8026 - DNA, 259 bp, Zea mays
  unsure at all n locations
  Clone ID: LIB3150-015-Q1-N1-F2
ctttgtgtgccgcaacaacggcggcgagtggaccgccaagcagcactccggcgagatcgaggcttccgccgctaccccatacgagctgcagcgccgcctcgtcgctgccgcctccgcggccgactctgcctacggcgtccagtcgtccttctccatggtcacccccagctccgccgtgttccaggtgatcgtcggtgctgtcggtggtggtgcaatgatggtgagcggaggtggcggcggcngtgctgctgcatctggt

SEQ ID NO: 8027 - DNA, 266 bp, Zea mays
  Clone ID: LIB3150-015-Q1-N1-F3
aaaaagttgaaaatgcacttcagaaaggtactgatttctctaatcaaggttccatcctggaggaggatccagagtaccatcttattgttgactgcaatgctttatcagtagatattgagaatgaaataatcataatccataatttcatacgggacaagtataggttgaagtttcctgaactggagtcccttgttcatcacccaatcgattatgcccgtgttgtcaagaagattgcaaacgagatggatttaacactagtaaatctg

SEQ ID NO: 8028 - DNA, 314 bp, Zea mays
  Clone ID: LIB3150-015-Q1-N1-F4
agaggaagccgcggtagcactggtagcggcagcagtaagggggagatgtcgtcggcgttcagcggcgatgagaccgcccctttcttcggcttccttggcgcctccgctgcgctcgtcttctcatgcatgggggcggcgtacgggacagccaagagtggcgtcggcgtggcgtccatgggtgtcatgcgcccagagctcgtcatgaagtccatcgtgcccgtggtcatggctggtgtgctcggtatctacagcctcatcatcgccgtcatcatcagcactgggatcaaccccaaggccaagccatactacctctt

SEQ ID NO: 8029 - DNA, 175 bp, Zea mays
  Clone ID: LIB3150-015-Q1-N1-F5
tacgagtacaccccaatcactgacgatagggcggatgtgcggaagatcgatgatttctacttcaatctggcccctactatcaagtgactatcccccactcactaaccacataggccgccggatgaacagcaagtgtgaccacatcggccagagctagcataacattttgtacagc

SEQ ID NO: 8030 - DNA, 171 bp, Zea mays
  Clone ID: LIB3150-015-Q1-N1-F6
gctgacgggcaaccgctcctcactggggcggcagcgatggtgcatgttaacatctaccactcctattgtaacaccctctatatgccgtggcgtgcgcccgataaggagcgcctagattactatatgtaccgcgtgtatgagtacttcctgaagtgcaagcgcaagtccttc

SEQ ID NO: 8031 - DNA, 173 bp, Zea mays
  Clone ID: LIB3150-015-Q1-N1-F9
ccttatctctatttccgatctcaaacttcatcaaatgctctatgccacttcttttataggaggaccatctattcttgctacagctgtagctctctatgcactttatgctacaatctatcctgtcacttatgacaaggatataggtgattataccctattctacccacgtctta

SEQ ID NO: 8032 - DNA, 208 bp, Zea mays
  Clone ID: LIB3150-015-Q1-N1-G1
tgccaaactcactgatgagattggacagaaagtgcagattgtaggagatgatcttctcgttaccaaccccaccagggtcgccaaggccatcaatgagaagacctgcaatgctctcctcttgaaggtgaaccaaatcgggtctgtgaccgagagtatcgaagctgtcaggatgtccaagcgcgccggatggggagtgatggcaagccac

SEQ ID NO: 8033 - DNA, 310 bp, Zea mays
  Clone ID: LIB3150-015-Q1-N1-G11
gatcatccccaagaagaaccgcaatgagatctgcgagtacctcttcaaggagggcgtgctgtatgccaagaaggactacaacctggcgaagcacccgcagatcgatgtgcccaacctccaggtgatcaagctcatgcagagctttaagtccaaggagtatgttagggagaccttctcctggcagtactactactggtatctcaccaacgatggcattgagcacctacgcaactacctgaacctcccgtctgagatcgtgcctgccacgctcaagaagtctgccaagccacctggccgcccatttggctct

SEQ ID NO: 8034 - DNA, 425 bp, Zea mays
  Clone ID: LIB3150-015-Q1-N1-G12
agcgaggcgacgccgaggcacctaatggccggcgaagggaaatggcgacgcggccaggggatctgatctggcagattgtgaggaagaacaactccttcctggtgaagcagtttggcaacggcaatgccaaggtgcagttcaccaaggagcccaacaacctctacaatttacactcctacaagtactctggcttagcaaacaagaaaactgtaacgatccagccagctgctggaaaggactcggctgtggtgctatctactaccaagaccaagaagcataacacacccgcgaagctcagccacatgtctgtgatgcgcaaggagttccgcaagatggccaaggctgtgaaaaaccaggttggcgacaactattacaggcctgatctgaccaagtcggcccttggtaggctgagctctgtgtaccgc

SEQ ID NO: 8035 - DNA, 221 bp, Zea mays
  Clone ID: LIB3150-015-Q1-N1-G2
cgagaacagtaacaatgcttattgaatccagctacttgcttattggtgggatcaaatcaataccaacccaaccgggctggcccccgccatatatcagaacacctcgctgtgcgcgtcccatcgaatgccaaccaaatgccgtctgtgaccggacgtatccatgctgataggatgtcccagcgcgccaaatggggagcgacacaatgccacacgacttacga

SEQ ID NO: 8036 - DNA, 330 bp, Zea mays
  Clone ID: LIB3150-015-Q1-N1-G3
cgccgcccccagatccggcaccgcccgctgctcgaacccgcaccccacgcccgcaggccgggaccggtgggcgcgcgccgggcagtaggagggagaggaagggcggcatggcggcgccgccggcgagggcccggtccgactacgactaccttatcaagcttcttctcattggggatagcggtgttggcaagagttgcctcctgttgcggttctctgatggttccttcactacaagctttattaccacaattggtattgactttaagatacggacaatagaattggatggtaagcgtataaagctacagatttggatacagcgggccaaaa

SEQ ID NO: 8037 - DNA, 398 bp, Zea mays
  Clone ID: LIB3150-015-Q1-N1-G4
gctagccccaacgccgccgaccgccgctcggggatcgcctgctttcctctgccgaccacatctacaccgcaccaccggtccttccaagtgagcttcaaccccctgcgtgtagatggagagggttctcaaggatgacgccgtccaggagaagggcgagcgcgccagaatggcatcgtttgttggggccatggcaatctcggatttggcgaagaccacattgggtccaaaaggaatggacaagatcctgcaatcaactggtagagggcgtaatgttactgttacaaatgatggggctaccattttgaagtcacttcacattgacaatcctgctgcaaaggtccttgttgacatctcaaaaagtcaagatgatgaatttggtgatgggacaacttctggtg

SEQ ID NO: 8038 - DNA, 256 bp, Zea mays
  unsure at all n locations
  Clone ID: LIB3150-015-Q1-N1-G5
gtgacttctgtatcctctcgatcgattgcttcctccaccgaggcggggggaagcgccccccagatcgccgccggcaagcggcgatcactgcaactgcgagcataagggacgctcgtgaagtgaccaatccgatctggcactggctgcacagggcaccattgaatggctaatccggacaacggnggggttgcctactgttgcggttctctgatggttccttcactacaagctgtattaccacaattggtatcgactt

SEQ ID NO: 8039 - DNA, 356 bp, Zea mays
  Clone ID: LIB3150-015-Q1-N1-G6
gccaaaccctagattgggcaagatgctcgggggcctgtacggcgacctcccgccgccgtcttctgccggcgatgaagacaaggcctccacggcttccgtttggtccagcgccaccaagatggcgcctcccaccctccgcaagccgtccaccaccttcgccccacccccatctattctccggaaccagcacctgcgcccgcccaaagccacctccatccccgctccccccgtcgttgccgccgaacccgccccggccacctcctttcagcccgcgttcgtcgctgtccagtccaccgtgctggaggagtacgaccctgccaggcccaacgactacgaggactaccggaaggacaagc

SEQ ID NO: 8040 - DNA, 218 bp, Zea mays
  Clone ID: LIB3150-015-Q1-N1-G7
gcgtctccttccattcaaaacaagtgcttttctgggaaaggcaccaggtcaaccagtcattttgagatatccctacaaaagatttaatgcagcatgaggattccatgtcaggcgcacgtcatgtatttcagccgctctgtcattttgtttattacctatacgtgctccgcttaccagtttactatccttctgagcaagaaaaagaagatcctatgctc

SEQ ID NO: 8041 - DNA, 375 bp, Zea mays
  Clone ID: LIB3150-015-Q1-N1-G9
gcatcctccatactctacccacctttaccattttgcccaccgctcaaacaatcaccgagcacggcgccctcctgacaagggagtcgccagcaatggcgacggcgctgaacacttactgtatgagccctagcataggtgctgcggcgcacctaatgccagcacagtcaaccagattcaccttccaggcctcttaccctcgtcctaccaactcaagcagcaacgacatgatccacccgcagagacattactatgagctgcacacaatactcaccactgactaccacatgcacgatatacctctctcccacccctaccttgtggctagcatgcacgtgatcaccatcctcttccgtgacctgcaccacctgtacacta

SEQ ID NO: 8042 - DNA, 256 bp, Zea mays
  Clone ID: LIB3150-015-Q1-N1-H1
cccaagcgccccccccccccccctgggccacgcatggggaacgcgcggcgccccgccgctgactcggcggcggcgtcggaccgggaggtcggatttgcgaagctacatggcgagtgcttcgagtactacatgcagacctactccatcgttcttggtcgccatagccgccgtcgcagcaagggccccgtcgccgccccgccggaggccgacgacggcgtcgacgtggacctcggcgccctcggagcaagcatgaacg

SEQ ID NO: 8043 - DNA, 463 bp, Zea mays
  Clone ID: LIB3150-015-Q1-N1-H11
caagctcttgcctcaggaaagatttatgatggagatgggttcaactacatcaaagaatcttttgaaaatggtactcttcaccttattgggttgttgagtgatggtggtgtccactcccgccttgaccaactacagttacttctgaaaggtgtcagtgagagaggagcaaaaaaaattcgtgtgcacatccttaccgatgggcgtgacgttttggatggaagcagcgttggtttcgtggagaccctagagaatgatcttttggagcttcgaggcaagggtattgatgcacagattgcatctggtggtggaaggatgtatgttaccatggaccgttatgagaatgactgggatgtggttaaacgtggctgggatgctcaggtgctcggagaagcaccctacaaattcaaaagtgcacttgaggctgtgaaaacactgagagcacagcccaaggctattgatcaat

SEQ ID NO: 8044 - DNA, 335 bp, Zea mays
  Clone ID: LIB3150-015-Q1-N1-H12
cttgctcttgcctcaggaaagatttatgatggagatgggttcaactacatcaaagaatcttttgaaaatggtactcttcaccttattgggttgttgagtgatggtggtgtccactcccgccttgaccaactacagttacttctgaaaggtgtcagtgagagaggagcaaaaaaaattcgtgtgcacatccttaccgatgggcgtgacgttttggatggaagcagcgttggtttcgtggagaccctagagaatgatcttttggagcttcgaggcaagggtattgatgcacagattgcatctggtggtggaaggatgtatgttaccatggaccgtta

SEQ ID NO: 8045 - DNA, 187 bp, Zea mays
  Clone ID: LIB3150-015-Q1-N1-H3
ccgcgctgccctcgtcccgatctgcgacccaaatacccgatccaccatggccggaataaggcttacgcccgaggaaccctagatgcccgttggcacgccaccccgtccccagttcgcacccttcgttgcctgcgcaggcggtggatggttgttggtagccatagccgtccacgaacgaagggccctg

SEQ ID NO: 8046 - DNA, 416 bp, Zea mays
  Clone ID: LIB3150-015-Q1-N1-H4
gctagcctcaacgccgccgaccgccgatcggggatcgcgtgctatcctctgccgaccacatcttcaccgcaccaccggtcctttcaagtgagcttcaaccccctgcgtgtagatggagagggttgttacggatgacgccgacgaagagaagggcgagcgcaccacaatggcatcctttgttggggccatggcaatctcggatttggcgaagaccacattgtgtccaaaaggaatggacaagatcctgccatcaactggtagagggcgtaatgtcactgttacaaatgatggggctaccattttgaagtgacttcacattgacaatcctgctgcaaaggtgcttgttgacatctcaaaagttcaagatgatgaacttggtgatgggacaacttctgttgtcgttctagctggagaac

SEQ ID NO: 8047 - DNA, 251 bp, Zea mays
  unsure at all n locations
  Clone ID: LIB3150-015-Q1-N1-H5
gaaagttccagcgagcgactgtgtctagcaggatagagcgcgctggggaatatgcggacacttttctgcctcgtggacggcgtggccgtcgcggccatactcctgacagcgtcatgccataagtgcggctacagtacctatcttcatatctgcgtctagtacaagcatgagtcatgtacgctgcaagctcacanatgtgactaaattaaggtccactatcgtgggacactgactgatggatcagatttata

SEQ ID NO: 8048 - DNA, 369 bp, Zea mays
  unsure at all n locations
  Clone ID: LIB3150-016-Q1-N1-A1
ggacaaatggactggttgtttccctgtcaagtggcacattgtgaaggatgttccaaacagcttgctgaagcacatcattcttgagaacaatgaaaacaagccagtgacgaacagcagagatacacatgaggtgaagcttgagcaaggccttcaagtgcttaagattttcaaggatcatgtctgcaagacatccatactggatgacttcngcttttatgataatcgtgagaagatgatgcaagagaggaaagccaaacagcagcagtcgctgaaaaaggtcattgatgtgaagctgcccagcgtcaccgacatggagagaagtcctaaaggggagactggatcaacagaactcactggggttgggactga

SEQ ID NO: 8049 - DNA, 398 bp, Zea mays
  Clone ID: LIB3150-016-Q1-N1-A10
cgccgccagcggcagcaatcccctcctcctcctccctgttcctggacgccggctccggcgccggctcctcatcgtccgcggactgaagtggtgaacacggaagaaggttgccattttactaagttaaagttagatcattggagcaatgccgccccataagatcgagactgggcaccaagatgtgatgcatgatgtcgccatggattactatggcaagcgcctagctacatcctcctctgataatacaataaagatcattggcgtaagtggaacctcacaccagcagcttgcaactttgagtggacaccagggcccagtatggcaagtcgcatgggctcatcccaagtttggttccatgcttgcatcctgcagctacgacggccgagtgatcatctgga

SEQ ID NO: 8050 - DNA, 389 bp, Zea mays
  Clone ID: LIB3150-016-Q1-N1-A11
gagtaaacaaggcttcccaggataagaagagcttggacgttggagcaaatctgtttattggcaatcttgatccggatgttgatgagaagctcctctatgataccttcagtgcatttggagtgattgtaactaatcctaagataatgcgagatcctgaaacaggaaattctagaggctttggctttgtgagctatgagtcctttgaatcatctgaccaagcaatagatgccatgaacaaccaacatttgtgcaaccgcccaatcactgtctcttatgcttacaagaaagacacgaatggagaacgccatggcacaccagcagagagactgctggcagcaaacaatccaggatctcataagaataggccacacacaatgtttgcaagtggt

SEQ ID NO: 8051 - DNA, 393 bp, Zea mays
  Clone ID: LIB3150-016-Q1-N1-A2
caacaatgatcagctgtgcctaaagccgcaagcaccacagccggagaaatcctctcgtgtggtctcttcagctctcagacggcaagacgatgctgccgccgaggtccgccgccgccgcgccgtgctcggttgcaggacttctgttccaccgattctcatcctactcgtcctcttctgtctattctgtccgccaccacgcctcgtctgctctctcctcccagccctccacccgccccaccaccacctggtcctcttccccccattccagcagccgcaggatcagggggtttgcggcctgggcttcggcgccggggccggcggggtctgcggattccctcgctacaaaggcgctagaggctaagatcaaggaacagctggaggcggacacagtca

SEQ ID NO: 8052 - DNA, 364 bp, Zea mays
  Clone ID: LIB3150-016-Q1-N1-A3
ggcgaggaaggagggagagagcacgggggcttgatcgaagatggatgccggagcaaaggtggtgaacaaagccgcggcggggcgtcgcggcgggggcggccccaagaagaagccggtctctcgctccgtgaaggccggcctccagttccccgtaggccgtatcggccgctacctcaagcagggtcgctactcccagcgtgtcggcaccggcgcccccgtctacctcgctgccgtcctcgagtacctcgccgccgagcttctttagttggcggggaacgcagcgcgggacaacaagaagaaccggatcatcccgcgacacgtactgctggcgatccgcaacgatgaggagctcgggaagctactg

SEQ ID NO: 8053 - DNA, 380 bp, Zea mays
  unsure at all n locations
  Clone ID: LIB3150-016-Q1-N1-A4
gtgctctggaagtggtgcgagggcgacaaccagcgctggaagatcctcccttggtgaacgaacgaaagaaactactagctggtaccctaataataattctgctggctgcggcgatccccaaataaaagaggcagggtgcgatgcatcgcggtcttctcgactctcgagtggtgtttgcgttagacagccagccactgtgtggctagtgttccaacatttgtcagcctgcttgcgcgaggaaatggcggtgactgactcaagagaagggcctggtcataggctgctgcattatgaatttctgatcatgtcttatgtctgtactctgaatcaactatgtatgagatcttatctncttctcctactgaatgaatgaatcatta

SEQ ID NO: 8054 - DNA, 402 bp, Zea mays
  Clone ID: LIB3150-016-Q1-N1-A5
atcttatccatcacctatggtgaagagcctagatcacataaccatccgagggctctttctactttttatgtttcttgtggcatcctttgttggtcatgcacagataataagaggtgaaaccaaggagaataaggacactaacagcatgacgatgacaacaacaagactaggaagctatgtaattagcatggatgaaaaatctagcttgtgctttctggatccaagaactctatggtacatctgcaaaataacatatcgcctttttaggacattgaaggattgcttggagttttgccacaatatatgatgcaccatgttggaaaaaaagactaataagaggccatgctttctcaagattgtagatggagatggtgaagatgttatacccaatcatccatgcat

SEQ ID NO: 8055 - DNA, 389 bp, Zea mays
  Clone ID: LIB3150-016-Q1-N1-A7
ggtagcgagagcttatcgtcgtcggcggcgaagatggtgtcgctgaagctgcagaagcggctcgccgcgagcgtcctcaagtgtgggaaaggcaaagtctggcttgaccccaatgaagtcagcgagatctccatggctaactcccgccagaacatccggaaattggttaaggatgggtttatcatcaggaagcctcagaaggttcactctaggtcccgtgcaagaagggcacatgaggccaagcagaagggaaggcactctggatacggcaagcgcaggggtaccagggaggctaggctccccaccaagattctgtggatgaagaagatgcgtgttctgaggcgcctgctccgcaagtaccgtgaggccaagaagattgacaagcacat

SEQ ID NO: 8056 - DNA, 397 bp, Zea mays
  Clone ID: LIB3150-016-Q1-N1-A8
gcgccggcgtgctcgtgatctcaacccaaggcgtgcctccgctccggtcacccgtcactccacgcaaccatgtcgaggaggaagaccagggagcccaaggaggagaacgtcacccttggacccactgtccgtgaaggagagtatgtctttggtgtcgctcacatctttgcatccttcaatgacaccttcattcatatcactgatttgtctgggagggaaactctggttcggatcaccggtggcatgaaggtgaaggctgaccgtgacgagtcgtcaccttacgctgctatgcttgctgctcaagacgtcgcacagcgctgcaaggagcttggcattactgcactgcacattaagcttcgcgccaccggaggcaacaagaccaagacccctggacctg

SEQ ID NO: 8057 - DNA, 385 bp, Zea mays
  Clone ID: LIB3150-016-Q1-N1-A9
gcgaaggagaaagcagaccaacctagccacgcagggagaaagaggccaaaagggaggggagagtgtcgtcatggcttccattgtcgcttccaggagggccgttcctctagttcgcgctctggagaagctcatcgcagcgtcctccgctcccgggactggctccgccctcaggccggtggcagtcgccggcggcctccgcggctacaacaccggcgctccgctccgacgctacgagggggccgagtcggaagacgatagcgtccgcgagtactatgggcggcacggcggccgggactacgctgtgcccagcctgttctcagatattttccgtgatccgcttagtgcgccgaacaagattggccgcctgctgaaccttgtggacgac

SEQ ID NO: 8058 - DNA, 393 bp, Zea mays
  Clone ID: LIB3150-016-Q1-N1-B1
cttctcctcacctcttgctaaagcaaagcaaacctgcaacccgcaattattcctcccccgcacgcgaaatccgcccgcagctcttcgtccccggaggaccaagcccgcgcaacagagatgtcgtacgcctacctgttcaagtacatcatcatcggcgacacaggcgtcggcaagtcgtgcctgctgctgcagttcaccgacaagcgattccagcccgtccacgacctcaccatcggcgtcgagttcggggcccggatgatcaccatcgacaacaagcccatcaagctccagatttgggacacggctggtcaagagtcattcagatccataactagatcatactacagaggcgctgctggtgctcttttggtttatgacataactaggagggag

SEQ ID NO: 8059 - DNA, 397 bp, Zea mays
  Clone ID: LIB3150-016-Q1-N1-B10
caggaacctcttcccacacttccgcgctcctccctctgtctcgagactcgagaatggttgtgtaggcgggcgcaggagggagggaggcgagagggggagctagggtttttcgccgccgccttctgttatcctcaggctctgaaccccctcctgtccggtgcgcggcggattagactccgatggggaagtctccggcgaagtggatcaagtccgtgctcttcgggaagaagtcgtcgtccaggtccggctccaccaaggccaaagatttatcgaaaggtgcgagtaacaaaggagctgctgctgcggggaaggagcccgtgttctctgagagctccccagtgatctcggagcctgtacttgttagcgcccacaacaatgagaccgtgcgggaggtggc

SEQ ID NO: 8060 - DNA, 370 bp, Zea mays
  Clone ID: LIB3150-016-Q1-N1-B12
ggcggtgatggctgcgacggccggcgtggggggtggtggaggggctaacgcggcggtggcatatcatatagcacaggcagtgcggtccacctccaatctcctccagctcatggagcagtccttccccgctcaggttcacttggcaaaactacccaagaaccttgtggaaaaagcatcctttgcaaagaacacggagcatgtactgtaccatttacctcaagtaatttcatccttggatgcttatatggacaggagtttgcatagagcatcctaaattaagactgtcacacagtttcttgtaaacatggtaaatacacagctgaagtccatgttgccttcctcttataggaaggataatcagaatagttct

SEQ ID NO: 8061 - DNA, 389 bp, Zea mays
  Clone ID: LIB3150-016-Q1-N1-B2
ccgactccgccgccgatccgtctcagcgcatagcgcgccgcgacctcatcgatcaccttgagctctcaatcatggcggacgtcgatgtctaaccggaggctgccgccggagctcccaagaagaggacgttccccaagtacagctaccgcggcgtcgacctagatgcgcttctcgacatgtccacggacgaccttgtccagcttttgctcgcgcgcgccaagagaaggttccagaggggtctgaagaggaagcccatggcgctcatcaagaatctgcgcaaggcgaataaggatgctcctgctggtgagaagcccgagccagtcaagacacatctgcgtaacatgatcattgtccctgagatgattggaagcattgatggggtctacaac

SEQ ID NO: 8062 - DNA, 403 bp, Zea mays
  Clone ID: LIB3150-016-Q1-N1-B3
cgcaagcttcgaaccttcgacccacgcggcgcggctccagcaccaacccccggcggcgatgcagatggcagcggcagtggccccaaccgacgccccggcctcggcggctgctccggcgccgcacccgccccacgcgcacgcggcgcacggaccgtcacacccgcaccaccacatgccgcaaccgcggtgggtggtcatcccgtaccctccaccacaccacccaaacatgtatgccgcggcctacggagcctacccgtactatggaaaccagcagctagtgagctgatgtggcgatgctctctgctcagtttcctccctcggatcggagggaggaaaccaagtttttggtcctgtaagatagtagctacaatgagatattataggcggccatacaaatgggcga

SEQ ID NO: 8063 - DNA, 402 bp, Zea mays
  unsure at all n locations
  Clone ID: LIB3150-016-Q1-N1-B4
ccgccatccattctcctcctccgttgcagctgcggcatccatccagtagtccgaccaatccatggcttcagcgttcgggaccgcctccacttgcggcattaaacatgcacctgccggcgttgcgcttgctgcgcccatgaagcacctttccctcgtctcgccctcgctggtttcgcttccgcgcaagatgaggccgcgaaggaagtacaacttcagggtaaacgctgcaaaggagctgcatttcaacaaggatggctcggctatcaagaaaatgcaaaatggggtcaacaagcttgcagatctcgtcggggttactcttggaccaaaggggcgaaatgtagtcctcgaaagcaagtatggctcacctaaaatngtcaatgatggtgtcactgtggcaaagga

SEQ ID NO: 8064 - DNA, 331 bp, Zea mays
  Clone ID: LIB3150-016-Q1-N1-B5
ctccttccagtgtccgtcgtcgtgcgctcgcgaggcctctatctagaggcctgtgccggcgaagagcgcacagtcgcccaccaggatgaagttcgttgctgactacctgcttgctgtcctcgctgggaactccagcccctctgccgaggacttgacagccattctggagtcagttggctgtgaagttgacaatgaaaagatggaactccttctgtcccaactgagcggtaaggacattaccgagctcattgccgccggcagggagaagtttgcttcaatcccatgttgcggtggcggtgtggctgtcgcggcagctgcccctgctgctggc

SEQ ID NO: 8065 - DNA, 341 bp, Zea mays
  Clone ID: LIB3150-016-Q1-N1-B6
gtgtgacagcatgtctagcatctttgatgcgaaggctggcattgccttgaacggcaactttgtgaagcttgtgtcctggtacgacaactagtggggatacagcacccgagtggtcgacctgatccgccacatgaacagtaccaagttaatgaacaaactgatgaaagcatgcaaagagtgatgaaagcatgctaagagagttgtgtttcttccccggaagtgcttccgaaaataaatttttcttatctgattgtctaaaacctataacggatgtatcgtaatggttgttatcgttaaacttttaacggtcattctatttcaaaaattttgcattttgcact

SEQ ID NO: 8066 - DNA, 341 bp, Zea mays
  Clone ID: LIB3150-016-Q1-N1-B7
cttgaccacccattccatggaggaggctgatattcttggtgaccggatagctataatggcaaaggggaaactgcggtgcatcgggacatcaataaggctgaagtcgaaatttggaacaggatacattgctaatgttaatttctctggaaatggccacatgcagagccccaacatcaacagcaacactgaggctccggttaatccgaacatagaagctgtcaaatggttcttcaaggaacggcttgatgttaatccaaaagaggagagcaagacattcttgacatttgtcatccctcatcacaaagaaccacttctgacgagattctttggagagttgcaag

SEQ ID NO: 8067 - DNA, 398 bp, Zea mays
  Clone ID: LIB3150-016-Q1-N1-B9
ggcccctacgcgcgcagccttaaccccatccgcagacatcagccggcgcctgtgttcctctccccgagccggtgcacgcaccacttcccccacttcgatctagcataatccgactccgccgactcgcctgaaccctagccagccgccgccatgccgccgcgacgcggtaggggaaagggtaagggtagggcaaagccaagagcgaagcccaccgagcccgagcccgagtccgatcccgaactagacgaagccgccaagtccgaaatcgaggcgggggacgcggaggctggggaggagtccagcgccgagagcgaggactcgaaggaagacgaatcggagagcgacaccgagtccatggatgcagaggccagcgaagaagctggcgagaacggaacgga

SEQ ID NO: 8068 - DNA, 362 bp, Zea mays
  Clone ID: LIB3150-016-Q1-N1-C1
caggcacaaaactcatctgggggtagtcgactcgtcgtcttcgctcgcccgtgctcaccactgacctacccgcttcaaaacagccaaactgggaaataaagattctccgtccacgcctcgtcccaaccctagccccgtcgatctcgcatggccaccggcccgcgatctctccacgcccttctcggcggcggcgcattcgccgacttgctgctgtgcatgcggaggaacgcctcggcggcggccgtggtgggcgccaccgcggtctggttcgtcttcgaacgcgcgggctacagcttccccttcgtcctgtccaacgccctgctccttctcgtcgccattctcttcttttgggccaagtccgc

SEQ ID NO: 8069 - DNA, 398 bp, Zea mays
  Clone ID: LIB3150-016-Q1-N1-C11
gttcggcccttcgccagctctttttcgggcacttcgccggcgacgaacacccaccagttgctgatgcaaggctttcaaaagattaacagtctcaattgatgcaaaagcaacacaatcacactaaaggtttggattagacatttcagagcatgggttcgcggtttccatcccaccagctaagcaatggcttgtatgtctcgggccgacctgagcaacctaaagagaagtctccagtcatttgctcctcggctatgccgtacactggtggggacataaagaaatctggggagcttggaaagatgtttgatctccatagaaaatctggtccattgtgtaatcaaacttcaaggaatacttcctttggtggtgctgcctccaactctggaccagtttctaat

SEQ ID NO: 8070 - DNA, 400 bp, Zea mays
  Clone ID: LIB3150-016-Q1-N1-C2
gctgctcccacctctagcccgacaggtgaagccgccgccgctgcagtgtccatagccaccgcaggagactgagatggggggttttgtcaagacccacaagagcaatgcgtacttcaagcgtttccaggtgaagttcaagagaaggcgcgctggcaagacagactacagggccaggataaggctgattaaccaagacaaaaacaagtacaatacacccaaatacagatttgttgtgcgatttaccaacaaggacatcacagcacaaatcatctctgctagtatagcaggtgatatggttcttgcttctgcttactcgcatgagttgccacgatatggtcttgaagttggtctgaccaactatgcagctgcctactgcactggccttctgttggctcgccgt

SEQ ID NO: 8071 - DNA, 397 bp, Zea mays
  unsure at all n locations
  Clone ID: LIB3150-016-Q1-N1-C3
gcacgcacgaacgcgctcccaccccctcccgccgccaccgccgccaaaaccccggcccgacttggcgtcctccgccaacctcctcctgtgcagcgcgggcggngggatatggcatcggaggacgtggtgggcaagagcaggggcgacacggccgtcaccaccatcgtcaacctggcggaggaggccaagctcgcgcgcgagggcgtcaaggcgcccggccaccagatcctcaccatctgcaagtcgctcgtcgccggcggcgtagcaggcggagtgtctcgtactgctgttgctccacttgaacgattgaaaatattgcttcaggttcaaaatccgcacagcatcaagtacaatggtactgttcagggtctcaagtatatctggagaacagagggcc

SEQ ID NO: 8072 - DNA, 373 bp, Zea mays
  Clone ID: LIB3150-016-Q1-N1-C4
ggaaatcttccgttctcaaaccaacctatgcgattcgccgcagcctctcaccctcgcgagtcccgacctcccgcagccgccgcacagatggcacccaaggcggagaagaagccggtggccaagaagcccgcggaggaggagcccgcgacagagaaggtggagaaggctccggcggggaagaagcccaaggccgagaagcgcctccctgctggcaagtccaatgagggcggcgagggcaagaaggggaaaaagaaggcgaagaagtccgtggagacctacaagatctacatcttcaacgtgctgaagcatgtgcaccccgacatctgcatcttgtccaaagccatgtgcatcatgaactccttcatcaacgaca

SEQ ID NO: 8073 - DNA, 76 bp, Zea mays
  Clone ID: LIB3150-016-Q1-N1-C5
ggctcaaagatcgcaagcagtctcccgccggggcgggccgcttccagctctgcgtgccaattcgcattcctggatg

SEQ ID NO: 8074 - DNA, 398 bp, Zea mays
  Clone ID: LIB3150-016-Q1-N1-C7
gtccccactccccacaccctgctgcctgcgagctcatcgatctcctcctctccgacgacgaccatggctgagacgaccctgctgacgaggaggtccaagcgcatcgctctgcgcgtttcccttgccggagccaaacccagctggcgtgactgggccggcctagcgccgctggcggtggagaagatcgccgaccgcctccgggacgaggacgtggcggacttcatgcggttccgcctggtgtgcaagctgtggatggacggcagcggcatcaggaagcctcgtgagctgggcgcacgcgttatcgaccacagcttccaccctcgccggtggatcctgctgacggatgagaagaaggaggctgatgaggcgacgcccacgcgccgtatgctgctcaacct

SEQ ID NO: 8075 - DNA, 334 bp, Zea mays
  Clone ID: LIB3150-016-Q1-N1-C8
gtgtgctcagtcagatccccgtcccgcattgcctaaggccaggttagttggcattgaagacgatgactgcttctgcagctgctggtgtgcagatggtggctgcacgcccttgcatttcggcctcgccaggaattcttaccgcacgggtagcagtttctaggactgattgcatgctcagtaccactgctacatttcccaaaatcagctgctcctggcctctaatgtttaagcgcaatgatgttgttgtaagagcaatatcggaagagtgtggcccgcaagggcttcccattgatctcaaaagtaaaagggcattcattgctggagttgctgatga

SEQ ID NO: 8076 - DNA, 400 bp, Zea mays
  Clone ID: LIB3150-016-Q1-N1-C9
cgcacacaaacacacaccagcccagctccgagagatcatccggcggccggcgagatgagccgcggcacgggcgcgggttatgaccgccacatcaccattttctcccctgagggacgcctgtaccaagtcgagtacgcgttcaaggcggtgaagtcggcgggtgtcacgtcgatcggcgtccgcggcgcggactccgtctgcgtcgtcacccagaagaaagtcccggacaagttgctggatcagacgagcgtgacacacttgttcccgatcaccaagtacgtcggattgcttgccactggcctcacagctgatgcaaggtcattggtttcccaagcaaggaacgaagcagctgagtttcgtttcaaatggggctatgagatgccagttgatgtgttagcat

SEQ ID NO: 8077 - DNA, 393 bp, Zea mays
  Clone ID: LIB3150-016-Q1-N1-D10
cggacgcgtgggcggacgcgtgggcggacgcgtgggcggacgcgtgggcggacgcgtgggcgccgcaggcggcccaggcccaaccgcagccactggcgcagcagcctccgccgcctcctcctccagcggggctgagccggtacgagtcgcagaagcgccgcgactggaacacgttcctgcagtacctgcggaaccacaagccgccactgacgctggcccgctgcagcggcgcgcacgtcatcgagttcctccgctacctggaccagttcggcaagaccaaggtgcacaccgagggctgcgcccacttcggccagcccaacccgccggcgccctgcgcgtgcccgctgcgccaggcgtggggcagcctcgacgcgctcatcggccgtctccgcg

SEQ ID NO: 8078 - DNA, 376 bp, Zea mays
  Clone ID: LIB3150-016-Q1-N1-D11
aaagcagctcacttcagttcaattcagccatgaggagccaggtcgcagcagtagccatgtttttgctcctcctggccttgggtgctgaggccgacctctgcgtcacgcgtagcaggaccttcaaagggtggtgccaccagagcgagaactgcatcaccgtgtgcaagagcgagggcaataccggcgggttctgcaagctcggggcttgcatgtgcaccaaagagtgtgtccgaagtactgacgctgctggtgctaataaagccccacagcagcatttgagttgatgagtagtaatgaagaatatggttttgttatgccaaggcgcgatctataatttgaggccgagatgacaaaaaataaatgattttgttactct

SEQ ID NO: 8079 - DNA, 285 bp, Zea mays
  Clone ID: LIB3150-016-Q1-N1-D2
gatcagcacagcggcagtgcgtagagaggatcgccgaacagaacaccatgaagatggtcatcgctctacgagtgtgcctggctctgtcagctgccaacgcctatgcaatgcagatgccctgcccctgctcagggctgcagggcttgtacagcgctcgcgccggcctgactactatgatgggcgccggctggctgtacccctacgcggagtacctgacgcagccgcaatgcaccccgctggcagcggcgccctactacgccgggtgtgggcagacgagcgccatgt

SEQ ID NO: 8080 - DNA, 397 bp, Zea mays
  Clone ID: LIB3150-016-Q1-N1-D3
ctcgagtctcgtccacccgtcgtcctcctagctcctctactcgccagtcgccatgggcaagattaagatcggaatcaacggcttcggaaggatcggcaggctcgtggccagtgtcgccctccagagcgaggatgtcgagctcgtcgccgtcaacgaccccttcatcaccacggactacatgacctacatgttcaagtacgacaccgtccacggccactggaagcacagcgacatcacactcaaggactccaagaccctttctcttcggtgacaagccggtcaccgtctttggcatcaggaaccctgaggaaatcccgtggggtgaggctggcgctgagtatgtcgtggagtccaccggcgtcttcactgacaaggacaaggctgctgcacatctcaa

SEQ ID NO: 8081 - DNA, 76 bp, Zea mays
  Clone ID: LIB3150-016-Q1-N1-D4
gagaatggatggtggccgccattgcgtaggaggaggcacatcattgtatttgctgtggactctgtgcaggatgcat

SEQ ID NO: 8082 - DNA, 347 bp, Zea mays
  Clone ID: LIB3150-016-Q1-N1-D6
ccgtcgcttccggctcccgcagcgtcgccgaccttcacagccggttccttcatccgccaccatggggaagacacgtggtatgggagctgggcgcaagctcaagacccaccgcagaaaccagaggtgggctgacaaagcatacaagaagagccacttgtgcaatgagtgtgaaaaaacctttgctggatcatctcacgccagggcatcgttctggagaagatggtattgaagcaagcagccaaatcgggcatccgaaatgtgcccgtgttcagctggtgaagattggaaagaagattgctgcctttgtgccgaatgatggtggcctaaactacatcgaggaaaatgat

SEQ ID NO: 8083 - DNA, 335 bp, Zea mays
  Clone ID: LIB3150-016-Q1-N1-D7
tccacagtcaccgccgcctcccccagcgtgcagcccgtacgccgcgcagccaacccagcggacacgatgcatgcccacggcatcgccatccgcgcccgcgggccggtggcggcgacgcaggcccccgcgcgccgactgcaatgccgcgtgtctgcggcggcggtcggcgcgcccgccgcgcgagcccgcgtgacgcactcgatgccgccggagaatgcggaggtgttccgctcgctggagggctgggcggcgcggtctctgctgccgctgcttaagcccgtggaggagtgctggcagccggctgactttcttcctgacttcttgtccgagatgtt

SEQ ID NO: 8084 - DNA, 399 bp, Zea mays
  Clone ID: LIB3150-016-Q1-N1-D8
ggaccaggtaagcagcagcaggaaccctagcaccgccgcatccgcagccatgggtatcgacctcgttgccggtgggaggaacaagaagaccaagcgcacagcgccgaagtccgacgatgtttatctcaagctccttgtcaagctctaccgtttcttggtcaggaggaccaagagcaacttcaatgctgtcattctcaagaggctcttcatgagcaaaaccaatcgcccaccaatctccatgcgccgccttgtcaagttcatggaaggaaaggagaagaacattgctgtgattgttggcacagtcacagatgacaagaggatccaagaggttccagcaatgaaggttactgccctgaggttcaccgagacggcaagggccaggattgtcaatgctggtgg

SEQ ID NO: 8085 - DNA, 400 bp, Zea mays
  Clone ID: LIB3150-016-Q1-N1-D9
gggcaccaccaccacaaccagccggctcccccggcgtcgggccccaaccaggtgttcaagatcttctgccgcgccaacgagaactactgcctggccgtccgcgacggcgccgtcgtgctggccccggtcaaccccaaggacgaccaccagcactggtacaaggacatgcgcttcagcacccgggtcaaggacgaggaaggcatgccggcgttcgcgctcgtcaacaaggccacggggctcgccatcaagcactccctcggccagtcccacccggtcaagctcgcgcctttcagcccggaccaagaggacgcgtctgtgctgtggacggagagcaaggacgtgggcaagggctttcgctgcatccgcatggtcaacaacacccgcctcaacttcgacgcct

SEQ ID NO: 8086 - DNA, 400 bp, Zea mays
  Clone ID: LIB3150-016-Q1-N1-E1
gcggatgcggcaagcagcagtacggctaccggccgactgagcccgtctggttcggcagcgccggcaggggcgacgccgtcgtcgacgttccgctcgagaacatggggagcaaggcgagtgagctctcgtcgtgggaatcagatctgaagcggatattaagaggaggtaggaggcgctgaagaatgctggcgtgccgatggaggagatgaactggccaccattctttcctatcatccaccatgatattgccaatgagataccagccaatgtgcagaaattgcagtatcttgcattcacaagctggcttggtgtgttgtcatggaccattctgttgcaagtgtgatttagtaatagcaagtcattttcttatcttggtggtggtgcgtaaggccataagcat

SEQ ID NO: 8087 - DNA, 389 bp, Zea mays
  Clone ID: LIB3150-016-Q1-N1-E10
ctctttctctcctggtcttcgtcctgcgcggggctccaccccaacttgctctgctcttctcggattacggctcggggttggtcattggcggtcagggcctttcaagaaagggcggcggcgcttttcctgacgcatgttgcccctgtgtcctggcttgctgcgcgcttgagggttgggctcaggattggggggagagcatgctctgcgtctactggtcctgttcccatctctctgatacttatatggatgcatctgtgaacgccaagaataatgtttgttttctgtgggaacactgtccacagtctttgcggtgatattcatttagctgcggttgtgctccggacgtattccaagcaaccccttctaacttcaagtttgtgttgcatttc

SEQ ID NO: 8088 - DNA, 271 bp, Zea mays
  Clone ID: LIB3150-016-Q1-N1-E2
tcgcggacgcgtgggcagaagagcacatcggggcttcgaccactgcgtcgtgacgacaagggagaagatcacgacgcgagcgaacttgacgtggagcagcgtacgaaggagaagcgacactcgacacagcttcagacgtcaggcgcacatggctcgaccacgcaacagttagtgatgatgacgaacttggacgatggcaacggcttttcagcgtcgcgaacagagggtgcacatgaacagcgagctcggcgagactttcggcgtcgcgaac

SEQ ID NO: 8089 - DNA, 397 bp, Zea mays
  Clone ID: LIB3150-016-Q1-N1-E3
acaaaaccctcgctcgctccccaccaccccgccgctgccgcctgtaccagctgcgtcaagatgagtcggcaccctgaggtgaagtgggctcagaggatcgacaaggtttacatcactgtacagttacctgacgcaaaggatgctaaggtcaatttggatccagatggtgtcttcacattctctggcagtgctggtacaaacttgtatgaattgaaactagatctgaatgacaaagtaaacgttgaggctagcaaaataagtgtgggggtcaggtccatattctgtatcgtagaaaaagctgaagccaaatggtggaagaaactcgttcgagatgatcaaagggcacctcactttgtgaaagttgattgggacaaatgggttgatgaagatgatgatg

SEQ ID NO: 8090 - DNA, 51 bp, Zea mays
  Clone ID: LIB3150-016-Q1-N1-E5
gggtctttgtgaggaaaatcaatgatgttagcggggctggagcttaggggc

SEQ ID NO: 8091 - DNA, 293 bp, Zea mays
  Clone ID: LIB3150-016-Q1-N1-E6
ctctcctcggttttctctcccaccaccaacgcccagatcgcatcgatctccgccgtcgccctctctgggattccgcgcgacaaagtcaggcgtagaggctccaggaggaggagggaggcgcatcaaggcgggtgggggagatgtacctctgggactggttctacggggtgctggcctccctcggcctgtggcaaaaggaggccaagatcctgttacttggccttcacaacgccggcatgaccacgctgcttcacatgctcaaggacgagcggttggtgcatcaccagccgact

SEQ ID NO: 8092 - DNA, 380 bp, Zea mays
  Clone ID: LIB3150-016-Q1-N1-E7
cccccgcaaaaaccctagctttacctgcccacaagcgcctccaagatgaagctcgtcaggttcttgatgaagctgaacaacgaaacggtgaccatcgagcttaagaacggcaccgtcgtacacggaaccattaccggcgttgacatcagcatgaatactcatctgaagactgtgaagctgacactaaaagggaaaaatcctgttacccttgatcaccttagtgtgaggggaaacaacatccgctattatatccttcctgacagcctaaacctggagactttgctggttgaggaaacaccaagggtcaagcctaagaagcctacttctgggaagcccttgggacgtgtgcgtggccgtggtcgtgggcgcggtctgggtcg

SEQ ID NO: 8093 - DNA, 398 bp, Zea mays
  Clone ID: LIB3150-016-Q1-N1-E8
cccaaatcgaccgagcgaattcaccacagcttctcaccaccgctaccttcgatggcacccaaggcggacaagaagccggcggcgaagaagcctgcagaggaggagcccgcgacagagaaggcggagaaggctccggcggggaagaagcccaaggccgagaagcgcctcccggcgggcaagtccgccggtaaggagggcggcgagggcaagaaggggaaaaagaaagcgaagaagtccgtggagacctacaagatctacatcttcaaggtgctgaagcaggtgcaccccgacatcggcatctcgtccaaggccatgtccatcatgaactccttcatcaacgacatcttcgagaagctcgcggccgagtccgccaagctggcgcgctataacaagaagcc

SEQ ID NO: 8094 - DNA, 400 bp, Zea mays
  Clone ID: LIB3150-016-Q1-N1-F1
cgatttccccttaacacaatacagaggaagcaggcggcggcgatcgggcgatggcatggcgggcgagcctgtctcggagcctaaaggagatccgcgtcctcttctgtcagtcctccccggccagcgccgccgcccgtgagttcgtgaagaagaactatggtgacatcaaggctcgcaacccctccctccccttccttgtccgcgagtgctccggtgtccagccccagctctgggcgcgctacgatatgggtgtggagagatgcgtgaacttggatggcctgacggaagcacagattgataaaaagctggaggagcttgccaaggccggcgagtctcttaaaaccaaatagttttggaactctatcctaccatgtttaacttttccaaataaatgatgcca

SEQ ID NO: 8095 - DNA, 377 bp, Zea mays
  unsure at all n locations
  Clone ID: LIB3150-016-Q1-N1-F2
tttggagagcgcanaagtcaatatcttgatgacattgctactctcactggaggcactgtcatcagagaagaagttggattatccttagacaaggcagacaatgcggtcctaggaactgctgctaaggttgtagttaccaaggattcaacaacaatagtgggagatggcactacacaagaggaagtgaacaaaaaggtgacacaaatcaagaaccagattgaggctactgaacaagaatatgagagagaaaaacttaacgagaggatagctcaactctctggtggtgttgctgtcattcaagtaggagcacagacagaaactgagctcaaagaaaaaaaattgagggttgaggatgccctgaatgctacaaaagcagc

SEQ ID NO: 8096 - DNA, 246 bp, Zea mays
  Clone ID: LIB3150-016-Q1-N1-F3
gtgatgttcccccttcccgttctggagccacattaaccagatgctccagctcgggaagcttctccgtgcgcggggcctgtgcgtcaccatgctccacaccgactttaacgcgcccgaccccgcactccacccggacattaccttcgtgtccatccgcgagtccctccccgccgaggtcgtcgccaaccccgacatggtagagcaaatgatgcagctcaacgccgtctgcgaggcgccgttccaggc

SEQ ID NO: 8097 - DNA, 64 bp, Zea mays
  Clone ID: LIB3150-016-Q1-N1-F5
gtcgagcgcggacttccatcttggctcgtttggggggttcggaagcggcgctgggggtctcttt

SEQ ID NO: 8098 - DNA, 369 bp, Zea mays
  Clone ID: LIB3150-016-Q1-N1-F7
tcgggtcatggctcacaatcaagattcagtgtcgaattgcccatcaacctgaggactggaaagaatgaacttgcccttctaagtatgactgttggtttacaaaatgcatgattcgcttatgaatggataggagcaggctttacaaatgtgaacatctctggtgtgagaactggaatcatagacttgtcttcaaataattgggcatacaagattggactggaatgggaatattataatttgttcaagcctgatcagacaaatatccaacggtggattccacaatccgagccaccaaaaaaccaacctttgacatggtataaggcaaatgttgatgttccacaatgagatgacccagttgggatagacatt

SEQ ID NO: 8099 - DNA, 396 bp, Zea mays
  Clone ID: LIB3150-016-Q1-N1-F8
gggaaggagaatcatcacctccaattacatgccatgacttcatgggacaacatgtgtttacggagcaagtagctgtatctgctgcaccagggacaactcatccttgcccatatgtggcatacttgcatcctcttccaccactgacatcgtcaagctcccatgtccctgagagaaccactgatcgtactgcataccatgatcattggaaccccatggttgggccatcagatgttaggcccatgcaaacaatgcaacctgctgatttccatcatagccattgggcacatgtgccccattcttatgctcaacccaacagcaacaatgagcagccaggaatcccttttggaacaagggctacacgggttgatggtgatagccaacgtcgaatatctgttg

SEQ ID NO: 8100 - DNA, 399 bp, Zea mays
  Clone ID: LIB3150-016-Q1-N1-G1
gtattagcagtcgaccggttcctcggagcacgatgaagtttgttgctgcctacctgcttgctgtcctcgctgggaacgccagcccctccgctgacgatttgactgccattctggagtcagttggctgtgaagttgacaatgaaaagatggaactcctgctgtcccaactgagcggtaaggacatcaccgagctcattgccgcgggcagggagaagtttgcttcagtcccatgtggtggcggcggtgtcgctgttgcggcagctgcacctgctgctggcggagctgcttctgcagctgaggcaaagaaagaagagaaggtggaagagaaggaagaaagcgatgatgatatgggcttcagcctcttcgactaggctgcacagtcatcacagtattgttttg

SEQ ID NO: 8101 - DNA, 402 bp, Zea mays
  Clone ID: LIB3150-016-Q1-N1-G11
aagtgcagcagaacgatcggatctagcagaattctctcaacctcatcggcggcggcgaagagcgtgcggatcggagatggcgacaagcgggtggaggaggagagcggcggcgcgggcctcctggagccacaccacggtgtacctgtggctcgcgctcgccgcagcagcactgacgctcgcccaggctaagaaggacctaacggaggttacccacaaggtctacttcgatgtcgagattgacggcaagcccgcaggtcggattgtcatggggctttttgggaagactgttcctaagacagcagagaacttccgagctctttgcacaggagagaaaggaattggcaagagtggcaaagctctccactacaagggaagtacattccacagaatcattcccagctt

SEQ ID NO: 8102 - DNA, 406 bp, Zea mays
  Clone ID: LIB3150-016-Q1-N1-G3
gccaaccgcatccagtccaccccatccccctcgaccccgacaaccccgagtcccgacccgatggcgcccaaggccgagaagaagccagcggagaagaagccggcggccgaggagaaggcggagaagacgaccgcaggtaagaagcccaagtccgagaagcgcctgcccgcctcgaagtcctccggcaaggagggcggcgagaagaaggggaagaagaaggccaagaagagcgtggagacctacaaaatctacatcttcaaggtcctgaagcaggtgcaccccgacatcggcatctcctccaaggccatgtccatcatgaactccttcatcaacgacatcttcgagaagctcgccggcgaggccgctaagctcgcccggtacaacaagaaacccaccatcacctccc

SEQ ID NO: 8103 - DNA, 178 bp, Zea mays
  Clone ID: LIB3150-016-Q1-N1-G4
gttgatcgacatcatccaatacatgatcgacgtggatgccggtgtgatcacgatcgataactcgcggtctgaccagaagctactgtccgtattccatgcgggtgtgaaggacagatccagcctaggccctggtgtgtacgacatccactatcgtatgattccctacaccgaggagatc

SEQ ID NO: 8104 - DNA, 313 bp, Zea mays
  Clone ID: LIB3150-016-Q1-N1-G5
gccaacaccccaatcgcacaggatagaccgagagagaggttttccatgcatggctcccggagtgtcttccgtgctggtcccgcacgagcccgtcctgctgaaagacatgctcgccttaccgtgcagctgcgggaacaccgatgtgtacgcccgccacctcttcagcaaccgagtcgctccgccacgctcctaggacgacggcgtcgatgacgccgatgccgaccgccacggtgaccgcgacctcttcatccccaagatcttcaccggagacgtgctggacctgatcgacgatgctgcgaggctggacctgatg

SEQ ID NO: 8105 - DNA, 265 bp, Zea mays
  Clone ID: LIB3150-016-Q1-N1-G7
cccacgcgtccggcgggatccacagaaggatgagtgaagaggataagactgctgcttctgctgagcagccgaagagggcccctaagctcaatgaaaggatcctctcttctctgtccaggaggtccgtagctgctaatccttggcatgaacttgaaaccggtcctaatcctcctgcggttttaaaggtggtggtgggaacaacaaagggaaccaaagttaattttaaccttgacaggaaacctgaacggataaaggtgaaccaagt

SEQ ID NO: 8106 - DNA, 391 bp, Zea mays
  Clone ID: LIB3150-016-Q1-N1-H1
gtcggacacaggcacgacacgagctcatccggcggcggcagagcgggaggagggagaacgcttcggtcccccccaacccaacctcctccccttcccgacaaggcgacgcgaagcgagatgccgctgtacgactgcatgctgctgctgaagacgacggtgaccagggaggtcctagcggaactggtgacgcgggtggcgcgccgcgcatgccagcgcaacggggtcgtcaccgacgtcaagtcattcggcaaggtcagcctcgcctactgcatcatgaagctcgacggccgccacttccaaggccatcttatgcaaatgaccatgatggttcccccttcgttcccgcaagaacttcactatctgaacaaggaagacaagctgctttccttgc

SEQ ID NO: 8107 - DNA, 125 bp, Zea mays
  Clone ID: LIB3150-016-Q1-N1-H12
atgcacgcgttcgtatgcattgattcttttaaaccacccacgcttccgcttttattattattttttgactgacgagggaggcccgtactctcgtatagtgttaaggtatacatacatatttatat

SEQ ID NO: 8108 - DNA, 323 bp, Zea mays
  unsure at all n locations
  Clone ID: LIB3150-016-Q1-N1-H4
cgacgccaaccgcgccgaggaggtcgcggacaccgtcatggcgctcttcctgggcctcctccgccgcacccacctgctggtccgccacgccttctcgtcgtccccgactgctgggtggctcggctcccggcaaccgctgtgccggggcatggcccgatgcagggggctcgtactgggcattcgtcggcgtcaacgccggcgcacgggtgcctggccaccccgcaccttgcctttcccatgagcgtcctctactttcgatccgctctaacgaggttactgggaaaaggaaagacgtccttctattgtatnttccttctggctgg

SEQ ID NO: 8109 - DNA, 402 bp, Zea mays
  Clone ID: LIB3150-016-Q1-N1-H5
gtctacttgaatgatgaatcagatattgtgttgcgtagacctggcatcaagacaaagctaaatagtctctttattcaattgaggaagaactgcgcccatcctgatcttttggaagctgcatttggaacaacaagcctttatccacctgttaataagcttttagagcaatgtggcaaatttcagcttctggacagactactaacttccctacttgcacgcaagcataaggttctaatattctcacaatggacaaaagttttggacatttctgagtattacctagattcaaaaggccttggggtttgcagaattgatggtagtgttaatttggaagagaggcggcgacagatagcagagtttaatgatttgaatagcagtctgaatgtctttattctgagcaca

SEQ ID NO: 8110 - DNA, 253 bp, Zea mays
  Clone ID: LIB3150-016-Q1-N1-H6
gcatttcctcccaatccatcccgcctccaaacccgaactccaagtcgccccgcatcgatggcgcccaaggccgagaagaagcccgcggcgaagaagccggcggaggaggagcccgctgtcgagaaggcgccggccgggaagaagcccaatgcggagaatcgtgtcccatcaagcaagtccgtcggcaaggagggcggctagggaaagaggggccggaagaaaggcaagaagagcgtggagacctacaagatct

SEQ ID NO: 8111 - DNA, 330 bp, Zea mays
  Clone ID: LIB3150-016-Q1-N1-H9
ttcttttctcatcaacctctgatgaccgcagcgaccctcgaggccatccgttcggtgcctacactgcacagcatcacctactgctggagctggtcggtcgctcatcaatggacaaagacgtgccctgtcaactcgcgctcgcgctcgcttgcatacgccgtacaccgcgctgatcctcctgtgccgcaggtcccacgccagcgtgcttataacgctcgacgacttcgactccatgggtgacgacatcgccaacgacacccaggctatgatggacacgtgtgccaacaggtgcaacttcaaacaagaagccgtactcgccgtgacggacag

SEQ ID NO: 8112 - DNA, 213 bp, Zea mays
  Clone ID: LIB3150-017-Q1-N1-A1
gctccatcatccactctctctgcttctcacccaaccgctactggctctgtgcttcgactcaagacactacaaagatgaaggacctcgagtcgaagcacggcgcgcgagacctcaagcccagcagcaaagtgtgcataaaccagagcctgtaccgaacaagcgcgaactggagtgcggactcaatcacacatatcactgcctacaccgaaggga

SEQ ID NO: 8113 - DNA, 396 bp, Zea mays
  Clone ID: LIB3150-017-Q1-N1-A11
tcgagacgaccaaacttcctacgaaggcagaaccgcattctcgcgtcggcttgcttttaactgaatccagcccaccgcttctcgcacgtggccatggacgcggtcgattctgcggtggatcccctccgagacttcgtcaaggacagcgttcgactcgtcaagcgctgacacaagcctgaccgcaaggagttcaccatggtggcaacacggactgcgatagggttcgtcgtcacgggcttcatcggctacttcgtcaagctcatcttcattaccatcaacaacattatcgacggttaccgctatgctcatggcgcgactagcatgggagtagtgcgatacttttgagagcaagggatagcgaggatcttggtctctggaataagattgataatgaca

SEQ ID NO: 8114 - DNA, 389 bp, Zea mays
  Clone ID: LIB3150-017-Q1-N1-A3
cccacgcgtccgggatggtagaggttttggaaggaatgattacacagaccgttcaggctacaatggaccacctgattttcgaagtcaaactcagtaccaagggcatgtaaatccagctgggcaaggtcaaggttacaacaacccccaagagcgtagcaacttctcgcaagggcagggaggaggttttaggcctggtggtccttcagcacctgggtcttatggccaaccatcagcacctggatcttatggtcaacctaatacacttggtaactatgggcaggtacctccatcagtgaatcctggtggtaacagagttcctggtgtgaatcctagttatggtggggatggcagacaaggggctggaccagcatatggtggagataacttgc

SEQ ID NO: 8115 - DNA, 354 bp, Zea mays
  Clone ID: LIB3150-017-Q1-N1-A4
ggcttctcctccccctcttaccaagtcctcttcgggttagggttacttagggttttgtggaggggcgatggcggcggctgatgtggagtaccgttgcttcgtcggcgggcttgcctgggccaccagcaacgagtcgctggagaatgccttcgcctcctacggcgagatcctcgactccaaggtcatcaccgaccgggagacggggaggtctcgcggcttcggcttcgttaccttctcctccgagaactccatgctcgacgctatcgagaacatgaacggcaaggagctcgacggccgtaacatcaccgttaaccaggcccagtcctcttgcggtggcggtggcggcggtggcta

SEQ ID NO: 8116 - DNA, 415 bp, Zea mays
  unsure at all n locations
  Clone ID: LIB3150-017-Q1-N1-A5
cttcaaggcctttttttttttgagataacaaggaggagaggaggagatggcggtcacgatcacgtgggtgaaggcgaggcagatcttcgacagccgcggcaaccccaccgtcgaggtggacgtgggccttagcgacggcagctacgcgaggggggccgtacccagcggcgcatccactggaatatatgaggccttggagttgagggatggaggatctgattatcttggcaagggtgttcttaaggctgtcagcaatgtaaataacattattggaccagcaattgttggaaaggaccccactgagcaggttgagattgacaacttcatggtccaacagcttgatggaacctccaatgagtggggctggtgcaaacagaagcttggagcanatgccatccttgcggtttcacttgct

SEQ ID NO: 8117 - DNA, 405 bp, Zea mays
  Clone ID: LIB3150-017-Q1-N1-A7
ggcgcaaatatacttgttgataacaaaggttgcattaagctagcagattttggggcatctaagcaagtagaaaagttggcaactgcaactgctgccaagacgatgaaaggtaccccatattggatggcaccagaagtcattgttggaagcggtcacaattgttctgctgatatctggagtgttggttgcacggtaattgaaatggcgataggcaaacccccatggagccatgaatatcaagagggttctctactttattatgttgggacgacaaaatcacacccacctataccagaacatctctccacagaagccaaggattttctgttaaaatgcttacagaaaggaaccagaaatgagatctgttgcatcagacttgttgcagcaccccatttgttacacgag

SEQ ID NO: 8118 - DNA, 403 bp, Zea mays
  Clone ID: LIB3150-017-Q1-N1-B10
caagattgagactgagctgaccaagatctgtgatggcatcctcaagctgcttgagacccatcttgtgccgtcttccactgcccccgagtccaaggtcttctatctcaagatgaagggtgattactacagatacctcgctgagttcaagactggagctgagagaaaggacgctgctgagaacacgatggtggcatacaaggctgcccaggacattgctctggctgagcttgctccaactcaccctattaggcttggactggcacttaacttctcagtgttctactatgagattctgaactcacctgatcgcgcctgcagtcttgcaaagcaggcttttgacgaggccatctcagaactggacaccctgagcgaggagtcctacaaggacagcactttgatcatg

SEQ ID NO: 8119 - DNA, 352 bp, Zea mays
  Clone ID: LIB3150-017-Q1-N1-B11
ctagagcgtgacttacgtgactatgatgtgtgatgtcgtcgtgaagctgcgggacacccatcttgtgccgggtttcactgctggcgtgtccaacgtcatgtatctcaagacgaatggtaattactctagataccgcgacgagtgcaagactggaccaggcataaaggtccttgatgataacatgctggtcgcatataatgatagcaatgacattgttcttgcgaaacttgggtgaccttaatttactataggatgaatgcccacttatctgttgagtgacctactatgagatcctgatgtaagctgaccgaacttgaagtcgtgaaaaagattgttgggacgacgccagctt

SEQ ID NO: 8120 - DNA, 264 bp, Zea mays
  Clone ID: LIB3150-017-Q1-N1-B12
cttcactagtacagggctggtcgagacgtgcaaacggatcatcaagcggcaataatcccatccagagccgggttccactgctgcagacaccaaaggcaactatctcaacatgaagggtgattactgctaatacctgagtatgagtaagactggacctgatagaaaaagctgtgcgcccatacaaacggcttgataaaaggtcagatcgcatcatagatatggaggagcttctttaacataaccttatgatgctgggacaatcac

SEQ ID NO: 8121 - DNA, 362 bp, Zea mays
  Clone ID: LIB3150-017-Q1-N1-B2
cctggcctccctcgcggcctcgctcccagtcgccgccaccgccgccgcggtgagattcccattccgtttccgcatcggtcgcgccatggcctccgccgccgcaggggcctcgccggcgagggtggccgtggtacagatgacctccgtgggggacgtcgacgccaactacgccacctgctcccgcctcaccaaggaagcagctgcttctggagtgaaatttctttgcttccctgaggtcttctcattcattggatccaaggatggcgaggctatgaagctagctgaaccattagatgggccaataatgcagagatactgctcacttgcaaaagaatcaaccatggtgctatctctggggggtt

SEQ ID NO: 8122 - DNA, 398 bp, Zea mays
  Clone ID: LIB3150-017-Q1-N1-B3
cgcttcgctcctctctgtcccgaccgagcagcagcgaccgagccctggccgagccgccctcccccaacgcgcctgcaccgacgccggctccgtgtcgggcaagctcagctacgagatcttctcgctgctggagagcaagttcctcttcggcaacggctccatgtcgggcacgccagggcagccgggccccggcaaggacagggacaagggcagggtgcgggtgctggcaatcaacgggtgcgggccgggccccagcgacgcgctgctggcgtcggccgcgctggcgaggctggaggagaggccgtcgccgctgcgacgggtgttcggggacgccacgctcaaggacaccgtggcgccggtgctggtccccagctacgacctggccacggtggcgccct

SEQ ID NO: 8123 - DNA, 402 bp, Zea mays
  Clone ID: LIB3150-017-Q1-N1-B4
cgcgctgctgcaggacgcgtacggccacctccgcgacaaggcgcaggtccgcatctggcgccgcccgggccgcgccgtcgaccgcgccaccgccgagcacctcttcgacgtcatcaacgcgcgcgaggacgtcctgcgccgcctgatccgccgctgcgcctacctcaagtacgtcgaggcgcgcctcggcgaccgcacgctctacgccgacgagatactcagggacggcttctgcctcaacatgatcgacacgccgctctgcccgctcaaggtcgtcaccaacctccaggaggccgtctgggacgctgacattgtcgtcaacggcctgccttccaccgacaccaagggaggtgtttcggggagatcaggaggtactgggagggagaggattactgcccccat

SEQ ID NO: 8124 - DNA, 389 bp, Zea mays
  Clone ID: LIB3150-017-Q1-N1-B5
caacacagtacacgcagttcgagagagagagagagagatagagagataaagatgtcctggttcgggcaccaccaccacaaccagccggttcccccggcgtaggtcccaaaccaggtgttcaagatcttctgccgcgccaacgagaactactggctggccgtacgcgacggcgccgtcgtgctggccccggtcaaccccaaggacgaccaccagcactggtacaaggacatgcgcttcagcacccgggtcaaggacgaggaatgcatgccggcgttcgcgctcgtcaacaaggccacggggctcgccatcaagcactgcctcggccagtcccacccggtcaagctcgcgcctttcagcctggaccacgaggacgcgtcggtgctgtggac

SEQ ID NO: 8125 - DNA, 375 bp, Zea mays
  Clone ID: LIB3150-017-Q1-N1-B6
gtgaagggaagggagcggaagagaggtgggtgaccgccgctcctccgtccagccttccagttccaggcgtggcgaactaggcaagcggcaagctcaccgctcctcgagtgaggcccaggttccgtcgccgccgtactcagcagcggataccggcgagtcaacaggtagtagagggggaatgaggagagcagtttctgttcgcccggtcacacgcgcggacggagcaatcccgctgctgcgtccgactcagtttgccgtcaccctgttgcacgtacggctagggtttggagatagatacgctccccagctcgtgtggaggcgcgccgagatgcggggaggaatagaggaagcgcggttttgataccttgttcctga

SEQ ID NO: 8126 - DNA, 418 bp, Zea mays
  Clone ID: LIB3150-017-Q1-N1-B7
ctatatctctagccaacacacacataatactctccattccattccattccatctcaaaggatagaataatgggcggtctctccaccaagcttttcgtggtcctcctactgctcgtttgttacaccgggacgcaaggcgggccggtgactatggtgtcggcgaggaagtgcgagtcgcagagcttccgcttcaagggaccttgctcgagggacgccaactgcgcaaacgtctgcctgaccgaaggtttcaccggcggcgtgtgcaagggcctacgccaccgctgcttctgcaccagggactgctagtactgcctcgcctcgtgtcctgcgtgtgcatatatagccgcagctgatcagtataacatgcatgcatgcgttaccaaatatttggcactaccagcaagttaatgaattaaaat

SEQ ID NO: 8127 - DNA, 409 bp, Zea mays
  unsure at all n locations
  Clone ID: LIB3150-017-Q1-N1-B8
gcgcccgttgttgtatcttgtcactgatcagtgttgtttgctttgctttgccgtgctaatggcgcccgctccatgtggccgttcgtcgcagagggtgttccacttcggcaagggcaagagcgagggcaacaagaacatgaaggagctgctgggcggcaagggcgcgaacctggcggagatggcgagcatcgggctgtcggtgccgccggggttcacggtgtcgacggaggcgtgccagcagtaccaggaggccgggcgcgccctcccgccggagctctgggcggaggtcctcgacggcctgcggtgggtggaggagtacatgggcgccgncctcggcgacccgcggcgcccgctcctgctttccgtccgatccggcgccgaggtgtccatgcccgggatgatggacacg

SEQ ID NO: 8128 - DNA, 419 bp, Zea mays
  Clone ID: LIB3150-017-Q1-N1-C1
cggacgcgtgggttctttgaccctgccacaaagaagtggaccaccaagaacacaggttctcctacctgcaagagaggatttgttcagttctgctatgagccaatcaagcaaatcatcaagacctgcatgaatgaccagaaggagaaattatggcccatgctgcaaaagctcaatgttaccatgaaggctgatgagaaggagttgattggcaaagctttgatgaagcgtgttatgcaaacgtggcttccagctagcactgctctgcttgagatgatgatattccaccttccttccccagcaaaggctcaaaagtatcgtgtggagaacttgtacgagggaccccttgatgatgtgtatgcaactgctatcagaaactgtgatccagagggtcctcttatgctgtatgtttcaaagatgat

SEQ ID NO: 8129 - DNA, 190 bp, Zea mays
  Clone ID: LIB3150-017-Q1-N1-C10
ataggaacctggaaccatataaggctatatagaaggctgaatctcacaccaactatcttgaccatatcgagcgacctttgtgacgagaatggagggacgtcctaatgctgtgaagtctagccttttgaattcgtagtggcacgaacagagagtacttgctgacccaggagcaaggcatattagagactaa

SEQ ID NO: 8130 - DNA, 418 bp, Zea mays
  Clone ID: LIB3150-017-Q1-N1-C11
aagcttcaaagcatctctgctgggattttagcaagcggcaacgacgagcgacccaaaaaaagcaatcaatagtcaccatatctgctcctctcgctccacacccccctcctctgcgacttgaggcaggacaggaggcagagacgggcaatggggttcgtgctggtggtctctctgcccttcatcttcctctccatcctcctcggcttcggctgctacttcctcggcaagcacaggggccgggaggagatgcggaccggcgtcagcgcgcagatctacggcacgccgctgccgccgcccggcgtcgtcggagcctactcgccgccgcctgagccgttccacagcaataaacaatggtccgaggctgtgtgactgagaatcagacgtctcttcattcattctactagtactactacatata

SEQ ID NO: 8131 - DNA, 349 bp, Zea mays
  Clone ID: LIB3150-017-Q1-N1-C12
gcaccgcaccgttcgcttgcttgcgtcaactccactcctcttggccggcgcatcacctactgttcgccgatgccgccaccgctccaccgggcagtcagccagccatggatgaggagtacgacgtgatcgtgcttggcacgcggctcaaggagtgcatcctcagtggtctcctttccgtcgacggcctcaaggttttgcatatggacagaaacgactactatggaggagactccacctcgctcaaccttaatcagctctggaagaggtctagaggagaagacaagcccgcagcacatctaggtgcaagcagagactacaatgtggacatggtgccaaaagttatgatggc

SEQ ID NO: 8132 - DNA, 119 bp, Zea mays
  Clone ID: LIB3150-017-Q1-N1-C2
ctccccctccccgatcatcgcaggccgatcaatcggcggttccgccggcattgggccgaagaatgaccacatcgactggaagagcggggttctggcctacttctctcatggggccttct

SEQ ID NO: 8133 - DNA, 331 bp, Zea mays
  Clone ID: LIB3150-017-Q1-N1-C3
cccacgcgtccgctcattcatctccattcgaaacaccctcgcacccacactctcccttcgtccccagcctaaatccccgcaacgatggctcgcacgaagcagacggcgcgcaagtccacgggcggcaaggccccgaggaagcagctggcgaccaaggcggcgcgcaagtcggcccctgcgaccggcggcgtgaagaagccgcaccgcttccgcccgggcaccgtggcgctgcgcgagatccgcaagtaccagaagagcacggagcttctcatccgcaagctgcccttccagcgcctggtccgcgagatcgcgcaggacttcaagaccgacc

SEQ ID NO: 8134 - DNA, 378 bp, Zea mays
  Clone ID: LIB3150-017-Q1-N1-C4
ggatgtcgctaaggagttgttcacacaggtgcatgaagctgcatcaggaagtatatttgtacacatgcctgatgtatggataaatctggctcatacatattttgctcaaggtcattttcaacaagcagttaaattgtatcaaaattgtttgcggaagttcttccacaatacagatgcaaccatcctattataccttgctcggacacactatgaggctgagcgatggcaagactgcaggaaaactttgcttagagctatacatttggctccatcaaattacttgttacggtttaatgtaggagtgtcaatgcagaaattctcagcttcaaccctgcaaaagacaaaacaaacagttgatgaggttcgcgccacagtcac

SEQ ID NO: 8135 - DNA, 374 bp, Zea mays
  Clone ID: LIB3150-017-Q1-N1-C5
gcatcccttcactgccggagtgtatgttgcattaatgatggctcagatcgaggtccttaggaagaagggccactcttactcatagataattaacgagagcctgatcgagtcacgggactcgttgaacccgctcatgcatgctcgcggagtggccttcatggtcgataactgctccacaactgctcgtttgggatctaggaaatgggcaccacgcttcgattacatctagacccaacaggcgtttgtgactgttgacatgaaagcaccgatcaaccaagacctcatcagcaactacatgtctgaccctgtgcacggcgccatcgaagtctgtgctcagctgacgcccaccgttgacatctcagtgaccactgatg

SEQ ID NO: 8136 - DNA, 472 bp, Zea mays
  unsure at all n locations
  Clone ID: LIB3150-017-Q1-N1-C9
gaagagctatgaancgatcgcatgcaccgcgtatcgtaatgcttgtgatacctnnctagagatcgacccacgcccgtccgcaagcgacagccggctttcagttgcgcggcgctcgaatgatgagtgcgtatcactcatacgagacccacctgtctgcttgttacttgcactacaggtctttgacaaagaatggcacacacagctctcggcgatgaagatacgtgcgtcatctttagacacctggcaggtgagcacgtttgatgtagtctctcctcaccatcgtaggagcggcatcttcgaagtgaaggcaactgcaggcgacactcaccttggcggcgaggacttcgacaatcgcatggtgaaccacttcgtccaagagttcaagcgcaagaataagaaggacataagcggcaacccccgtgcactgcgccggctgcgcacggcgtgcgagcgcgccaagcgcacgctgtca

SEQ ID NO: 8137 - DNA, 266 bp, Zea mays
  Clone ID: LIB3150-017-Q1-N1-D1
accacctcaacttcagctgctcctagcatcgtcgagcgcgagctatacaccgagctagccggcggagggcagcaaatgcgggcggccgcggggtcctggcactcgtcgtgctcaatctgacggtcgtcgcattggaggacgacccgaccattgtgcattcgaaccatacgatttggctatacggtgtccagctcggcagcgcgcgcttttgcttctgccttgagctggacgaccagcaatgcgggactgaatatgatcggtccatt

SEQ ID NO: 8138 - DNA, 236 bp, Zea mays
  Clone ID: LIB3150-017-Q1-N1-D10
gtgaggaaactttacttacccactatggcgctgcctccgcgtatctctcggtttgtcttattgctgacatagctgtcgtattcaggttccagtggcgctgccgcctgaccgtcatccgcagcatgatagggaagcgctcccccaccggcgacgaggatgacgcccgacccaagaagatccaaagctgacgaactgagcaactgcgaccgtaaggcatccgtttgtcccataagctc

SEQ ID NO: 8139 - DNA, 183 bp, Zea mays
  Clone ID: LIB3150-017-Q1-N1-D12
ctcgtattactattcccaatctagcaaacggtaccatccttttgcaaactaagagaggggctcgatggtactcaaggcggataagaatcggtctgctaataaactagcagtggaagatcgcgcagtcctggcagaaaaggcccttggtgggaagaagcaagaggcggtgaatctgctcccggc

SEQ ID NO: 8140 - DNA, 397 bp, Zea mays
  Clone ID: LIB3150-017-Q1-N1-D2
ggcgcagagacaggcgtcttcgtactcgcctatctccgcgactcaaagcttcttccatttcctaccgccgccgctgcagctccaccccattccgtcgacaccatgagggagtgcatctcgatccacatcggccaagccggtatccaggtcggaaacgcgtgctgggagctttactgcctcgagcatggcattcaggctgatggtcagatgcccggtgacaagaccattgggggtggtgatgatgctttcaacaccttcttcagtgagactggtgctgggaagcacgtccctcgtgctgtttttgttgaccttgaaccaactgtcatcgatgaggtgaggactggcacctaccgccagctcttccaccctgagcagcttatcagtggcaaggaggatg

SEQ ID NO: 8141 - DNA, 230 bp, Zea mays
  Clone ID: LIB3150-017-Q1-N1-D3
ttcttttacggtggggtgggtttttgttggcttcggtgttagcatattcgttgttggttgccctgtaagatgaactgccgaggctagctcagctagtttgaaataatttatgtttcaaaactcagatgtattgcgccgacacaaaggattagttgggtatcttctggcaaaatagcaaccaacatgtcaaacatgactaggcatgcctacacattggttttcgacgttta

SEQ ID NO: 8142 - DNA, 404 bp, Zea mays
  unsure at all n locations
  Clone ID: LIB3150-017-Q1-N1-D4
ccgactcctaagctagaatcgcactccactccactctccagagtccagtcctcactcccacacccgtacgcttcgcggcgcgtcgcttttgccagccatacgccagcctgagcgcccgacgtcgcaggattcgccgggaacgcccacaccaccggccgcagccgaccaggcagacgagtagtgtggtggtggtggtggtggtagcgcgggggcggggcggcgctgcgtgaccgacgccgcgggagatgaaggccaaggccctccctttcatcgccttcgagcacaagcgagacgcctatggcttcgccgtgcggccacaacacctgcagcggtacagagagtatgcgaacatctataangaggaggaagaggagaggtccgacagatggaagaattttctggat

SEQ ID NO: 8143 - DNA, 380 bp, Zea mays
  Clone ID: LIB3150-017-Q1-N1-D5
gtcggctgccgcagactggtagtagccggcgcgccgtcaccgtatcctcagatcagcggcgagcagataccacaccactctactgacgcccgacgagcagtgtaacattttccttcagccatgggtaaggagaagactcacatcaacattgtggtcattggccatgtcgactctggcaagtcgaccaccactggccacctgatctacaagcttggaggtattgacaagcgagtgattgagaggttcgagaaagaggctgccgagatgaacaagcggtcattcaagtatgcgtgggtgcttgacaagctcaaggctgagcgggaagagaggtattacaattgaaattgccctgtggaagttcgagaccaccaagtactact

SEQ ID NO: 8144 - DNA, 335 bp, Zea mays
  Clone ID: LIB3150-017-Q1-N1-D6
attccctagcacccccagtctgtagccgggcaaccgagacaccgtgtgtgaaccaagcagaccacaacaagaagaagcgtagtcgtcgccggacggaaaggcgcggagcaagatgtcgtggcaggcgtacgtagacaagcacctgatgtgcgagatcgaaggacagcatctcagcgccgccggcatcgtcggtcacgacggcagcgtttgggcgcagtccgagagcttccccgagttaaagcctgaggaggttgctggtatcataaaggactttgatgaacctggtactctttcactaactggtcttttcgttggaggtacaaagtacatggtga

SEQ ID NO: 8145 - DNA, 264 bp, Zea mays
  Clone ID: LIB3150-017-Q1-N1-D7
gtgcagcgactactcaaagctctaatcgggcggatgatcaaaagcctgcctccagatcactggacaaactttgttgaggggctaaggcagttgctgtggcctacctacccaccaaggcggggcttaaatagctcgacgagtactttctcactcgcaaatacatcactggctaacaaacttgcaaagatgactagtatgtctacacttggttttcatatgctaacttatgcaagtgtatcaacatcgcatggtggataaatcaca

SEQ ID NO: 8146 - DNA, 395 bp, Zea mays
  Clone ID: LIB3150-017-Q1-N1-D8
ggcaaactctgaggtgtctgctctgcttgggcgtattccatctgctgtgggataccaacccactcttgctactgatcttggaggactgcaggagcggattactaccacaaagaagggttctattacatctgttcaagctatttatgtgcctgctgatgacttgacagatcctgctcctgctaccacctatgcccatcttgatgctactactgtgttgtcacgtcagatttctgagcttggtatttaccctgccgtggatcctctcgattccacatccagaatgttgtccacccatgttctgggtgaggaccactacaacactgctcgtggtgttcataaggttcttcagaattacaataatgtccaagatattatcgccattctgggaatggatg

SEQ ID NO: 8147 - DNA, 231 bp, Zea mays
  Clone ID: LIB3150-017-Q1-N1-D9
agacgactacattattggtgaagtacggcgcctcctcggcctctagctcatactatgtccgtgcttcggagcgtgtgccatgcagggtccatgcggactgctgcctgaactgggcccgccggctgaaggccactggatactccagcggcaagcagaatgactgaaaaccgaagtagatcatgagctgacgcaataagcaccgtcaaccgcttgacagtcgctcctcttcta

SEQ ID NO: 8148 - DNA, 331 bp, Zea mays
  Clone ID: LIB3150-017-Q1-N1-E1
gacgaagaaggccaccacccccttcgaaggccagaagcccggtacctccggcctccgcaagaaggttactgtattccagcagcctcattatctgcagaactttgtccagtcaacattcaatgcccttcctgcagaccaagtaaaaggtgcaaccattgttgtctctggtgatggccgctatttctcaaaagatgctgttcagatcataacaaaaatggctgctgccaatggagtaagacgtgtttgggttggacaaaacagtctcatgtctactcctgctgtatctgcttgcatccgtgaaagaattggtgcagatggatcaaaagctact

SEQ ID NO: 8149 - DNA, 336 bp, Zea mays
  Clone ID: LIB3150-017-Q1-N1-E11
acgatttattattcgaatccacaaaggacgactgagaaaagagaaggaaccaagaagatcatgaacatacagcatccgggttacagttttgacacaacgctgtcgaacaaggtttataagcctgaggcttgctgcgcatggaacacgagataaatggcacagatcgctataagggagacgatttgatgtctgggtattttatgtggtaaatcaaggctgtgctatcacaccccttcacaaatgtgagccagagctgtttttgccttgcacttttagtttgggacttcagaaggaaaccttgacatcgagcaacaccatgatcttggacaccaactg

SEQ ID NO: 8150 - DNA, 311 bp, Zea mays
  Clone ID: LIB3150-017-Q1-N1-E12
attaatcattcgaatccacaaaggacgacggagaaaaggcaggagccaagaagaacaagaacaagcagcatccgcgttacagtttttacacatcgctagacaacaagggtcataagcccgaagcttgcatgcgcatggaacagggataaagtgcagcgatcgctataaggagccgatatgagactgctcatgtttatatggaaatgcaaagctatgctatcacgcccctccactaacatgaccagagctgtttctgccttgcgctttcagtttggactacataaggaaacctttacatcgatcaacgccat

SEQ ID NO: 8151 - DNA, 394 bp, Zea mays
  Clone ID: LIB3150-017-Q1-N1-E2
ggaaaaaagagcgagaactcgcagctgacgcgcacacggcaagccccaatcggagccgcggaccggatcagaactaggtctcgaggcgatggcaagcggaggcgagggcgcagggagcggcgaatcccctcccgccgcctcagtggaggcggcagcggtcgaggcgacgctgcacatccggtgcgcgaacggctccaagttcacggtgcagacggacctgggcgccacggtgggcgcgttcaaggaggtcttatccggtagctgcggcgtgccagcaccgcagcagcgcctgatctacaagggccgcatcctcaaggacgagcaaaccctagacagctatggcgttgagacggatcacacaattcacttggtgcgaggtgtcgccacaccagct

SEQ ID NO: 8152 - DNA, 338 bp, Zea mays
  Clone ID: LIB3150-017-Q1-N1-E3
gcggtgggttatggccacatggtctttgagctcagcgagctgcccacaccgggagtctaggtcaggaggaagctctatggctggagctacgacacccaaaacccgtctgggtctgatgactgcactatgatacttcgtcaggtacttgaatttctttatcggagtgatgagctgaacaccactatcaacgcatcgcactgtggctaagtctttacacacacatagagaagcttcaaacttaaataggcagattccagttattgcactcttgactcctactgttgtcaaatggaaatatcagtgcgctggacattcttttcatcgtacggagagaatta

SEQ ID NO: 8153 - DNA, 315 bp, Zea mays
  Clone ID: LIB3150-017-Q1-N1-E4
gaactgaacaggccagatgctgaccaaggaggacatttagagcgccacgaacgataatgggctgccattctcacctgacagatctgatgctgtcaagacggcatacagcgactttcctgaaatcaaacatcgagatgtgccacaactactggcgcataatctgaatggaaagcatgagcccagggactatagagctgctcctgattaaccaaaggacgctactcaatgtagctttgacacttatgtgaagaatcatattggagcatagaaagaaggaggcaagactggacggcatgaagatcgaaagctaactac

SEQ ID NO: 8154 - DNA, 391 bp, Zea mays
  Clone ID: LIB3150-017-Q1-N1-E5
gcttccgaaaccgcctccttcaccatctccgacattcttgacaccgcagccggcgtaagtggcgagctcgatgacgggagcgacgacagccaagacgcgtcgaggtcaggggcctccgaagtgctgcttcgcgaggtgctcgagttcctctctcgcccgtcatcgatctcgaaccagatggcccttgacgcgctctcgcttgtgcttcccaaacccgtggcgaagctaggggctcgaatggggagatgccgggatgttgccgcagctatcctaaagttcttcgtgacgaattgcaatccgagggacatgctctccatcctctgtgaggcattagatgcaccaatggagctaccaaatggcttatccagttttgttcttctactcgatgcac

SEQ ID NO: 8155 - DNA, 410 bp, Zea mays
  Clone ID: LIB3150-017-Q1-N1-E6
gcttccgaaaccgcctccttcaccatctgggacattcttgacaccgcagccggcgtaagtggcgagctcgatgacgggagcgacgacagccaagacgcgtcgaggtcaggggcctccgaagtgctgcttcgcgaggtgctcgagttcctctctcgcccgtcatcgatctcgaaccagatggcccttgacgcgctctcgcttgtgcttcccaaacccgtggcgaagctaggggctcgaatggggagatgccgggatgttgccgcagctatgctaaagttcttcgtgacgaattgcaatccgagggacatgctctccatgctctgtgaggcattagatgcaccaatggagctaccaaatggcttatccagttgtgttcttctactcgatgcacttgctaacgtgtttacttt

SEQ ID NO: 8156 - DNA, 411 bp, Zea mays
  Clone ID: LIB3150-017-Q1-N1-E8
gaatttagaaacacatcaaaccttccgctctcttcccttcctttgcgggctgctctccagttcaggcgtccagcttcgcccagagtccagacacggccaacagttaaacgcgccaccgacaccacgctcgcacgcacgccccacaggtacagctagctcccacccctcaacagcaacagctaagcttctcctagcagacagcaacatgaccgaggaggaggccaagaaggtggaggtggaagtggaggtcaccaaggcggcgccggcgaaggagaacgccgccgaagagaaggccgtcatccccgcgaccgagccgccggccgcccaggagaagccgccagcgccggccgacgactccaaggccctggccatcgtcgagagtgagtacaacttgctctgcttaattctccc

SEQ ID NO: 8157 - DNA, 201 bp, Zea mays
  Clone ID: LIB3150-017-Q1-N1-E9
acggatatgcaagacgttctatccctgtatgcgggcagttgcactagaggtatcgagctcaatgatcgagatggtgagacacaagctaggccaaactaccatggatgcgctcttagtcatgccatcagtaggcgcgctcttgccgaggaagatctgacagattgcgtaaggaacatccttaatgaaagggctcattcgttc

SEQ ID NO: 8158 - DNA, 120 bp, Zea mays
  Clone ID: LIB3150-017-Q1-N1-F1
cttacacatgcacttgcactagctgcggggagcatacagcgatgcgtagactgccaaggtgccagtcaaagtgtcgattgtgtacttggcagtgtcatgtgcactaacttatatagtatg

SEQ ID NO: 8159 - DNA, 127 bp, Zea mays
  Clone ID: LIB3150-017-Q1-N1-F10
gtcgtccgccttgccattaacgaaggcttggtctttcttcttggatctccactcgtccattcacagatccgttccttcagctaggggtagcgttcatctgcagcgatggctatcaagcggagcaagg

SEQ ID NO: 8160 - DNA, 400 bp, Zea mays
  Clone ID: LIB3150-017-Q1-N1-F11
ggggcagccagggaggcttgtcaagagcattggcctgcacgggcggatcatggagcggcacgccatgtcagctactctcctggcgaagctgccgtaccagcacatcgctctgaacctggcgctgatcaaccagggcgcgatggttaccgtgctagccaagatagaggagatgcagcgcggcgagacgcgggcaagccgccatgcgaaggcgtatatggagggcctcgtgggtgtgctggtccggctaacgacgacgctgtatgacccggacgtgctcttggcggccatggatcacaacctcacgtcggtgctcacagatctcgtgcggtccgcatgcagcgacgaggtccagcgtctcgccgcgattggtctcgagaacctcagcagccagtcgcccaac

SEQ ID NO: 8161 - DNA, 419 bp, Zea mays
  Clone ID: LIB3150-017-Q1-N1-F12
ggggcagccagggaggcttgtcaagagcattggcctgcacgggcggatcatggagcggcacgccatgtcagctactctcctggcgaagctgccgtaccagcacatcgctctgaacctggcgctgatcaaccagggcgcgatggttaccgtgctagccaagatagaggagatgcagcgcggcgagacgcgggcaagccgccatgcgaaggcgtatatggagggcctcgtgggtgtgctggtccggctaacgacgacgctgtatgacccggacgtgctcttggcggccatggatcacaacctcacgtcggtgctcacagatctcgtgcggtccgcatgcagcgacgaagtccagcgtctcgccgcgattggtctcgagaacctcagcagccagtcgcccaacctttcccagcccccaaccg

SEQ ID NO: 8162 - DNA, 417 bp, Zea mays
  unsure at all n locations
  Clone ID: LIB3150-017-Q1-N1-F2
cgtagttaaggcactctctccccttcttcaacataaaccgcaaccaccggcagccactactgacgctacagcaccgtcagatgcctgactttctgaaggagctatgaatcatgaatgttaagagaaccattttctcttcggtgcgtgcgctgttctagatcactatcgtgtgcctatgaagtgatcagtgtcacacaagcaacggcattgtgggctaaagcatatctccacctttacttagcttggtacaggcaggagacttcccattgtcattaccgtgttctatgctgagtcatgtgctgctttcgttggccgggtgaggtgtgcttgttggccagcggtcgtgaccacctaattaccgtgttatggtcatcactgtaacatgcgaaaggtctaatnttttttcatgggttgttt

SEQ ID NO: 8163 - DNA, 259 bp, Zea mays
  Clone ID: LIB3150-017-Q1-N1-F3
gtggagatctggaactcgtcgccaaaagtattgagtcttccgacctcaacttctcacgttacggtgacaccttttttgaggtggtttttgttggaggacgcactcagcctggcactgtaaaacctgaagaaggagaccgccacccttattctatgttagattgtgtggcacagcgtgaaacaattttgcctttcgtactctatatccagaaaacattgcgcaagaagccttttttaataaaaaaatcttgaaaatgtta

SEQ ID NO: 8164 - DNA, 385 bp, Zea mays
  Clone ID: LIB3150-017-Q1-N1-F4
cctgattctccgcctatacgtcgccgaccagatccttctcctgtcaggcgtggtgacacacctcgcaggagaccaccatctccagttcgaaggcgttctccttctccaccacctaggaggcataggtcaccgatgcgtctttcacctaggaggggacgtggtagcccatcaccacgcaggcgctcccctgggcctcttaggcggcgctcaccacctccaaggcggttgagaagcccaccaagaaggccaccacctccacgtcgcttcagtcgctctcctcctcgccgaccccttcgctcccgctccagatcaatttctccaagaaggggacgagggcctccattgaggcgtggtaggtcagactcatcatattctcgatcaccta

SEQ ID NO: 8165 - DNA, 402 bp, Zea mays
  Clone ID: LIB3150-017-Q1-N1-F6
cccacgcgtccgcagaagggaacatcgaggacattgtaagtgaattatgtgctgagacgggagccaaccaggaggatgccctcgcgcgaattgaaaagctttcagaagtaaacccgatgcttggcttccgtgggtgcaggcttggtatatcgtaccctgaattgacagagatgcaagcccgggccatttttgaagctgctatagcaatgaccaaccagggtgttcaagtgttcccagagataatggttcctcttgttggaacaccacaggaactggggcatcaagtgactcttatccgccaagttgctgagaaagtgttcgccaatgtgggcaagactatcgggtacaaagttggaacaatgattgagatccccagggcagctctggtggctgatgagatag

SEQ ID NO: 8166 - DNA, 379 bp, Zea mays
  Clone ID: LIB3150-017-Q1-N1-F8
gttcgtccgtgtgaccggcggcgaggtcggcgcagcgtcttcgctggcccccaagatcggcccgctcggtctttcccccaagaagatcggagaggacatcgccaaggagacggccaaggactggaagggcctccgcgtcaccgtcaagctcaccgtccagaaccggcaggccaaggtctccgtcgtcccctccgccgcggcgctcgtcatcaaggcgctcaaggagccagagagggaccgcaagaaggtcaagaacatcaagcacagcggcaacatcagcctcgacgacgtcatcgagatcgccaggaccatgaggcacaggtccatggccaaggaattggccggcaccgtcaaggagatcctcggtacctgcgtcagc

SEQ ID NO: 8167 - DNA, 286 bp, Zea mays
  Clone ID: LIB3150-017-Q1-N1-F9
acgctggcctgacagggcaagagcttagagggcgtctttgcttcaggcgatcgcaatgtggaagctttcaatgaatactttgcaaagatgccatggctgagctgccctttgtctgacagtgaaagccgtgaggcccttgatggcctgttcatggtctctggtatcccacaccttgtacatccttgatgcaaaaactggtgaagtttacactgaagaaagtgttgaattcgtgagtgagtatcgcgtggatgcttaccgtatcacaccacatcggatcaatgaactg

SEQ ID NO: 8168 - DNA, 218 bp, Zea mays
  Clone ID: LIB3150-017-Q1-N1-G1
cacatcgccatggcagccaagatgtttgcattgattgcgctcctagctctttgtgcaaccgccactagtgctacccatatgccagggcacttgtcaccactactgatgccattggctaccatgaacccatggatgcagtactgcatgaagcaacagggggttgacaacttgctagcgtggccgacccctgatgctgcagcaactgttggccttaccgc

SEQ ID NO: 8169 - DNA, 130 bp, Zea mays
  Clone ID: LIB3150-017-Q1-N1-G10
cggccgcctgggaactaataacaggtgcggttcgacttctcgagctctccgtctagcgaatccccttccaacttgccataatcttggcaagacccgtgtcctgtgagcaaccatcatgctgtcaacctac

SEQ ID NO: 8170 - DNA, 409 bp, Zea mays
  unsure at all n locations
  Clone ID: LIB3150-017-Q1-N1-G11
cggacgcgtgggcaaaatctcatttgagcgtgcaagctccttcgcctcgaaccctctcgcgcttggcttgctttcactctccagggccccactcccacctcgccgccgcagccatggcgatcacagcgccaactcccgacatcctcggcgagcgccagtccggccaggacgtccgcacgcagaacgtgatggcttgcggggcggtggccaacatcatcaaatcctcgctcggccccgttggtctcgacaagatgctagtggatgatattggtgatgttacaatcactaatgatggagcaaccatacttaagatgtnggaagttgagcatccagccgccaaggttcttgttgagttggctgagctccaagatcgtgaggtatgagatggaactacttccgttgtcatcat

SEQ ID NO: 8171 - DNA, 227 bp, Zea mays
  Clone ID: LIB3150-017-Q1-N1-G12
gtgcaaacagaagcttgtagcaaatgcccttcttgcggtttcacttgctgtgtgcaaagctctagctatggttaaaatgattactgtctaacagcacattggaaatcttgctgggaacaaaaatatggtgctccctgtacctgccttgaatgcgattaatggaaggtcacatgctggaaacaagcttgccatgcaggagttcatgatcctacctactggtagcctct

SEQ ID NO: 8172 - DNA, 409 bp, Zea mays
  Clone ID: LIB3150-017-Q1-N1-G2
caaagcaatcggaattctctgcgatttctctagatctcgactaccccccactagttttggttcctcctttcgttcgagagagcgattctggtggcaatggcgaagagcgagggtccggcgatcgggatcgacctcggcaccacctactcgtgcgtcggcgtgtggcagcacgaccgggtggagattatcgccaacgaccaggggaaccgcaccacgccgtcctatgtcggcttcaccgacaccgagcggctcatcggcgacgctgccaagaaccaggtcgccatgaaccccaccaacaccgtcttcgatgccaagcggttgatcggcaggaggttctctgatccgtcagtgcagagtgacatgaagctatggcctttcaggtcatccaggtcctggtgacagcccatga

SEQ ID NO: 8173 - DNA, 213 bp, Zea mays
  Clone ID: LIB3150-017-Q1-N1-G3
ctcattcccaagtcctcatctgcttcgcttcccaccaaatcgaatcctcatcgctccggctatatggcgactctaaccatgcagacgatcggtcccacccctgctccggctgcgcagcaagacccgagcaagggagagaatccttctaccgtcgatggtagcgatctgggtgacatcgactcgggctgggttatcctcaagaactccgatgtc

SEQ ID NO: 8174 - DNA, 383 bp, Zea mays
  Clone ID: LIB3150-017-Q1-N1-G4
ggattgcccacttccttacttttacagcggcatcatgccactgtcagtgttatccatgccttcacaacaaatccagaggctattacccgcgaatctgatattgtgatatcagctgctggagtggccaatcttgtaaggggaagctggttaaagcaaggtgcagaggtgattgatgttgggacaaatccaatcgaggatccaaccagtgactacggttatcgcctaactggggatgtctgctttgaagaagcactgaatgtggcctctgctataactccagttcctggcggagttggaccagtaacgattgccatgcttcttggcaacacactcgattcagcaaaacgcgtttatggcctaagtgactgaactgacccccctct

SEQ ID NO: 8175 - DNA, 417 bp, Zea mays
  Clone ID: LIB3150-017-Q1-N1-G6
gggttttgctgctctccgaccccgagctccgaaggccgcagcatcaggcgcggcccccctcgcgtgtgaccgaaatggcgctgccgaatcaggggaccgttgattaccccagcttcaagctcgtcatcgtcggcgatggtggaactggtaaaactacatttgtgaagaggcatctcactggagagtttgagaagaaatatgaaccaaccattggtgtggaagttcatccgctggatttcaccactaactgtggtaagatcaggttctactgctgggataccgcacggcaagagaagtttggtggcctcagggatggatactatatgcatggccagtgtgcgatcatcatgttcgatgtaacctcaaggctcactgacaagaatgttcctacgtggcatagggacctgtgcagggtct

SEQ ID NO: 8176 - DNA, 161 bp, Zea mays
  Clone ID: LIB3150-017-Q1-N1-G7
gcgtatgccagcgttccgcttgtgttcacaggaacacgaatgacgtagggagcgcctagctaagtctgcaactatactgaagggaggctggctaacagcgccccctgtattatgcgagatgaaaggtgaaaaaggtcgtcgatggcacaactgctgacgcg

SEQ ID NO: 8177 - DNA, 387 bp, Zea mays
  unsure at all n locations
  Clone ID: LIB3150-017-Q1-N1-G8
cccgtctctggagtctggaagcttcttcctcctcgcctccgactccgtcatggccggcggcaacctgttcgggcgggcgctgagctacgtagtcaacgagctcctcgtcgagggcctcgccaacaaccgtgcattccagaggttcgctgtgaagaccaacaggactcttgagagcctatcgtctaaagctaaggaagtgagggaggagttatcggaacaattgaaggaagctcgtggccagaaagatcacttcaagcagtgaagctggttcccacatcgattcagcaagatgatactgacaatcttgttacgagtntagtccttgtctgggtactatttatgaatgacattcctgatgtcattcaatggaaattagtcttaagtttc

SEQ ID NO: 8178 - DNA, 381 bp, Zea mays
  Clone ID: LIB3150-017-Q1-N1-G9
cggacgcgtgggtcccgctcccagctcgggttccgcttcttgcagccgtcgcccctaagcgctccagagaacttgcgtcaacatggggaagacacgtggtatgggagccgggcgcaagctcaagacccaccgcatgaaccagcggtgggctgacaaggcatacaataagagccatttgggcaatgagtggaagaaacagttcgctgggtcatcccatgccaagggcattggcctggagaagattgatattgaggccaagcaaccaaacttcgctatccgtaggcgtgctcgagttcagcttgttaagaatggcatgatgattgctgccttcgtgccaaatgacggatgtttgaactacatcggggaacatgatgaggtctt

SEQ ID NO: 8179 - DNA, 252 bp, Zea mays
  Clone ID: LIB3150-017-Q1-N1-H1
ctgcatgcatgcgttccgcttgtgttaacacatacaccagtaacatgtggcgcacctatataaggctgcaactatactgctaggagtctggcaaggagccgctaccgatctaggggagaccaaagatgaagaagcgtctggcactcaactctgcttacggggccacacgaggagtccatctgggccgccgagctgctgccctgcgactgccacacctctgctgcggagctgctcactggcgcgaccgacgag

SEQ ID NO: 8180 - DNA, 393 bp, Zea mays
  Clone ID: LIB3150-017-Q1-N1-H10
ctccgttgaaaaagttgaattgttgattgacttgattggttatatagtttctgagagttgggaaccgcagggtaggggcatcggaaggagcatcatagacgatgctatcagagagttaccactactgcggaagctggctttggatctttgcgatgcctgtgaagacggttacgatagcccaaacgatgcggaagggaagatgattagaagtgtaaggatgagccgatgcaagaagatggcggtgtcgtgtttggaggtccccagacaagggtcttcaacttcaaagccggtgcacaaggacactgtagtgctggaatggagcaacacaatgttcacaaccaccatagtgaagaaagagtgtgatgagcctcttctgtagttttgtccctaatg

SEQ ID NO: 8181 - DNA, 294 bp, Zea mays
  Clone ID: LIB3150-017-Q1-N1-H11
tcggtacggcttgtcctccccctacggttcgggttcgagttcatgaggctctcctgagttcggctacatgcgtgatcggatctagatggcggcttcggatgtttactaccgctgctttgtcggaatcctgtcctggttcacagacgaccactacttacacaactccttctgcacctacggcgaggtccacgagttcaagatcatccttgatctggagacgcagaggtgccgcggcttcagcttcgtcaccttttacacggaggaggctattcgatacgccatcgccggccttaa

SEQ ID NO: 8182 - DNA, 403 bp, Zea mays
  Clone ID: LIB3150-017-Q1-N1-H12
gcgatagggagagaggagagagtctgcaggatccagcaggccgaggaaggagtcagcggcgggccggagaatatgagcggcaacggcgcgaagaaggtggtcgatgcggcggtgaaggccggcaggacgatcatcgactgggacggcatggccaagttgctcgtcaccgacgaggcgcgcaaggagttcgccgccctccgccgcgctttcgatgacgtcaaccaccagctccagaccaagttctcccaggaaccccagccgattgattgggagtactacagaaaaggaattggatcaaaagtggtggatatgtacaaagaggcttttgaaagcatcgagatcccgaagtacgtcgacacaggtacttcccagtacaagcaaagtttgatgctgtgattgctga

SEQ ID NO: 8183 - DNA, 345 bp, Zea mays
  Clone ID: LIB3150-017-Q1-N1-H2
cgggagacgcgctccccagtccccacccccctctcgtgtcgtggcgacgactgggggggctgtcgctgccgccctacgtcaggtggccaggtcgtattagggcacttcgccggcgacgagtaccacaagtttgcaggcagtggacactttctctggtatcagagggtcaatgtccaattattatgatgactacgatgacattgacgagatggaggatgattatgatatggatgatcccattgatgacatggtagacgaacagcaagggattagggattctgatgcggaagataatgattatggacaaccaaatgatcagatcccagatacttcatcaacagatgc

SEQ ID NO: 8184 - DNA, 355 bp, Zea mays
  Clone ID: LIB3150-017-Q1-N1-H3
ccgcaagccgtccgccttgcccttcacgaaggcttggtcctcctccttgtatctccactccccccttcacagatccgttcctccagctagggttagcgttcctctgcagcgatggcgatcaagcggaccaaggcggagaagaagatcgcgtacgacaagaagctgtgcagcctgctcgatgagtacaccaaggtgctcatcgccctcgccgacaacgtcggttccaagcagctccaggacatccgccggggcctcaggggcgactcggtggtgctcatggtgaagaacacgctcatcaggcgctgcatcaaagtgtacgccgagaagaccggtaaccacacctttgacccgctca

SEQ ID NO: 8185 - DNA, 257 bp, Zea mays
  Clone ID: LIB3150-017-Q1-N1-H4
ccttactaccgacaggttcccatttcgctaggctagcggctcgtggatcgcccgtcctcacctcctccagcggcgacagcttacgtagccgccttcttaagaatgttatagacgccgaccgaaggacccggccgccagacgcagcatccgttggtgaaggcgaagtacgcaggctccgcttctaaggacgacctagctagcccgctatgaaccacaggaaggccatcttacgggcgaagctacgtgagacgaatgag

SEQ ID NO: 8186 - DNA, 278 bp, Zea mays
  Clone ID: LIB3150-017-Q1-N1-H5
acggtgaatgggatagaggtgagagtctgctggatctaacggtccgggggaggaggcaacgttagatcttcaaatcttggcggaagatgcacaaagaaagtggtctagacggctgcgagtgccaggacgacgatgatcaagttggatttgatgtggaaattggtcaccagcaactagagacccaccgagtggtcctgtctattaacaactatctatgaatggaagcaccagctagaaaccaagctgttctaataacacctaccctattgattgcgagt

SEQ ID NO: 8187 - DNA, 326 bp, Zea mays
  Clone ID: LIB3150-017-Q1-N1-H6
tcgacaacccagcgcccgcagtcatcgttatcgatcgatcgccggcaaactaacctctaatgttgtctggagcctgcgaggaggacatgaagctcgcggtgggcggcgcccacatgaaccttaaggtcaagggacaggatggccatgaggtgttctttcgcgtaaagaggtccacccatctgaagaagctggtgaacgcttattgagaccgatagtctgtggatatgtgtgccattgcgttactgtttgatggccgcacgctttgcattgagcaaaccctcgatgagctggagatggaggactgcgactagatcgacgccatgctt

SEQ ID NO: 8188 - DNA, 417 bp, Zea mays
  Clone ID: LIB3150-017-Q1-N1-H7
cagacacagagctcgaccccccctccccttccttcgctcgtgcagccctgaccacccgcatccccgtcagtcatggcagcggcagcaggcggaggcgcggtgcgtgcgctgtcccagaaggagcaggacatacagatgatgctcgccgccgacgtccaccttggcaccaagaactgcgatttccagatggagcgctatgcctttaaccgccgcaccgacggcatctacatcatcaaccttggcaagacatgggagaaactgcagcttgcagcgagggttatcgacgccatcgagaacccgcatgacatgatcgtccagtccgcccgcccctatggccagcgtgctgtcctcaagttcgctcagtacactggcgctcatgccatcgctgagaggcacacccctggtaccttcactaat

SEQ ID NO: 8189 - DNA, 383 bp, Zea mays
  Clone ID: LIB3150-017-Q1-N1-H8
gtcaaaaggcattgatgttagggccttggtggttatcaatccaggaaatccgactgggcaggttcttgctgaagacaaccaatatgatatagtgaaattctgtaaaaatgagggccttgttcttctagctgatgaggtatatcaagagaacatctatgttgacaacaagaaatttaactctttcaagaagattgcaagatccatgggatacggcgaggatgatctccctctagtatcatttcagtctgtctccaaaggatactatggagagtgtggtaaagaggaggtacatagagatacgtgcttagtgctccgtagagacagattacaggagctcagtgactgtctcatatcactgtcaatctgcagctcgcatgatcaca

SEQ ID NO: 8190 - DNA, 228 bp, Zea mays
  Clone ID: LIB3150-018-Q1-N1-A1
gcataataatgacaataatcgatcttgtccgaaggcctgaatatcacgcgcggcccccgtagcgtgtgaccgaaaaggcgctgcgcgcatcacgggaccgctgaattccatagcttcaacgctcgaaattttccgcgaaggtggaactggtaaaactacatttgtggagaggcatctcactggagcggtcgagaagaaatatgaacccaccattgaggtggaagtcca

SEQ ID NO: 8191 - DNA, 409 bp, Zea mays
  Clone ID: LIB3150-018-Q1-N1-A10
ggcatgggcgtggcactgccacccgacgcaccgcctgcttctgctgttcaatcgcgacgagtatcactccaggccgacgcagccggcgcagtggtgggcggcgggggaggaagccaaggaaatccttggaggcagggacgagctcggcgggggaacgtggatggggtgcacgagggatggtaagctcgccttcctgaccaacgtgcgggaacccagctctctgatcggggccaagaccagaggacagctcccggtcaggtttctacagggcagcctttgtccattggagtatgccacagaaattgcaaaggaagcagatcagtacaatggctttaaccttatattggctgatgtgaactcaggaaccatggtttacatctctaatagacccggaggcgatcctgtgatt

SEQ ID NO: 8192 - DNA, 410 bp, Zea mays
  Clone ID: LIB3150-018-Q1-N1-A12
gaaagatgagggtgtctctgacgccacgggagaaggggttattggatgacgacgacgaataagatgatgcacatgaggcaaacaagaagaaagatggagggctgtccaacaaaaagaagaagctggagcgcagaatgaagattgcagacctcaaacagatatgcaacagacctgacgttgtagaggtctgggatgcaactgctgcagatccaaaattgcttgtttatctcaaggcatacaaaaacacagtacctgtccctaggcactggtctcaaaagcggaagttcttgcaggggaagagaggtattgagaagcagcctttccagcttcctgacttcatagctgcaactggaatagaaaagataagacaggcgtatattgagaaagaggatagcaagaagttgaaacat

SEQ ID NO: 8193 - DNA, 366 bp, Zea mays
  Clone ID: LIB3150-018-Q1-N1-A3
cagagcgcagaagaacccgatcgacaccatgagggtgttgctcgttgccctcgctctcctggctctcgctgcgagcgccacctccacgcatacaagcggcggctgcggctgccagccaccgccgccggttcatctaccgccgccggtgcatctgccacctccggttcacctgccacctccggtgcatctcccaccgccggtccacctgccgccgccggtccacctgccaccgccggtccatgtgccgccgccggttcatctgccgccgccaccatgccactaccctactcaaccgccccggcctcagcctcatccccagccacacccatgcccgtgccaacagccgcatccaagcccgtgccagct

SEQ ID NO: 8194 - DNA, 392 bp, Zea mays
  unsure at all n locations
  Clone ID: LIB3150-018-Q1-N1-A5
gggaggacctgactcgatctgggcaaaacaccattaccgacgtgttggcggaagaggggtgtagtggccgccgccgtctggtgcttgcacgggcttgcggttcgtgttgcggttcgggaacttcgcgagcgcgcctgggaagcatatccagcctcgatttggcaagggacgtcatggtctggcgggaattcttcactggagttgggtggcggcgcggagttctctccctccgtggaccagttcgagcaccctcacaactaccgaagagccagtggccgaggatccgggtgttcatcaggtagaagttgctgagcaggagctcattgaagacgagcaagctacagaggattatggngttcagctggtagagactgctgtgcangagctcgttg

SEQ ID NO: 8195 - DNA, 307 bp, Zea mays
  Clone ID: LIB3150-018-Q1-N1-A6
cccgagcatacaagggtggacgcggagccggcggcggagcggagatggcggagaagaagcgaggcgccggcactcgcaaggatgaggtggtgacacgcgagtacaccatcaacctccacaaacgcctccacggatgcaccttcaagaagaaggcaccaaatgccatcaaggagatcaggaagttcgctcaaaaggccatgggtactactgatcgtcggattgacgtgaagctcaacaagcacatctggagcagtggtattcgcagtgtgcctaggcgtgtctcgtgtcataattgcccccaaccgga

SEQ ID NO: 8196 - DNA, 254 bp, Zea mays
  Clone ID: LIB3150-018-Q1-N1-A7
ggagcctggccacgacgccgccacgggcgtgcagtccaaggacgtccacctcggctcctactccgcgcggctctacctgcccccaagcgccggcgccggcgccaagctgcccgtcgtcgtgtacgtccacggcggcggcttcgtggccgagtccgccgcctcgcccaactaccacctcttcctcaacaggctcgccgccgcctgccccgcgctcgccgtctccgtcgactaccgcctggcgcccgagcaccctc

SEQ ID NO: 8197 - DNA, 292 bp, Zea mays
  Clone ID: LIB3150-018-Q1-N1-A8
accacctcgcctgcgatctccgtagcctccgtcgcgtcgagcatcgatcatgtcggcctactgcggaaagtacaaggatgagctcatcaagaatgctgcctacattggcacccctggcaagggtatccttgctgctgatgagtccactggcaccattggcaagcgcctttccagcatcaatgtcgagaacgttgaggagaaccgccgtgccctccgtgagctcctattctgctgccctggtgctctccagtacatcagcggtgtgatcctcttcgaggagaccctgtaccag

SEQ ID NO: 8198 - DNA, 339 bp, Zea mays
  Clone ID: LIB3150-018-Q1-N1-A9
ctcctccgccgcggcgaaacccgccgggccagaaccccacccggaggaagggcgaggagccgtggctcgccgcgagcctccgcccggcgaacttcctcccgggcctcgccatcgggttcctcctaggcctcctcctcgacttgtcctcgtcgtggaggcccaagtccagccccgcgccggctccggccgccgcacccgcgcgggcctccagctccaagcgggcgtcggggacctcgtttgcctcgggcggcgaggagcttaagatggttttagtggtgcgtcaggacctcaagatgggggctgggtaaaatagcttcccaatgtgccccatgcagcgac

SEQ ID NO: 8199 - DNA, 361 bp, Zea mays
  Clone ID: LIB3150-018-Q1-N1-B1
agaggcgcagagacaggcgtcttcgtactcgcctatctccgcgactcaaagcttcttccatttcctaccgccgccgctgcagctccaccccattccgtcgacaccatgagggagtgcatctcgatccacatcggccaagccggtatccaggtcggaaacgcgtgctgggagctttactgcctcgagcatggcattcaggctgatggtcagatgcccggtgacaagaccattgggggtggtgatgatgctttcaacaccttcttcagtgagactggtgctgggaagcacgtccctcgtgctgtttttgttgaccttgaaccaactgtcatcgatgaggtgaggactggcacctaccgccagc

SEQ ID NO: 8200 - DNA, 392 bp, Zea mays
  Clone ID: LIB3150-018-Q1-N1-B10
ttttactccactccccctcaccacgagtcggaattcagccccgcgccgcgcgtcgatcctatcctccagtctgattccagctccgcctccacctccacctcccctctcgatccctcgctattaatacatcccggcggatcactcccgatctccatccctcccagccaggcctgcctcctcgatcctcggacgaaacgcgccgacttctttcttcgtcccagtctcgcctgctgccctttttaggtcgcccggatctcgctctcgtcgtcgtcgtcgcgcgcgcgcgcgcttcttgtttctgtcggcgccgccgcggagctgggaaggcggctccttttcgcggtcacaacccacaacacgccctcgtgatcttataccttcttcttggaaaa

SEQ ID NO: 8201 - DNA, 335 bp, Zea mays
  Clone ID: LIB3150-018-Q1-N1-B11
cgcggctcaaacctttcccccttctcccggttcccgccgccgctccatcccgtaacgcgacaccatgagggagtgcatttcgatccacatcggccaggccggtatccaggtcggaaacgcgtgctgggagctgtactgccttgagcatggcattcaggctgacggtcagatgcccggtgacaagaccattgggggaggtgatgatgctttcaacaccttcttcagtgagactggtgctgggaaacacgcgccccgtgctgtttttgtgaccttgaacccactgtcatcgatgaggtgagaactggcacctaccgccagctttttcaccctgagca

SEQ ID NO: 8202 - DNA, 406 bp, Zea mays
  Clone ID: LIB3150-018-Q1-N1-B12
cgcctcgctagcgccttccgcgaaccgactcccgagaggccgagaccaccccgatgtccgccatggagaccgacatcaacgcgccgccgcccgccccagccggcgagggatcctccgtggtcggtccgtcctcctcatcctcccgcaagcccaacaagcgcttcgagatcaagaagtggaacgccgtcgcgctctgggcatgggatatcgtcgtcgacaactgcgccatctgccgcaaccacatcatggatctatgcatcgagtgccaggcgaaccaagctagcgcgaccagcgaggagtgcactgtcgcttggggtgtctgtaatcatgcttttcacttccactgcatcagcaggtggcttaagactcgccaagtgtgcccattagataacagtgagtgggagtt

SEQ ID NO: 8203 - DNA, 277 bp, Zea mays
  Clone ID: LIB3150-018-Q1-N1-B2
gtgaatacaacgacaataacatgtattcggccacaacttattgggagaaattcgttgatcaagagaccaagaaagtggtgaacgaggtgaaactgacagccttgttgtcatcgtctcagcacagacagtcaatagtagctcccgacaaggtctcatgggtggagaaaccctggattcgtctgctctccgtggacgcacaccccaccgaaccatggatcataactggtcacgaatgtggacaccttgccattaggaaccatgacacacagatgctact

SEQ ID NO: 8204 - DNA, 374 bp, Zea mays
  Clone ID: LIB3150-018-Q1-N1-B3
cacgaaggcgcgcttggcgtacatgaggtcgaacttgtggtcaatgcgggagaagacctccgaggctcgtgaggatctggctgcgctcgagaaggactacgaggaggtcggtgctgagtttgacgagggtgaggacggcgacgagggtgacgagtactagacgctctactggcgcggcgtcgtcgggcttgtgtgccactgctatcctgtgatctgccctgagtggctcctatcgtgttatgtttctgtcggttcttatctatctgtcgttgtgtggtttacaacttacgttgtaagactttattcccccgctttgctactgggttattaagtttggcgttattgttttcttgatctctgagatgctttgcttt

SEQ ID NO: 8205 - DNA, 331 bp, Zea mays
  Clone ID: LIB3150-018-Q1-N1-B4
gcggaaacctaacccacccaagcggcagccatggagcccttccccgacggcgccagcggctcggtggagcggtggcgcgcggaggcggcgcgtgcgttccagcactacctgcaccgatcggggccacacactgcggggcggggggcgggcactctcgttgccgtggcggagtacgcgctgcgagtctactacgtgcggggcttctacatagtcacctaccgtctgggcatctacctgatcaacctcctcatgcgattactgtaccccatggtcgaaccggagctagacgccagacccgagctttcaaccagcggctacgacgagttcaagc

SEQ ID NO: 8206 - DNA, 394 bp, Zea mays
  Clone ID: LIB3150-018-Q1-N1-B5
ccccgatcatcgcaccacctgtagcccacctcgctctcgagtctcgacccagcgacgagatggccgcggtggatctgaccccaaggacgcccaagaaggcctacggcggcgacggcggcgcctactacgagtggagccccgccgacctgcccatgctctccgtcgcctccatcggcgccgccaagctctcgctcgccgccggcggcctctccctccccagctactccgactccgccaaggtcgcctacgtcctacaaggcgcgggcacctgcggcctcgtcctgcccgaggcgacgaaggagaaggtggtggcggtgaaggagggcgacgcgctggcgctgcccttcggcgcggtgacgtggtggcacaacggccccggcgcgcaggccgacct

SEQ ID NO: 8207 - DNA, 385 bp, Zea mays
  Clone ID: LIB3150-018-Q1-N1-B6
tgcttgttggttacctcgtggaagcttaaaatatctcgtcttgttgacatccttgcagttgtcgcgtgaacaagtaatctatgatggcaatgtttgcctggtcatgaagtattattactttcgttgaaaccgtgatgctattaagacttaattttttttatggaaaaaaaaaaaaaaaaaaaaaaaaaaaaaaaaaaaaaaaaaaaaaaaaaaaaataaaaataaaaaaaaaaaaaaaaaaaaaaaaaaaaataaaaattattataattaattttttttttaatatatttaaaaaaatatattgggggggcccccccgggaaatattcgggccgtgttcctctgggggtcaccctttttttttcttttgggggggtttttttaaa

SEQ ID NO: 8208 - DNA, 383 bp, Zea mays
  unsure at all n locations
  Clone ID: LIB3150-018-Q1-N1-B7
ccactctgctactccacctacctcccggctgccggatccggcgatggagaagatgctccactcagccccagcccacggcaggctcccggagtgcttcatcttcccggccgacaagctcccgcaggccaaggccacctcagcgacggtctccctgcccatcgtggacctctccctcggccgcgacgaggtgcggcgcgccatcctcgaggccggcaaggagatcggcttcttccaggtggtgaaccacggcgtctccctggaggcgatgcangacatggagacggtgtgccaggagttcttccggctgccggcggaggacaaggccgngctgtactcggaggacacggggagggcgacccggatctactccagcaccatgttcg

SEQ ID NO: 8209 - DNA, 396 bp, Zea mays
  Clone ID: LIB3150-018-Q1-N1-B8
ctccatccaatcgaaggacctagcgagcggcagcggcggcggcgatcggagaagatggtgcgcaaggcgaaggttgagttcgacgagcagccgccggataacttcgacccgaagaacccgtatgccgacccggtggcgatgctcgagtaccgggaacacctggtgcgagagaagtggatccagatcgagaccgccaagatcatccgggagcgcctccgctggtgctaccgcatcgagggcatcaaccaccaccagaagtgccgccacctcgtcgaccaatacctagaggctacccgcggcgtgggttggggcaaggatgcccgcccgcctgaactccacgagcccaagaagaccgtcaaggcggagtagcggcgctgctgccttgcttctcgtgct

SEQ ID NO: 8210 - DNA, 371 bp, Zea mays
  Clone ID: LIB3150-018-Q1-N1-B9
ctgattcaggcgcatctcacttgtgagggattctctttgacgccagcacttcttaaagattacagacacatgcttgaacttgcacctcgtcttctggaagaactcgttatgattgcagttttaccaaggaatccccatggttttggatggctccggcctgcactcagtgatattgagctttctcagaatattatccaggctgtcccattaagtgcaccgaaaggctagtgggctacctcggaaggaattccgctttgcttgcagtggcacaatttacagaagcaaccgtgaaaaagattggtcgcaagaaaattctggcattccaagaactttgtgacatgccttgtgaagatcgtgctgcattgctcaca

SEQ ID NO: 8211 - DNA, 397 bp, Zea mays
  Clone ID: LIB3150-018-Q1-N1-C1
gccgtctgctccgggctgctgttctgcgcctccacaaggctttggcctctgtgttgtaagttttaagcttcacctccagccatgggtaaagagaagtcccacatcaacattgtggttattggccatgtcgactctggcaagtcaaccaccactggccacctgatctacaagcttggaggcattgacaagcgtgtgattgagaggttcgagaaggaagccgctgaaatgaacaaacggtccttcaagtacgcctgggtgcttgacaagctcaaggctgagcgtgagagaggtatcaccattgatattgctctgtggaagtttgagaccaccaagtactactgcactgtcattgatgcccctggacatcgcgacttcatcaagaacatgatcacgggta

SEQ ID NO: 8212 - DNA, 394 bp, Zea mays
  Clone ID: LIB3150-018-Q1-N1-C11
gctccagatccagggccctcatagagcctgcgctcgatctgccccccggatcggattggccgccgcgcatctcatgggtgaggaagctgtccacttcagcgtcgtcgacgccaaggactgcaaacagagtgcctttgaagtcggcgataagacgtatgttatttgtagatcagatgatgatttgaaaacatctgctgttaaaattcacgacaagctcactcagacttggctctcacccacaatacttggggaacagccacttctaaccaagtcacagtctgtgattcctgtcagtgatgagaagatattagttatcgagaagggtgttcccttgaatgagtccatctggttccttgagatagacacccccttttgtaagcaacaacggaaaatc

SEQ ID NO: 8213 - DNA, 387 bp, Zea mays
  Clone ID: LIB3150-018-Q1-N1-C2
ggagaccactcgcgactgctgtgctgagctggcgcaaggttgggccctaggtgctgcacgcgtgaacctggacctctggtcaagcttaaatagaagtgctacatcaacgttgctgttatgggtcatgtctactctcgcggggctatgaccattggcaagttgagctacatgcaatctggcattgacacgcgcgcgagtgtcagtatcaacagggaagcctctgtaatcatcacaaagttctctgatcaccactaagtgcttagacaagctcaacgatgatctctatacagggatcaccgttcatattggattgtcgaagtgatagactaccgagcactaatggactgctattgactcaacagaacatctggattacgaccataacat

SEQ ID NO: 8214 - DNA, 414 bp, Zea mays
  Clone ID: LIB3150-018-Q1-N1-C3
gttggcttctcctccccctccggttcgggttcgggttcgtgaggttctccggggttcggtttcgtgggtgagcggatcgagatggcggcgtcggatgttgagtaccgctgcttcgtcggcggcctcgcctgggccacggacgaccactccctccacaacgccttcagcacctacggcgaggtcctcgagtccaagatcatcctcgatcgggagacgcagaggtcccgcggcttcggcttcgtcaccttctccacggaggaggcgatgcggaacgccatcgagggcatgaacggcaaggagctggacggccgcaacatcaccgtcaacgaggcccagtcccgcggcggccgtggaggcggcggcggcggcgggtaccgtggtggccgtggaggcggcggctaccgcggtggcggg

SEQ ID NO: 8215 - DNA, 404 bp, Zea mays
  Clone ID: LIB3150-018-Q1-N1-C4
caacaatgttgcgatgtatgatcctttgctgaagaaatggcaccaccaatctgttcctctcaatcatacgaagatagttattccagtggcatccgtgggtggccttgtatgtttattggatctgagccacaggaatttttacatctgcaaccctcttacgcaatcactgaaggagatcccaccaagatcagtccatggttggtcaagagtcgttgtagggatggtgttgaatggaagaagttctagtgatggctacaaagtaatgtggttagatattgatgggacttgcgaagtttatgactctacaaagaacgtgtggtcttgccctggaacttttcctccaagcatcaaacttccacttgctctaaattgaggtcacaccagtggcggttgcagcatgatat

SEQ ID NO: 8216 - DNA, 400 bp, Zea mays
  Clone ID: LIB3150-018-Q1-N1-C6
cccgccgccactcctgctttggcgccgtagctagcaaaggcgatatccatggcgacccctgcacggatcgagctggacaagctgagcgtggagcagctcaaggggctcaaggagcagacggatctggaggtcaacctcctccaggacagcctcaccaagatccgcaccgccgccacccgactcgagaacgcctccgccgcgctccaggacctatccctccgcccccaagggaagaagatgctcgtgccgctcactgcgtccctctacgttcccggttcactggacgacgcggagaaggtcctcgtcgatgtcggcaccggttacttcatcgagaaaaccatggctcaggggaaagaatactgtgaaaggaaaattaatttattgaagtcaaattttgatg

SEQ ID NO: 8217 - DNA, 267 bp, Zea mays
  Clone ID: LIB3150-018-Q1-N1-C7
aacaaatcacatttatctgatccttaggggcaagcaaggccatcttgaatttctatcgaaatatcatgcgtcaccactgagtggcccatgtcctgtttgtttgctcacggcttgaagactcatcggctggtccttctaaatcagttcagggtttatttgagagcgacggtattggacgggattgagacggctacaatcccctactataccaatttaaataacagcgatggaggaccatttaacccccttgcattgcaacaagcccta

SEQ ID NO: 8218 - DNA, 411 bp, Zea mays
  Clone ID: LIB3150-018-Q1-N1-C9
caagtagtgaccaggagcgagcagccggggaaacgagtcaagcaatggagaaggccgtcgacaggcagcgggtcctgctgcggcacctcaaccccgccgcggcggggagccccgccccgcccgccatctccgcaagcgcgtgcgcggcgggggacagcgcggcgtaccaccggaggccggccttcgccgacgacgtcgtcatcgtcgctgcttacaggacggcaatctgcaaggccaagagagggggtttcaaggatacctttgctgaggacctcttggttcctgtcttcaaggctttggtagacaagacgaagctggacccaagtgaagttggcgacattgttgttggtactgtcttagctcctggttcccagagggcaatcgaatgcagaatggctgcactgtatgctg

SEQ ID NO: 8219 - DNA, 413 bp, Zea mays
  Clone ID: LIB3150-018-Q1-N1-D1
cctccatttccggccggctgtcggtgctgcctttcgcagcaaaaggtgggatctcgcgtccgccggcggtggcattgccggatcgagatatctccagcggcggcctgcgtatctccgtggccgatctgcgctgcggcttccccgggcggtgcggactgctgcggtgaggagcgttgctctgcgctgtggtccaagcgagggggcgggggggactgcacgccaggtgttcgacgaagaacccggcccgaggcagccatgagggacttcccttcctgcttcggcgagagcggcgtccagatcgcggacgcgtcgtcttcgtcgtcgtccagcgccggcaagggcgcggcgcagaacctggtgacctgcctctaccagacgcacttctcaggcaggcccctgcttgatctcgctca

SEQ ID NO: 8220 - DNA, 236 bp, Zea mays
  Clone ID: LIB3150-018-Q1-N1-D11
aaaaaaaaaaaaaaaaaaaaaaaaaaagggggggaaaaaaaaaagggggaggggaggaaaaaaaaaaaaaaaataaaaagaaagaaaaaataaagggaacaagagttagggtgttggtggtgatgaatttatgggtgttgcattttttggtttagggggggtgtttttcgggtttttttttgggtgtttttggggggcatctttttttttttttggggtgggttttaaagtttggg

SEQ ID NO: 8221 - DNA, 370 bp, Zea mays
  Clone ID: LIB3150-018-Q1-N1-D12
gcctccaaagccactcccaaacccccgctggcagaaccttctcgaagctccccgccgcctcctccactcgcaccgatggcgaaggaaccaatgcgcgtgctcgtcactggcgccgcaggacaaattggatatgccctggttcccatgattgctaggggtgttatgcttggtgcagaccagcctgttattctgcacatgcttgacattccgccagcagctgaagcccttaatggtgttaagatggagttggttgatgctgcgtttcctcttctgaagggagttgttgctacaactgatgttgtggaagcctgcactggggtcaatgtggccgccatgggtggtggattccccaggaaggaaggaatggaaa

SEQ ID NO: 8222 - DNA, 412 bp, Zea mays
  Clone ID: LIB3150-018-Q1-N1-D2
aacattttccgtttcacccaggcaaattctgaggtgtctgctcttcttggacgtatcccatctgctgtgggataccagccaacccttgccactgatcttggaggactgcaagagcgtattacgacaacaaagaagggttctattacgtctgtccaggctatatatgtgcctgctgatgacttgacagatcctgctcctgctactacctttgcccatcttgatgctacaactgtgttgtcacggcagatctctgagcttggtatttatcctgctgtcgatccactggattccacatcaagaatgctttctccccacgtgctgggtgaggatcattacaataactgctcgtggtgttcagaaggttcttcagaactacaaaaatcttcaggatattattgctatcttgggtatg

SEQ ID NO: 8223 - DNA, 262 bp, Zea mays
  Clone ID: LIB3150-018-Q1-N1-D3
gtgagagcacgcttgccacgcccgagcatggggaccgcccaccgggtggccgctaccttactgtggtctttaccaagtcaccatgacgcgtccctcatcctgcggagccctagtgacaaaacctgccctacccatgtgacttatggccggtatcacaggtggtccacagctagcattccggataacagtccaccgcttgagctattgcaggcaccaatttaccacgatgaatacactggtaacgtctgcagagaaaaagatc

SEQ ID NO: 8224 - DNA, 255 bp, Zea mays
  Clone ID: LIB3150-018-Q1-N1-D4
cactgatgtggctatactgctggacaatgaggccatctacgacatctgccgccgatcccttgacattgagcgcccaacctacaccaacctcaacaggcttgtgtcccaggtcatctcatcccttactgcctccctgaggttcgatggtgctctgaacgtggatgttaacgagttccagaccaacctggtaccctacccgaggatccacttcatgctttcttcgtacgctccagtcatctttgttgagaaggccta

SEQ ID NO: 8225 - DNA, 368 bp, Zea mays
  Clone ID: LIB3150-018-Q1-N1-D5
gacgacccggcgactgctgcgccgggggatcctcataccatacgccgcggcggcctcaataacagcgacagctctccatggcgacactaccggcaaccggccgaggggagagacgattggctagagcgggcggcctatctgcgtgcgacagcggcaccccggtgtggtcgcgtgcgccagtcggcgccgtgcccaggcgtcaagctctgcccactccggattccgttatgcactgactctagcgctgttctgactgactgtcctagactctgacttccacctggtgagcgatcttgactcctccgattcttgacctggcactgtttcgattgaatccgacgccgacgatgtagatgagaacaccccag

SEQ ID NO: 8226 - DNA, 408 bp, Zea mays
  unsure at all n locations
  Clone ID: LIB3150-018-Q1-N1-D7
caaaaccctcgctcgctccccaccaccgcggcgcgccgccgcctgtaccagctgcgtcaagatgagtcggcaccctgaggtgaagtgggctcagaggatcgacaaggtttacatcactgtacagttacctgacgcaaaggatgctaaggtcaatttggatccagatggtgtcttcacattctctggcagtgctggtacaaacttgtatgaattgaaactagatctgaatgacaaagtaaacgttgaggctagcaaaataagtgtgggggtcaggtccatattctgtatcgtaaaaaaagctgaagccaaatggtggaagaaactcgttcgagatgatcaaagggcacctcactntgtgaaagttgattgggacaaatgggttgatgaagatgatgatggtgctgatat

SEQ ID NO: 8227 - DNA, 378 bp, Zea mays
  Clone ID: LIB3150-018-Q1-N1-D8
ctcgcgccgccgccaacgcaaccctgtggtgcccaatccctcacagcaaccatggctggcgcgcaggagtccctctctctggtgggcacgatgcgcggccacaacggcgaggtgacggcgatcgcgaccccgatcgacaactcgccgttcatcgtctcctcctcccgcgacaagtccctgctggtgtgggacctgaccaacccggtccactccaccccggaatccggcgccaccgacgactacggcgttccctttcgtcgcctcaccggccactcccacttcgtccaggacgtcgtcctcaggttcgacggccatgtcgccctttccggcttctgggatggagagctccgcctctgggacctcttcaccggccttacc

SEQ ID NO: 8228 - DNA, 399 bp, Zea mays
  Clone ID: LIB3150-018-Q1-N1-E10
gcgcctgagggagctggcgaacctcgtgatcgtcgccggtgaccacggcaaggagtccaaggacagggaggagcaggcggagttcaagaagatgtacagcctcatcgacgagtacaagttgaagggccatatccggtggatctcggcgcagatgaaccgtgtccgcaacggggagctgtaccgctacatttgtgataccaagggcgcattcgtgcagcctgcgttctacgaagcgttcggcctgactgtgatcgagtccatgacgtgcggtctgccaacgatcgcgacctgccatggtggccctgctgagatcatcgtggacggggtatctggcctgcacattgacccttaccacagcgacaaggccgcggatatcctggtcaacttctttgacaaatg

SEQ ID NO: 8229 - DNA, 142 bp, Zea mays
  Clone ID: LIB3150-018-Q1-N1-E11
gcgcttgacggagctggcgaaccttgggggggtcttctgtgaccgggggaaggagttcaatgacagggcggatcatcgcggtgttcaagaagatgtacagcctaatcgatgaggacaagcagaagggccgaatatttgggat

SEQ ID NO: 8230 - DNA, 339 bp, Zea mays
  unsure at all n locations
  Clone ID: LIB3150-018-Q1-N1-E2
gctgcctccgcctctcgagtctcgtccacccgtcgtcctcctagctcctctactcgccagtcgccatgggcaagattaagatncggaatcaacggcttcggaaggatcggcaggctcgtggccagggtcgccctccagagcgaggatgtcgagctcgtcgccgtcaacgaccccttcatcaccacggactacatgacctacatgttcaagtacgacaccgtccacggccactggaagcacagcgacatcacactcaaggactccaagacccttctcttcggtgacaagccggtcaccgtctttggcatcaggaaccctgaggaaaatcccgtggggtga

SEQ ID NO: 8231 - DNA, 319 bp, Zea mays
  Clone ID: LIB3150-018-Q1-N1-E3
cctccggccgcttccccctccctgccctccctttccccagatccgaagccattaaaaccagcggatctcacctcggggcgcgtccgcggcatctgggcaagcgagtggtagagcccgcagccatgagatggtatgcatcggtagcctcctgagggcgctggtcctgagtgcggcggcgtctgcgggcaggcgccgggggcccaggatcctgtgtggccacgaggcggatgtacgcgtgactcctcggcacggacacggctggcgcagattccgggcagtcacgggaaggatgatgctggactcctctgactgtgcctct

SEQ ID NO: 8232 - DNA, 385 bp, Zea mays
  Clone ID: LIB3150-018-Q1-N1-E5
cgaaagccagccagcaagcaaccccctgccccgtcggtggccacggccacgggcagccgcgcaccggccaaggcacagctagctagcgaagcaggccagccagccatccagactccggcaagggatggtggtggcgaggaagccgcacgccgccgccgccgccgccggcggcggcggcgtcagggtggcgcccgcgaggctggagggcctccccgcggcgtggccgggcgccgccgccgccgtcaaggtcaagtggccggcgcccgggggcgcgctctcgcagatgctcactgggcggtgggcgcgcggggtcaccgccgtggaggccgtcggggccggcgggaccgtccgatgggagccgcgcgacgccaaccggttcaggctc

SEQ ID NO: 8233 - DNA, 409 bp, Zea mays
  unsure at all n locations
  Clone ID: LIB3150-018-Q1-N1-E6
gccagaccagtcgccgcggcccgtgcgcttcggtatcctgggctgcgccgccatcgcgcgaaagctggcacgcgccatgctgctcgcgcccggcgcagccgtcgccgccgtcgggagccgctccgaagagaaggcccgcctcttcgccgccgacaacggcctcgacgtcgccaccacccgcctccacggctcgtacgatgcgctcctcgacgacccggacatcgacgccgtctacatgccgctccccaccagcctccacgtgcgctgggctaccgcagccgccgcacgtggcaagcacgtgctcctagagaagcccacggcgctgtgcgccgccgacctcgacgccatcctcgcggcttgcgagaccgcggnggtccagttcatggactccaccatgtggatgcaccat

SEQ ID NO: 8234 - DNA, 363 bp, Zea mays
  Clone ID: LIB3150-018-Q1-N1-E7
gatcaaacaagtagcgacagctcgacaagcagttgtgagagtgagccggcgctgagaagagatggctaagatcgccgcagccgccgcggcggcggcggcgctgtgcttcgcggccctggtggccgtggccgtctgccaaggcgaggtcgagcggcagaggctcagggacctgcagtgctggcaggaggtccaggagagcccgctcgacgcgtgccgccaggtcctcgaccggcagctaaccggcggcggcgtctgcggcccgttccggtggggcaccgggctccggatgcggtgctgccagcagcttcaggacgtgagcctgtagtgccgctgcgccgtcatccggagcatggttaggggcta

SEQ ID NO: 8235 - DNA, 319 bp, Zea mays
  Clone ID: LIB3150-018-Q1-N1-E8
gaagtcctaagtctttttacagataacggcgattatcatcatcggcgccgtcattatgtgaagggcttactagttgatgatattatggggtacaaaatctatactcatgaattacgctctggatatgctgcaaggattgataattttaggagctatgacaccgagagcaaagatgtaattcaaaggtggacatatcctatggtgcctgatgtaatatccagtcgtgattcctttgagagtatacttcataggcagggaatatacaaggtattatatgtaacaaagacatcttcttctacaaattcattgcaaattctgt

SEQ ID NO: 8236 - DNA, 404 bp, Zea mays
  Clone ID: LIB3150-018-Q1-N1-E9
ctgcctctccgacccccagctcaacgagatggggcgagcgaccccctcttccccgaccaccagatcgcagcgatggagccggatccggtcgccgctggggcatcctcctcgccgccgccttcaccagcgccggccacgtccccgccgtggcaaacacgagatgacgatgagccgggagcggtggattgcgcggatcccggaggagacctgaatcccgcgccgccgccgtcgcctcagcaggctacagttgagaacgccgctgtgggcagcgaggtggagcaggaggagccaaagaaggaggcgatggcaggagtaggggagactctctgcagcttcatggaggagtttggggatcaaggagaggactccattatcttgtcaccgcggctgaaggatattagtac

SEQ ID NO: 8237 - DNA, 270 bp, Zea mays
  Clone ID: LIB3150-018-Q1-N1-F1
taaacttttaacggtcattctatttcaaaaggtttgcattttgcactaaaaaaaaaaaaaaaaaaaaaaaaaaaaaaaaaaaaaaaaaaaaaaaaaaaaaaaaaaaaaaaaaaaaaaaaaagaaaaaaaaaaaaaaaaaaaaaaaaaaaaaaaaaaaaaaagaaaaaaaagaagaaaagggggggggggttaaaaggggagaaaggggggggaaaatggggagctcaaaagataaagtagtaaagtgggaacaaaaaactgggaggtaga

SEQ ID NO: 8238 - DNA, 357 bp, Zea mays
  Clone ID: LIB3150-018-Q1-N1-F10
cgatgagctcgacagctacatgtaccggggggtggggcaccagattgtggtgagctacgcgaaatgcatgggcttgcctcttttccggaggcgcattcgcggatccacaagggatcagggtcttaggtacagtgtcacggcaggtgatgaggtagaagatatgtttgctctgttgagcgaggttaaacgtctaatcccatccatcagtgcggagatgtcaggtgcaatcgcattcgattaccagaggctttggtgtgagagtgtttgttcgaggctgggcctggtctcgctggggtatttatggaagcaggatcaaacttttgttcctatgagaaaatgataaagatgggcattgtg

SEQ ID NO: 8239 - DNA, 397 bp, Zea mays
  Clone ID: LIB3150-018-Q1-N1-F11
cccacgcgtccggcgggatccacagaaggatgagtgaagaggataagactgctgcttctgctgagcagccgaagagggcccctaagctcaatgaaaggatcctctcttctctgtccaggaggtccgtagctgctcatccgtggcatgatcttgagatcggtcctgatgctcctgctgttttcaatgttgttgttgagatcacaaagggaagcaaagttaaatatgagcttgacaagaaaactggactgattaaggttgatcgagtcctatactcatcagttgtataccctcacaattatggtttcgttccaaggactctttgtgaagacaatgacccattggatgtgttggtcctgatgcaggagcctgttattcctggttcgttcctgcgagcaag

SEQ ID NO: 8240 - DNA, 259 bp, Zea mays
  Clone ID: LIB3150-018-Q1-N1-F12
cgtgaaaccccgaggtgaaggaacaggggggcgagtgctagcagcagcggcgactccttcgccataccgttcgtcgtgctcgctcactcggatcgaaccctccctagggtttcgcatcggcctcccgccaactcctatcccttccccctcccttcgccacgcgcgcgcggggagctaccaaaccctacgacggcaaattcggtgcgatcgcccacggtggatgccttgtctgccgacgagaggagccgttcggggcttg

SEQ ID NO: 8241 - DNA, 349 bp, Zea mays
  Clone ID: LIB3150-018-Q1-N1-F2
gcttgcagtaccagcaatccagagcggggcagatctaccgagatccgcgtcacagaggagagagagatcgccatggtggcggcgctgggacccggccggttctacggcagcggcctgccgaggccacgcttcttcccgggcgaccgcgtggacccgccggcgtccgtcaccgacccgctcctcgactgggcgcgcgaggcgcactggtccatgggcggcttcggcgtgaagcgccttcgcctgcagggccgcatcgagggctccatcgacaagctccgccgccgcacgcgccgtgacgccagggccaagaccaaggcccgctctgctggtcacgtgcccgcctcgctgt

SEQ ID NO: 8242 - DNA, 365 bp, Zea mays
  Clone ID: LIB3150-018-Q1-N1-F3
ctgcgagagagagagagagttgtacaaggctcgtcgccggccgcactgtaggggtaccttgagcctgttcaccgccgtcgcctgccgcctcacatccacagcatccatggccgacacagctcgcctcttcatgctggtggcggtggccacggcggcgctcgccggccgctcagacggcgcgtggtgcgtgtgccggtcggacctggcggacagcgcgctgcagaagacgctggactacgcgtgcggcggcggcgccgactgcaagcccatcctgcagggcggcgcctgcttcgccccggacaccgtcaaggcccactgctcctacgccgccaacagcttctaccagcgcaacggccagaacgcgc

SEQ ID NO: 8243 - DNA, 406 bp, Zea mays
  Clone ID: LIB3150-018-Q1-N1-F4
gtgagagagggacgcggcctgttgtcccggcttttagacgcaacttccatcgctgcgaagctatccattcgtgttcgtcatggccgccagcgtcaccgtggaaaacctcaaccccaaggtcttaaaatgtgagtatgcagtccgtggggagattgtcatccatgctcagcgcctgcagcaacaactacaaacacaaccagggtctcttccttttgatgagatcctctattgcaatattgggaatccccaatctcttggtcagcaacctgtgacattcttcagggaggttcttgctctttgtgatcatccgtgcctcttggaaaaagaggaaaccaaatcattgttcagtgctgatgcaatttctcgagcaaagcagattcttgcaactattcctggaagggcaaca

SEQ ID NO: 8244 - DNA, 408 bp, Zea mays
  Clone ID: LIB3150-018-Q1-N1-F5
cgaacgccggagctcgacgaggacgaccgacgacgcacgcagagatccggcgtactgcaaattttgaaaactgaactgtaagatggcatcagcagagctttcccgtgaggaaaatgtgtacatggcgaagctcgccgagcaggcggagaggtacgaggagatggttgagttcatggagaaggtagccaagactgttgactcggaggagctcactgtggaggagcgaaacctcctgtctgttgcatacaagaacgtcattggagcccgccgcgcctcatggcgcatcatctcctccatcgagcagaaggaggagggccgaggcaatgaggaccgagtaacactcatcaaggattatcgtggcaagattgagactgagctgaccaagatctgtgatggcatcctcaagct

SEQ ID NO: 8245 - DNA, 406 bp, Zea mays
  Clone ID: LIB3150-018-Q1-N1-F6
ggaaacgcgtgctgggagctgtactgcctcgagcatggcattcaggctgatggtcagatgcccggtgacaagaccattgggggaggtgatgatgctttcaacaccttcttcagtgagactggcgctgggaagcacgtcccccgtgctgtttttgttgaccttgagcccactgtcatcgatgaggtgaggactggcacctatcgccagctcttccatcctgagcagctcatcagtggcaaggaggatgcagccaacaacttcgctcgtggtcactacaccattggcaaggagattgttgacctgtgccttgaccgcatcaggaagcttgcagataattgcactggtctccagggcttcctcgtcttcaacgctgttggtggaggaacgggctctgggcttggttctc

SEQ ID NO: 8246 - DNA, 394 bp, Zea mays
  Clone ID: LIB3150-018-Q1-N1-F7
gcccccaagcgctcggctccacctccgggggctccgcccccggctgcctcctccgaggagaccgcctctggttcgggctccgaggaggaggaggaggaggaggaggaggaggatgatttggagaccgtccactcaccggctcccgtcgctcccaagagcgttgctccgctgccgcagaaggtccaggaacccgaagcgtccgacgaggatgagtatgacgatgaagatgacgagccgcagaaggtccaggaacccgaagcgtccgatgaggatgaagacgacgaagaggaggatatcgaagaggacgagaaggccaaccacgtggtcccttcttccgccaccaagaacccgccttcgccgcccgaaactggcgaggattccgaggcttccgacg

SEQ ID NO: 8247 - DNA, 320 bp, Zea mays
  unsure at all n locations
  Clone ID: LIB3150-018-Q1-N1-F8
ctatttttgcgggcgccacaaactctaaaagtgattactcattgagtaattgtggaatatacacctattcagatgtagttttagttttggtcgtcggttggtgagcctgtcatttttgcaatgttatgttactgctagtattcatttattgtgtcgatttgaggttaatagcctttttggggctgttggaataagtgatattttagagtagttaatactagtagctagggtcaggatttacatgtttatttgcaatatgtcgacgccaaaggattcggtctttatactgataataaaccgctattgatttaaannaaaaa

SEQ ID NO: 8248 - DNA, 311 bp, Zea mays
  Clone ID: LIB3150-018-Q1-N1-G1
cggcgtcgggccccaaccaggtgttcaagatcttctgccgcgccaacgagaactactgcctggccgtccgcgacggcgccgtcgtgctggccccggtcaaccccaaggacgaccaccagcactggtacaaggacatgcgcttcagcacccgggtcaaggacgaggaaggcatgccggcgttcgcgctcgtcaacaaggccacggggctcgccatcaagcactccctcggccagtcccacccggtcaagctcgcgcctttcagcccggaccaggagggacgcgtcggtgctgtggacggagagcaaggacgt

SEQ ID NO: 8249 - DNA, 143 bp, Zea mays
  Clone ID: LIB3150-018-Q1-N1-G11
gatggctgataaggttcgagcagtcatagaggggcctcttacactggctgactttgacatggttgacatacatgagcggagtggtgctcacaacgagtgacgacacgtgccttgaagattgcatcagagaggatgctcatatg

SEQ ID NO: 8250 - DNA, 240 bp, Zea mays
  Clone ID: LIB3150-018-Q1-N1-G2
taggctccaaaaatccaaagccgtcccttatcaaccgtcccttcgatccctggggcggcggccgggaccatgacgaccggatccaacggcgacggaggcggcgcggggtcctggtacccgcagggcccaccgcactacgggtacggcggcgggtccgcctccttccgcggctgctgctgctgcctcttgctgctgctgacattactggcgctccttggtctggccttcgcgctcgtcgtc

SEQ ID NO: 8251 - DNA, 395 bp, Zea mays
  unsure at all n locations
  Clone ID: LIB3150-018-Q1-N1-G3
gcgccgccgcctcctccgccacccagcgctcgagctcctcgcgtcctgcgagcgcgcgccgcaacgccaccatgaagttcaacatcgcgaacccttccaccgggtgccaaaagaagctggaaatcgatgacgaccagaagctgcgtgccttttatgaccgaaggatatcccaggaggtcagtggtgatgctctgggtgaggagttcaagggttatgtcttcaagatcatgggtggatgtgacaagcaaggcttcccaatgaagcaaggagttttgacttctggtcgtgttcgtcttctgctccataggggcactccctgcttccgtggttatggcaggcgtaatggtgagcgcangaggaagtctgtccgtggttgcatcgtgagccaagaccta

SEQ ID NO: 8252 - DNA, 413 bp, Zea mays
  Clone ID: LIB3150-018-Q1-N1-G6
ggaaatcttccgttctcaaaccaacctaggcaattcgccgcagcctctcaccctcgcgagtcccgacctcccgcagccgccgcacagatggcacccaaggcggagaagaagccggtggccaagaagcccgcggaggaggagcccgcgacagagaaggtggagaaggctccggcggggaagaagcccaaggccgagaagcgcctcccggcgggcaagtccaaggagggcggcgagggcaagaaggggaaaaagaaggcgaagaagtccgtggagacctacaagatctacatcttcaaggtgctgaagcaggtgcaccccgacatcggcatctcgtccaaggccatgtccatcatgaactccttcatcaacgacatcttcgagaagctcgcggccgagtccgccaagctggcgcg

SEQ ID NO: 8253 - DNA, 410 bp, Zea mays
  Clone ID: LIB3150-018-Q1-N1-G9
ctccccactccctctcgtcgccgtcctgtgccgttcgcaacgccgggctgcccaccgtcgaaatggccccgaagcgaggtggcagggcaccggtgccggccaagaagaagacggataaagtgacgaaccctctgttcgagaaaaggccgaagcagttcggcatcggcggcgcgttgcctcccaagaaggacctgcaccgattcgtcaagtggcccaaggtcgtgcgcatccagcgccagcgtcgcatcctcaagcagcgcctcaaggtgcctccggcgctcaaccagttcacccgcaccctcgacaagaacctcgctaccaacctgttcaagatgcttcttaagtaccggcccgaagacaaggctgccaagaaggagaggcttctgaagagggcccaggctgagaatgaa

SEQ ID NO: 8254 - DNA, 293 bp, Zea mays
  Clone ID: LIB3150-018-Q1-N1-H1
gcagaaacgagagggccggagcagccgcaggcccggggatcccaccggcggtcgccctcatactttctagtcactgccttcgtttctgtttacaacaatcaagatgagccgcggcggcagcgcgggtggcggtcaaagctctctgggttacctctttggaagcggggagccccccaaaccagcaatggcaccagctgctagtgctccacctgctgctgcacgtgctccacctgctgagaaaccacctgctgcaaagcctgatggcaccagtcagattgctgctggggttacca

SEQ ID NO: 8255 - DNA, 392 bp, Zea mays
  Clone ID: LIB3150-018-Q1-N1-H10
cggacgcgtgggcgcgggacgaggtccgcaccctcttcatcgctggcctccccgccgacgccaagccgcgcgaagtctacaacctcttccgcgatttccccggatacgtctcctcccacctccgcacgggcaaatcctctcaggcgtatgcgtttgctgtgtttgcagatcaacagtctgcactagctgccttgagtgccacaaatggaatggtatttgatcttgagaaaaattgttctcttcatgtagatctcgcaaaatccaattccagatcaaagcgcttgagatcagatgatacttcaccttattctcctgaaaaaagaaataggaaaccaaggggatttcctgattcaggtatgactcaagtagctttttgggcagaatggcatgaa

SEQ ID NO: 8256 - DNA, 308 bp, Zea mays
  unsure at all n locations
  Clone ID: LIB3150-018-Q1-N1-H2
cgcagagccgccgacaactctctctaccgtgcgagaccccaagcaccaccgcggcggcggcgaccatggctgtcggaaagaacaagaggatctccaagggaaagaagggcggcaagaaaaagaccgtcgaccctttctctaagaaggattggtatgacatcaaggcaccgtccgtgttcagtgtgcgcaacatcgggaagactctcgtatccaggacacagggtaccaggattgcttatgagggtctgaagcacagagtctctgaggtttgcctagctgatcttcanggcgacgaggatcaaagctac

SEQ ID NO: 8257 - DNA, 364 bp, Zea mays
  unsure at all n locations
  Clone ID: LIB3150-018-Q1-N1-H3
tgaagcgtactaacaaaaagcgcccgattcgcctcgcaaaatcgccgccgccatcacctacctactcacagaagttccgccttcctttcctccggcgcgcgccgcgcctgtcgccatggtgaagcgatggcttcccctcgaggccaaccccgacgtcatgaaccagttcatgtggggactgggggtccccgaggacgtggggttctgcgacgtgtacggcctcgatgacgagttgctcgccatggtgccccagccggtgctcgcggtcctacttctctacccccaggaccggagcaaggagtcccaagcttcagctacctcgtcggtggagaccaaggagcccagcaggaacgtatatntcaca

SEQ ID NO: 8258 - DNA, 345 bp, Zea mays
  Clone ID: LIB3150-018-Q1-N1-H4
gcctgttcttagccctctcctttgtagcagctatgtttgccataggctctcatgctgatggagactgtgagaatgacctccaaagcctgataagtgactgcaagacatacgtgatgttcccagctaatccaaaggtccctccttcggatgcttgctgtggtgtcatcaagaaggcaaacgtttcttgcttgtgctccaaggtcaccaaagaaactgagaaggttgtgtgcatggagaaggttgtgtatgttgctgagcagtgtaagaggccatttgagcatggctttcagtgcggaagctacaaggttccagcaaactgatgataccataagagggaagcgtttg

SEQ ID NO: 8259 - DNA, 211 bp, Zea mays
  Clone ID: LIB3150-018-Q1-N1-H5
ggacccaaggcgccgtcatcggcgacatgagctaccgacttgtcgtcggcctatcgctgatcgcatcagagaccggcgtgcccgatgtcataacacacggtcccggactaccctaccgcgggctcctcaggcgcgggagacgccggggacgcactcttatgctacagctggaggctgtcggacgagacgagtcaacaccggcccctggagc

SEQ ID NO: 8260 - DNA, 315 bp, Zea mays
  Clone ID: LIB3150-018-Q1-N1-H6
gccgtgtgtgaaaggaacccatgcttggagcctgtggacatctggatgaatggtggtgcaacatgttcagggtttagtgcatctttgcattcattcggaccttatcgaatggagggctcctaagttcatatcaacgacagtccacgagtagccgcgaacccttactcatggacaaagatggctagctacctattgctcatgtagcagcaggtgtggtctactcgtacgctgatcatgaagatgactacaccgcaaatgacacatgcggggtagcggacctgtatgcctttgtgccaaagtggttcgctaaatact

SEQ ID NO: 8261 - DNA, 409 bp, Zea mays
  Clone ID: LIB3150-019-Q1-N1-A10
cgaagcctctcgaacgagcgaggccacgaggtgcccgccgcgcccagccggcctcgccgaccgggcccgccggcccctatataggcaggcgccacttcctcctcgcaaccaccagacgccagtccaccaccgcttcccgtgcagcgccctccctctacgttcccccatttcctgtgttggcggcgatggcgcggcacttcgtgctcaacaccggcgccaagatcccctccgtggggctcggcacctggcagtctgaccccggcgtcgttggcaacgctgtctacgccgccgtcaaggcgggttaccgacacatcgattgtgccagagtttacggcaatgaaaaggagattggtttggcgctgaagaagctatttgaaaaaggtgtagtgaagcgagaagatctgtttat

SEQ ID NO: 8262 - DNA, 403 bp, Zea mays
  Clone ID: LIB3150-019-Q1-N1-A11
atttgcttacacaggcacaaacgctgggcgcctgaccctgctctcgcggtctatgagatggcgttgatcacgaatgtctttgactatgacgagcttgcaaagcagaagctgcctaagatggtttatgacttctatgccgggggtgcagaagaccagcggacactcatggacaataaggaggcattctacaagattctgtttccaccacgggtgctgattgatgtgtctcatattgacatgtctacaagtatattgggttacaaaatttccatgcctattatggtggctcccactgctttgcacacactatcccaccaagaacgagatgttgcttttgtccaagcaagatctgctgcaagaactataatgacgttgacttcatggtcatcttgcaacattgacg

SEQ ID NO: 8263 - DNA, 358 bp, Zea mays
  Clone ID: LIB3150-019-Q1-N1-A12
gtcactgatcagagctgtatgctttgcgtggacatcctaatggcgcccgctccatgtggacacacactgcagatggtgttacacttacacatgggcaagagcgagggcaacaagaacatgaacgaactgctcggcgataagggcgcgaacctgccggatatcgccagcatcaggctgtcggagccgacctggttcattgtgtctactgaggcgtgccaacattaccagtaggccggtcgcgccctcccgccctcgctctggtctgaagtcctaaaccgcctgcgatggcttaaatattacataacctcctccctccgccacccgcgttgcccgctcctgctatccaaccgctctggca

SEQ ID NO: 8264 - DNA, 173 bp, Zea mays
  Clone ID: LIB3150-019-Q1-N1-A2
gtcaagatccagtacggacacgccaagaaggacctgctggacaacgagcgcagcgatcgtgagaatctctacgtgcagctggtgaacaacatcctcagcgccttgactgacaccgacgacctggtcacccttgggtacccggacatgatggagctggccaaatacgtggtgtg

SEQ ID NO: 8265 - DNA, 279 bp, Zea mays
  Clone ID: LIB3150-019-Q1-N1-A3
atcggccagctcgagggcagggtcgacctcgagagcgaggatgtcgagctcgtggccgtcaacgaccccttcatcaccacggactacatgacctacatgttcaagtacgacaccggccacggacactggaagcacaacgacatcacactcaacgactccaagacacttctgttcggtgacaagccggtcaccgactttggcatcatgaaccctgaggaaatcccatggggcgaggctggcgctgactatgtcgtggaggccaccagcgtcttcactgac

SEQ ID NO: 8266 - DNA, 394 bp, Zea mays
  unsure at all n locations
  Clone ID: LIB3150-019-Q1-N1-A4
cgaagagaatgttatcagcctgagcaaagagaaggagcagttgatgaaggaaagagatgctgcatttcaggaggctcatatgtggcgcattgaactagtaaaagccagggagcaagcagtgatacaggaagcaactattgcccgagcagaggagaaggctagagtttctgaagcagatgccgcagctcggatcaaggaagctgctgaaaagttgcatactgttgagaaagaaaaggaggagcttctagccctggttggtgttctccaatcacaagtcctgagagagcagagcagcacaaagcaagtatgcgaggagaggtctgaatcatgctcangcgccgataattcgcctctgttgacaaaacatgttgacgcatcagacgaatatgtggac

SEQ ID NO: 8267 - DNA, 117 bp, Zea mays
  Clone ID: LIB3150-019-Q1-N1-A5
gtcgtttttgggcaccgaacacgttcttgggaccggcggcggcggcctaatttcaagtccaactggttaaggcttcattgggcttgaaccctttggcggcgacaagcacttacaaca

SEQ ID NO: 8268 - DNA, 308 bp, Zea mays
  Clone ID: LIB3150-019-Q1-N1-A6
gcatattcccccgaggccccgaaccaaaccgaaccaaaccaaaccaaaccagcccagatcagcggaacacactccgctcttccgagaccggacacatggcggcggcggcggtgacgtccaacggcggcgcagtggccgcaaatgggccggcgcccggccggctggccttcgtgtacagcgaggtgcagacgaaccggcttctgcacgccctttcccttcccttcgtgcttcggttcaacttctcggtcgtcgtcggccccgccagcttcgccgcgggcaaccccgatgagatcgccaagctctttccc

SEQ ID NO: 8269 - DNA, 302 bp, Zea mays
  Clone ID: LIB3150-019-Q1-N1-A7
cacgacttccgtccgagtctgagctcatctgcacgcgccgccgccgccgctcgacgcccaccgcgcagccatggcggaacagactgagaaggctttcctcaagcagcctaaggtgttcctcagctcaaagaaatctggcaagggtaagaagccaggcaagggtggcaatcgattttggaagagcattggccttggtttcaagactcccagggaagcaattgaagggacctacattgacaagaaatgtccattcactggaaccgtttctatcagaggcagaattattgctggaacatgccaca

SEQ ID NO: 8270 - DNA, 400 bp, Zea mays
  Clone ID: LIB3150-019-Q1-N1-A8
gccaagagttcttcttgttaggcaaggcagaagcagaagcaaaaaaagaaaggtcttgttgccgatggggagctcagggttctcgtggacgcttccggaccaccccaagctccccaaggggaaaccggtggctgtcgtcgtgctggacggatggggcgaggccaaccccgaccagtacaactgcatccatgtcgctcagactcctgtcatggactcgctaaagaatggcgctcctgagaaatggagactagtgaaggctcatggaacagctgtgggcctcccatctgatgatgacatgggcaacagtgaagttggtcacaatgcacttggtgctggtcgaattttcggccaaagtgctaagcttgtcgatcaagctcttgcctttcgaaagatttatgat

SEQ ID NO: 8271 - DNA, 345 bp, Zea mays
  Clone ID: LIB3150-019-Q1-N1-A9
cacttccacagtcagtgccttttgttggcagatgccaagatctgggttctgcactaccagcatgaaaagctgctcaaattgttgaccccctccccctatttggtttctcctgcatcaatgcatcatacatactctctggctctggattttttttcgagtaatagcatttttacatgttcgagcaaattatctgttattaagagaacttcagcagggcaatatgtaaagcagtcatatactgttaactatattttgaaattcctttccattgcctctcaagcaattttcctctgtatgtccaggtatttatgttgggggaagcaaagtggtccattttacacgtaa

SEQ ID NO: 8272 - DNA, 350 bp, Zea mays
  Clone ID: LIB3150-019-Q1-N1-B1
cttcatgttatcatattcgatgaaattgatgccatctgcaagtctagaggatctacccgtgatggtacaggtgtacatgatagcattgtaaaccagctgcttacaaagatagatggtgttgaggcgttgaataatgtattgcttattggaatgacgaatcgtaaagatttgcttgatgaagctttattgagacctggacgattggaagtacacattgagataaacctgcctgatgaaaatggtcgtttgcaaatccttcaaattcatacaaataagatgaaggagaattctttcctgtctccagatattaatcttcaggagctagctgcgcggacaaagaactacagtgg

SEQ ID NO: 8273 - DNA, 412 bp, Zea mays
  Clone ID: LIB3150-019-Q1-N1-B10
cggacagctgtcggatcagaaaccctagcgggggaggctctcacctattattagaatccacctcgcaccccgcgagcggtgacttccctagggtttagtcgcgccgccgccgccgccgaaacagcacatcgctctctcgatctcagccatggcggaggtggagcagccccaggacgcggtgaagctcttcaaccgctggaccttcgacgatgtccaggtgaacgatatctcgctgaacgactacctggctgtgactgcggcgaagcacgcgacattcctgccgcactccgcggggcgctactccaagaagcggttccgcaaggcgcagtgcgccatcgtcgagcgcctcaccaactcgctcatgatgcacgggcgcaacaacggcaagaaggtcatggccgtccgcatcatg

SEQ ID NO: 8274 - DNA, 412 bp, Zea mays
  Clone ID: LIB3150-019-Q1-N1-B2
ggagacctcaaggaggtgcgcgaggaggtcgccaagtacaaggtgggggctccggctcgtgttggtctggttgctccagttgatgttgttgtgccccctggcaacactggtctggatccgtcccagacctctttcttccaggtgcttaacatccccaccaagattaacaagggtaccgtggaaattatcacccctgtggagctgatcaagaagggtgaaaaggtgggctcgtccgagtctgccctgctcgccaagctgggtatccgccccttctcgtatggcctccaggtcaccagtgtctacgaggatgggtccgtgttcagccctgaggtgctcgacctttccgaggaggacctgattgagaagtttgccactggtgtctccatggttgcctccctgtcactggcgatct

SEQ ID NO: 8275 - DNA, 356 bp, Zea mays
  Clone ID: LIB3150-019-Q1-N1-B3
gccgccgccgctcccagtctccacgcggaagcagcgcctcgcaccgctcctacccaatggcgccgacgtcgaagctgtcgatgggcatcaagcgcgcgtcgcggtcgcacgcgtaccaccgccgtgggctctgggccatcaaggccaagaacggcggcgtcttccccaaggtcgagaagcccgccgccgccgcggaacccaagttctaccccgccgacgacgtcaagcctcgcgttcccagcacccgcaagcctaatcccaccaagctcaggtcgagcatcacgcctgggacggtgctgatcctcctcgcggggcgcttcatggggaaaaagagtgggttcctcaagcagctcaac

SEQ ID NO: 8276 - DNA, 322 bp, Zea mays
  Clone ID: LIB3150-019-Q1-N1-B4
gtcggttgacttcctttactgcctgtatgtgatgtcataacttgacctccctcggattcgccattctacgcgtgccctcgtctctcggcccctcaaccctctccctgctttactaggttacctcaacaatccgtcaaatacgagcctggcggtggacgcagaggatcttttggagggaagctaggccggtcgggtccctgccggaaaaagataagaaaaggaacctgtatcgatgacgtcgtactcgctgactacgactgcggtgaggacatccggatcagacggagactcgacagccgacacgcacacgcgcgagaaacgc

SEQ ID NO: 8277 - DNA, 403 bp, Zea mays
  unsure at all n locations
  Clone ID: LIB3150-019-Q1-N1-B5
aagatgtcaagatcgaccgagtctatattggttcctgcactggtggcaagactgaggacttccttgctgccgcaaaggtgttcttagcctcgggaaagaaggttaaagttcccacattccttgtccctgccacacaaaaggtgtggatggacgtatatagccttcctgtaccaggatctggtggcaaaacttgcgcccagatattcgaggaggctggttgtgatacaccagcaagtcctaattgcggtgcttgtttgggtggccctcgcgatacgtatgcacggatgaatgaacctacggtctgcgtgtccaccacgaacaggnaacttccgggcaggatggggcacaaggaagggcagatctacctggcgtccccctacaccgatgcagcctcggccctgac

SEQ ID NO: 8278 - DNA, 241 bp, Zea mays
  Clone ID: LIB3150-019-Q1-N1-B6
gcggcacaaacgagtgttgatatgtcacgaccgggtaaaaaaccagcgcacagcaccgggttttttgcagcattcttggaaggaatggctgaacaaaggcatagcttgcctggccagcggccactattttattggggaggcgggtggctgacgaaacaccacagtttggttgggtcgacacgcaagtagagcataacttggattgaattatactaatcataaacatatactgttggctagc

SEQ ID NO: 8279 - DNA, 171 bp, Zea mays
  Clone ID: LIB3150-019-Q1-N1-B7
acaaatgctaccaataggaatacaaggggggttactgctccctggccttctgtcctccccaaaatcacttgccggacaaccgagatccacccatagcaaccaaattttccacctgctgcatttacagccctgtcctgacaccagctcgagtaacctactggccatggctgg

SEQ ID NO: 8280 - DNA, 405 bp, Zea mays
  Clone ID: LIB3150-019-Q1-N1-B8
gatcatgtcggcctactgcggaaagtacaaggatgagctcatcaagaatgctgcctacattggcacccctggcaagggtatccttgctgctgatgagtccactggcaccattggcaagcgcctttccagcatcaatgtcgagaacgttgaggagaaccgccgtgccctccgtgagctcctattctgctgccctggtgctctccagtacatcagcggtgtgatcctcttcgaggagaccctgtaccagaagaccaaggatggcaagccttttgttgatgtcctcaaggagggaggcgtcctccctggcatcaaggttgacaagggcaccattgaggttgttggcactgataaggagaccaccacccaaggccatgacgaccttggcaagcgctgcgccaagtacta

SEQ ID NO: 8281 - DNA, 373 bp, Zea mays
  Clone ID: LIB3150-019-Q1-N1-B9
gcgcttggcccactccctccagacggtcgggggtgccgacaccgtcaccgcggggatgccgctcaagaggtgcgtggatatcgggcgcgtggccctgttgaactacggggtggactatcgccgtctcgttgtcatcgtctatgtcgtcgatcagaacaggccacttgtggatgcccgtgatatgggcaggtgccaggagaactagaacctgatctcacttactgacatcaagattgacatcaaacgtgtctccaagaagacagccctgatcaacgcgatggacgaagctgatgtgaagaccaagtgggagaacagcttatggggcacgaacctgattgtccacacgaggaaagcatcgatcaatgactttgat

SEQ ID NO: 8282 - DNA, 372 bp, Zea mays
  unsure at all n locations
  Clone ID: LIB3150-019-Q1-N1-C1
ctgggtcttcagaccattagctttatctactccagagcgcagaagaacccgatcgacaccatgagggtgttgctcgttgccctcgctctcctggctctcgctgcgagcgccacctccacgcatacaagcggcggctgcggctgccagccaccgccgccggttcatctaccgccgccggtgcatctgccaccttcggttcacctgccaccttcggtgcatcttccaccgccggtccacctgccgccgccggtccacctgccaccgncggtccatgtgccgccgccggttcatctgccgccgcaccatgccactaccctactaaccgcccggcttagctatcccagcacacccatgccgtgcacagcgatcaac

SEQ ID NO: 8283 - DNA, 373 bp, Zea mays
  Clone ID: LIB3150-019-Q1-N1-C10
ggtcatctatgcctctcagctcacggcgcaagccaaggctgctggagccagtctacctggtggagatccaggccccagaaaatgcacttggtggtatctacggtgttctgaaccagaagagaggtcatgtctttgaggagatgcagaggccgggtaccccgctctacaacatcaaggctatgctccctgtcatcgagtcctttggttaatacagccaactgacggcataaccgatggttacgcgttcccacagtgtggatgtgaccattaggacatgatatgctcagattctttggaggccgagtcccatgctgctaaaattgcactggatatcctcaaaatgaatggtttaaaagagcagatgacccctctt

SEQ ID NO: 8284 - DNA, 405 bp, Zea mays
  Clone ID: LIB3150-019-Q1-N1-C11
gaggcggacaaggtaagcagcaatcgcaggaaccctagcgccgccgcacccgcaggaatgggtatcgacctcgtcgccggtgggaggaataagaagaccaagcgcactgcgcccaagtctgacgatgtctacctcaagctcctcgtcaagctctaccgtttcttggtcaggaggaccaagagcaatttcaacgctgtcattctcaagaggcttttcatgagtaaaaccaaccgaccaccaatctccatgcgccgccttgtcaagtttatggaaggaaaggagaagaacattgctgtcattgttggcacagtcacagatgacaaaaggatccaggaggttccaacaatgaaggttactgccctgaggttcacggagacagcaagggccaggattgtcaatgctggt

SEQ ID NO: 8285 - DNA, 404 bp, Zea mays
  Clone ID: LIB3150-019-Q1-N1-C12
gcaattaataattaaagtacgtgaaagggtgaccgacaaagaatggcgtaggagaaaaatgcaaatgaggatatcagaggaagaaggaagacttaagaaggatgaggaggaaacaaaagagatgtggaagaggaagagagagcatgaagagaagtgggaggagaccagagacaagcgggtctccagctggagggatttcatgaagacaggaaagaagggacggaaaggtgaaatcaaacccccaaaactgaagactgaagatccgaacaaatcttacgtgcaaaggccagtaaagcgaaactgagtggaatgtcagcaatcaaagaacatccggtagcggcctttcatctcaccagattagagctgcaacccttcaatgttgtacttgtcctgaatgtggtaag

SEQ ID NO: 8286 - DNA, 223 bp, Zea mays
  Clone ID: LIB3150-019-Q1-N1-C2
gcgaagagtgcgcacggttgttcaagtccaacacaatgaatgtggagtgcttgtcgggcagtccaccgatgggcaccagttgtgtgtcaaaagtgccatggacgtccccgtatcacattttatggaggtttatggaattgctgaaaacagccagaccatccgtgctgaagtttgcacagattttggtcccaactttgatcccaaggtttttgatgaattgtgc

SEQ ID NO: 8287 - DNA, 395 bp, Zea mays
  Clone ID: LIB3150-019-Q1-N1-C3
cacaaaaccctttcttccttccgccgccgccgcgaccggctaaacccttcatttcgccgcagcgacgaccacccgccgcgggccaactatggcgcccgttgcggctcccatacgcgacctgcttacctctttcagccccggcgcggacttcctcgcgctctcttctggggacggccgcatcaaggtatgggacgccgtgcggggccggctgcagaccgagtttgctgacatccctgcagtggaggcggtcgcggtcgctgagtcgaagcgcggccacctcgccctcgattacacctgcatgaagtgggtacaactttccagtaagaagaagaggaaggctgggagctcattgattgtgcttggtacaagcaagtggagatgtgcttgcacttgat

SEQ ID NO: 8288 - DNA, 412 bp, Zea mays
  Clone ID: LIB3150-019-Q1-N1-C4
aaaagttcccgaggagggatggatcatgcaagatggtacaccttggcctgggaacaatactagggaccatcctggaatgattcaggttttcctgggtcacagtggagggcttgacgttgaaggcaatgaacttcctcgtttggtttatgtgtctcgtgaaaaacgtcctggattccaacatcacaagaaggctggtgccatgaatgcacttgttcgtgtatcagctgtccttactaatgggcaatacatgttgaatcttgattgtgaccactacatcaataatagcaaggctcttcgagaagctatgtgcttccttatggacccaaacctaggaaggaatgtctgttatgtccaatttcctcagaggtttgatggtattgataggaatgaccgatatgcaaacaggaacact

SEQ ID NO: 8289 - DNA, 401 bp, Zea mays
  Clone ID: LIB3150-019-Q1-N1-C5
cctcaccccacctatattatcccgtgccccttgtctttcttcctccacaagcagcgaaatccaatctagaagcgcccctctccctctctctctctctcttcgccgtccgaagctccgcaccccaatctaatcgacacctcgccgagatgggccgcaagttcttcgtcggtggcaactggaaatgcaatggaaccacagatcaggtcgagaagattgtcaaaaccctgaatgaaggacaggttcccccttcagatgttgtggaggtcgttgtcagccctccttatgtcttccttcctgtggtcaagagccagctgcgccaagagttccatgttgcggctcagaactgctgggttaagaagggaggtgctttcaccggtgaagtcagtgctgagatgctcgtc

SEQ ID NO: 8290 - DNA, 332 bp, Zea mays
  Clone ID: LIB3150-019-Q1-N1-C6
ggcgaggcaaaagcattgcgaccacagacagcgcgcgcttcaaggcctttttttttttttttgagataacaaggaggagaggaggagatggcggtcacgatcacgtgggtgaaggcgaggcagatcttcgacagccgcggcaaccccaccgtcgaggtggacgtgggccttagcgacggcagctacgcgaggggggccgtacccagcggcgcattcactggaatatatgaagccttggagttgagggatggaggatctgattatcttggcaagggtgttcttaaagctgtcagcaatgtaaataacattattggaccagcaattgttggaaa

SEQ ID NO: 8291 - DNA, 376 bp, Zea mays
  Clone ID: LIB3150-019-Q1-N1-C7
ccctcacccgcctccactcccccctcccaggtgctgcccaggtaagtcggcggcggcgatgacaacgcgcttcaagaagaaccgcaagaagcgcggccacgtgtccgccgggcacggccgcatcggcaagcacaggaagcacccgggaggtcgcggtaacgccggtggcatgcaccaccaccgtatcctcttcgacaagtaccatccgggctacttcggcaaggttggcatgcgttacttccataagctccgcaacaagttctactgccccgcggtcaacatcgagcgcctctggtcgatggtgcccgccgacaaggcggcggaagccggcggcgacaaggccccgcagatcgacgtcacgcagttcggctacttc

SEQ ID NO: 8292 - DNA, 410 bp, Zea mays
  Clone ID: LIB3150-019-Q1-N1-C8
cagcagcaggcggcgccgaggagcggcatcccactcagtgcttgcaaccatggctaggggattgaagaagcacttgaagaggctcaatgcgcccaagcattggatgctcgacaagcttggcggagcttttgctcccaagccatcttctggacctcacaagtccagggagtgccttcctctgatcctcatcatcaggaacaggctcaagtatgctctgaactaccgtgaggtcatttctatcctgatgcaacgccatgtacttgttgatggcaaggtcaggactgacaagacctaccctgctgggttcatggatgtcatttccatccctaagacaatggagaactacaggctgctttatgacaccaaaggccgcttccgtcttcacccaatcagggatgaggatgccaagt

SEQ ID NO: 8293 - DNA, 287 bp, Zea mays
  Clone ID: LIB3150-019-Q1-N1-C9
gagtaaaccaccttaacttccaccggggtgccactcactattagataccatggctaacgaatcgaataaccactagaacaggctcaatcagcataatcatttgattctccaaaagcttctcttatctttgactaacaagccatcttatggacctgacaatatcagcgagttgcttactctaatactaatgatcgcgaacacgctcaaatatactctgaactaccttaagaccatttctatcctaaagctcactcatgtacttattgacctcaaatttatgacttaca

SEQ ID NO: 8294 - DNA, 411 bp, Zea mays
  Clone ID: LIB3150-019-Q1-N1-D1
gtcaagtcggagcccgcaggtgtcgacaccgcgcgccgggagccggaagaagtgtggggggtgagctgtggaccatgagcgcgaccgggcgagccccgtgcggccttccgcgcgtcggcctgggcacggcggtgcagggcccgcggccggaccccgtccgcgccgcggtgctgcgcgccatccagctcggctaccgccacttcgacacggccgcgcactacgccaccgaggcgcccatcggggaggccgccgccgaggccgtgcgcacggggctcgtcgcctcccgcgaggacctcttcgtcacgtccaaggtctggtgcgccgacgcgcaccgggacagggtgctcccggccctccgccggacgctcagcaatctccagatggaatacgtggacctgtacatggtgcact

SEQ ID NO: 8295 - DNA, 405 bp, Zea mays
  Clone ID: LIB3150-019-Q1-N1-D11
atcacaatgtgacctccaaagtttcctggggtgatggtaaggtagcgagcaaccgaaaaggttgaggatcctctgcttgcatggtttccgccagaacgcatccagttttaagggaagaacgtcagcactttccaagaagctgaagcatatcactgagcttgtctttgtcgacgcgcctcatgagctttcctttgtatatcaaccaatccggggacactgctccgacaaaccctcacctctgtctgttacaccgaaacggaaattctcatggttcattgctccaaactcccactgcaaccctgaacaaaactggagggctgcagatgtgccgtatgaccctcttcagtaccagcaacaaaccgaatgcttcgaggaatcatacacctatcttgaaaatgcaatctc

SEQ ID NO: 8296 - DNA, 408 bp, Zea mays
  Clone ID: LIB3150-019-Q1-N1-D12
cttccttatggacccaaacctaggaaggaatgtctgttatgtccaatttcctcagaggtttgatggtattgataggaatgaccgatatgcaaacaggaacactgtgtttttcgatattaacttgagaggtcttgacggcattcaagggccagtttatgtgggaactggttgtgtgtttaacagaacggccttatatggttatgagcctccagtcaagaaaaaaaagccaggcttcttctcttcgctttgtgggggaaggaaaaagacgtcaaaatctaagaagagctcggaaaagaagaagtcacatagacacgcagacagttctgtaccagtatttaatctcgaagatatagaggaagggattgaaggttctcagtttgatgatgagaaatcgctgattatgtctca

SEQ ID NO: 8297 - DNA, 406 bp, Zea mays
  Clone ID: LIB3150-019-Q1-N1-D2
cgatctcgtttcaaatccatccatcctcgttggctccgtcccgcagcatatcaaccccatggccaagatcaagatcgggatcaatgggttcggcaggatcggaaggctggtggccagggtggacctgcagagtgacgatgtcgagctcgtcgccgtgaacgaccccttcatcagcaccgactacatgacctacatgttcaagtacgacactgtgcacggacagtggaagcaccatgaagtcaacgtgaaggactccaaaacccttctctttggtgagaaggacgatgctgtgtttggctgcatgaaccctgaagagatcccgtggggttcggttggtgctgaatatgttagtgagtctactggtgttttcactgaccacgagaaggctgcagctcacttgaagggt

SEQ ID NO: 8298 - DNA, 411 bp, Zea mays
  Clone ID: LIB3150-019-Q1-N1-D3
gcaaccatggccgcggggggcaccgccgacttcttctaccgcgagtcgcagcgtctgggctacgtcgcccgctctgcgtttaagctgatccagatgcagaagcagcacaagctcatcgcgccgggcgctgctgtgctcgacctcggctgcgcccccggcgcgtggcttcaggtggcttgtcagaacctgggtcccctcgagaagggtggcattgtcgtcggcgtcgatgttaagaaggtgaaagtgccctctgcgcactgtgactcacgggtcaggacggtctgtgcagatgtcatgacgctgatgaagcggcaggctcgggcaatgtcgccacaggaacgaggattctctgtgatactgtcagacatgtgccccccagtttcagggatcacgactaaagatggagctata

SEQ ID NO: 8299 - DNA, 376 bp, Zea mays
  unsure at all n locations
  Clone ID: LIB3150-019-Q1-N1-D4
ccttctttcattcgccgccgccgcctgctctctgctgccgacgccatggggagaaggcctgcgagatgctatcgccagatcaagaacaagccataccccaagtccaggtactgccgtggtgtccctgaccccaagatcaggatctacgatgttggcatgaagagaaagggtgttgatgagttcccctactgtgtgcaccttgtctcttgggagaaggagaatgtctccagtgaggctcttgaggctgcccgtattgcctgcaacaagtacatgaccaagtctgcaggaaaggatgccttccaccttcgggtccgggttcaccccttccatgtacttcgtatcaacaagatgctntcgcgtgctggggctgataagc

SEQ ID NO: 8300 - DNA, 410 bp, Zea mays
  Clone ID: LIB3150-019-Q1-N1-D5
gcagccgcgactcctgaatcccgacagctccagcgcctccgctggtccccactgcttcggccatggcggtgcgagccacggtctcccgcttcccggccacgccggaggcgctggagtcgtgcgccgtccaatggggcgtcgccgtgacgcccttcgccgccgcggacgagcacggccaacccccgaccaccggcgccggcggggaccgcgtaccacgctgcgagcactgctgggcgtacttgagcagccactgcgatctggagcgctggggctggacctgcgcgctctgtggcacgctcaacggattcgacgacgaggccgagcgacggttccagcgtcccgacgtgtgccccgagctcaagtcctctttcgtagacctcgaaatcctagtggatgaggcagagggcgga

SEQ ID NO: 8301 - DNA, 407 bp, Zea mays
  Clone ID: LIB3150-019-Q1-N1-D7
ggagctggaaactgtaacacagtctgaggctataaggaagcgctatcggtttttgagtcacttctcattaacaactacatttcagttctgtgaaattgacttgagtgatgtagtgtctcctaactcactggctccattcttggatgaaatcaagaagcgtgagaaacaaagaaaacgagccgccaagaaggaagaaagtgagagagtgaaggcggaagttgctgctgctgttcaggcatcagctatgcgatttgagtatacaaattcctctcaaagtcacaacgatgtcatgttctctctggatgactttgaagccctgggaaacaacgctgggccgtccaccagtccaccagcgagtgaaaggaagcttttctctgatgtaacacgcttgggttttgcatctgctc

SEQ ID NO: 8302 - DNA, 365 bp, Zea mays
  Clone ID: LIB3150-019-Q1-N1-D9
gacaccactatactgacgcccgacgggcagtgtaacattttacttgagacatgggtaaggagaatactcacattaacattgcggtcattgggcatgtctactgtgacaagtcgaccaccactggccacctgatctacaagcttggaggtatcgacaagcgagtgattgataggtgcgagaaagaggctaacgagatgaacaagcggctattcgcgtatgcgtggatgcttgacaagctaaaggctgagcgtaagagaggtataacaattgatattgctatgtggaaggtagagaccaccacgtactactacgctgctattgatgcaccgacacaccctgactgcatcaaaaatatgatcactggc

SEQ ID NO: 8303 - DNA, 400 bp, Zea mays
  unsure at all n locations
  Clone ID: LIB3150-019-Q1-N1-E1
accgcgcccgcgcgcacaaccgcaaggccggcctcgactccccgcgctgcgaggtcgtctgcggcaacttcctctccatgccgttcccggacgcctccttcgacggcgcctactccatcgaggccacctgccacgcgcccaggctgcaggacgtgtacggcgaggtctaccgcgtgctcaaaccggggggactctacgtctcctacgagtgggtcaccaccccgctgtaccgcgccgaggacccggaccacgtcgagtgcatccacggcatcgagcgcggcgacgcgctccctgggctccgccgccaggacgagatcgcgtccatcgccaaggaagtcggattcgaggtgctcaaggagcangacctggcgcttgcccccgcgctgccctggtggacgcg

SEQ ID NO: 8304 - DNA, 406 bp, Zea mays
  Clone ID: LIB3150-019-Q1-N1-E10
ctggcgaggcaaaagcattgcgaccacagacagcgcgcgcttcaaggccttttttttttttttttgagataacaaggaggagaggaggagatggcggtcacgatcacgtgggtgaaggcgaggcagatcttcgacagccgcggcaaccccaccgtcgaggtggacgtgggccttagcgacggcagctacgcgaggggggccgtacccagcggcgcatccactggaatatatgaggccttggagttgagggatggaggatctgattatcttggcaagggtgttcttaaggctgtcagcaatgtaaataacattattggaccagcaattgttggaaaggaccccactgagcaggttgagattgacaacttcatggtccaacagcttgatggaacctccaatgagtggg

SEQ ID NO: 8305 - DNA, 305 bp, Zea mays
  Clone ID: LIB3150-019-Q1-N1-E11
ttcatgcaaacaaacaaggtatacggcggggagatgacacgacaggtgcggttgtttctcggacaccatggatccgctgaagctgtactgagcggtgatgcaatcaaacgtgactaggtgcgcaacagcgctctatgacgctgcctcccactactagatcttgcccatcaacttagccaccgccgatcacaagagccccgacctacctattcgcaacccgtttggttatgatccagctctgcatgattgtgactggtaacctctttaatcacgaacaatttgcatttacgctgctcgcaaaaaca

SEQ ID NO: 8306 - DNA, 399 bp, Zea mays
  Clone ID: LIB3150-019-Q1-N1-E12
ttctttcagaaggcactatcactcttgcgccctattacacaaacgaatcttgcgaatctatcagtggcaatagcgctcttccgaccgctcccgcgagtcgatcctcccgagcttcctttacacctcctcggcgcgctctttcactgacacaggaccctgcgcgcgcttacctgtctcctacccaacgcctgccactgttggagcacgaagcggcgcacccatctctatccatgcgcccaatgagaagatcgatatgtactctccggtcttctatcccgcctgcactgacggatgaatcgtcagattaagtatcactcacatgtccgtcacccctttagacctcctcaagtgcattatgcatatcgacccatctaaatacacaagtatttcatctctatt

SEQ ID NO: 8307 - DNA, 414 bp, Zea mays
  unsure at all n locations
  Clone ID: LIB3150-019-Q1-N1-E2
cccacgcgtccgcgctcctctcccaacccagtcgctcaaaaccctagagctctcgcctgctcgcctccgccgccggagcgagctccccatcttcatccgtcaaccatggcgacccagatcagcaagaagaagaagttcgtcagcgacggtgttttctacgccgagctcaacgagatgctgacgcgggagctggcggaggacggctactctggcgtggaggtgcgcgtcacgccgatgcgcacggagatcatcatccgcgccacgcgcacgcagaacgtgctcggcgagaagggccgtaggatcagggagctcacctccgtcgtccagaagaggttcaacttccctgagaatggcgtagagctttacgccgagaaggtcgtcaaccgtggcctctgtgccatcgcgcangccgag

SEQ ID NO: 8308 - DNA, 380 bp, Zea mays
  Clone ID: LIB3150-019-Q1-N1-E3
cggagaggttccggattttcggggtggggtttgggagatgcctcccgtgaagaagtacaagaaggggaagcgtaaatacaacgatggcaagctcaatattgtcagggtacgacgcgcgcctgactcgctggcaacggagctccgtgccctagacactgagtgatgacacgctttactgaacatgctaaaagagctagatcatgctgtgccttcatatgagggcgaagcattgaggctcttcttcatgacttcatcgaagacttttgactacatctgctccattggtatgcgaagatatgatctcaatggcacctgctggactgatcaacattgaggggcggcttctcaatgtggataatcatgtggcaattgtcatgatg

SEQ ID NO: 8309 - DNA, 412 bp, Zea mays
  Clone ID: LIB3150-019-Q1-N1-E4
cacagcacatgcagttcgagagagagagagagggagagagagataaagatgtcgtggttcgggcaccaccaccacaaccagccggctcccccggcgtcgggccccaaccaggtgttcaagatcttctgccgcgccaacgagaactactgcctggccgtccgcgacggcgccgtcgtgctggccccggtcaaccccaaggacgaccaccagcactggtacaaggacatgcgcttcagcacccgggtcaaggacgaggaaggcatgccggcgttcgcgctcgtcaacaaggccacggggctcgccatcaagcactccctcggccagtcccacccggtcaagctcgcgcctttcagcccggaccaggaggacgcgtcggtgctgtggacggagagcaaggacgtgggcaagggct

SEQ ID NO: 8310 - DNA, 411 bp, Zea mays
  Clone ID: LIB3150-019-Q1-N1-E5
cttccgcgccgccacccccttcaggtaaggaagaggaggagggcaggatgtcgcaccgtaagttcgagcacccgaggcacggctccctcggcttccttcccaggaagcgctcctcccgccaccgcggcaaggtgaagtcattccccagggatgaccccaagaagccttgccatctcactgccttccttggctacaaggctggcatgactcacattgtccgtgaggttgagaagccaggatccaaactccataagaaggaaacttgtgaggctgttaccatcattgaaacccctcctcttgtcattgttgggctcgtggcatatgtgaagactcctcgtggcctccgcacactcaactctgtttgggcccaacatcttagcgaagaagtgaggagaaggttctacaagaact

SEQ ID NO: 8311 - DNA, 366 bp, Zea mays
  Clone ID: LIB3150-019-Q1-N1-E6
tcgagcgatcttgctcgacagacatccctcctcggtacctgcgtcccgaaccatctaaactacatggccacaatcaagatcgggatgaacgggttgctaacgatcggaacggtggtggactgggagcccctgccgagtgacgatatcaagctcgccggcttgaacgaccgattgatcagcaccgactacatgacctacatgctcaagatcaacactgggcacatactatggaagcaccatgaagtcaaggtgatggactccaacacgtttatgtatcgggcgaaggacgttgatatgtttctctgctagaaccctcaaaagaccccgatgggttcagcaggggctcaatataccgctgagtgcact

SEQ ID NO: 8312 - DNA, 408 bp, Zea mays
  Clone ID: LIB3150-019-Q1-N1-E8
cggatgcactgagagtaaaagagcttgccatcacgaatctcacaaactacctcacaaaagagaacagagctgaagacctcaggaaccttttgacccagctcaggcccttttttgcattgatccccaaggcgaagactgcgaagattgtgcgtggcatcattgatgccgttgccaaggtgcctggaacatctcagcttcagatctcactgtgcaaggagatggtagaatggacccgtgcagagaagcgaaccttcctcaggcagcgtgtggaagcaaggctggcagcccttctgttggagaatcaggagtatactgaggctcttacactcctttctggactcatcaaggaagttaggaagctggatgacaagttgcttcttgtggacatcgaccttttggagagcaagc

SEQ ID NO: 8313 - DNA, 410 bp, Zea mays
  Clone ID: LIB3150-019-Q1-N1-E9
cggatgcactgagagtaaaagagctgggcgtgacgaatctgacaaactacctaacaaaagagaacagagctgaagacctcaggaaccttttgacccagctgacgcccttttttggattgatccgcaaggcgaagactgcgaagattgtgcgtggcatgattgatgccggtggcaaggtgcctggaacatctcaacttgagatctcactgtgcaaggagatggtagaatggacccgtgcagataagcgaaccttcctgaggcagcgtgtggaaacaaggctggcaggccttctgatggagaatcaggagtatactgaggctcttacactcctttctggactcataaaagaagttaggaggctggatgacaaggtgattattgtggacatcgacctttaggagagcaagctt

SEQ ID NO: 8314 - DNA, 398 bp, Zea mays
  unsure at all n locations
  Clone ID: LIB3150-019-Q1-N1-F1
cccgtcgcatcccatcccactaccacccatctcgtcgtccgccgattcgatccggttcttccaacccaggggcagtgatggcgacgaagaggagcgtgggcaccctcggcgaggcggatctgaaggggaagaaggtgttcgtgcgcgccgacctcaacgtcccgctcgacgatgcccagaagatcaccgacgacacccgcatccgcgcctccgtccccaccatcaagttcctcctcgagaagggcgccaaggtcatcctcgccagccacctgngtcgtccaaaaggtgtcaccccaaagtacagcttgaagcctcttgttccacgcttgtctgagctccttggagttgaagtcgtgatggccaatgattgcattggtgaagaagttgagaagttggct

SEQ ID NO: 8315 - DNA, 406 bp, Zea mays
  Clone ID: LIB3150-019-Q1-N1-F12
cggcgggctaaaattcctggaaaggttttcttatatcaactccatcgtttatccctggacgtccattcctctcctggcttactgtaccttgcctgccatctgcctgctcacggggaagtttatcacaccagagcttaccaatgtcgccagtatctggttcatggcacttttcatctgcatctccgtgaccggcatcctggaaatgaggtggagtggcgtggccatcgacgactggtggaggaacgagcagttctgggtcatcggaggcgtttcggcgcatctgttcgcggtgttccagggcctgctgaaggtgttcgccggcatcgacacgagcttcaccgtgacgtcgaaggccggggacgacgaggagttctcggagctgtacacgttcaagtggaccaccctg

SEQ ID NO: 8316 - DNA, 412 bp, Zea mays
  Clone ID: LIB3150-019-Q1-N1-F2
gcagctccacaacaattcgtgcctgcctgccctgcctctcggccacctccctcgtcctccccctcctacgccgcccccgtcctcggcccccacgcgctcgcgcggcgcacgaggcgacgaacccgacctcctcctccgcgcccgtccctgccaccggtcgccgatattggaaggagctcggagggctggggcgctgacctgagttttatggagagaggatgccagagctgcgaagcagtactcgccaagcatgcctaaagtcgaagaagcttgaagatctgcagctaggagagccgcctgcgaaaccggtgtcacctgctccgccgagggcagggaagcgtgctcctacacgtgctgctaggggcaagaagggtgccacttgggaaaggagtgccccccgcacctaagacta

SEQ ID NO: 8317 - DNA, 377 bp, Zea mays
  Clone ID: LIB3150-019-Q1-N1-F3
cccaacaccacctcgcctgcgatctccgtagcctccgtcgcgtcgagcatcgatcatgtcggcctactgcggaaagtacaaggatgagctcatcaagaatgctgcctacattggcacccctggcaagggtatccttgctgctgatgagtccactggcaccattggcaagcgcctttccagcatcaatgtcgagaacgttgaggagaaccgccgtgccctccgtgagctcctattctgctgccctggtgctctccagtacatcagcggtgtgatcctcttcgaggagaccctgtaccagaagaccaaggatggcaagccttttgttgatgtcctcaaagagggaggcgtactccctggcatcaaggttgacaagggca

SEQ ID NO: 8318 - DNA, 406 bp, Zea mays
  Clone ID: LIB3150-019-Q1-N1-F4
aaggaatcgggttatgccggacagagcacatgttcttcgcttcggatgagaggattaaggctgtgaggcagatgattatggctcccacagttgagctgaggcagcaggcgctggatcgccttctgccttaccagaggtctgacttcgaaggcatcttccgtgctatggatggactttcagtgactattcgacttctggaccctcccctccacgagttccttccagaagggaacgtcgaggaaatcgtgcgtgaactgtgttctgagacgggagccaaccaggaggatgccctcgcacggatcgaaaagctttcggaagtaaacccgatgcttggcttccgtggctgcaggcttggtatatcgtaccctgagctaacagaaatgcaagcccgtgccatctttgaagc

SEQ ID NO: 8319 - DNA, 397 bp, Zea mays
  Clone ID: LIB3150-019-Q1-N1-F6
gccattgagcacacatcaggattgaccttatgcggttgcaagcctgttactaacatgggccagattgcctatgaacataactaccagatcactggtggtatggatagcgatcaaagaatcatcttttcagaacagatcctgggagcagtagaacaatcagctgcacaagctaaaagtgcaagcattgactcattggaggcagatcagcacaaggagggcatatggagccatctatctacaatctcaaggaatagagcacctccaaaagtggaagagaaacttacctaagttgcacctgctgatgaagcagcaaattttgttgcaaacgtagatgcagaagctgtcaagatggcgtcagatgctgcattgcatgcaaaaatgatggcagatgaagctc

SEQ ID NO: 8320 - DNA, 290 bp, Zea mays
  Clone ID: LIB3150-019-Q1-N1-F7
gaagcgtagtcgtcgccggaaggaaaggcgcggagcaagatgtcgtggcaggcgtacgtcgacgagcacctgatgtgcgagatcgaaggacagcatcttagcgccgccgccatcgtcggtcacgacggcagcgtttgggcgcagtccgagagcttccccgagttaaagcctgaggaggttgctggtatcataaaggactttgatgaacctggtactcttgcaccaactggtcttttcgttggaggtacaaagtacatggtgatccaaggtgaacctggagttgtcatccg

SEQ ID NO: 8321 - DNA, 316 bp, Zea mays
  Clone ID: LIB3150-019-Q1-N1-F8
cggcgggctaaaattcctggaaagggggtgttatatcaactccatcgtttatccctggacgtccattcctctcctggcttactgtaccttgcctgccatctgcctgctcaccgggaagtttatcacaccagagcttaccaatgtcgccagtatctggttcatggcacttttcatctgcatctccgtgacccgcattctggaaatgaagtggagtggcgtggccatcgacgactggtggaagaaccagcagttctgggtcatccgaagcctttctgcgcatttgttcgcggtgttccaaggcctgctgaaagtgttt

SEQ ID NO: 8322 - DNA, 395 bp, Zea mays
  unsure at all n locations
  Clone ID: LIB3150-019-Q1-N1-G1
gngtcttcagaccattagctttatctactccagagcgcagaagaacccgatcgacaccatgagggtgttgctcgttgccctcgctctcctggctctcgctgcgagcgccacctccacgcatacaagcggcggctgcggctgccagccaccgccgccggttcatctaccgccgccggtgcatctgccacctccggttcacctgccacctccggtgcatctcccaccgccggtccacctgccgccgccggtccacctgccaccgccggtccatgtgccgccgccggttcatctgccgccgccaccatgccactaccctactcaaccgccccggcctcagcctcatccccagccacacccatgcccgtgccaacagccgcatccaaacccgtgccagc

SEQ ID NO: 8323 - DNA, 216 bp, Zea mays
  Clone ID: LIB3150-019-Q1-N1-G11
tcggtgttttgatacccttagctttatctgcgggatacctaagaagatcccgatcgacactataatgacattgctcgttgctctgagtcttctggctctcagcctttagcgcacacttacatgcatacaagcatgataatgcttatggcactcacagccgaatgatcatttacgaccctctgtgcatctgtacatcttgatgtcacctgccatcta

SEQ ID NO: 8324 - DNA, 354 bp, Zea mays
  Clone ID: LIB3150-019-Q1-N1-G12
gggtctccagctgcaagcacgcatcgggcaggccacaaacgaaatggcggcgacggcaaacgtaccttcttggcgccacgcattcgcggcagcatatagctgtgactcgcaaatgcccgagactgagatgcacggtgaattattcgcgaacaactgcggctacacggtgtggtcggggctgctgtccagcgcgggctccgcgccgctgcccaccacggtgttcgcgctggcgccttcggagtcccgtgccgtggcggcgcccgcggggtggtctggccgactctggggccgcacgctctgcgccgccgacgccgccactgggcggttcttgtgcaccacaggggactgcaggtc

SEQ ID NO: 8325 - DNA, 416 bp, Zea mays
  Clone ID: LIB3150-019-Q1-N1-G2
tccagacccacccgagccaacaacccatggccgacgcgacgccgcgtctactgctcgcggtcgcgggcctcaccctcgccgtcctcgccgccgcggtctcgccgtctctggcggcggggcacgccggtgctgcaggacccggcggagctcctgcgccttgccaaggagccggccttcgcggactggatggtcggggtgcggcggcggatccacgagaacccggagctgggatacgaggagttccagaccagcgagctcgtgcgccgggagctccacgccatggggatcccctacaggcaccccttcgccgtcaccggcgtggtagcaacagtcggcaccggcggtccgaccttcgttgctctgcgggcggacatggacgcgctgcccttgcaggaaagtgtggagtgggaacacaa

SEQ ID NO: 8326 - DNA, 363 bp, Zea mays
  Clone ID: LIB3150-019-Q1-N1-G3
ttcgtttctgcctgctcgtttctgcggcgggggcggcgacggcggcctaccacctgagcggggcggggagaggggacggagatggatatcgcgcgggcggctgctggcgtggcctgctgcaaggagcaccagaggatctacgccgagtggttcgccctcgccgacccagatggcgactgccgtgtcacgggcgccaatgccaccagcttcttcgccatgtccacactgtcacgcgccgatctcaaacacgtgtgggcgaacgtggattacaggatgcaggggtacctcggattaggcgagttcgtcacagcaatgcagcttgtgtctctggtccagcagggaacgagaacccacatgacagtc

SEQ ID NO: 8327 - DNA, 394 bp, Zea mays
  Clone ID: LIB3150-019-Q1-N1-G4
ggatgctggtaatcttctcaaaccaatgcttgggagaggagaactacggtgtattggtgcaacaacccttgatgaataccgcaaatatattgagaaagatccagcactggagcggcgcttccaacaagtttttgttgatcagccttcagttgaagatacaatttcaatactccgagggctaagagagagatatgagttgcaccatggtgtacgaatatctgacagtgcccttgtggctgcagctgttctttcagaccgctatatcagtggacgattcttgcctgacaaagcaattgatctggttgatgaatcagctgccaagttaaaaatggagataacatcgaaacctactgctctggacgagattgatcgtgctgtcttgaagcttgaaatg

SEQ ID NO: 8328 - DNA, 409 bp, Zea mays
  Clone ID: LIB3150-019-Q1-N1-G5
gcaaccaccgcctccccgatctcgtcgagaggaagcccaatcccgaaaccgtcgccgtattccaatggcgcccaaggccgagaagaagcccgccgccaagaagcctgcggaggaggagccggcggcggagaaggccacggcggggaagaagcccaaggccgagaagcggctccccgcgggcaagtccgcaggcaaggagggtggcgagaagaaggggaagaagaaggcaaagaagtcggtggagacgtacaagatctacatctttaaggtgctgaagcaggtgcacccggacattggcatctcgtccaaggccatgtccatcatgaactccttcatcaacgacatcttcgagaagctggcggcggaggcggccaagctggcgcggtacaacaagaagcctaccattacg

SEQ ID NO: 8329 - DNA, 412 bp, Zea mays
  Clone ID: LIB3150-019-Q1-N1-G6
cagaaccctctccgcaatctccccgcctcgctcccgcctccacccaatggcgtctctccctaacggtggcggcgccgccgcctctggctcatgcggcgcgcgccctgtggacaaggaggtggacttcgccaactacttctgcacgtacgcctacctttaccaccagaaggagatgctctgcgaccgcgtccgcatggacgcgtaccactccgccgtcttccgcaacgcgccccacttccagggcaaggtggtccttgacgtgggcaccgggagcggcatccttgctatctggagcgcgcaggccggggccaggaaggtgtacgccgtcgaggcgactaacatggcggagcacgcgcgcgagcttgctcgcgccaacggcgtcacggatatcgttgaggtgatacagggcacc

SEQ ID NO: 8330 - DNA, 413 bp, Zea mays
  Clone ID: LIB3150-019-Q1-N1-G7
cccacgcgtccgcttgcatacgcgcccgaacaaagcttcgtctgcgaggggcgtcctcctgccgccagaagctttcaggagcatcagcgatggtgtggttccaatgcgaggactgtggcgagaacctcaagaagcccaaacttgccggccacttccgctcctgctccgcgtacaagctgtcatgcatcgattgcggcgagttattcagccaggacaccgtgcaggggcacacgcagtgcatctacgaggccgagaagtacggtcctaagggacagaccaaaccatccaatggtgcacagggtaaggcagataagccaaagccaaatgcagatgtcgatatcaatgttgggctgtcgacacggcctccttggttctgtagcctatgcaagaccactaccacaagcaagcaaact

SEQ ID NO: 8331 - DNA, 390 bp, Zea mays
  Clone ID: LIB3150-019-Q1-N1-H1
catcgctctctcgatctcagccatggcggaggtggagcagccccaggacgcggtgaagctcttcaaccgctggaccttcgacgatgtccacgtgaacgatatctcgctgaacgactacctggctgtgactgcggcgaagcacgcgacattcctgccgcactccgcggggcgctactccaagaagcggttccgcaaggcgcagtgcgccatcgtcgagcgcctcaccaactcgctcatgatgcacgggcgcaacaacggcaagaaggtcatggccgtccgcatcatgaagcacacctctgagatcatgcacctgctcactgacgccaatcccatccaggtgcgcgtggacgccattatcaacagtggaccacgtgaggatgccacccgtat

SEQ ID NO: 8332 - DNA, 408 bp, Zea mays
  Clone ID: LIB3150-019-Q1-N1-H10
ataagtccgcccccctctccctcaggaaacccctctcttcttcccgcggtctgctcgttcgatctgtgcagcagatctgaggtctcgagcgaccgtgaagcagcttcaatcgtcggcatggcgctcgtattgcatagtggggctggaaacaagaatgccttcaaagcacttattgctgcagaatacagtgggatcaaggttgagttgaccaaggattttgagatgggtgtctccaacaagacccctgagtttcttaagatgaacccccttgggaaggttcctgttctggagactcctgatggccctgtttttgagagtaatgctatcgcacgctatgttgctcgcttgaaagatgacaaccctctttttgggtcttcccatattgaacaagcccacgttgagcaatgg

SEQ ID NO: 8333 - DNA, 404 bp, Zea mays
  unsure at all n locations
  Clone ID: LIB3150-019-Q1-N1-H12
ccctagggttctcacggcgccataagagcctctcctctctccccggccgccgcccgccgcccgctgccgctgcttgcgcctctctcgcccgcatcgccgcagggttcgcaaagatggcagtgccgctgctgacgcanaagatcgtgaagaagcgggtcaagcagttcaagaggccacacctcgaccgctacaagtgcctcaagccaagctggcgtaggcccaagggtatcgactcccgtgtcaggcggaagttcaagggatgcacctcgatgcccaacattggatacggctctgacaagaagacgaggcactaccttcccaacaagttcaagaagtttgtcgttcacaacgtctctgagctggagctgctgttgatgcacaacaagacatactgtgccgagatt

SEQ ID NO: 8334 - DNA, 343 bp, Zea mays
  Clone ID: LIB3150-019-Q1-N1-H2
ctcttcctgtcagtagtagagtgagagtgaggcagcgagtgggagacaaggggaaatggggaagggagcgcaagggagcgatgcggcggcggcgggcggcgaggtggaggagaacatggcggcgtggctggttgccaagaacaccctcaagatcatgcccttcaagctcccgcccgtcggcccttatgatgtccgcgtgcgcatgaaggcagtggggatttgcggcagcgatgtgcactacctaagggagatgcgcatcgcgcacttcgtggtgaaggagccgatggtgatcgggcacgagtgcgcgggcgtggtcgaggaggtgggcgccggcgtgacgcac

SEQ ID NO: 8335 - DNA, 409 bp, Zea mays
  Clone ID: LIB3150-019-Q1-N1-H3
atcctgcgctgacccttgagattttaaataagctcggggttgcagctgacatttttaaccattggtttgctatgctacgacaagttaaaaaaagtggggcacgtgttaatttcaagagggagcatgataagaaagtttgctgcttgggcttgacctcccttattgcgcttccagctgctaagattccagcagatgctttggatcggatcttcaaagcaacacttgagctgcttgttgcttacaaggaccaagttgcagaagctaagaagcaaaatgaagaggctgctgatgatatggatggttttgatgctgatgaagaagatgatgacgaagttgactctgataaggagatgggtcttgatgatgaagacggggatgaagtaagcagtcttcagctgcagaaattagc

SEQ ID NO: 8336 - DNA, 386 bp, Zea mays
  Clone ID: LIB3150-019-Q1-N1-H4
tgcacccgttacttggtacagaacaactgctttggagagactaaggaagtatggtgcaatatatttaactccattttcacaccgtttggcagaaaaaattgatgatccagagttccagagattgagatgcagggtgaattatcacgcactacgatttaagccaagtatcatgaaaacaagtagtgatatagcgaataagctccattcagaaggccatttcatgtcaattcatcttcggtttgagctggatatgcttgcatatgctgggtgcttcgacatattcacacctgaagaacaggaaatcctgttgaggcatcggaacaaatattttccatttctgttgaggtattggggcaaatattttccaagaaacacacctgactaca

SEQ ID NO: 8337 - DNA, 414 bp, Zea mays
  unsure at all n locations
  Clone ID: LIB3150-019-Q1-N1-H5
cgacccactcgcccaaaaccgtagcgccctcgcctgctcgccgccgccgtcgttgcgagctccccatcttcctccgttaaccatggcgacccagatcagcaagaagaagaagttcgtcagcgacggcgtgttctacgccgagctcaatgagatgctgacgcgggagctcgcggaggacggctactccggcgtggaggtgcgtgtcacaccgatgcgcacggagatcatcatccgcgcaacgcgcacgcagaacgtgctcggcgagaagggccgcaggatcagggagctcacgtctgtggtccagaagaggttcaacttccccgagaacggcgtcgagctctacgccgagaaggtcgtcaaccgcggcctctgcgccatcgcgcangctgagtacctccgctacaagctcctcgg

SEQ ID NO: 8338 - DNA, 402 bp, Zea mays
  unsure at all n locations
  Clone ID: LIB3150-019-Q1-N1-H6
ccctagggttctcacggcgccataagagcctctcctctctccccggccgccgcccgccgcccgctgccgctgcttgcgcctctctcgcccgcatcgccgcagggttcgcaaagatggcagtgccgctgctgacgcagaagatcgtgaagaagcgggtcaagcagttcaagaggccacacctcgaccgctacaagtgcctcaagccaagctggcgtaggcccaagggtatcgactcccgtgtcaggcggaagttcaagggatgcaccttgatgcccaacattggatacggctctgacaagaagacgaggcactaccttcccaacaagttcaagaagtttgtcgttcacaacgtctctgagctggagctgctgttgatgcacaacangacatactgtgccgaga

SEQ ID NO: 8339 - DNA, 368 bp, Zea mays
  Clone ID: LIB3150-019-Q1-N1-H7
ctcttcctgtcagtagtagagtgagagtgaggcagcgagtgggagacaaggggaaatggggaagggagcgcaagggagcgatgcggcggcggcgggcggcgaggtggaggagaacatggcggcgtggctggttgccaagaacaccctcaagatcatgcccttcaagctcccgcccgtcggcccttatgatgtccgcgtgcgcatgaaggcagtggggatttgcggcagcgatgtgcactacctaagggagatgcgcatcgcgcacttcgtggtgaaggagccgatggtgatcgggcacgagtgcgcgggcgtggtcgaggaggtgggcgccggcgtgacgcacctgtccgtgggcgaccgcgtggcgc

SEQ ID NO: 8340 - DNA, 369 bp, Zea mays
  Clone ID: LIB3150-019-Q1-N1-H8
ctctcgctgttaccaaaataatgagagggtggcaccgagtgcgagacaccgggaactgaagcatgtagcacgaggaagcgatcccccatgaccgggcgaccaggcgtaggaaaacattgcgctgtatccacttcacaaaaacacgataatgatcatactctgaaaactcccaaccctcggacgttctcataagcaattacgcatgaacacctcagacatatgcgtgatgaattttcactcactaatgcagactctcgtggaccacttgagatttaagacgcacttagagaccgtgcacaatttcacctaccgcttgcacaaaccatactgccatcgtgatcgcatctatccatcgcatactgacatgac

SEQ ID NO: 8341 - DNA, 166 bp, Zea mays
  Clone ID: LIB3150-019-Q1-N1-H9
ctttttctgttaatattaaaattagggtgtggaatcttttccaaaaccacttgcattttataattgatcacactcttgcaatgaaccatatgattttattctgctacaagataacttcacctactatccaaattctcaaaatcactttaaaaatcataccctatat

SEQ ID NO: 8342 - DNA, 333 bp, Zea mays
  Clone ID: LIB3150-020-Q1-N1-A10
ctgccccttctctcttcgtcgcgcctccgcctccgccgtcgtagcatcctcctccgccacctcggccatggcgacatccccagcgctcctcttcccttctccctcctcggcatcctctgcgccttcgtcggcgcgggtggaggcagtggtgcttttcaacgtctgcgacagctacgtgcggcgcccggaccaggcggaccgcgtcatcggcaccctcctcggttccctcctctccgacggcaccgtccacgtccgcaactcctatgtcgtcccccacagcgagtcaacccgccaggtcggccatcacatcgactaccaccataacatgtacgc

SEQ ID NO: 8343 - DNA, 142 bp, Zea mays
  Clone ID: LIB3150-020-Q1-N1-A11
atcttcattcactcactctcttccatcacgctactgtagataccatggccaagtcgaccgctatgttagtagccgatctggacctgttggtggtgatggtgactactagcacaggcggtggctgggcagcagcggcgtgcga

SEQ ID NO: 8344 - DNA, 321 bp, Zea mays
  Clone ID: LIB3150-020-Q1-N1-A2
ggaaaattgcactgcagcaagacgtggacgggctgaggaagaagctgcggcacgaggagaacgtgcaccgagctctggagcgggcgttcacgaggccgctcggggctctgcctcgcctcccttcttttctgccgtctcaaacgttggagcttctggccgaagtcgccgtcctggaggaggaggtcgtccggctggaggagcaagtcggcaatttccggcaaggactgtaccgggaggccgtcatcaccaccttcatggcggctaagagcgcgtacttcctggacggttaccggagcacgccggtacggcacaagccatttt

SEQ ID NO: 8345 - DNA, 403 bp, Zea mays
  Clone ID: LIB3150-020-Q1-N1-A3
cgcaaattgcaccaagaaatccatcgagaggccgtcgacaggggaattaatggcgtcctcgtctagcagcagccaccgccgcctcatcctcgcagccgccgtcctgctctccgtgctcgcggctgccagcgccagcgccgggacctcctgcgtgccggggtgggccatcccgcacaacccgctcccgagctgccgctggtacgtgaccagccggacctgcggcatcgggccgcgcctcccgtggccggagctgaagaggagatgctgccgggagctggcggacatcccggcgtactgccggtgcacggcgctgagcatcctcatggacggcgcgatcccgccgggcccggacgcgcagctggagggccgcctagaggacctgccgggctgcccgcgggaggtg

SEQ ID NO: 8346 - DNA, 398 bp, Zea mays
  Clone ID: LIB3150-020-Q1-N1-A4
tcgggtacgctcatcaaatggattacccataaggagctggccacaagggacatcaagatacttgtgtttgatgaggcagatcatatgcttgctgaggatggctttaggagtgactctgaaaggatgatgagggatatacaaagaagcgctggtggttgtcaggtgcttctcttttctgcgaccttcaatgatagggtgaaggattttgttacaaaggtcattatggatggaaatcagatatttgtgaagaaggaagagcttactttggaaaaagttaagcagtacaaagttcaagtacctgatgaatctgcaaaaatagaggttattagggacaagatatttgaatttggacagaaagtttgccaggttatcatatttgtttaaacaaagcaaagtac

SEQ ID NO: 8347 - DNA, 370 bp, Zea mays
  Clone ID: LIB3150-020-Q1-N1-A5
gctggagaacggtattctgccttgacggggttctttgttccttattcacatgtttcacttgtgatctattaggtgaggaaggaactaggaattgaggagaatgctaaggtgctcgtttttaattttgggggtcaggtgggtcacttgtcatataggtggtttggtaagcttatggaatatgtttctattttctcatgtggtaatgttatgtggctacttgtcaaaatgaactcaatacagacaatacacaaaagttgcttttcgccagcttcccagataaactgcttttccaacaggcaacagctaccaaatagggcctatcgtttcttctgaaccgatatctgctgattctgattctttcagtaatcac

SEQ ID NO: 8348 - DNA, 405 bp, Zea mays
  Clone ID: LIB3150-020-Q1-N1-A6
ggcgtaggtagcggcggtctcaaccccaggcgagctcggctccggtcacccgtcgatccacgcaaccatgtcgaggaggaagaccagggagcccaaggaggagaacgttacccttggacccactgtccgtgaaggagagtttgtctttggtgttgctcacatctttgcatccttcaatgacaccttcattcatgtcactgatttgtctgggagggaaactttggttcggatcactggtggcatgaaggttaaggctgatcgtgatgagtcgtctccttatgctgctatgcttgctgctcaagatgttgcacagcgttgcaaggagctcggtatcaccgcgctgcacattaagcttcgtgcaactggaggcaacaagaacaagacccctggacctggtgctcagtc

SEQ ID NO: 8349 - DNA, 354 bp, Zea mays
  Clone ID: LIB3150-020-Q1-N1-A7
tttccgagttccagaccaaccttgttccatagccacgtatacatttcatgctttcctcatctgcccctgtaatctctgctgagaaggcttaccatgagcagctctctgttcctgaaatcaccaatgccgtctttgagccctcaagcatgatggccaagtgtgacccaaggcatgggaagtacatggcttgctgcttgatgtaccgtggtgatgttgttcccaaggatgtcaatgctgcagtcgcaaccatcaagaccaagagaactgtccagtttgtggactggtgccccaccggattcaagtgtggcattaactaccagccaccgaatgttgtccctggaggcgacctggcaa

SEQ ID NO: 8350 - DNA, 243 bp, Zea mays
  Clone ID: LIB3150-020-Q1-N1-A8
tttcgacaccatgagggtgttgctcgttgccgtcgctcttctggctctcgctgagagccccacctccacgcatacaagcggcggctgcggttgccagccaccggcgacggtttatgtaccgtcgtcggtgcatctgccaccttcggttcacctgccacctccggtgcatatcccaccgtcggtccacctgcggacgccggtacacctgccaccgctggtccatgtgcctgcgtcggttcattt

SEQ ID NO: 8351 - DNA, 432 bp, Zea mays
  Clone ID: LIB3150-020-Q1-N1-A9
atttgagcttcaaatcaacgaccaacgttgtgaggatgcagaggaggaacaggagagccatgaaaataatggacattagaaacagagacatgttcctcgagagcatcatgtgatttattttgttgtaaatcactaccgatgcagctcggtttgcctactgtttcatctacactttctcttcctttttccttgatgttataggattaacatcactgggtgactttctggaattgcatcgatggttccttttggtgagaaaaggtcttgctgctggtcaagaatgtaacttgtagagcatgatgttgaatcgtgtgaaattagttcagtacttttgatctaacaaataagaagtcgaaatggggaaaggagatataataatcttttcctttgaatattatgggaaccggtatgttaaaaaaaaataaataaaaa

SEQ ID NO: 8352 - DNA, 402 bp, Zea mays
  Clone ID: LIB3150-020-Q1-N1-B1
aaaaaacaatggtcttgacgagttggagtgtggaaggggaggattgggatgacgaccatgaggagatggtggatgcggaggttgacatggaagatattgctgggaaagcaccggcgaggaggaagaacgggaatttggagggtgttctagctaatggagtgcataacggtgtaaaggacatggtcacaccaatcattaggacgagtttggagaagcaaggttacaaaattattggttctcatagcggagtgaagatttgcagatggactaagtcgcagctgcgaggtcgtggagggtgttataagcactcattttacggcatagaaagtcacaagatgcatggaaacaacttcaagtttgggcttgtgcaaataaatgtgtattttgttggagacatcacac

SEQ ID NO: 8353 - DNA, 419 bp, Zea mays
  Clone ID: LIB3150-020-Q1-N1-B10
gtagattgagtcatgatgccgatgccgaggggtcaatggctgcaattatctcattgggtttgattggtgctggcacaaacaatgccagaatagctgccatgcttcgcaatctttcaagttattactacaaagaagcggctcatctgctttgtgttagaattgctcagggccttgttcacctacgaaagggcttgttgaccctttctccgtaccattctgatagatttcttctttccccgatggcacttggagggcttgtaactgttctgcatgcgtgtcttgatatgaaatccactattctaaggaaaaatcactacatactttacattattggcctggcaatgccagccaagattgctttaactgtcgaattagaacttaagcccccttttagtaccttttcccctttggcaaacttt

SEQ ID NO: 8354 - DNA, 341 bp, Zea mays
  Clone ID: LIB3150-020-Q1-N1-B11
gagcgagttgacacaaaacgtaagccagagtattgaattgtagaggaacgtgcaagaccttgatcagaagctgcagatagcttattacaagactgaccaacaggcagaggatactgaggaatcgcgatcccgagaattcagactggattcatcaacgacttgatgcaagcaccaagacaaaactcatgctgtctgacgaaacccaaccctgcaaggagtgcaagaaccttccggcatcatggccttcaagttcatcctgagagttgccctgctgtctgtcctaatctgaatgtttcttgggaagcggaactagcgctcaagtcgtgctgaaagggcttagc

SEQ ID NO: 8355 - DNA, 130 bp, Zea mays
  Clone ID: LIB3150-020-Q1-N1-B12
tcttaacggcaaaggccattaataagcaaccatgacgcattcacaacagcaactcaacaacctaagctagagggagtgagtgggagagagagagagagacacacgaggcccgaaagagatggaggtgtgg

SEQ ID NO: 8356 - DNA, 368 bp, Zea mays
  Clone ID: LIB3150-020-Q1-N1-B2
caccagcttgccaaatctctaaccctaggggcagcggcggagatggcccccaagcgctcggctccacctccgccgcctccgcccccggctgcctcctccgaggagaccgcctctggttcgggctccgaggaggaggaggaggaggaggaggaggaggatgatttggagaccgcccactcaccggctgccgtcgctcccaagagcgttgctccgctgccgcagaaggtccaggaacccgaagcgtccgacgaggatgagtatgacgatgaagatgacgagccgcaaaaggtccaggaacccgaagcgtccgatgaggatgaaaacgacgaacaggatgatatcgaagaggacgagaaggcccaccacgt

SEQ ID NO: 8357 - DNA, 402 bp, Zea mays
  Clone ID: LIB3150-020-Q1-N1-B3
gagttgtacttcttgaactcatttcagacgaaaaggcactggatccttctttctctccttacgggaatggattcaacatagttgcctgggcttgcatgcttttacaaaagggtcgagctcgtgaattctttatagaagggctgtgggatgtggccccacatgacgaccttgttgagattctacacctgggcatcaagtgtacggttgattctctttcttctaggcccacaatgaagcaagttgttcggcgacttaaggaactcagaccaccgtcttactaggaatagcaagcagagactggtttgcttctgcataatgagaccaagactgcaacagccagtaatgttccaaataaactggtggcaactggcaagcaattcaaatgtcatttctcaagggatc

SEQ ID NO: 8358 - DNA, 394 bp, Zea mays
  Clone ID: LIB3150-020-Q1-N1-B4
caaaagtcgcgtgctgtgctctgctctcgggtcgcacggactcgtggtaaaggatggccaccatgtcggctctcgcgaggacggcgccgccccttgctgggaccattcgccggccgtcctgcgcgctgcggccgacggcgtccctctccttcgccgccgcttcaacgacgccccgcggccggctcgggctggggctgagcacggcgccggcggggagcgggagggcggccagggctcgcgccgtcccgcagcgcatcgtcgcctcctcggaggttgagcgaagctacattatgatcaaaccagatggtgttcagcgtggtctggttggagagattatttctcgctttgagaaaaaagggtttttgttgaaaggcttaaaacttttccagtgccc

SEQ ID NO: 8359 - DNA, 389 bp, Zea mays
  Clone ID: LIB3150-020-Q1-N1-B5
tcgccgggaaggaggcccgcaggccgcaggcagagcagccgccgttccgtatccgtcccgtctccggcgcggcggcgctgacgctaggggttgccgcacccagcgcggagatgcagcaacgtgcgcgggatggcgagcaacaccgcctgctcgacctcgcagtcgagtccggcttcgaccgcgacctcgccgccagctgcctcgcccgcctcctcgaggtctacggggaggatggtctggatatggttactgtcgacaactgtggcaatgatttccttgcatcactggctgatgccacacaacctactgatgactgggacgatctcaaagggattgagaccgaggcatgtggcaacttgaatgatatgatgatgaagaatgtacctgac

SEQ ID NO: 8360 - DNA, 401 bp, Zea mays
  Clone ID: LIB3150-020-Q1-N1-B6
ggggtggtaggtttcacttaaggtgggggggcagagaggttctctatgagaaatcacctgatggagagacctatgttaagggccttctactcaccaaggctacaagtagagagataatcaaagctgatgcatacgtcgcagcctgtgatgttccgggtatcaaaagattacttccatcataatggagggaatgggaaatgtttgacaatatctacaagttagatggtgtccctgttgtcactgtccagctccgctacaacggatgggtcactgaacttcaagatttggagaaatcaagacaactgcaaagggcggttgggttggataacctgttgtacacggcggatgcagacttttcctgtttttcggaccttgctctctcatattctgctgattactac

SEQ ID NO: 8361 - DNA, 374 bp, Zea mays
  Clone ID: LIB3150-020-Q1-N1-B7
tttgttcttccttcccgaaccctcgcgccgcgaccgccttcgtctagcattttcctacacccaatctgatctgaccaagccctctgaacaccaccgcccatcctcctcctcctccgccgccgccgcccaagatgggcttcgacgtgggcctcgtcccctacaaccccgacgggtggggtccacctgaagttgccgccgcgccgccttccctcggtggtggctcctcgtctgtccccttcgctcccttctcccgctccgacaagctgggccgcatcgccgactggacgcgcaacccgccgggccccggggctttcgccgcagctcgcgacgccgttttcgatttagcggggctcgaggactccatcgggctcgcg

SEQ ID NO: 8362 - DNA, 409 bp, Zea mays
  Clone ID: LIB3150-020-Q1-N1-B8
cccaacaccacctcgcctgcgatctccggagcctccgtcgcgtcgagcatcgatcatctcggcctactgcggaaagtacaaggatgagctcatcaagaatgctgcctacattggcacccctggcaagggtatccttgctgctgatgagtccactggcaccattggcaagcgcctttccagcatcaatgtcgagaacgttgaggagaaccgccgtgccctccgtgagctcctattctgctgccctggtgctctccagtacatcagcggtgtgatcctcttcgaggagaccctgtaccagaagaccaaggatggcaagccttttgttgatgtcctcaaggagggaggcgtcctccctggcatcaaggttgacaagggcaccattgagggttgtggcactgataaagagacc

SEQ ID NO: 8363 - DNA, 327 bp, Zea mays
  Clone ID: LIB3150-020-Q1-N1-B9
ctccagcattcctatcctctccccgcccgcgcgtgccgccgccgccgccgccgccgcggcttcccttcctctcccgagccaagatgaatgttgaaaagctcaagaagatggcaggtgctgtgcgcaccggggggaagggtagcgtgcgcaggaagaagaaggcagtccacaagactacaaccacagatgacaaacggcttcaaagcaccttgaaaagaataggagtgaacagcattcctggtattgaagaggtcaacatctttaaggatgatgttgttattcagtttgtaaatcctaaagtgcaagcgtcaaattgtgctaatacat

SEQ ID NO: 8364 - DNA, 323 bp, Zea mays
  Clone ID: LIB3150-020-Q1-N1-C1
ggatctcgttcccggccgtctgccgctcgggcctcacccgtcgccgtcgtccccctcccggtcccggccttccaaatcgtcagcgcagggcgcaggcgcgcagccgcacacgcttgcccgcgccgcccagcagctcccccatagccgtcgcgccgtcccggccctccaagattctgattggtgttttgctggaaccatgtccagtccgtggagccctatgagtatggaggaagacgaagagatccaagagctcgatgccgaggagcagcaggacggtgagcagccgcagcagggtgatgggctgcaacaggggtccacagctg

SEQ ID NO: 8365 - DNA, 250 bp, Zea mays
  Clone ID: LIB3150-020-Q1-N1-C10
tctcctcgaaaccgtctctctgagcgtcctgagtccgtggagagggtggcggcggtggatatggagagcctggcgcagcgcgcggcgctgctgcgggagtcgctgcacaagagccagcatgtcaccgacgccgtctgcttcatactcggctccttagacaagagcctcaccgtgcttgactccgccatgcgccccattcaagtgaggacgcacgccgtttggaaccggcaccataacatttaccgcacgc

SEQ ID NO: 8366 - DNA, 310 bp, Zea mays
  Clone ID: LIB3150-020-Q1-N1-C11
gaacatccttgttgaaatgggaacatacggtcaagtccaggatgactatctggattgctatggtgatcctgaatttatcggcaagattggaacggacattgaagattacaagtgctcatggctagttgtgcaagcccttgagcgtgctgatgagagccaaaagcgcattctatttgaaaattatggcaagaaagatccagcctgtgtggcaaaagtgaagaacctctacaaagaacttgacctagaggcggtatttcaggagtacgagaatgagagctacaagaagctgattgcagacattgaaacccca

SEQ ID NO: 8367 - DNA, 238 bp, Zea mays
  Clone ID: LIB3150-020-Q1-N1-C12
cttctcctccccctccggttcgggttcgggttcgtgaggttctccggggttcggtttcgtgggtgagcggatcgagatggcggcgtcggatgttgagtaccgctgcttcgtcggcggcctcgcctgggccacggacgaccactccctccacaacgccttcagcacctacggcgaggtcctcgagtccaagatcatcctcgatcgggagacgcagaggtcccgcggctttcgcttcgtc

SEQ ID NO: 8368 - DNA, 382 bp, Zea mays
  Clone ID: LIB3150-020-Q1-N1-C3
cgcagagacaggcgtcttcgtactcgcctgtctccgcgactcaaagcttcttccatttcctaccgccgccgctgcagctccaccccattccgtcgacaccatgagggagtgcatctcgatccacatcggccaagccggtatccaggtcggaaacgcgtgctgggagctttactgcctcgagcatggcattcaggctgatggtcagatgcccggtgacaagaccattgggggtggtgatgatgctttcaacaccttcttcagtgagactggtgctgggaagcacgtccctcgtgctgtttttgttgaccttgaaccaactgtcatcgatgaggtgaggactggcacctaccgccagctcttccaccctgagcagcttatcagt

SEQ ID NO: 8369 - DNA, 344 bp, Zea mays
  Clone ID: LIB3150-020-Q1-N1-C4
tctttatctactccagagcgcagaagaacgcgatcgacaccatgagggtgttgctcgccgccctcgctctcctggctctcgctgcgagcgccacctccacgcatacaagcggctgctgcggctgccagccaccgccgccggttcatctaccgccgccggtgcatctgccacctccggttcacctgccacctccggtgcatctcccaccgccggtccacctgccgtcgccggtccacctgccaccgacggtccatgtgccgccgacggttcatctgccgtcgtcaccatgccactaccctactcaaaccgcccggccttaggctcatccccagccacacccatgc

SEQ ID NO: 8370 - DNA, 365 bp, Zea mays
  Clone ID: LIB3150-020-Q1-N1-C5
agaccattagctttatctactccagagcgcgagaagaacccgatcgacaccatgaggccgttgctcgttgccctcgctctcctggctctcgctgcgagcgccacctccacgcatacaagcggcggctgcggctgccagccaccgccgccggttcatctaccgccgccggtgcatctgccacctccggttcacctgccacctccggtgcatctcccaccgccggtccacctgccgccgccggtccacctgccaccgccggtccatgtgccgccgccggttcatctgccgccgccaccatgccactaccctactcaaccgccccggcctcagcctcatccccagccacacccatgcccgtgccaaca

SEQ ID NO: 8371 - DNA, 399 bp, Zea mays
  Clone ID: LIB3150-020-Q1-N1-C6
cggcgtcgggccccaaccaggtgttcaagagcttctgccgcgccaacgagaactactgcctggccgtccgcgacggcgccgtcgtgctggccccggtcaaccccaaggacgaccaccagcactggtacaaggacatgcgcttcagcacccgggtcaaggacgaggaaggcatgccggcgttcgcgctcgtcaacaaggccacggggctcgccatcaagcactccctcggccagtcccacccggtcaagctcgcgcctttcagcccggaccaggaggacgcgtcggtgctgtggacggagagcaaggacgtgggcaagggctttcgctgcatccgcatggtcaacaacacccgcctcaactttgacgcctttcacggcgacagggaccacggcggcgtgc

SEQ ID NO: 8372 - DNA, 215 bp, Zea mays
  Clone ID: LIB3150-020-Q1-N1-C8
tctggaacagattgtgatgaggttgaatgggtaaaaaacacccaccgaccgctgtgtccccttgtacatcaccttaaagggctgcccactcctgcattcttggcccacaacccggtgcttaacatcttctcttcttcctaccggaactatttctttggccgtcgattaccctacatctttcctgtctgaagttatttttcggtcaaatttcctca

SEQ ID NO: 8373 - DNA, 242 bp, Zea mays
  Clone ID: LIB3150-020-Q1-N1-C9
ctcagactcctctccgcacataccctcccgtcctctccgtcaccgtcgcatctgccatgggggcgtacaagtacgtctcggagttatggagaaggaagcaatccgacgtgatgcggttcgttcaacgcgtgcgctgatgggagtacaggcagcagccggccatcgtccgactcacaaggcccacccgccccgacaaggcccgccgcctcggcttcaaagccaagcaggggtatgttgtttac

SEQ ID NO: 8374 - DNA, 123 bp, Zea mays
  Clone ID: LIB3150-020-Q1-N1-D10
gttgtcctccccctccggttcgggttcgggtgcgtgaggatctccggcgatcggcttctctggtgagcgaatcgaaatggcagcaccatgatgttgagaaccgatgcttcgtccgccatctac

SEQ ID NO: 8375 - DNA, 152 bp, Zea mays
  Clone ID: LIB3150-020-Q1-N1-D12
ggaaaaatatccccaaaccctagctcccgatctcgatggcgaaccctcgcgtcttcttcgacatgacacgccgcggcgccccggcgggccggattcggaaggagctgtacgccaaccaagggcccaagaccggggagaactttccgccgctg

SEQ ID NO: 8376 - DNA, 352 bp, Zea mays
  Clone ID: LIB3150-020-Q1-N1-D2
aacacagcacaggcagttcgagagagagagagagagagagagagataaagatgtcgtggttcgggcaccaccaccacaaccagccggctcccccggcgtcgggccccaaccaggtgttcaagatcttctgccgcgccaacgagaactactgcctggccgtccgcgacggcgccgtcgtgctggccccggtcaaccccaaggacgaccaccagcactggtacaaggacatgcgcttcagcacccgggtcaaggacgaggaaggcatgccggcgttcgcgctcgtcaacaaggccacggggctcgccatcaagcactccctcggccagtcccacccggtcaagctcgcgccttt

SEQ ID NO: 8377 - DNA, 164 bp, Zea mays
  Clone ID: LIB3150-020-Q1-N1-D3
aaagctggaatcttttaaagtgaaccaagccgtcttcttcgaatccggttggttggcggcaagtgagcaggtttttggattggcttaaaccccccccaaaatgaaaaaaatcttggacattcagggagggcaatgtggcaaccaaatcggtgccaaggtctggg

SEQ ID NO: 8378 - DNA, 309 bp, Zea mays
  Clone ID: LIB3150-020-Q1-N1-D4
cgcaatctccccgcctcgctcccgcctccgcccaatggcgtctctccctaacggtggccgcgccgccgcctctggctcatgcggcgcgcgccctgtggacaaggaggtggacttcgccaactacttctgcacgtacgcctacctttaccaccagaaggagatgctctgcgaccgcgtccgcatggacgcgtaccactccgccgtctttcgcaacgcgccccactttcagggcaaggtggtccttgacgtgggcaccgggagcggcatccttgctatctggagcgcgcaagccggggccaggaaagtgta

SEQ ID NO: 8379 - DNA, 407 bp, Zea mays
  unsure at all n locations
  Clone ID: LIB3150-020-Q1-N1-D5
tcgctcctgcaggccggcgccaatatcctgatgttcgactccctgcacgggcggacctgcctgcaccacgcgtcctacttcggccacgtcgactgcctgcgggccatcctcgcggcggcgcggaccacgccggtggccgactcatggggtttcgcccggttcgtcaacgtcagggacgaccgcggcgccacgccgctgcacctcgccgccaggcagggccgccccgcctgcgtgcaggtgctgctggagaacggcgccattgtctccgccctcaccggctcctatgggttccccggcagcacgtcgctgcatctggccgctcgaagcgggaacctggactgcatccggaaactgctcgcctggggcgcggatcgtctncagagggactcagcagggaggattcctta

SEQ ID NO: 8380 - DNA, 342 bp, Zea mays
  Clone ID: LIB3150-020-Q1-N1-D6
tttctcgttattggcactgcccctgttgggcgtgttgagactgtggtcattaagcccgccctggaccacactttctagtctactggtcttactactgaggttaacatcgtcgagatgcaccataacagctctccaggaggcccatcctgttgacaacggtggcttaaacgtgaagaatgctgctgcgaaagatctctaaagctggtctgcagccttgaactccaaggatgacccttacaactaggctgatagcttaacattgcatgccatcataatgaatcatcttggccagattggcaatcgctattccccaattctggactgacacacaccacacattgc

SEQ ID NO: 8381 - DNA, 158 bp, Zea mays
  Clone ID: LIB3150-020-Q1-N1-D8
tcgcgtagggccatccctagcttcatcccgggggttgttcgtgcagctgctggtggcagcctgagaccaggcgcgaggatgctggcggtgttcagcggctaggtggtggatgtgccaactgagcttgtggtcacagtgagccacacatcctagccaag

SEQ ID NO: 8382 - DNA, 230 bp, Zea mays
  Clone ID: LIB3150-020-Q1-N1-D9
ctcgcgccctcgctcgcttaaatactatggaggcgcaccgcacagaaggggcctgccccctcctcgtctgcgaaaagattgcggtgctgctgctgacgaagaagatcgtgaagaagcgggtcaagcagatcaagaggccctaactcgatcggtacaagtgccttaagccaagctggctcatgccaaatggtatagactttcgtttctggaagaagtttaagggatgcacc

SEQ ID NO: 8383 - DNA, 342 bp, Zea mays
  Clone ID: LIB3150-020-Q1-N1-E1
cccccttgcaagtatagtctcggcggctctagaagacgatgggcaaggacgacgtgatcgagagcggcgctggcggcggcgagttcgctgccaaggactacacggaccctcccccggcgccgctgatcgacgcggctgagctggggtcctggtcgctgtaccgcgccgtgatcgccgagttcatcgccacgctgctgttcctgtacatcacggtggccaccgtgatcgggtacaagcaccagacggacgcgtcggcgtcgggtgccgacgcggcgtgcggcggcgtgggggtgctgggcatcgcctgggccttcggcggcatgatcttcgtcctcgtctact

SEQ ID NO: 8384 - DNA, 219 bp, Zea mays
  Clone ID: LIB3150-020-Q1-N1-E10
ggaaaaatatccccaaaccctagctcccggtctcgatggcgaaccctcgcgtcttcttcgacatgaccgtcggcggcgccccggcgggccggatcgtgatggagctgtacgccaacgaggtgcccaagaccgcggagaacttccgcgcgctgtgcacgggcgagaagggcgtgggcaagtccgggaagccgctccactacaagggcttcacctttcacc

SEQ ID NO: 8385 - DNA, 157 bp, Zea mays
  Clone ID: LIB3150-020-Q1-N1-E11
ggaaaactatacccaaacgctagctcacgggcctcatggcaaacccgtacgtattctccgacatgacgggcgggagcgccccggccaaccggatcgacatcgaactctacgccaactaggtgcccaagaccgcagagaacttccgcgcgcgtgtgca

SEQ ID NO: 8386 - DNA, 392 bp, Zea mays
  Clone ID: LIB3150-020-Q1-N1-E2
gccactccgaggccaagtctagggtttgggaatctgtaggaggggagaggggagcgcgctcagggtcagggaggcgaagatgatcgaggtggtgctgaacgaccgcctggggaagaaggtgcgggtgaagtgcaacgaggacgacaccatcggcgacctcaagaagctggtcggcgcagacggggacgcgccccgagaagatccgcatccagaagtggtacaacatctacaaggaccacatcacgctcaaggactacgagatccacgacgggatggggctcgagctctactacaactaggcgccctgaccccaaccgtgccctgatgtaatgttaatccgaattctgaagtcatgggtgcgcttccagtcacagcgtctttagctaacaagc

SEQ ID NO: 8387 - DNA, 408 bp, Zea mays
  Clone ID: LIB3150-020-Q1-N1-E5
tgggtcttcagaccattagctttatctactccagagcgcagaagaacccgatcgacaccatgagggtgttgctcgttgccctcgctctcctggctctcgctgcgagcgccacctccacgcatacaagcggcggctgcggctgccagccaccgccgccggttcatctaccgccgccggtgcatctgccacctccggttcacctgccacctccggtgcatctcccaccgccggtccacctgccgccgccggtccacctgccaccgccggtccatgtgccgccgccggttcatctgccgccgccaccatgccactaccctactcaaccgccccggcctcagcctcatccccagccacacccatgcccgtgccaacagccgcatccaagcccgtgccagctgcagggaacct

SEQ ID NO: 8388 - DNA, 373 bp, Zea mays
  Clone ID: LIB3150-020-Q1-N1-E6
tgggtcttcagaccattagctttatctgctccagagcgcagaagaacccgatcgacaccatgagggtgttgctcgttgccctcgctctcctggctctcgctgcgagcgccacctccacgcatacaagcggcggctgcggctgccagccaccgccgacggttcatctaccgccgccggtgcatctgccaccttcggttcacctgccacctccggtgcatcttccaccgccggtccacctgccgccgccggtccacctgccaccgccggtccatgtgccgccgccggttcatctgccgccgtcaccatgccactaccctactcaaccgccccggccttagtcttatgcccagccacacccatgcccgtgccaaca

SEQ ID NO: 8389 - DNA, 359 bp, Zea mays
  unsure at all n locations
  Clone ID: LIB3150-020-Q1-N1-E7
ttttgtacgctcatcaaatggattacccataggaggctgtccacaagggacatcaagacacctgtgtttgatgaggcagatcatatgcttgctgaggatggctttaggagtgactctgaaaggatgatgtgggatatacaaagaagcgctcgtggttgtcaggtgcttctcttttctgcgaccttttatgatagtgtgaaggattttgttacaaaggtcattatggatggaaattagatatntgtgaacaaggaagagcttactttggaaaaagttaagcagctcaaagttcaagtacttgttgaataggcaaaaatagaggttataagggacaatatattttaatttttaaagaaaga

SEQ ID NO: 8390 - DNA, 352 bp, Zea mays
  Clone ID: LIB3150-020-Q1-N1-E8
tcgtgcaacttctagtgggatcaaagattagggaagtttacaacagtgtgagggaggatcgtgctctgctaaatggtgcgcagaagttgcttggtatccttattgccattggagaagccgtggcgtatgttctctctggaatgtatggcagtgtgagccaacttggaactgggaatgctatcctcattatacttcagcttttctttgctggtatcattgtcatctgtctagatgaactcctacagaaaggctatggtttgggatctggcatctctctgttcattgctacaaatatctgtgagaatattatctggaaggcggttagccctacaaccattaacagtgggcgtgg

SEQ ID NO: 8391 - DNA, 347 bp, Zea mays
  Clone ID: LIB3150-020-Q1-N1-E9
gcgaaaccctagcctcgagctctatctccggccacagctggtcaggttagcggcgaaggatgagcaggcgctggagccgcacgatctacgtcgggaacctccccggcgacatccgggagagggaggtggaggatctgttctacaagtatggtaaaattgttgacattgacctgaaggtccccccaagaccacctggttatgcttttgttgagtttgaagatcctcgtgatgctgaggaggcaattgctggacgggatggatacaactttgatggacaccgtctaagagtggaggctgctcatggtggtagaaggaatgctttctcgcatgatcgttcaagtggcttt

SEQ ID NO: 8392 - DNA, 279 bp, Zea mays
  Clone ID: LIB3150-020-Q1-N1-F10
ctcactcagtccacaccaccaggcacacggggctcaagacagcacagccaccacccaccgagctctatcgccggaacagcgccgttcatctagcagaggtacgagaccaatgagaccttccacggctggagctctggccgccgcggccctcgtcgcgacgctcgcgctgagcgtcggcgccaccccggagacgacgtgcgcgggggctgcggcccacgaccggcgcgtggactacggcttttgcgtggcgaggctgaaccaccaacaacacagccccga

SEQ ID NO: 8393 - DNA, 237 bp, Zea mays
  Clone ID: LIB3150-020-Q1-N1-F11
atcttcatgtgcgccgccaacgcgccggcgcgctccgaccctgcgcctcagcctggtaccgtgcctgtgccgccctgagccatcgggcctacgccctgcggatctgcctggtaccgtgctagtgccgactgcgcatccgaccttcgtctgggactacgaccatcgcggatacgacttgcgacttaacccagcacggaccgccgacggccggacggccgataggagccactgacccga

SEQ ID NO: 8394 - DNA, 303 bp, Zea mays
  Clone ID: LIB3150-020-Q1-N1-F12
atcactcagtgcacaccaaccggctcagggggctcttgacaggacagtcagcacttacccagctctatcgccggaacagcgccgctgatctagcagaggctcagagaccaaggacacctttctcggcttggagctcaggcacgcgtggcccttggttcgacgcctcgtgcggagctgtccttgccactcatgagacgacgtgcgcgggggcggcggtccactgaccggagcgtggactacggcttttgcgtgtagaggctgatccaccaccacgacaggcccgacgcggacacctggggcctg

SEQ ID NO: 8395 - DNA, 375 bp, Zea mays
  Clone ID: LIB3150-020-Q1-N1-F2
tccaagggtactcgagctcgagctacactcggcgtttacggcgccggcgatcacccaccgcgtcctccgccttgtcctctttcctcaacctaacccccatccagcgaggtttctccgctctcatatagatatgaagagggcggcgccgtctcaggagcccctcgacgtttcttccggggactcctcgggctcggattccgatcaattaggcggcaaggataagggcgggagcgcctctaaagctgctgcaggggctgaagatgtgaagagggtggtgctgcataaagaatcccaggacgtatcttctgatgatgacctgagctcggattctgatgatgatgctgggaaggggaatgcttggaatgcctttgggct

SEQ ID NO: 8396 - DNA, 370 bp, Zea mays
  Clone ID: LIB3150-020-Q1-N1-F3
agaccattagctttatctactccagagcgcgagaagaacccgatcgacaccatgagggtgttgctcgttgccctcgctctcctggctctcgctgcgagcgccacctgcacgcatacaagcggcggctgcggctgccagccaccgccgccggttcatctaccgccgccggtgcatctgccacctccggttcacctgccacctccggtgcatctcccaccgccggtccacctgccgccgccggtccacctgccaccgccggtccatgtgccgccgccggttcatctgccgccgccaccatgccactaccctactcaaccgccccggcctcagcctcatccccagccacacccatgcccgtgccaacagccgc

SEQ ID NO: 8397 - DNA, 269 bp, Zea mays
  Clone ID: LIB3150-020-Q1-N1-F4
tggtggtattggaactgtccctgttggacgtgttgagactggtgtcattaagcctggtatggttgttacttttgggcctactggtcttactactgaggttaagtccgttgagatgcaccatgaggctctccaggaggcccttcccggtgacaatgttggcttcaacgtgaagaatgttgctgtgaaagatctgaagcgtgggtatgtgtccttcaactccaaggatgacccttccaaggaggctgctagctttaccttccatgtcatca

SEQ ID NO: 8398 - DNA, 406 bp, Zea mays
  Clone ID: LIB3150-020-Q1-N1-F5
gttaacgttaattcgatcatgcacactgggggttttgtcgacgccgaagatatgaacttgagaaaacataaatatagaagttggttaggatactcaaatagcaagctggcacaggtaaaattcagtagcatgcttcacaagaaaattcctgcagaggctggcatcggtgtagtttgcgcttctcctggaattgtcgacacgaacgttgcaagagatcttcctaagattgtcgtagccgcgtaccatttgattccctacttcatatttgacgctcaagaaggttctaggagtgcactgtttgcagcatccgatccccaagtcccggaatactgcgagacgctcaagtcggaggactggccagtttgtgcctgcattaactatgactgtagtccgatgaatgcgtctg

SEQ ID NO: 8399 - DNA, 403 bp, Zea mays
  Clone ID: LIB3150-020-Q1-N1-F7
tcgggcgacggtccgcctcagcgcatcgcgggcggcgacctcatggatcacctttagccctcaatcatggtgagttccccgccaaaactgtattcaccttcaagatccacggggtgcttatgactctcacatgtactaatcagctttgctcaagccgacgtcgatagtcgaaccggacgttgccgccgtagctgccaacaagagtacattccataagtacagctaccgtggcgtctgacctagatgcgcttctcgacatgtccactgactaccttgttcagcttttgcgcgggcgcaccaggagaaggtttcagacgcgtctgaagaggaagcccatggcgctcataaagaagctacgcaaggggaaaaaagatgctcctgcttgtgagaagcccgagccagt

SEQ ID NO: 8400 - DNA, 296 bp, Zea mays
  Clone ID: LIB3150-020-Q1-N1-F8
cggacgcgtgggcgtacgcgtggggggggcgggcatcgcatgcgacgcccacaacgcatacgtgctcccgcgccggcttctcccaggcccacggcgacccaccatgattgatagaggcatgagactgtggacatcattgctattgcgattcgattactggatatagtgtaggtggtaaagcatcacctgtgcacacactcttcgagctgttggtgcatcaagggccacctacacgaagatgctctatttgtcgtcttatgtcacattaaatgtaacccaacgctcattggtatctt

SEQ ID NO: 8401 - DNA, 277 bp, Zea mays
  Clone ID: LIB3150-020-Q1-N1-F9
atcttcttgtgcgccgccaacgcgccggcgccctccgcccctgcgcctcagcctggtaccgtgcctgtgccgccctgtgcctccggtcctccgccctccgcatctgcctggtaccgtgctagtgccgcctgcgcatccgtcctccgcctgggtctccgccctccgcggctccgccttgcgactttaccctgcacggcccgccgccggccggtcgcccgtctggagccactgacccgagtttccgtccagcacttcaaggaccagcgcctgttcgttc

SEQ ID NO: 8402 - DNA, 356 bp, Zea mays
  Clone ID: LIB3150-020-Q1-N1-G1
cgccaatcagcaccagccaccgtggcgatgacggatgaggcggaggcgaaggcgaaaggcaacgcggcgttcgcggccggccgtttcgaggaggctgtccagcacttcagcgacgccatcgcgctcgcgcccgacaaccacgtcctctactccaaccgctcggcggcgtacgcgtcgctctggcgctacgcggaggcgctagatgacgccaagcggaccgtggcgctgaagccggactgggccaagggctacttccgccttggcgccgtgcaccttggcctcggtgacgcgcccaaggccgtcgaggcctacgagaaagggcttgcgctctagccgttcaatgaggcgctcaaatt

SEQ ID NO: 8403 - DNA, 297 bp, Zea mays
  Clone ID: LIB3150-020-Q1-N1-G11
ggacgcccaccagcacctgccctcctcgccgtcgccgcctccctccgcgcgaccgatctaccctccgccaccaccatgtcgctgatcgccggggaggacttccagcatatcctgcgtttgctgaacaccaacgtggatgggaagcagaagatcatgttcgccatgacctcaatcaagggtgtcgggcgccgcttctccaacatcgtctgcaagaaggccgacatcgacatgaacaagagggccggcgagctgacgcctgatgagctggagcgcctgatgacggtcgtggccaaccct

SEQ ID NO: 8404 - DNA, 119 bp, Zea mays
  Clone ID: LIB3150-020-Q1-N1-G12
ttttcgaggcaaaagcatagcgaccacagacggggcgcgcttcatggccttattattctgacattaactaagaggtgaggaggatactgctgtcacgatcacttgggagaaggcgaggc

SEQ ID NO: 8405 - DNA, 298 bp, Zea mays
  Clone ID: LIB3150-020-Q1-N1-G2
cggccaggttgggaagctgcaagcctgcaacccgatacagcaaagcgcctattacataacataatacatgatcaacgaagcacctacattaaatatatctcatctagtctagatcccaacaacacattacaggccatcgcgtcgcatcagtttatgtttccccagatggcgtgtcccgaggtcactttgttgcttggccttgctgtcagttcatacacgatccgagcaaatgtgtccgagtatttcccttctgatgtcaggatctcagcaaaagtgttctcgtgtacgaagagatgca

SEQ ID NO: 8406 - DNA, 341 bp, Zea mays
  Clone ID: LIB3150-020-Q1-N1-G3
ctcgctatcgttatagctcggacagggtgggaagctgcaagcctgcaacccgagacaccaaagcgcctattacataacataatacatgaccaacgaagcgcctacgttaaatatatctcatctagtctagataccaacaacacattacaggccatcgtgtcacatgagtttatgttcgcccagatggcttgtccccaggtcacttcgttgcttgggcttgctgtcagttgatacacgatccgaacaaatgtgtgcgaatatttcccttgtgatgtcaggatctcaataaaagcgttcttgtgtacgaagagatgcattctggtctgacgctcatagacgag

SEQ ID NO: 8407 - DNA, 350 bp, Zea mays
  Clone ID: LIB3150-020-Q1-N1-G4
ctgagtccctcacacactcactatacactgctctgctgcaacaagaaggaagaagctcgcgcctccgtagctatcgttgtcagcaatggccaccaccgctgcgtgcagcctcctcaagtgctccttcgagggctcccggctgccttcggccacgcgcaccaccaccccgtcgtccgtggtcgtggccacacctcgcgccggcggaggcccgatccgcgcgttcatctcctacccgaacccgccctacgacctgacgtgcttccggctcagccccatcaaggagtccatcgtgtcccgcgagatgacccggcgcttcatgacggacatgatcacccaaaccgacaccgacg

SEQ ID NO: 8408 - DNA, 397 bp, Zea mays
  Clone ID: LIB3150-020-Q1-N1-G5
ttccaactcctgagcactttctcctcggggcagacaagccaatcgaagccgagatacgaccatggactccaccggcaccggagcagggggtaaggggaagaagggagcggccgggcgcaaggtcggcgggccaaggaagaagtcggtgtcgaggtccgtgaaggccggtctccagttccccgtcggccgcatcgggcgctacttgaagaagggccgctacgcgcagcgtgtcggcaccggcgcccccgtctacctcgccgctgtcctcgaatacctcgccgctgaggttctggagctcgccggtaatgctgccagggacaacaagaagactcgcattattccgcgccacgtgcttctggcgatccggaacgacgaggagcttgggaagctgttgggc

SEQ ID NO: 8409 - DNA, 204 bp, Zea mays
  Clone ID: LIB3150-020-Q1-N1-G8
tcgtacacacgcgtgtatttcaaattgcttgagtggtctacactgccctgccatcatactccacgtgagcccggtcgagcgtgagcaagggaaaggcatggctgttccgaatcattgaacgctggcgctgggcgtgcttttggccgtgaccgtggtggctcatcaagcctgtgtgcgcgcagcgatcacaatttccaccgtgta

SEQ ID NO: 8410 - DNA, 143 bp, Zea mays
  Clone ID: LIB3150-020-Q1-N1-G9
tgttcaatgcgctcaaacatttgatgctagagaagcttggcagagcattatggtctcaagccctctttaggaactcacaaacctagggagtgcctgccactgaaccacatcatgaggaacaggctcaagtatcctcttacata

SEQ ID NO: 8411 - DNA, 376 bp, Zea mays
  Clone ID: LIB3150-020-Q1-N1-H1
aaagcctccgacccccttcctctctccctgcggcgccgctgcgcacgcagggaacaagcgacatgggcgtctacacctttgtgtgccgcaacaacggcggcgagtggaccgccaagcagcactccggcgagatcgaggcttccgccgctaccccatacgagctgcagcgccgtctcgtcgctgtcgcctccgcggccgactctgcctacggcgtgcagtcgtccttctccatggtcacccccagctccgccgtgttccaggtgatcgtcggtgctgtcggtggtggtgcaatgatggtgagcggaggtggcggcggccgtgctgctgcatctggtggtgctgctggcgaggctcccaaggaggagaataaggaaga

SEQ ID NO: 8412 - DNA, 191 bp, Zea mays
  Clone ID: LIB3150-020-Q1-N1-H11
tctcatggcagtggtgcggcactaatccgctggggtgcacttttgggaatcgttgtttcaccacttcgacctggcagcattacgcctggtcctattccattttaaactacacgaattccaattacgtttagtaccagctgttggacgtgcttgtgatttacaagccagtgcaccaattgggaacactgctg

SEQ ID NO: 8413 - DNA, 135 bp, Zea mays
  Clone ID: LIB3150-020-Q1-N1-H12
cggacgcgtggacggacgcgtgtgttcagcgtggcatgaaccatcttgatgtggcgaccagaggacgcatacaggatgtcctgtaccggctggccaacatgcttgaacaaactcattgcgctgacagtacaagcg

SEQ ID NO: 8414 - DNA, 371 bp, Zea mays
  Clone ID: LIB3150-020-Q1-N1-H2
gggctacatcccgctcaccacctacctgggcacctacaagatcggcgactacgtcgacctcaaggtgaacggcgccgtccacaaggggatgccgcacaagttctaccacggccgcaccggtcgcgtctggaacgtcaccaagcgcgccatcggcgtcgagataaacaagcaggtgaatggtcgcatcatcaggaagcgtatccatgtccgcgtggagcatgtgcagccgtcccgctgcacagaagagttccgcctgaggaaggtgaagaatgatcagctgaaggcggatgcaaaggagcgcggcgaggtcatcagcaccaagaggcagccgttgggtcccaagcctggcttcatggttgaggggactacca

SEQ ID NO: 8415 - DNA, 278 bp, Zea mays
  Clone ID: LIB3150-020-Q1-N1-H3
gagaaacgctaggctgcagctctatatcagggcgcaggtactcacggtacagggcatcgagctctacgcgctggaccccatccatctatacaaagagcctactcggaccatccgagaaccgtggctaggaacatcgtgcggtatcaccaagaggacctttgcgctcgctgccagcacatccgtcatttacttgctagaccagagatcctgaccatgctcaggtgctattgctcaacgtgacgcatacaaacttgatctacaccgtctaacactccaag

SEQ ID NO: 8416 - DNA, 407 bp, Zea mays
  Clone ID: LIB3150-020-Q1-N1-H5
agctcctcgacccccgcccaacactcccaggcgtcacgccgtcgccgacgagagtcccacattcaccatgatcatctccaagaagaaccgccgcgagatctgcaggaccatcttccatgacggggttctatatgacaataaggactacaacctgtacaagctccccaagcttgacgtgcccaacctgtaggtgatcaagcttatgcacagcttcaagtccaacgagtatatcaggaagaccttctcctgccagtactactactggtaccttaccaacgatggcattgagcacatgcgcagcttactcaacctgccgtcagaggttgtgcccaacaccctcaagaagtcctccaagcccccggaccagtcctttggatctggcccaccgggtgaccgccccatgggtt

SEQ ID NO: 8417 - DNA, 335 bp, Zea mays
  Clone ID: LIB3150-020-Q1-N1-H6
tcgcggacgcgtgggcggacgcgtggggggggggtgcttcgcacgcgacgcctacaacgaatcctggcccccgcgccgacttcggccagccctgtggcgactcaccaggattgaaggaggcatgagatggtggacatcattgatatagcgatttgattactggagatggtgacggcggtaaagcagcaccgctgcacacactctttgatctgcgtttgcatcaagggccacctaagtgaggatgctctggtcctcgtcgttctactcatgaactgtaacccgatgcttattgctatcttgtcgtgtgtgtgcaagtggttcgacgatgttgccaa

SEQ ID NO: 8418 - DNA, 83 bp, Zea mays
  Clone ID: LIB3150-020-Q1-N1-H7
tctcggacgcgtgggcagacgcttgtacgcggagtggtattaaccagccagatattgcccctcgtggactcattaaggatttt

SEQ ID NO: 8419 - DNA, 95 bp, Zea mays
  Clone ID: LIB3150-020-Q1-N1-H8
tttgctcaatgcgcccaaacattgaatgctgggcaattttgatgggctttttgctcccaaccatttttttgacctcacaagtcttaggagttcct

SEQ ID NO: 8420 - DNA, 237 bp, Zea mays
  Clone ID: LIB3150-020-Q1-N1-H9
gttcccccgcgcccgagacgcaaccccgcgccaggagtaagtttgttcttttatcgatattatcgatatggcgagggaggagaatgtctacatggccaagctggctgagcaggccgaatggtatgaagagatggttgagtatatggagaaggtggctaagactgttgatgtggaagagctcactgttgatgagcttaaccttttgacggtcgcatacaagaatgtgattggggctcg

SEQ ID NO: 8421 - DNA, 218 bp, Zea mays
  Clone ID: LIB3150-021-Q1-N1-A10
ctgggtcttcagaccattagcttgatggactccagagcgcagaagaacccgatcgacaccatgagggtgttgctcgttgccctcgctctcctggctctcgctgcgagcgccacctccacgcatacaagcggcggctgcggctgccagccaccgccgccggttcatctaccgccgccggtgcatctgccacctccggttcacctgccacctccggtgca

SEQ ID NO: 8422 - DNA, 196 bp, Zea mays
  Clone ID: LIB3150-021-Q1-N1-A3
gccgatccgacctcaattccgaatccctgcggcatctaccggcgtccccaacgccctccggcatgccggacgtgcaaacgctcgtcagcgacttactgctcaagcttaagcgccggaaggtggaggggtcgcacgcggcggcccggcagacggcggaactgctacggtcggatgtgtcgcagcatcagatgggtag

SEQ ID NO: 8423 - DNA, 105 bp, Zea mays
  Clone ID: LIB3150-021-Q1-N1-A4
gcataggggtgggtgcctcacggtcagggattcgtgtgcgctatgccgcaacttggatctcgctcggggccgtgtcgagggtttcctcctgctctgctatgtatg

SEQ ID NO: 8424 - DNA, 245 bp, Zea mays
  Clone ID: LIB3150-021-Q1-N1-A8
gcccgcccaaatacgaaagcctcagatctgagtgaccagcgccgccgcttcgttcgtgtcgaggggagaagaggaaatggcggcgagcgagggcgtgctcctggggatgggcaaccccctcctcgacatctccgccgttgtcgatgacgccttcctggcaaagtatgacatcaagctgaacaatgccattctcgctgaggagaagcacttgcctatgtatgatgagttggctagcaacagcaatg

SEQ ID NO: 8425 - DNA, 284 bp, Zea mays
  Clone ID: LIB3150-021-Q1-N1-A9
cccctcagtatgatcagatactgaggagaaatgagcagatgtatgcattgttggcaatttgcctatctttgtgcccacagaacaagctcattgatgaaaatgttagcacccagctgaaagaaaagtataatgacaaaatgacgaagatgcagaggtatgatgatgaagcatacgctgcttatgatgagctattctcgtatgcttgccccaagttcattacaccgtctgctccaattctggaccagccgctaacaaactataaccaggatgcataccgtcttcag

SEQ ID NO: 8426 - DNA, 192 bp, Zea mays
  Clone ID: LIB3150-021-Q1-N1-B1
gctcacctgagccttccccaagttgtttgtcttctcttgctccgcaaaccagcgcaagcccttccctgacagcggcggcgacatggtgctcgaggcgacgatgatctgcatagacaactcggagtggatgcggaacggcgactacgccccgtcgcggttccaggcgcaggccgatgccgtcaacctcatatg

SEQ ID NO: 8427 - DNA, 263 bp, Zea mays
  Clone ID: LIB3150-021-Q1-N1-B10
gccttctgcgcctccatttcggcgtctgtcccttgcaagttcagtctcgcctccaaccatgggtaaagaagaagtcccacatcaacattgtggttattggccatgtcgactctggcaagtcgaccaccacaggacaccttatctacaagcttggaggcattgacaagcgtgtgatcgagaggtttgagaaagaggctgctgaaatgaacaagcggtccttcaagtacgcctgggtgctcgacaagctcaaggctgagcgtgag

SEQ ID NO: 8428 - DNA, 242 bp, Zea mays
  Clone ID: LIB3150-021-Q1-N1-B2
ttagagcagccgcatccacaacctgcctctgtcgtcccctggcggcgtccgcggcaggatggcggaatctacggcgaggacggtgaaggatgtcaacccgcacgagttcgtcaaggcctacttcgtccacctcaagcgctccggcaagatggagctccctgagtgggttgacattgtgaagactgcgaagtttaaggaggcttcctcttatgaacccgactggtactacatttagggctgga

SEQ ID NO: 8429 - DNA, 315 bp, Zea mays
  Clone ID: LIB3150-021-Q1-N1-B3
cggtgtccggtccggcgcccccctatttggtctcgcagcctcttctccccaaaccctaatcttgctcctgtttatctctgctccaatccgttggtggagcggcggcgatggaggggaaggaggaaggtcggatcttcgtgggcggcctgtcgtggcaaacggacgagcgcaagcttcaggacgcctttggtcgcttcggcaaggtcgtcgatgttcagatcatgctggagaggcacacaaaccgccacaggggcttttggcttcgtgacattcgaagatcgaagggcaagtgacagcgctatcaaagagatgcgt

SEQ ID NO: 8430 - DNA, 250 bp, Zea mays
  unsure at all n locations
  Clone ID: LIB3150-021-Q1-N1-B4
ctttgatgaaactaaggaagagtatgtagaagttcctagtgacagtggtattacattcaatgttgcacccaagatgaaggcgcttcaaattgctgagaaagctagggacgctctcctaagtggaaagtttgaccaggtacgtgtcaacctgccaaatggtgacatggttggtcacactgnggatattgaggccaccgttgttgcttgcaaggcagctgatgaagctgttaagatcattctggatgctgtc

SEQ ID NO: 8431 - DNA, 187 bp, Zea mays
  Clone ID: LIB3150-021-Q1-N1-B5
ctcgagaagctaccggctggtccgatcggacggaccccttcgcgcgccccaaagatttcaagtaaggtgctgtaacaaaaaatgcaagggggcaaaggtgggaagcaaggcttattctgtttccgggacccttctggggggtccgggggcttttgacaaccagggagccttatgcctggtttttttg

SEQ ID NO: 8432 - DNA, 175 bp, Zea mays
  Clone ID: LIB3150-021-Q1-N1-B6
tcatagcagccgcatccaaaagccctatgggggggtccttttcagccgccgcagccagctcacgtaatctactgtaaggacagatacagaggtcaatccgcacgaggtcgggatggtctagtttgtgcaactcaaacgctaccgcaagagggagctccccgagagggttgacatt

SEQ ID NO: 8433 - DNA, 312 bp, Zea mays
  Clone ID: LIB3150-021-Q1-N1-B8
ctttgatgaaactaaggaagagtatgtagaagttcctagtgacagtggtattacattcaatgttgcacccaagatgaaggcgcttcaaattgctgagaaagctagggacgctctcctaagtggaaagtttgaccaggtacgtgtcaacctgccaaatggtgacatggttggtcacactggggatattgaggccaccgttgttgcttgcaaggcagctgatgaagctgttaagatcattctggatgctgtcgagcaagttggtggtatttaccttgttactgccgatcatggcaatgctgaggatatggtgaa

SEQ ID NO: 8434 - DNA, 337 bp, Zea mays
  Clone ID: LIB3150-021-Q1-N1-B9
gcaggcgtcaccaagggtttccgggatgaagatgcggttcgtctacgctcactttcccatcaacgcctccatcaccaacgccaactccgccattgagatcagaaacttcctcggggagaagaaggtcaggaaggttgatatgcttgaaggcgtgaccatcttgcgttcagagaaggtcaaggatgagcttgttcttgaaggcaatgatgttgagcttgtctctcgctccgctgctctcataaaccagaaatgccatgtcaagaagaaggatatccggaagttcttggacggtatctatgtgagtgacaagggccccatctttgatgagcaatgagct

SEQ ID NO: 8435 - DNA, 138 bp, Zea mays
  Clone ID: LIB3150-021-Q1-N1-C1
ttttgatgaaactaaggaagagtattgtatgctggtttattgacagtggtgtgacactcacccttgcacccaagatgaaggctcttcaaattgcagagaaagctagggacgctgtcctaagaagaaagtctgaccatg

SEQ ID NO: 8436 - DNA, 290 bp, Zea mays
  Clone ID: LIB3150-021-Q1-N1-C4
aaaagggcgtgtttgagactagcggaccgaccttgaagttgaagttgaaaaggccggcctgcgcggcgatggatgtcaagtgccggcgtctggaggggaaggtggccatcgtgacggcgtccacgatggggatcggcctcgccatcgccgagcgcctcggtctggagggcgccgccgtcgtcatctcctcccgcaagcagaagaacgtgaacgaggcggtggaggggctcagggccaagggtatcaccgcggttggtgccgtctgccacgtctccgacgcacagcagcgc

SEQ ID NO: 8437 - DNA, 317 bp, Zea mays
  Clone ID: LIB3150-021-Q1-N1-C5
gtgcgtgttgctgttcagtgcaaggttgcctctgaccttcccaagctagtcgaaggtttgaagcgtctagcaaagtccgatcctatggttctctgtacaatggaagaatctggtgagcatatcattgctggagctggtgagcttcatcttgagatttgcctgaaggatctgcaggaggacttcatgggtggtgctgaaattattgtttccccacccgtcgtctccttccgtgaaacggttcttgagaagtcctgccgtactgtcatgagcaagtctcccaacaagcacaaccgtctgtacatggaagcgcgcccctt

SEQ ID NO: 8438 - DNA, 299 bp, Zea mays
  Clone ID: LIB3150-021-Q1-N1-C7
caggcaaccagctgccgagggaggaaccctagcggaacactgtgcaggtgacagcggcgcgcgacgtgggatacggcggcattcgtccccctcggcccctcctccatccccggcgcggcggcgccagcagccggtctgcagaaccatagcaacactttggtgcgcttaagatgtccatcctccgaccctttctcccaatagtagccaagatcaaatggttgggagatgcttttctactgggattccttctgatatgatagcggatcttaattagggaaatggagtcagtattttggcga

SEQ ID NO: 8439 - DNA, 329 bp, Zea mays
  Clone ID: LIB3150-021-Q1-N1-D11
aaagagagatgttaagacggaaggtacgatcgactggtttgaagacgccgtttcgtgatggatatgtaagagatttagctgaggaagttctaaaactggccaagaatggactggaaagaagagggtacaaggaggttggtttccttagagaggtcgacgaagtagtgagaacaggagtgacgcctgcggagaggctgctgagcctgtacgagaccaagtggcaacgcaacgtcgaccatgttttcgagcatttgttatactgattactgaggatgacgccgccgaacgacgttggactgagcttgtagatgtaccccgtaccctaatac

SEQ ID NO: 8440 - DNA, 313 bp, Zea mays
  Clone ID: LIB3150-021-Q1-N1-D12
tcggtacacggtctccctcttcctgtgaggggtagagtgagagtgaggcagcgagtgggagacaaggggaaatggggaagggagcgcaagggagcgatgcggcggcggcgggcggcgaggtggaggagaacatggcggcgtggctggttgccaagaacaccctcaagatcatgcccttcaagctcccgcccgtcagcccttatgatgtccgcgtgcgcatgaaagcagtggggatttgcggcagcgatgtgcactacctaatggagatgcgcatcgcgcacttcgtggtgaaagagccgatggtgatcgggca

SEQ ID NO: 8441 - DNA, 246 bp, Zea mays
  Clone ID: LIB3150-021-Q1-N1-D3
cgaccgagcgaattcaccacagcttctcaccaccgctaccttcgatggcacccaaggcggacaagaagccggcggcgaagaagcctgcagaggaggagcccgcgacagagaaggcggagaaggctccggcggggaagaagcccaaggccgagaagcgcctcccggcgggcaagtccgccggtaaggagggcggcgagggcaagaaggggaaaaagaaagcgaagaagtccgtggagacctacaaga

SEQ ID NO: 8442 - DNA, 300 bp, Zea mays
  Clone ID: LIB3150-021-Q1-N1-D5
gaggaaggagggatcgatcgaggatggtggacgtctcgcgcgtgcagaaggagctcaccgagtgcaaccgcgaccgggaggtatcgggcgtctccatcgcgctccacgacggcgccaacatctcccacctcaccggcaccatcgccgggcccgccgacagcccctacgagggcggcacgttcgtcatcgatatccgcctgcccggtggatatccctttgagcctccgaagatgcagttcatcaccaaagtatggcaccctaacatcagcagccaaaatggagcaatttgcttggacattc

SEQ ID NO: 8443 - DNA, 374 bp, Zea mays
  Clone ID: LIB3150-021-Q1-N1-D6
atcagatctcgcgcccgtgcagccaaagcaaaatcagcatccggatctccacattccccaccaaaaatcatcctccggacgaaatcagcggcggcggagatgggagcggagtgccggtacgaggtggcgcacgcggcgtacatcaagctggcgctgcacgcactgaagcaccctgcgaccgacgtcaacggcctcctcgtcggtcgcctcgtcgagccttcgtcctcaccggccgtcgtctcggtcatcgacgccgtgccgctttctcaccacccgcaccatctgccgctgctccccacgctcgagctcgcgctcaccctcgtcgaggaccacttcgcaacccagggcgaaggcctcgccgtcgtcgggtacta

SEQ ID NO: 8444 - DNA, 281 bp, Zea mays
  Clone ID: LIB3150-021-Q1-N1-D7
tcgcggacgcgtgggcgcgtttagaacctgtagagatttcccccactcgccagtcgcagcagcacctgtagccatggacgccagcggagccggtagcaaggggaagaagggtgcggccgggcgcaaggcaggcggccccaggaagaagtcggtgacgcggtccgtcaaggccgggctgcagttccccgtcggccggatcgggcgctacctgaagaagggccggtacgcgcagcgcgtgggcactggcgccaccgtctacctcgccgacgtcctggagtacc

SEQ ID NO: 8445 - DNA, 344 bp, Zea mays
  unsure at all n locations
  Clone ID: LIB3150-021-Q1-N1-D8
gccgacgaatgcacagtcccggagaatattggtgaagcaataacttgatattgggttctagaccaaagaagcaatggaaaaggaatcatctgccacatacgagccaaaaaggaacagtgaaataagggtttttgagagttcagatgagatttcaacggatcttgctgagtatatctcacaagtttcagaaatttctgtcaaagaaaggggatactttgccatcgccttatctggaggtcccctagtcagttttttggggaaactttgtgaagctccatacaacaagacactggattggtccaaatggtacatnttctggtctgatgaacgtgctgtggcaaaaa

SEQ ID NO: 8446 - DNA, 254 bp, Zea mays
  Clone ID: LIB3150-021-Q1-N1-D9
tcgagccgagcgtcttatcaaagacggcatgctcctctagctcaagagagccacatctgccgcggtagtttacagaagcatctaagggaagcttgttgttgaggatgcctacgctctggagctcaaccgccttcgcatgtgactctcttccaagaaggtccagaacctgcacatagattatgcccatctgcttaaaggagcctttgacattcctctatgggctaaggcagctgaaccgacccctacttagggtg

SEQ ID NO: 8447 - DNA, 242 bp, Zea mays
  Clone ID: LIB3150-021-Q1-N1-E10
cataccacgttgagggtaaaaacaggggatgtgtaatgcacggcgtgtatacacccatacaaggaattaccaggcatgatgacaggatctaagataattaaccattacaccttgatttatacaaaacaaagatgtccttttcatctcccacgctatcatctcataacactaacccgatgatatgccctcaataaatcaatcgccatgcctcgcattctttttatgagctattcaatgacttt

SEQ ID NO: 8448 - DNA, 329 bp, Zea mays
  Clone ID: LIB3150-021-Q1-N1-E11
gcagaattgagtgacaggctcaaacacaggctagaagataggtgcttagtgagttaaccagtgggatgtcgctggaagatagtttgaagaagagggtggccaagtgccgcagggagtatgacattatttacaagcagctaccggtgctgctagagaagatggaaattctatttcctacggggaagaagatggagagctccgagccggagaacaaatccgaagcaaagggggagccggtcgacccgctgcgagccatgacgccggcagaaataggggagcgctacaaggatctggcggacaccgtcaagggattcctcaaggatctggac

SEQ ID NO: 8449 - DNA, 295 bp, Zea mays
  unsure at all n locations
  Clone ID: LIB3150-021-Q1-N1-E2
ctcccacacagaaaaccctagccgccgccaccgaagcggcctcccaggtaagcaggatcgtccagcccgccgccgccatgaagcgcaatccccgcgtcacgagctcccgccggaagtgccgcaaggcgcactttacggccccgtcctccgtccgccgcgttctcatgtccgcggggctgtcgacggagctccgccacaagtacaacgtgcgctccatcccgatccgcaaggacgacgaggtgcaggtcgtgcgcggcacctacaagggccgtgaggggaaggtggtgcangtgta

SEQ ID NO: 8450 - DNA, 304 bp, Zea mays
  Clone ID: LIB3150-021-Q1-N1-E3
ccgagcactgccatatccttcgcgtgccattcagaacagaaaacggaatcgttcgcaagtggatctcgcgatttgaagtctggccgtacctggagacttacactgatgacgtggcgcatgagattgctggagagcttcaggccaatcctgacctgatcatcggaaactacagtgacggaaaccttgttgcgtgtttgctcgcccacaagatgggtgttactcactgtaccattgcccatgcgcttgagaaaactaagtaccctaactccgacctttactggaagaagtttgaggatcactacca

SEQ ID NO: 8451 - DNA, 111 bp, Zea mays
  Clone ID: LIB3150-021-Q1-N1-E5
tcgatcgcggcgttcgcgctttaaggagaagaggggtcaaccgtggacgttgaggcccgcccctttccctccgagcccctggtccaaaccccaaaaaaaaaggccccttgg

SEQ ID NO: 8452 - DNA, 378 bp, Zea mays
  Clone ID: LIB3150-021-Q1-N1-E6
gttggcttctcctcccccaccggttcgtgttcaggttctggttcgtgggcgagagggaagagatggcggcgtcggacgttgagtaccgttgcttcgttggcggcctcgcctgggccaccgacgaccactccctcaacaacgccttcagcacctacggcgaggtcctcgagtcgaagatcatcctggatcgggagacgcagaggtcccgcggcttcggcttcgtcaccttctccacggaggacgcgatgcgcagcgccatcgagggcatgaacggcaaggagctcgacggccgcaacatcaccgttaacgaggcccagtcccgcggcggccgtggaggcggcggtggcggatacggtggcggccgccgtgatggaggcg

SEQ ID NO: 8453 - DNA, 174 bp, Zea mays
  Clone ID: LIB3150-021-Q1-N1-E8
ttatcgccgaatgtcggattgagaaaagggtgcggtcatctccttacctccatgccccaccagaagaatctgaccaactctatgcgacacataaaaagacagaacctcgtcctaaaatatctcgatctcgagagcggacactcgtttacctgcgccaacaatgtgctcgagtag

SEQ ID NO: 8454 - DNA, 234 bp, Zea mays
  Clone ID: LIB3150-021-Q1-N1-E9
gccgcgcgcattccccgtcccgtgccaccggaccaggggaaggaggacacacatgtcgtcgtctctctctccagcggcggcagccgcgcccctggatctggacggcaactccgtcgcgcccctcaccatctgcatgattggcgccggcggcttcatcggctcccacctctgcgagaagctcatggccgagacgcgccatgtcgtcctcgccgtcgacgtatactgagataagat

SEQ ID NO: 8455 - DNA, 257 bp, Zea mays
  Clone ID: LIB3150-021-Q1-N1-F11
tcgatcgaatccgtggcgcacttgctggggggtcactctcaagccgccgacgtcgtcgtgaggactccggcaaatggtgtcccgcgtggcctcgggcctgctcctccgccgtgccggcagccacactattgcctcctaaggagttatgcacatgtcaaaagctgcaacagacaactttcacctttggtctttgatagatctgaatgctaaaatatgaggagaagatgctattacttacctaatccctctacatacca

SEQ ID NO: 8456 - DNA, 297 bp, Zea mays
  Clone ID: LIB3150-021-Q1-N1-F2
cgcaccgtaaccctagcagcagatcggccatggagagctgggcgacctgggtggggacaagcgtcacctccgccttcttcgcctccctcgagcgctgctcctgcatcaacctctccaccgacgacgacgacgacgacgaggaccacgacgaggccaaggaccggcccctcatcctcgccgccgccccacgccacgactccgccgccaagcccgatccagactccgccgccgaggaccaggacgaccagaagcaagagcagccgccgctgccgcccgtatgaatcgaacccgattcct

SEQ ID NO: 8457 - DNA, 398 bp, Zea mays
  Clone ID: LIB3150-021-Q1-N1-F3
aacagccttaaatccacttgaaaataggtggggaacttactgccctgggatggaaccatcacccggttctgagtacattacctgattaagagatttgtacagtgtatcttgcatggaagacagggaaacccacaatttaaagaaggaaaccatcaaagatcagtatgaagtggtgaaaacaagaaccttaaactcaaataagtgcaaagagggtactcatgttatggagtatggtgataagacctataaggatgagaagttttcctttatcaaggtttcgatcctgcttatgccacattggcaacattgctgttttgccaagccccaaagggggcagtcaatcaaaaaaaggttgttttttcttcattttggaaaaggtccaacaggttaaatggggg

SEQ ID NO: 8458 - DNA, 404 bp, Zea mays
  Clone ID: LIB3150-021-Q1-N1-F6
aaaggctcatgcggcaagtcgctcgcgccgttcccgcaaggctgcttctactccaacgccctcggagggctcaagtgctacgagaaccccaagcacaaggtcaccgctgtccccgccgacgaagaagagatctgcggtgccactttcaaggtggtggaagggtctactgtcctgacggcgctgcactgatcgatcatcagctggcggaggcgatgcgacgatgatgcagaactttgtacatgcgtggtgggtgtgtaacatagtgtggctggcaacaagccatgctcatgcaaaccgatgaatctatctctgtatcatgcatcgatctcggttgcttgctagtcccgactccagactccagacatggctatatatagctggtgctaataaataggagtataatc

SEQ ID NO: 8459 - DNA, 232 bp, Zea mays
  Clone ID: LIB3150-021-Q1-N1-F7
cttacccctacctctacagcatctcccgtgtgcgacgactcgtctgcgctcctcacctcgccagccatgggcaagatcaagatcggaatcaacggtttcggaaggatcggcaggctcgtggccagggtcgccctgcatagcgaggatgtcgagctcgtctccgtcaacgacctcttcatcaccacggattacatgacctacatgtccaagtacgacaccgtgcacggccaat

SEQ ID NO: 8460 - DNA, 345 bp, Zea mays
  Clone ID: LIB3150-021-Q1-N1-G11
tcggcgacttcgagaaccctagtatcaagcgcagaactccgtcatgctgcgtgcggcggcggctgccgccgccatattcccggcgcgggtcgccgctgcgccggctgctgcggcggcggaggaacttaggtatccgctgctcagggttattgggacgctgaggggcagccgcggctcggtgctgctggggaggagggtgcgtttctgctccaactcctccgcgagcgactccgaagtggcggcggcagatgcggaggcgaatgccgaggatgcgaccgtcgcggaggaggaggcgggcagcaaggcgttttccgccatcgtgccgaccagcaccaatattgacga

SEQ ID NO: 8461 - DNA, 259 bp, Zea mays
  Clone ID: LIB3150-021-Q1-N1-G2
cttattcgagcgtgcacgctatttcgcgggggaggcttttgggctgggctcgttaccactccagacgggggcaagatcaagatggggatcaacgcatggcgatggcatggccggctcgagacatgcttggcgagcgatagtcaggacaggacgtccgtatgcataaagtgttggctcgcggggcggtagtaaatgtcctacatttccaagttaggtccttgtgctctgttacatgatttcacatgcatgatatcttgtt

SEQ ID NO: 8462 - DNA, 271 bp, Zea mays
  Clone ID: LIB3150-021-Q1-N1-G3
atctccctctcattccagaggactccgcgtcgccaggcccgcttcgcgtgcgacgccggcatatagggtttcgccggcgccggcgatggacccaccccccgtgagccccgatcgctgggggcccagtcagggcgctggcgtcgggccctccggcctccgccgatatggcctcaatttctccgcctccagcctcctccaggcccccatcgcggccctccttgagtactccggcgtagtccagtccggccctgccctggcggcgcaccacccg

SEQ ID NO: 8463 - DNA, 380 bp, Zea mays
  Clone ID: LIB3150-021-Q1-N1-G6
tagagctgttacgacgtatgctgcccgcctacggcatgctaggatccagtagagacgaacgacgcgtgcgagcagcatcctattgacctcgtgccaccggcggcggctacgccgctgcagcatagccatcccgccggcgtccgttgacgtagacacgagtgcaccgccatggggcgtatgcacatccgcgggaagggtatctcttcattggcgctgacatacaagaggactgctctgatctggctcaagacagctaccatcgaagtgcaggagatgattaccaaggctgtgaataatgtccagatgccgtcgcagattgttgttatgctccgtgaccagcactgcataccgcttgtcatgagcgtgactggtagcaagat

SEQ ID NO: 8464 - DNA, 312 bp, Zea mays
  Clone ID: LIB3150-021-Q1-N1-G9
tcggctgtaacgtgaacaatgttgcggggagggatctgaagcgtgggtatgtggcctccaactccaaggatgaccctgccaaggaggctgctagcttcaccttccaggtcatcatcatgaaccaccctggccagattggcattggctatgccccagttctggactgccacacctcacacattgctgtcatgtttgctgagctcgctaccaacattgattggcgatccggctaggagctggagaaggagcccaaatttctcatgaacggtgatactgagatggttaagtatggtcccactaaacccatggtgg

SEQ ID NO: 8465 - DNA, 76 bp, Zea mays
  Clone ID: LIB3150-021-Q1-N1-H1
gtgactcattattaacaataaaacaagttgggtgttattatccaaaaaaaaaaaaataatcaaaaggctaaaaagt

SEQ ID NO: 8466 - DNA, 121 bp, Zea mays
  Clone ID: LIB3150-021-Q1-N1-H10
tcgttctcgcgaactccatctcgaatggcagagtgatttaggcatacgcgtttcctccgtatagcattctcgcagccttatgggcgatatcaagagcgctatctatgtttccgacccgatc

SEQ ID NO: 8467 - DNA, 344 bp, Zea mays
  Clone ID: LIB3150-021-Q1-N1-H11
cactcgcgaactccatttcgatccgaggggaaatcaacccatcctcgtttcctccgtctagcagcctctcaccctcatggccaagatcaagatcgggatcaatgggttcggcaggatcggaaggctggtggccagggtggccctgcagagcgacgacgtcgagctcgtcgccgtgaacgaccccttcatcagcaccgattacatgacctacatgttcaagtatgacactgtgcacggacagtggaagcaccatgaggtcaaggtgaaggacttcaagacccttctctttggtgagaaggaaagtgctgtgtttggctgcatgaaccctgaagagatcccatggg

SEQ ID NO: 8468 - DNA, 113 bp, Zea mays
  Clone ID: LIB3150-021-Q1-N1-H12
tcagactcgcgaactccatttcgatgggagggaaattcaacccgggcgagtttcctccgactagcatcctatcacccttatggccaagaacaagatccgtatcaatgggttcg

SEQ ID NO: 8469 - DNA, 287 bp, Zea mays
  Clone ID: LIB3150-021-Q1-N1-H2
aacacagcacaggcaggtcgcgagagagagagagagagagagagataaagatgtcgtggttcgggcaccaccaccacaaccagccggctcccccggcgtcgggccccaaccaggtgttcaagatcttctgccgcgccaacgagaactactgcctggccgtccgcgacggcgccgtcgtgctggccccggtcaaccccaaggacgaccaccagcactggtacaaggacatgcgctatagcacccggttcaaggacgaggaaggcatgccggcgttcgcgctcgtcaac

SEQ ID NO: 8470 - DNA, 211 bp, Zea mays
  Clone ID: LIB3150-021-Q1-N1-H3
ccttgactggtacaaaggcccaaccctgcttgaggctcttgaccagatcaccgagcccaagaggccttcagacaagcccctgcgtctgcccctccaggatgtgtacaagattggtggtattggaactgtaccggttggtcgtgtggagactggtgtcatcaagcctggtatggttgtcacctttggtccaactggcctgactaccgaggtg

SEQ ID NO: 8471 - DNA, 157 bp, Zea mays
  Clone ID: LIB3150-021-Q1-N1-H4
cacagactccggcacaaactctagcccgagcgcgactgatcttcaaatcaccattccgcccaccgatcgacattcacgccagtctcggtctcttccgaaggcgtcccgcgcggttgttttagaggcgaggcggaagattagggagtgcatcttcgtc

SEQ ID NO: 8472 - DNA, 297 bp, Zea mays
  Clone ID: LIB3150-021-Q1-N1-H6
cacaacagcagctcaaaaaacccaacacgccttagcaagcagaggaaagacccgggattcgatggcgcggaagcagagagcgagagatggacggtaggatgtacggacttgagaccataatgatggtggctctgcaacacctatgtggacgtgcctcatggtaacgcatgcagcgacggctaattggaagaccagtgcggagataaccgcacttactattgagacacgcgcgccatagtcggtgatatggacgacggctatgagcaaatgggcgcgttctcctgcgaagggtaaatg

SEQ ID NO: 8473 - DNA, 158 bp, Zea mays
  Clone ID: LIB3150-021-Q1-N1-H8
cacaaactccggcacaaactctagcccgagcgcgactgatgttcaaatcaccattccgcaccaccgatcgacattcacgccagtctcggtctcttccgaaggcgtcccgcgcggttgtttgagaggcgaggcggaagatgagggagtgcatctgcgtc

SEQ ID NO: 8474 - DNA, 346 bp, Zea mays
  Clone ID: LIB3150-021-Q1-N1-H9
cagttggggtgatcggcttgaaaagggggggttttccatttatgcaactaaaagaaaacttacttcgtcactaatcatagggcctggatcagggtacaatttggtatccaaccccttggctgaagatagttccacaggtacaaaagggaagacgaattacgagaccaaaaaacggttcagtgaacaacttcgtgacgaaggtgaatccttcaaggcagtttttgacaagacaaaacagcacattggaggttttgagaatggagatgaggaataatccttgactagaagctcttttaagtgcttgcccttaagcgttttggatgctcaagatgattcttcacactta

SEQ ID NO: 8475 - DNA, 310 bp, Zea mays
  Clone ID: LIB3150-022-Q1-N1-A1
gtgaccactaatcacaatgacgatgagcagtgcgtgtggtagtctcaagctggtggcttcttcactgtcgctcgtgatacctctggggagcaacttggcacgggtacaaagatgaccctctacctcaaggatgatcaggtggagtaccttgaggagcgccgcctcaaggatctgatcaagaagcactccgagttcatcagctacccaatctctctctggattgagaagaccactgagaatgagatctctgatgatgaagatgaggaggataagaaggatgacgatggtcaagttgaggatgttgatgatg

SEQ ID NO: 8476 - DNA, 398 bp, Zea mays
  unsure at all n locations
  Clone ID: LIB3150-022-Q1-N1-A10
gaggcgcagagacaggcgtcttcgtactcgcctatctccgcgactcaaagcttcttccatttcctaccgccgccgctgcagctccaccccattccgtcgacaccatgagggagtgcatctcgatccacatcggccaagccggtatccaggtcggaaacgcgtgctgggagctttactgcctcgagcatggcattcatgctgatggtcagatgcccggtgacaagaccattgggggtggtgatgatgctttcaacaccttcttcagtgagactggtgctgggaagcacgtccctcgtgctggttttgttgaccttgaaccaactgtcatcgatgaggtgaggactggcacctaccgccagctcttncaccctgagcangctatcagtgggcaggaggat

SEQ ID NO: 8477 - DNA, 297 bp, Zea mays
  Clone ID: LIB3150-022-Q1-N1-A11
caagctctcacacaactacccgcggggcttccttgctgacaagggcagcgactgttacaatgcttaaccgccacaacagatccgcttcgcctttgtgggtcgcgaatttggcgggctgcttgatagacattcgcctatcttgccagatacgctcataatcgtcatggaacctatagtcactgtaacgtagtattgaaacgaaaggattttagctctaagaccagaccatccaggacagtgttaatacttatacgatgttcgtacgaactacatgaaatacatagcacattacttgag

SEQ ID NO: 8478 - DNA, 160 bp, Zea mays
  Clone ID: LIB3150-022-Q1-N1-A12
agctcctattaacattgactgtcgggggccctacgggccggtgacaataggctgaccccaatccgcctgattgggctcgcaccttcggtcatggatgcctgagctaggccgatctcctaggggatcatgttcctatcgacgcttaaggaggcgaagccgc

SEQ ID NO: 8479 - DNA, 380 bp, Zea mays
  Clone ID: LIB3150-022-Q1-N1-A2
ggaaaccctactcgtccccttccgcaggcgtcgccgcccaattcccccacccaattcccactctccgctcgacagatccatacatgatgggagaggccaaggagaacgacgtttatgaagaggagctcctggactacgacgaggacgacgacaagacagtcgatagctccgctgctaatcccaccagaaagggcgcaaagaacggcttcgtcgggatccacaagtccaggttcaaaaacctgctgtctaagccagagctgctccgtgctatccatgattgtgagtttgagcatccttccgaagtgcaacacgagtgtatccctcaagccattcttggaatggatgtcatctgtcaagctaaatctgggatggggaaaact

SEQ ID NO: 8480 - DNA, 246 bp, Zea mays
  Clone ID: LIB3150-022-Q1-N1-A3
tcttctcaaactctgccgatcgtgatagtgcgggggacatctttgagaagcttgtctatatcgctctcgactttcagcatgaatcggtgactgtaaagatcagctgctcacgtgagaacagctatgacctacgctatggccaggtcatcaccataagagcagatagattcaggtgcgcagaagtgctttttcaaccatgcatgcttgatctggaggatgatgacatccatgatacaacatacaatt

SEQ ID NO: 8481 - DNA, 175 bp, Zea mays
  Clone ID: LIB3150-022-Q1-N1-A4
tcgaaacgaggcatgtattgattcttcagatcatacatcaagctgtacaagcccatttacctaattcataaaagatgccacttgccgtattgaaaggcattagggtcaacgcgccggaaggtaaattgaccttaccatgtcccaagaatgcacaagcctaggaaggattgaccct

SEQ ID NO: 8482 - DNA, 382 bp, Zea mays
  Clone ID: LIB3150-022-Q1-N1-A5
ccgtcatcgatctcgtttcaaatccatccatcctcgtttcctccgtcccgcagcatctcaaccccatggccaagatcaagatcgggatcaatgggttcggcaggatcggaaggctggtggccagggtggccctgcagagtgacgatgtcgagctcgtcgccgtgaacgaccccttcatcagcaccgactacatgacctacatgttcaagtacgacactgtgcacggacagtggaagcaccatgaagtcaaggtgaaggactccaaaacccttctctttggtgagaaggaggttgctgtgtttggctgcaggaaccctgaggagatcccgtggggttcggttggtgctgaatatgttgttgagtctactggtgttttcactga

SEQ ID NO: 8483 - DNA, 369 bp, Zea mays
  Clone ID: LIB3150-022-Q1-N1-A7
gtgagaccctcctttccagcgaaaatgccgaacctcgagtgccggatgtatgagcagcggttcccggaggtggacgccgcggtgatgatccaggtgaagcacatcgctgacatgggcgcgtacgtctcgttgctcgagtacaacaacatcgagggcatgatcctcttctccgagctctcccgccgtcgtatccgctccatctcctccctcatcaaggttggccgccaggagcccgccatcgtgctccgtgtcgaccgcgacaagggctacatcgacctttcgaagcgtcgcgtctccgaggaggaggcgcacgcatgcgaggacaggtacaacaagtccaagctcgtgcactccatcatgcgccacgtc

SEQ ID NO: 8484 - DNA, 338 bp, Zea mays; identical to SEQ ID NO: 1101
  Clone ID: LIB3150-022-Q1-N1-A8

SEQ ID NO: 8485 - DNA, 396 bp, Zea mays
  Clone ID: LIB3150-022-Q1-N1-A9
ctgagagatccgtcccaacaatacggaccaagcccaataaaccagggtttttgtaaggaaaatccccgtcgttctcgcgtctggagctcggcggcggagcagggcggcagggggagggcgatggaattctgcccggtgtgtgggattctgctgcagatcgatccgggcaccggaagccaccgcctgcgcctcttctgccccgtctgcccctacgtctgccccatcctgaacaagatcgtgaagaaggcgaggttggtcaaaaaggaggtggagcccatctccagcacggcggatgagatgaaatcggcccctaagaccgcagttacatgccaaagatgcaaccatggagaagcatacttcaagcagatgcagattcgatcagctgatgaaccgatg

SEQ ID NO: 8486 - DNA, 383 bp, Zea mays
  Clone ID: LIB3150-022-Q1-N1-B1
atcgcgacggccgcccttttttttttgtttggttttttttttttggatttcgaacgatgcctgcatctcttcactgaagtaaacagatacggtatgcatcttattctgacagtcgttggaatacacatgcagcctcaacacccgttattggagacgcaggccggggagttcacgacatgaaagaaacaagtcctgtaattgcacaacacaacccagcgcgagatggtctgctctataaacaaccagccgagctcttcatggtgccatcatcatcacgactgcaaggctacagtggaagagagtagccgcggaggtacttggagtccaccttcgattcgcggaccagtgctactcgtccagttctggcgacctcacagatgcca

SEQ ID NO: 8487 - DNA, 378 bp, Zea mays
  Clone ID: LIB3150-022-Q1-N1-B10
ccggagccgagagaccagccagccatggcgctgcgtgccctgtacaacgagatccggagcatgaaggtccgcgacgtgccggcttacctgaagccgcgcttgacctgggacaacgtctagaagagcgccgaccaggccgtcgaccgctacatcgagaagtacatcgacacgagctcgccggaccctctctaccacgtctgcatcggagggatgatcttctcctacttcgtcaatctgccctgggagcgcgcccacctcgcccaccttgaggagatggagaggaccggtgggaagcactagatccgcttgcccgtccctcgccagcagcgcgggaagacgggtgactctcatggggtccattcaggctgatggcttctg

SEQ ID NO: 8488 - DNA, 418 bp, Zea mays
  unsure at all n locations
  Clone ID: LIB3150-022-Q1-N1-B2
cgagcggaaaagcgtcccccaacccagcacacgctgacgacacaccggcgaggcagacaggcagatcagccgcacctccccagtcccccttccccacctacgacgaccgccgcggacgaatcaaaaaagcttcctcctcccggcgtcgcctccgcgcgtggaggcgacgatccattccgccccccgtaggattttgctcctcccgatccggacgtcagatctcgagtggcggcacgcggatctgggggtttctctagaggcggcggcggcggccggaacaggggcagatggcgctctcggagatgcgggggctctcggtcttcatcagcgacatacgcaactgccacaacaaggagcatgagcgcctncgcgtcgacaaggagctcggcaacatccgcacgcggttcaaaaacgagaa

SEQ ID NO: 8489 - DNA, 390 bp, Zea mays
  Clone ID: LIB3150-022-Q1-N1-B3
cgccaccgccctcctacgttcccgcgtcttgttcccctcgtcgtcgtcgggttggtgggtccacctctcgccgcgccccgccgtcgacccgcctcagaatcaaagataagtcaaatggaaaggtcggtatgcgccggtggttttgctgcacgaggtttaatgcttcataccgtgaacatgaaaatgaacgtgccatcactccagaggagaaagaaggaaatggcttttctgttgaaagtgatcccatcaaggcaccaccttccattgaagtccctgaattatcatttgaagaattgaatgataagaccgacaattttggttcaatggctctgattggtgaggggtcatatggaagagtatattatgctattctggacagcggaaaacatg

SEQ ID NO: 8490 - DNA, 425 bp, Zea mays
  Clone ID: LIB3150-022-Q1-N1-B4
ctggaaacaagcttgccatgcaggagttcatgatcctcccaactggtgcctcctcgttcaaggaggccatgaagatgggagttgaggtgtaccacaacctgaagagcataatcaagaagaagtacggtcaggatgcgacaaatgttggggatgaaggtggttttgcacctaacattcaggaaaacaaagaaagccttgaactattgaaggcagccatagaaaaggctggctacactggaaaggtggtcattggaatggatgttgctgcttctgagttcttcggtgagaaagacaagacttatgatcttaatttcaaggaggagaacaacgatggctcaaacaaaatttcatgcgacagcctgaaagacctgtacaagtcctttgtttctgagtaccctatcgagtcgatcgaagatccatttgat

SEQ ID NO: 8491 - DNA, 374 bp, Zea mays
  Clone ID: LIB3150-022-Q1-N1-B5
gcggcggcgcgggcggacaaggagcaggcggaggaggagctgtgccaagccacaatgggtatctcgcgtgactcgatgcacaagcgccgggccaccggtggaaagcagaaggcctggaggaagaagcgaaagtatgagcttggtcgccagccagccaacaccaagttgtcaagcaataagacagtgaggagggtccgtgttcgtggaggtaatgtgaaatggagggctcttcgccttgatactggtaactactcatggggaagtgaagctgttacccgcaagacccgtatcctcgacgtggtctacaatgcatcaaacaatgagcttgtgaggacacaaacccttgtgaagagtgccattgtgcaagttgatgc

SEQ ID NO: 8492 - DNA, 396 bp, Zea mays
  Clone ID: LIB3150-022-Q1-N1-B6
ccgaactgagcagttcgaccaggcaggcatccacctccaaccccccttcgcctgcgcaaatcgttaccatcccagcgagaaagatggcgcgcgtctccaatgccaagaagcggcagggcgccaagcccgcctccgcgctcagcagcaccgacaccagcaccgccgcaaagaggaaggccgaggacgaccgccccgtgcgcgtctacgccgacggcatcttcgatctcttccacttcggccacgcccgcgccctcgagcaggccaagatgctgttccccaacacctatcttctcgtcggatgctgcaacgacgagctaacctaccgctacaagggcaagaccgtcatgacccatgaagagcgatacgaatccctgcggcactgcaagtgggttgatg

SEQ ID NO: 8493 - DNA, 421 bp, Zea mays
  Clone ID: LIB3150-022-Q1-N1-B7
gtactcgcctatctccgcgacccaaagcgttcccccttctcccattcttctctcatttctcaccaccgccgccgctaccccctttcgacaacaccatgagggagtgcatctcgatccacatcggccaggccggtatccaggtcggaaacgcgtgctgggagctgtactgcctcgagcatggcattcaggctgatggtcagatgcccggtgacaagaccattgggggaggtgatgatgctttcaacaccttcttcagtgagactggcgctgggaagcacgtcccccgtgctgtttttgttgaccttgagcccactgtcatcgatgaggtgaggactggcacctatcgccagctcttccatcctgagcagctcatcagtggcaaggaggatgcagccaacaacttcgctcgtggtcactacac

SEQ ID NO: 8494 - DNA, 405 bp, Zea mays
  Clone ID: LIB3150-022-Q1-N1-B8
cctggacagcaatgtacaggaagcagcacaagaaggatatccatgctgaggctgtcaagaagaggcgccgcgccaccaagaagccatactcgagagtccattgtgggtgcttccctagaggtgatccagaagaagagggctgagaagcccgaggtccgcgatgctgctagagaagctgctcttcgtgagatcaaggagcgcatcaagaagaccaaggatgagaagaaggcgaaaaaggctgaggtgaccaagtcccacaaggcacagacgaagggagcggtccagaagggttccaagggccccaagttaggcagaggcggtggcaagcgctgaaagaacctaagtgtagttccttgaccttgcaattgctcctgcatagcccaccttgatgcaccaacgccactt

SEQ ID NO: 8495 - DNA, 208 bp, Zea mays
  Clone ID: LIB3150-022-Q1-N1-B9
ctttcccccgtcctccctcgccttcggcttcgccttcgccggcaggagatttccaccaccaccgccggaccgccccgaccctcctcccctttcgcgctatggcccaaactgttgtgctcaaggttggcatgtcctgtgagggctgtgttggagctgtcaagcgggtcctgggcaaaatggaaggcgttgagtcctaccacgtacactt

SEQ ID NO: 8496 - DNA, 349 bp, Zea mays
  Clone ID: LIB3150-022-Q1-N1-C10
cgtgaggttctccggggttcggtttggggggtgagcggatcgagatggcggcgtcggatgttgagtaccgctgcttcgtcggcggcctcgcctgggccacggacgaccactccctccacaacgccttcagcacctacggcgaggtcctcgagtccaagatcatcctcgatcgggagacgcagaggtcccgcggcttcggcttcgtcaccttctccacggaggaggcgatgcggaacgccatcgagggcatgaacggcaaggagctggacggccgcaacatcaccgtcaacgaggcccattcccgcggcggccgttgaagcggcggctgcggctggtacagtggtggccg

SEQ ID NO: 8497 - DNA, 334 bp, Zea mays
  Clone ID: LIB3150-022-Q1-N1-C11
gtcgcgccgccgccgccgccgaaacagcacatcgctctctcgatctcagccatggcggaggtggagcagccccaggacgcggtgaagctcttcaaccgctggaccttcgacgatgtccaggtgaacgatatctcgctgaacgactacctggctgtgactgcggcgaagcacgcgacattcctgccgcactccgcggggcgctactccaagaagcggttccgcaaggcgcagtgcgccatcgtcgagcgcctcaccaactcgctcatgatgcacgggcgcaacaacggcaagaaggtcatggccgtccgcatcatgaagcacaccctggagatca

SEQ ID NO: 8498 - DNA, 177 bp, Zea mays
  Clone ID: LIB3150-022-Q1-N1-C12
gctccttggtgatgtccaagtatacccagagaaggggacaggtgccttttctgctggtctgcatggatgggcctttacactcactaactttgcgaaaatgtatgcatctaagtttggaggtgatgaatctaaaatgatggagaagctttggggtgagaatttctttgacccttgcac

SEQ ID NO: 8499 - DNA, 410 bp, Zea mays
  unsure at all n locations
  Clone ID: LIB3150-022-Q1-N1-C2
gtcggcgttcctgtcctaggtgttgtggagaacatgagtggcctgaggcagccactttcagatctcagtttcgtcaagcctggtgaggcgggcgagacagacgcgacagagtgggccctgaactacatcaaggagaaagcccctgagcttctgtcagtcatcgcctgcagcgaggtatttgatagcagcaagggaagcgccgagaagatgtgccgtgaaatgggggttcctttccttggcaaggtgcccatggatccgcatctgtgcaaggcggccgaggaagggaggtcatgcttcagtgatcagaaatgcngtgccagtgcgccggctcttcagagcattgtaanagaagctgatcaagactgggtgagaaaataatgttggcctgctgggaatctggtagtgagaat

SEQ ID NO: 8500 - DNA, 330 bp, Zea mays
  unsure at all n locations
  Clone ID: LIB3150-022-Q1-N1-C3
ctacgctaccgattttctcttgtgtcaggcataaaaaaaggttggacgggctgctagtattccctgctgtttggtgttttcgtatcggaggacgtctgtagatgtacaattcctcaagccccttgtgttcggcttgaggaagtttccgttgtaccctggacctgctatagccggttgattcttcaattgtattcctaaaagttactacacanaaaaaaaaaaaaaataaatttccttaaaaaaaaacaaaaaaaaaaaaaaaatgacaaaagaaaacaaagaaagaaagaaaaagcatcaatgatcataaatccaagggcggggcccccg

SEQ ID NO: 8501 - DNA, 419 bp, Zea mays
  Clone ID: LIB3150-022-Q1-N1-C6
cgctgcggaagcagagcgcgaggaaggagacggatttgctcggctgggatcccccgccaggggtccacatggcggcgtcgccttgagccgggcctctcctacccgcgacgtcctgcgatgccgccgcggggagcggcgctcctcctcctcctcgtcgtgctctgcgtgcaactgggaacatcaagctcaacaagtcttgcatcatacttattcggattctggagtagaacccaccagcatcgctttcctgcactagcccctggcccagccccttctcctcaacctgaaagcgccattattgctcacccagtgcataggcatcacagaagaagacaccatgcttccgcaccaccttcatcattttcgccagaaagacaagattgcagcagaacaacttgttctgctccacttacgtcgac

SEQ ID NO: 8502 - DNA, 361 bp, Zea mays
  Clone ID: LIB3150-022-Q1-N1-C7
gaactcacctgatcgcgcctgcagtcgtgcaaagcaggcttttgacgaggccatctcggaactggacaccctgagcgaggagtcctacaaggacagcactttgatcatgcagctccttcgtgataacttgaccctatggacttctgacatctcggaggaccctgctgaagagattagggaggcacccaagcgcgactcgagtgaggggcagtaaagccggctttatgtgcctagaaactagtagctagtgtttgctgctgtcgaatgacactatgcaatgtgatctggaacctggtttcttgggtgcgacgcttgttatgactgtcgtcagtaaaatttgggggctccccgtatgagatgc

SEQ ID NO: 8503 - DNA, 366 bp, Zea mays
  Clone ID: LIB3150-022-Q1-N1-C8
ctcctgagcactttctcctcgtcccagacaagccaatcgaagccgagatacgaccatggactccaccggcaccggagcagggggtaaggggaagaagggagcggccgggcgcaaggtcggcgggccaaggaagaagtcggtgtcgaggtccgtgaaggccggtctccagttccccgtcggccgcatcgggcgctacttgaagaagggccgctacgcgcagcgtgtcggcaccggcgcccccgtctacctcgccgctgtcctcgaatacctcgccgctgaggttctggagctcgccggtaatgctgccagggacaacaagaagactcgcattattccgcgccacgtgctttctgcgatccggaacga

SEQ ID NO: 8504 - DNA, 104 bp, Zea mays
  Clone ID: LIB3150-022-Q1-N1-C9
gtggtaacgccatcgagggcatgcacggcgaggcggtgcaccgtcgtaacattactgtcatagaagcctactcctgcggcggtcgtggagacgggcgaggacgc

SEQ ID NO: 8505 - DNA, 348 bp, Zea mays
  Clone ID: LIB3150-022-Q1-N1-D1
gtttcctccgtcccgcagcatctcaaccccatggccaagatcaagatcgggatcaatgggttcggcaggatcggaaggctggtggccagggtggccctgcagagtgacgatgtcgagctcgtcgccgtgaacgaccccttcatcagcaccgactacatgacctacatgttcaagtacgacactgtgcacggacagtggaagcaccatgaagtcaaggtgaaggactccaaaacccttctctttggtgagaaagaggttgctgtgtttggctgcaggaaccctgaggagatcccgtgggggttcaggtggtgctgaatatgttagtgagtctactggtgttttcactga

SEQ ID NO: 8506 - DNA, 215 bp, Zea mays
  Clone ID: LIB3150-022-Q1-N1-D10
cgctccttggtggtgtccaactttacggcgacaaggggacagctgcctttttttcttgtctacatggatgggcctttacactcactaactttgcgaagaggtattcatctaaattcggagtgggtggatctcagatgatgggaaggctatggggcgagaatttctttgaccctgccacaaagaaatggaccacccacaacacaaggactcctacc

SEQ ID NO: 8507 - DNA, 379 bp, Zea mays
  Clone ID: LIB3150-022-Q1-N1-D11
ccgccgcctccctccctttccgctccgtcaagaccctcctcctcaccccactcacccagctcccctcgagcccagaagcaccgcgcgcaccatgcggccaccgagagggcgcggcggcggcggccggttcggcggaagtggaggccgaagcggcggcggtggccggttcggcggcggaggccgtggtggccggttcggcggcgggttccgcgacgagggcccgcccgcagaggtcgtctaggtgtcgacgttcctgcacgcgtgcgatggagacgcggtgacgaagctcaccaacgagaaggtgccctacttcaacgcgcccatatacctgcagaacaagactcaggtcggcaaggtcgacgagatcttcggccccatc

SEQ ID NO: 8508 - DNA, 401 bp, Zea mays
  Clone ID: LIB3150-022-Q1-N1-D12
ccgcccccctctccctcagtaaacccctctcttcttcccgcggtctgctcgttcgatctgtgcagcagatctgaggtctcgagcgaccgtgaagcagcttcaatcgtcggcatggcgctcgtattgcatagtggggctggaaacaagaatgccttcaaagcacttattgctgcagaatacagtgggatcaaggttgagttgaccaaggattttgagatgggtgtctccaacaagacccctgagtttcttaagatgaacccccttgggaaggttcctgttctggagactcctgatggccctgtttttgagagtaatgctatcgcacgctatgttgctcgctagaaggatgacaaccctctttttgggtcttcccatatagaacaagcccacgttgagcaatg

SEQ ID NO: 8509 - DNA, 401 bp, Zea mays
  Clone ID: LIB3150-022-Q1-N1-D2
gcattcttccttctcccaacgacggaagaaacttcctgcctggatatccatccatccaaccgctcctccctcgtccggcaggcgacgactcgattccttcctcccttcctcctcctcgtctctttcatcggcgactccgatcttctctgccgtcgccgccgccgccaagagatcgacccgaccccgagcgcccgacccgaccccccaatccaaccaccaaccgccggcgcgcgcggaagattcagatttggcccctcgccggtaagggagaaagcgaggatgggtgcgtggatgtcgcgcgtgtggttcctcatgttcccagcgcgggagtacaagctcgtcgttgtggggctcgacaacgcggggaagaccaccacgctctacaagctccacctcggcga

SEQ ID NO: 8510 - DNA, 422 bp, Zea mays
  unsure at all n locations
  Clone ID: LIB3150-022-Q1-N1-D4
accgtttcttcctcgtctccgtctctacacggcggcgccgccgccgccagctgctgccaggagccaagcccaagcctgagcttaaaccatgccgattggttctcttttcgtgtcgaggctggccaggtctagccatgccctccccgctgccgccgccgcggccatctctcaagcgcccaggccccagcacatcgcatctcctatattctccggccttggagcagcggctcgtgatttcagctcaagggctctatggaagggagcattcgtcgatgccttcctggctagaataaagaagaacagagaaaacatgaatgggaagaagatttggtctcgtaagtcttctattttgccgggaatttagtggttccactgtgctcatttacaatgggaaaaagcatgtncggtgcaagatcactgaa

SEQ ID NO: 8511 - DNA, 279 bp, Zea mays
  Clone ID: LIB3150-022-Q1-N1-D5
ctcactcctcaccatttcccaaacccgacccatacccccgccgccgccgccgccatgccgcccaagctcgacccgtcgcaggtggtggaggtcttcgtccgggtgacgggcggcgaggtcggcgcggcgtcgtccctggcgcccaagatcggcccgctcgggctctccccgaagaagatcggcgaggacatcgccaaggagacggccaaagactggaagggcctgcgcgtcaccgtcaagctcaccgtccagaaccgccaggccaaggtctgcgtcgtc

SEQ ID NO: 8512 - DNA, 364 bp, Zea mays
  Clone ID: LIB3150-022-Q1-N1-D7
gtaacaaagtttgagctgttgtggctgcacccaatccacatatagcactacaaaatggtcactgggaaagtagcagtcgtcctcctagcctgctggacgctagttctctaccaaccagtgcttggccgtttaccgtgtaacaatgatcagaagagagagatcctgcgcgagtgtgatccactgaactcaacacctgactatactccatcccggcacggtgcgtgctgcgtggcggtgagaaaggtgccaggaaccaacatgctttgcattgcctccatactctcacttgctgacaaggccaaatacagtgtaaggaagattctaggctttagagatgcatgcgctcctttacatccacaccatc

SEQ ID NO: 8513 - DNA, 367 bp, Zea mays
  Clone ID: LIB3150-022-Q1-N1-D8
gccgcatctaccattccacccgggatgggccctcagcagagcttccccttcctcactgtggtggcttggtggggggatccgcgcctcccccatcgctggccagctcatggcgcccccgccgccggaggatctccaatgcgccgtgaacgtcaagtgcgccgcgccgccggcgctggccgcgggggacggcgagctccggtggctgctgcggtgcgtggaggcggcagcgaaaggcttcgccatctgcgcatgcctcaagggcggcctcgcgctcttctccgtcctcgtacgcatccgcagccgtcgctcccccagatcgaagaaggccggagctatgaccaacgatgaggccgtggtgctcgcggtc

SEQ ID NO: 8514 - DNA, 349 bp, Zea mays
  Clone ID: LIB3150-022-Q1-N1-D9
caccgctgttaggttctaccaggagagcttcggcgtccctccggccacgcgagctcgccgaaatggtcgcccacaggttccatcagtaccaggtggtgggtcgcgcgctgccgaccccaaccgatgagcaccccaagatctaccgcatgaagctctgggccaccaacgaggttcgcgccaagtccaagttctggtacttcctgagaaagctcaagaaggtgaagaagagcaatggccagatgctcgccatcaacgagatctttgagcgcaacccgaccaccataaagaactatggcttgtggctgctctcccagagcaggactggttaccacaacatgtacaaggagtt

SEQ ID NO: 8515 - DNA, 388 bp, Zea mays
  unsure at all n locations
  Clone ID: LIB3150-022-Q1-N1-E1
gtggatgtgaatgagttccagaccaacgttggtgccctacccgaggatccacttcatgctttcctcctatgctccagtcatctctgctgagaaggcctaccacgagcagctgtctgtggccgagatcaccaacagcgccttcgagccatcctccatgatggccaagtgcgatccccgccatggtaagtacatggcctgctgcctcatgtaccgtggtgatgtggtccccaaggatgtgaatgctgctgtggccaccatcaagaccaagcgcaccatccagtttgtggactggtgcccaactggctttaagtgcggcattaactaccagcctncaagtgtggtgcctggtggtgaccttgccaaggtgcagcgcgctgtgtgcatgatc

SEQ ID NO: 8516 - DNA, 359 bp, Zea mays
  unsure at all n locations
  Clone ID: LIB3150-022-Q1-N1-E12
gtcgggcagggcagctcctccgcgggcgaccaaaacgagatcgccaatcttttcccgaaccggtcacaccagtcctcggcgtgcctgtttccggcgctcgagcccgtggcgaccactccactaacaataggctttgttctctgcactcaacacgtcccgtgcggtcacaatggcatttgatgcatattctactatctacaggtgcgtgcgtaaggcagcaccttgtctggattctaaggacgcccagctataatcatgtagtgcaagtatgtacaactcactatagaacatgtgtgtgcctacagatatcatggtagatccgaactgatccgcantgaaaggaacatgattgtaacacc

SEQ ID NO: 8517 - DNA, 408 bp, Zea mays
  Clone ID: LIB3150-022-Q1-N1-E2
gccagtgagaatcctcgtgaagagagatgagctgactcttgagggtatcaagcagttctatgtgaatgtggataaggaagactggaagctggacacactgtgtgacctgtacgagacccttgccatcacccagagtgtcatctttgtcaacacccgccgcaaggtggactggctcactgacaagatgaggagcagggaccacactgtttctgccactcatggtgacatggaccagaacactagagacatcatcatgagggagttccggtctggctcctcccgtgtgctcatcaccaccgacctgcttgctcgtggtattgatgttcagcaggtgtccctggtcatcaactatgatctccccacccagccagagaattacctgcatcgcataggtcgtagtgggtcgtt

SEQ ID NO: 8518 - DNA, 404 bp, Zea mays
  Clone ID: LIB3150-022-Q1-N1-E3
gctcgcctcagtgccagtcgttgcggcagcagtgttgccagcagctcaggcaggtggagccgcaccaccggtcccaggcgatcttcggcttggtcctccagtccatcctgcagcagcagccgcaaagcggccagttcgcggggctgttgccggcccaaatagcgcaccacctgacggcgatgtgcggcctgcatcagccgactccatgcccctacgctgttgccggcggtgtcccccactgaagaaactatgtgctgtagtatagccgctggctagctagctagttgagtcatttagcggcgatgatagagtaatattgtgtcacgcatcaccatgggtggcagtctcagtgtgagcaatgccctgaatgaacaattgatatgaaaagaaaaaagtttggctcc

SEQ ID NO: 8519 - DNA, 404 bp, Zea mays
  Clone ID: LIB3150-022-Q1-N1-E4
gctaacgggaagatcgccaaggacgctaaggagaccgtgcaggagtgcgtctcggagttcatctccttcatcactagcgaggcgagtgacaagtgccagagggagaagcggaagaccatcaatggcgacgacctgctgtgggccatggccacgctggggtttgaggactatattgaacccctcaaggtgtacctgcagaagtacagagagatggagggtgatagtaagttaacttcaaaatccagcgatggctccattaaaaaggatgcccttggtcatgtgggagcaagtagctcagctgtacaagggatgggtcaacaaggaacatacaaccaaggaatgggttatatgcaacctcagtaccataacggagatatctcgaactaatgaagacatggaccttt

SEQ ID NO: 8520 - DNA, 258 bp, Zea mays
  unsure at all n locations
  Clone ID: LIB3150-022-Q1-N1-E5
cgctgtccgctgcccaccgcgtgcgcggcgctcccgtgcggcactgccggcggcgcgaccccgcgcccattggacgagcttccgccccgccccgatcgatcccgccgccatgtcgtcagcggccgtgtcgtcctcttnctccaccttcttactcgcgctcgccttcgcctcccccggggggccgcaaggcgggctagggtcggctcctcgccgttccacaccggcgccagcctgagtttcgcgttctgggcgccaccg

SEQ ID NO: 8521 - DNA, 407 bp, Zea mays
  Clone ID: LIB3150-022-Q1-N1-E6
ggcctttccaatgaccactgccgggaggttctttttcaggtgctccgaggactcaaatatctccattcagcagaaatactccacagagacctaaaacctggaaacctgctggtgaatgcaaatagtgatctgaagatatgtgattttggtctcgcacgtacaaacagtttcaaatgccagttcatgactgaatacgtcaccacccgctggtacagagctcctgagctgctcctctgctgcgacatctacagcacatacatagacgtctggtctgttgggtgcatctttgctgagctccttggccgtaagccaatatttccaggaactgaatgcctgaatcaactcaagctcatagtgaacgtgctcgagaccatgagtgaggctgacctagagttcatcgacaaccc

SEQ ID NO: 8522 - DNA, 420 bp, Zea mays
  Clone ID: LIB3150-022-Q1-N1-E7
ctccgctcgccccgcggttcccgcttgctacagccctccggtcgactcgggtcggcctcttcccagttcccacttcgccgccgctcccccgtttccttcaccccttctcctgcagtcctgcgcaccttcctcccagagtcccagtcaaaccctgctcggaagcaaacggactttggatcctcggctttaacactcgcgtaccctgctggaggttgttttgtatcatggagagtacagacaagaatgacaaaaaaattgctgtcacagaagagtcttctaatcctggacaaaattgtgaagatgacggggatttttcaatgaaaactgaaatgttaaatgtagaagaagcaccaagtttctcgaatgacaaattaaacaacgaatcagaagtgcagattcaagagggaggtaatgattcag

SEQ ID NO: 8523 - DNA, 374 bp, Zea mays
  Clone ID: LIB3150-022-Q1-N1-E8
gaagattccaaggaccgagcagaagagtctgagccatggatttctctcatctaccaaccagcaggaagcaatactgcaactaagtaccatgataagatgatagcaaatgagggtgtgcctattgatttcacaatgagctcctcttgttatttgacgtccttgtgtcctggggcctctactagcagaaagcgtatcaacaaattccaagcaataagggagatgcttttgctaccactggaagaacgcctcaaaaaatggtttactgaggtttcaggagtaaatcgatttgatgctctgaaggaccttgctccaacctgttcagaggttgaaattttgaaaatgcttccagagtgtgcatatttggtgcgtggatt

SEQ ID NO: 8524 - DNA, 409 bp, Zea mays
  unsure at all n locations
  Clone ID: LIB3150-022-Q1-N1-F1
cccaaatcctctccggccaccggcatcgctcctctcccgcccgccgacgccgaccgctcctatccacgccaccgcgtcggtgctcgagttgcctcagagagggagagagagagagagagagggagggagggagggagggagggaacggcgctcacgctgttccgattcgaacgagctcgcccggcgattttttttttcctggaacgggctggctccgaatctcggcgaagtgtggggagcggctccaccctccaaccaagcaccgcaggatcaaccagaaagcgggcgcgcgggcggcaggcggcggtgctgagaacacgggtggcactgtctggacggacgctgcggatctcggcgattcttcgcgggctgcgtcaagggcggatcggcagcnatgatcggcggcggc

SEQ ID NO: 8525 - DNA, 385 bp, Zea mays
  Clone ID: LIB3150-022-Q1-N1-F10
gtccctactgtcggaatcatacaatgacatgtccgttacggtgcagctctagctgtcgggatctcctgcgccggaacaggattaagtgaagccatctccttactggagcctctgacatcagacgtcgtcgactttgtacggcagggcgcgctcatcgccatggcaatggtgatgatccagaccaacgagtcctacgatccacgcgttggagcattcaagcgccagttggaaaagataatcctcgacaagcacgaggatgccatgagcaagatgggcgccatactggcttcaagcatcctcgacgccggtggcaggaatgtcaccatcaagctcaagtcgaggtcaaagcacgacaggctcaccgctgttgtcgggctagccgtct

SEQ ID NO: 8526 - DNA, 402 bp, Zea mays
  Clone ID: LIB3150-022-Q1-N1-F11
cccacgcgtccgcccacgcgtccggctgtatgcacttgtttttgcagcacggtacctggacctgtttgttcattttgtgtctctgtataacactgtcatgaagctggtcttcttggcaagttctttctcgatagtttggtacatgaagcggcataagattgtgcggaggacatatgacaaggatcatgacacctttcgccattacgttttagtgttgccttgtcttcttctggctctcctcattaatgagaagtttacttttaaagaggtgatgtgggcattctccatttatttggaagctgtcgcgatatttccacaacttgtgttgctacagcggacaaggaatattgacaacctgactggccaatatgtcttcttcttgagtgcctaccgtgtgcttta

SEQ ID NO: 8527 - DNA, 380 bp, Zea mays
  Clone ID: LIB3150-022-Q1-N1-F12
cccacgcgtccgcccacgcgtccgggggtatgcagttgtttttgcagcacggtacctggacctgtttgttcattttgtgtctctgtataacactgtcatgaagctggtcttcttggcaagttctttctcgatcgtttggtacatgaagcggcataagattgtgcggaggacatatgacaaggatcatgacacctttcgccattacgctttaatgttgcctcgtcatgtgttggctctcctcattaatgagaagtttacttttagagaggtgatgtgggcattctccatttatttggaagctgtcgcgatattttcacaacttgtgttgctacagcggacaaggaatattgacaacctgactgggcaatatgtcttttttt

SEQ ID NO: 8528 - DNA, 383 bp, Zea mays
  Clone ID: LIB3150-022-Q1-N1-F2
gccgccgccgaggacgacggcgatgatgtggcgttcgcgagctcgtgcgctgctcctactccgctcgaccattacccggccaccgccaccacctccacaaccatatcccactcgaaccctaacccgagtcccacctccccgcttcctgtcctcctccccggatcctatccccgatgcctcctcttccgccgccgcggatcccttccctgaagccttctcctccccgaccaaggcttctcaagatgccgctgaggccggagaggacaacctgagctcgatgtgggaggaagctggcgacgccgacgacatctttgcctcccccggcagcgccgacgccgtagccgacgatgaggaggtcgcccgcgtctgcgccgccgtggagt

SEQ ID NO: 8529 - DNA, 338 bp, Zea mays
  Clone ID: LIB3150-022-Q1-N1-F3
tcgctcttccaccttccaccacaagcgccggcggagccggtgcctgctccttcccgatccccgaggcaaagctgcgactccgcaaccgccgccatggcgttcgagaagatcaagggctccaacccaatcgtcgagatggacggtgatgagatgaccagggtattctggcagtctatcaaggacaagcttatcctcccatttctggacctggacatcaagtactatgatttggggatactgcaccgtgaagcaactgatgacaaggtcacagtggaggctgcagaggctactctcaagtacaacgtggctattaagtgtgcgaccattactccagatga

SEQ ID NO: 8530 - DNA, 388 bp, Zea mays
  Clone ID: LIB3150-022-Q1-N1-F4
cagaccattagctttatctactccagagcgcagaagaacccgatcgacaccatgagggtgttgctcgttgccctcgctctcctggctctcgctgcgagcgccacctccacgcatacaagcggcggctgcggctgccagccaccgccgccggttcatctaccgccgccggtgcatctgccacctccggttcacctgccacctccggtgcatctcccaccgccggtccacctgccgccgccggtccacctgccaccgccggtccatgtgccgccgccggttcatctgccgccgccaccatgccactaccctactcaaccgccccggcctcagcctcatccccagccacacccatgcccgtgccaacagccgcatccaagcccgtgccagc

SEQ ID NO: 8531 - DNA, 367 bp, Zea mays
  Clone ID: LIB3150-022-Q1-N1-F6
tcgatacctttcacccttcctctcaggaagccgaaccctagccaccgtgctcactttccagctctgaacccttcgcgggcgagtccacggcagtgcatgacctgatcctgctgtctaagccaccgcggtgagatgttgatggtgtctggcggccgacggaactcctatgcgaaagagatgaccctccgccgcaggatatccatcatattcaacatgacgcaagaacacttaccttctttaaaagactactacgatcatttagaacaacctgagcacatgactttcaacctcatccaacgcatacatctcgtggagattgaaccgaagattgcacgataccaacaagaaaatgcagagcagatttact

SEQ ID NO: 8532 - DNA, 409 bp, Zea mays
  Clone ID: LIB3150-022-Q1-N1-F8
gcgtcttcgtactcgcctacctgcggggctcaaacctttcccccttctcccaattcccgccgccgctccatcccgtaacgcgacaccatgagggagtgcatttcgatccacatcggccaggccggtatccaggtcggaaacgcgtgctgggagctgtactgccttgagcatggcattcaggctgacggtcagatgcccggtgacaagaccattgggggaggtgatgatgctttcaacaccttcttcagtgagactggtgctgggaagcacgtgccccgtgctgtttttgttgaccttgaacccactgtcatcgatgaggtgagaactggcacctaccgccagctcttccaccctgagcagctcatcagtgggaaggaggatgcagccaacaactttgcccgtggtcact

SEQ ID NO: 8533 - DNA, 383 bp, Zea mays
  Clone ID: LIB3150-022-Q1-N1-F9
cccgcctccactcccccctcccaggtgctgcccaggtaagtcggcggcggcgatgacaacgcgcttcaagaagaaccgcaagaagcgcggccacgtgtccgccgggcacggccgcatcggcaagcacaggaagcacccgggaggtcgcggtaacgccggtggcatgcaccaccaccgtatcctcttcgacaagtaccatccgggctacttcggcaaggttggcatgcgttacttccataagctccgcaacaagttctactgccccgcggtcaacatcgagcgcctctggtcgatggtgcccgccgacaaagcggcggaggccggcggcgacaaggccccgcagatcgacgtcacgcagttcggctacttcaaggtgctcggga

SEQ ID NO: 8534 - DNA, 393 bp, Zea mays
  unsure at all n locations
  Clone ID: LIB3150-022-Q1-N1-G1
cgagtctgctctagggtttttgccaagccgccgtcgccgtcgctctgccctcgtatcccctcccacgacaccgagacaccaagatgacggcgcagaccgcggaggagctcgccacccagatcgagcagcagaagctcgaggagcagaagaccgaggcagaggaagttgtggtggaggatgaggaggaggaagatgaggacgatgacgatgatgacaaggatgatgatgaactcgatggggatgccagtggcaagtcaaagcaaagcaggagtgagaagaagagccgcaaggccatgctgaagctaggcatgaagcccatcactggtgtcagccgcgtcactgtaaagaaaagcaagaatatactctntgtcatctccaaaccagatgtgttca

SEQ ID NO: 8535 - DNA, 400 bp, Zea mays
  Clone ID: LIB3150-022-Q1-N1-G10
agaggatccctctgtccaacaaccaagtcatcgaggagggcttgggcaagcacaacatcatctgcattgaggatcttgttcacgagatcatgactgttggcccacacttcaaggaggccaacaacttcctctggccattcaagttgaaggcgccgctgggaggcctgaagaagaagaggaaccactatgtggagggcggcgatgccggtaaccgcgagaactacatcaatgagctcatcaaaaggatgaattaggttcacgatcaagctcattgatagtaccctgtgctctaagtgacttcttgtgctgtccttattttatattagaaagttggatcgtcgatgaatatgcatgcagttttgatgtttcgaactagatgtgtatggaaaaaatctgatct

SEQ ID NO: 8536 - DNA, 354 bp, Zea mays
  unsure at all n locations
  Clone ID: LIB3150-022-Q1-N1-G11
caattacagagatctagagagagagatagagggcagatctacgctagagcgacagagccataaccaaccgagagggacagtccagtatggtggtggcgctcgggcccggccggttctacggcagcggcctgccgaggccgcgcttcttcccgggcgaccgcgtggacccgccggcgtccgtcaccgacccgctgctcgagtgggcgcgcgaagcgcactggtccatgggcggcatcagcgtgaagcgcctccgcctgcagggccgcatcgagggttccgtcgacaagctccgccgncgcgcgcaccgtgacgccagggtcaaggccaaggccaaggcccgcgccgcttgccaca

SEQ ID NO: 8537 - DNA, 391 bp, Zea mays
  Clone ID: LIB3150-022-Q1-N1-G12
gcaggaagcaggggctagacgcggatcggcgagcatgaagggcggcggcggcggcgggatgatggacgatgaagagagggtgggccatgcggagatcccgaccagtttcggtcccgagctgcgcgcctgcctccgatgccgcctcgtcaagacctacgaccagttcaaggagaacggctgcgaaaactgcccgtttctagagatggacagagagcacgacaacgtcgtcaactgcaccacccccaacttcactggaattatctctctgatggaccccagtaagagctgggcagcccgttggttgagaattggcaggttcattcctgggtgctatacacttgctgtctcggaagagcttccagaagagtatcaagggatttgtcaagacaac

SEQ ID NO: 8538 - DNA, 314 bp, Zea mays
  Clone ID: LIB3150-022-Q1-N1-G2
ggccgagtcccttatggagaaaatgaaggagctcaactttgctttcactgccatgtcctttaacagcttaatgacgatgtacaccaaagtcaaccaagctgagaaggtccccagtatcattcaggacatgaaggcagatgacgtattgccagatgtctttacttataatgtttggatgagggcgcttgcagctctcaaggacataccaagggttgagagggtgattgaagagatgaaacgggatggccgtgttgctcctgattggacaacatacagcaacctggcttccatatatgttgaagctggaatgtttg

SEQ ID NO: 8539 - DNA, 375 bp, Zea mays
  Clone ID: LIB3150-022-Q1-N1-G3
gatgatgtgaactggtgggggcacaaatttggatttttatcaagagggtttctaggagcaaaatcccgtaaaaataaatcttcacaaaaagatcctgctaatgtccgccagacatttgcagaggaagatcaagaaaatttgtacaatcttgttcaggataaagctacttctggaaagcagggtcttggcatcaaaggcctgccaatgaaagttgctggccaacgttggaagggaaacaaaacttcgtttgttgatagtgatgatgataattcagcccaacccgatgaatattcagaaatcgaagagaatggcgatgaggaagaacatatcagtgcttctgaatcaatagacacagataagaatgcagacaaagaa

SEQ ID NO: 8540 - DNA, 407 bp, Zea mays
  Clone ID: LIB3150-022-Q1-N1-G4
cgcgccgccgccgccgccgaaacaggagatggctctctcgatctcagccatggcggaggtggagcagccccaggacgcggtgaagctcttcaaccgctggaccttcgacgatgtccaggtgaacgatatctcgctgaacgactacctggctgtgactgcggcgaagcacgcgacattcctgccgcactccgcggggcgctactccaagaagcggttccgcaaggcgcagtgcgccatcgtcgagcgcctcaccaactcgctcatgatgcacgggcgcaacaacggcaagaaggtcatggccgtccgcatcatgaagcacaccctggagatcatccacctgctcactgacgccaatcccatccaggtggtcgtggacgccattatcaacagtggaccacgtgaggatg

SEQ ID NO: 8541 - DNA, 393 bp, Zea mays
  Clone ID: LIB3150-022-Q1-N1-G5
cacagctagctagcagatcgtttcgagtgaagatccaaagaggtagagagatggaaaggatgagttcgtcgctgcagtactgggtggaggagcacaagctctcaaccatcggagccgtgtgggcgacagcggtgggcgcgtctgtggcgtacagccggcggcgggcgccggcgcgggcgacaggcatgcgcctcatccacgccaggatgcacgcgcaggcgctcacgctcgccgtcctcgggggagccgcgctcgcgcaccactaccacggcaagagcaccaaccccgggaagaggcagcagcaagaggacctgtactacggcttctactcgcagctgccgccggccaccgacgccgacggcaacgagatcgagcgctggagctggtagagca

SEQ ID NO: 8542 - DNA, 372 bp, Zea mays
  Clone ID: LIB3150-022-Q1-N1-G6
gggttggcttctcctcccccaccggttcgtgttcaggttctggttcgtgggcgagagggaagagatggcggcgtcggacgttgagtaccgttgcttcgttggcggcctcgcctgggccaccgacgaccactccctcaacaacgccttcagcacctacggcgaggtcctcgagtcgaagatcatcctggatcgggagacgcagaggtcccgcggcttcggcttcgtcaccttctccacggaggacgcgatgcgcagcgccatcgagggcatgaacggcaaggagctcgacggccgcaacatcaccgttaacgaggcccagtcccgcggcggccgtggaggcggcggtggcggatacagtggcgggcgccgtga

SEQ ID NO: 8543 - DNA, 331 bp, Zea mays
  Clone ID: LIB3150-022-Q1-N1-G7
acgatgacaagctctccacccctagggaggggccttcttggcagtgacgacatcaacccgtacccatccatactcaccaccgacgtttgatggagtctctcctcgactagcgatacattaagtcttacttatccgtcgttgataatattatggaccaccttatgcccaagccctcacgcgtagacaccccttacagcgcctacaccgacatccggtcccttccactccgtgctggccacacagacataatccttgatgtgctggctcaggaccatattctgaacgcaaatgagctgctccaatgggacaatggcttgtcattcattgacat

SEQ ID NO: 8544 - DNA, 386 bp, Zea mays
  Clone ID: LIB3150-022-Q1-N1-G8
atctgcatgtgcatgtcgtgcacatcgcgtcggtcgaggaaacagagcaagcaagaaacgagctttaaaaacagttttttcagttcagttcagtctatattatctgcaacattgcaatatctaggcataatttcacattggatcaaaggttttctttttagagcgatgaaacagaataagaagcatggcagcttgaaggaggccacagaacactagagtagaacaaaataaagaattagtgaagaacatcatcaagcagcagatttcaggaatatatgaggccttggagttgagggatggaggatctgattatcttggcaagggtattcttaagcttttggcttaaaatttgagaggaggagatggcggtcacgatcacgtgggtg

SEQ ID NO: 8545 - DNA, 249 bp, Zea mays
  Clone ID: LIB3150-022-Q1-N1-H1
ggaggaggagacccaccgtcggctcgcccgtgtcccgattcccactcacgacatcaacctgtccccatccatctcgcccgcgacgtttgatggagtctctcctcgcctcgcgatccattaggtcttccttctccgccgtcgccagcatcaggggcgccgcttcccccatgccctcgcgcgtcgccaccctcgccagcgcctgcgccggcgcccgctcccgcgcgctccgtgctggccacacggactcaa

SEQ ID NO: 8546 - DNA, 359 bp, Zea mays
  Clone ID: LIB3150-022-Q1-N1-H10
ccctccgcgtcggcctggacgccaccaccgcatccgactaccgcttcgtcgtcgccgccggcgaggaggcactcggccgcgccaccgaggcctacgaggcgctcaccggccctgcccctgggaccttctggaccgcctgcgccgggtgccggctcctacacgagttcgagcgcaagtatgtgggataccgactggcctgcccatcctgccgccggaccttgatcggcgtggaggtcacacctccgccggaagacgaacccgttgcccggatgcctgcgcctcatcagatgccaccgggcaagatgcccgagaagatggacatgacgctcgccgtgatgcaactccagctcgtcaagaag

SEQ ID NO: 8547 - DNA, 397 bp, Zea mays
  Clone ID: LIB3150-022-Q1-N1-H11
cgaggagtggagatccggtgcctgccattgaggagtggaaggaagatctccggccaaaccgtgttgattggatatctctgcttgagaggattaaggcacggaatgtcgagttatacctcaaggttgctgaaattctgctagatcaagaatcttttgaggcaaacatccgagattactcaaaattaattgatcttcatgctaaagcaaataatgtggaaagtgcagagagagtacttggtaaaatgaaagagaagggtattgcacctgatgtcatcatatccatcgtattagtccacatgtatagcagggcatgcaagctagagcaagccaaggaggcttttgattttattcgtagggaggattttaaaccagatcggaaactcttcagttcaatgat

SEQ ID NO: 8548 - DNA, 376 bp, Zea mays
  Clone ID: LIB3150-022-Q1-N1-H12
gcggagtggagggcagcaaagagccctgcctactacaagcgtggcgactatgtgcctggattgaaggttgatggaatggatgttcttgctgtgaagcaagcgtgcaaatttgcaaaagatcatgctgtcgcaaatggcccaattgtccttgagatggatacctacagataccatggccactctatgtcagatccaggatgcacttaccgcaccagggatgagatttcaagtgtcaggcaggaacgggatccaattgaaagggttagaaagttgcttttgactcatgacctgtcaaatgctgctgagctcaagaatatggagaaagaaatcaggaaacaagtagatgacgctattgctaaagcaaaagaaagttcta

SEQ ID NO: 8549 - DNA, 404 bp, Zea mays
  Clone ID: LIB3150-022-Q1-N1-H2
ctcgcggcctcgccttatccccttcgtcactcacctcgaccaccgccatggccatggccttggcctccgcgaccgccgccgcactcttccgctccgccctgtccgcgccacacggcgccggcgcgcgcgtccggccgcagcgccggcagccgttcttggctccgctccacgcggcgaagggccccggctcggcgccggtggtgctggagggcaaggccaagggaaagaagaagaaggggcccagctccgggaaccttcccgcagccctcgacgtcgagatcagggaggcgcatgagtacctcgacagcgaccagcaggaacctgttccagaaaactttccatttgaattaatcgacgaagagggtatgagcgtggttattttgagaagggactacaaggacgag

SEQ ID NO: 8550 - DNA, 268 bp, Zea mays
  Clone ID: LIB3150-022-Q1-N1-H3
tccgttacgaggaaacccaccatcccctcgggtgggttcctattcctacttacgtcaccaacctgcaaagatgacttgggtgcgtacacttcgttttcgtctgctccctcctccaaatatatcaacgcttcctggtgggttaatcacattgttacgctcgcgaggctgatcagaatttctgccgaaggcccccgcgtgaacgtctaatcctcagcagtttcttcagccccaactgcagatgttgctgaatcacacgccccagctgctg

SEQ ID NO: 8551 - DNA, 261 bp, Zea mays
  Clone ID: LIB3150-022-Q1-N1-H4
cttacacgatggccaaatgcgacacacgcgatggctagtacatggactggtgcctcatgttccggggtgatggatcccccaaggatgtgaatgctgatgtggccaccatcgacaccatactcaccatgcacgtcgtgtattgctgcgctactagcttcaagtacggcatcatctaccagcctgcttacgttacgcctgatggcaacctggtcaaggtgcaccgtgccaggcgcatgatgtacaactccaccaatgatgcgg

SEQ ID NO: 8552 - DNA, 183 bp, Zea mays
  Clone ID: LIB3150-022-Q1-N1-H7
ggcgagcacgaacacacatcccctcccgtgttaggttattccctcgtgcgggccctcgccgcagacctctgccatggcggaccagctcaccgacgagcagatcgcggagttcaaggaggccttcagcctcttcgataaggatggcgacggctgcatcactaccaaagagcttggaaccgggat

SEQ ID NO: 8553 - DNA, 374 bp, Zea mays
  Clone ID: LIB3150-022-Q1-N1-H9
cgctcgccgcccactcgcatggcgtggtcgctcgtgtcgcgcccgcacctcacccagcgcccggtccgcgccgccacgctcgcctccgctacccggccccgcctcgcggccggggcccttagcgggcgctgccaggcgcaagcggcggtggacttggacgacgctcactacatgcggtggtgcgtggagctggcgcgcaaggcggccggccacaccagccccaaccctatggtgggctgcgtcatcgtccgcgacggccgcgtcgtcagtaaaggatttcaccccaaggccggccaaacctatgccgaggtattcgcactaaaagatgcaggtaatctacctgaaaatgcgacagtctatgttagcttggagcc

SEQ ID NO: 8554 - DNA, 294 bp, Zea mays
  Clone ID: LIB3150-023-Q1-N1-A11
aaagattttgacttctgcgcgcgccttcaacttctatcctccttaatagacccacgcgtcctcggacgcgtggggtcagactacaaatttggggagcaaacatcagtggccagactccccatattatactatcgagagactcttttgaccaggattatcagggtatactatgctaagatgactgtaaaaataggatagcaagtgctgatcgttggggatgaccttctttgcaccaaccccactagggcagctaaggctataaaggtgaaaacatgcagtgcccttatattcaaa

SEQ ID NO: 8555 - DNA, 393 bp, Zea mays
  Clone ID: LIB3150-023-Q1-N1-A2
ggagaagcagccgccgttgctgctgccgcgtccacagaatggggggtttcgtgaagactcataagaccaatgcgtatttcaaacgtttccaagtgaaattcaagagaaggcgggctggcaagacagactacagggccaggataaggcgtgtttaccaagacacaaacacagtgtcccacacacccatacacagatttggtgtgcgatttaccaacagggacatctctgcccaaatcatatctgctagtatagcgggtgatatggttcttgcttctgcctactcgcatgagttgccacgatatggtcttgaagttggtctgaccaactatgcagctgcctactgcactggccttctgttggctcgccgtgtgctcaagatccgtggtttggatc

SEQ ID NO: 8556 - DNA, 321 bp, Zea mays
  Clone ID: LIB3150-023-Q1-N1-A3
ccacccttccggtaaaagcatccgccaattacctttcggggtccaatctgagcctaattttttcaacggttccaaaatgaccgtgcttttttaccgatttcaggcttgggcaaaagtcgccaaccgcaacttttttgaagtggggctattttgacctagttttcctgttaaacattgccagcgccgcaactttgtcgtcttatgttgatcaacatttatcggggccattgggcagctgctagtttggcaattgcaaatcaatttaccttttggttcataaggcatatgctgctaccctaatggctaaaaatttcgttgaca

SEQ ID NO: 8557 - DNA, 206 bp, Zea mays
  Clone ID: LIB3150-023-Q1-N1-A4
tcggaaccaaagtgggatgctcatctcgggccgacagaagaagagatgctccaaagaccaccgacagacagggcgctgtcacacaggccaagatgtgatgggagaactcgcgggagcgaacgactggccacgggagctgcatcagcgcgcatgaccgaaaccgatacgttcacctcaaagcctaattcaaaactaacgagcgattt

SEQ ID NO: 8558 - DNA, 402 bp, Zea mays
  Clone ID: LIB3150-023-Q1-N1-A6
cggacgcgtggggtaagattacagatttcaccagcaaacaacaatggctagtcttttaatattatatttactggcctttaatttgtcgccatatcattgcatctgacagcatctttcatatgattttattatagtcagtttttaacatcccgttaaaattctctcctattccatcagattttacagtaatcctagaatgattattcagtagtgtattctgaaattttgaactttgtaggcgttgacatcagcatgaatactcatctgaagactgtgaagctgacactaaaagggaaaaatcctgttacccttgatcaccttagtgtgaggggaaacaacatccgctattatatccttcctgacagcctaaacctggagactttgctggttgaagaaacacca

SEQ ID NO: 8559 - DNA, 291 bp, Zea mays
  Clone ID: LIB3150-023-Q1-N1-A7
ggcgcgctcgacctgactctgcgaggcggaggcggacatctcctgctttgactcctcactacctggagtacgggtcgttctgaagcaccgctatgccgacttcatcgtgcatgaggttgcccgcgatggcgctctcatgcagctcacctagatcgacctccacaccgatagcgttggtgtgaacgaagatgacatggctgacccttccgctgaagcggatcactcacaagccctacagtcgttccaggcgatctgcggcgatgccgattgcaacgcattgaggggtcttct

SEQ ID NO: 8560 - DNA, 215 bp, Zea mays
  Clone ID: LIB3150-023-Q1-N1-A8
cacctatcggtcgcgtgtgcttcacgcggcggctcattcctgacaccgcacaccatgcatttgattctgatcgcaccgacgtcggcccaccgttttagttggcagttgcgacttgcgagtggcttcaacaaggcaacacaatgcaccggtaccaaccaaaaacagcggcaccggagacccgtacccactttcccggagagcgatggcgacggagc

SEQ ID NO: 8561 - DNA, 287 bp, Zea mays
  Clone ID: LIB3150-023-Q1-N1-A9
ggaagcctgaggagattaccaaagaggagtatgctgctttctacaagagcttgaccaacgactgggaggagcatcttgccgtgaagcacttctttgttgagggccagcttgagttcaaggctgtactctttgtgccaaagcgggccctcttcaacctctttgacaccaggaagaagcagaacaacatcaagctctatgtgcgacgtgtcttgatcatggacaactgtgatgagctgatcccacagtggctgaactctgtcaagggtattgttgactctgaggatctt

SEQ ID NO: 8562 - DNA, 349 bp, Zea mays
  Clone ID: LIB3150-023-Q1-N1-B1
gggcaagaagagccaactgaaaagtattcatccaagaacaccaccccacccgctccaagcacaagtttcgtcttgaagagagccgccaccaccaatggcttgttacaacactgcatctttagcggcgactctgctggcgttcgcgctgacgtttcaggcctgcctcgccgggaggaggctcaccgcgctggtgcaggagccggccataaccatgaggtaccacaagggcgcgctcctgtcgggccccatcgccgtcaacttcatctggtacggcgacttctcggcgccgcagcggtcggcgatcaccgacttcgtgtcgtcgctgacggcggcggcgcaaccggagccg

SEQ ID NO: 8563 - DNA, 280 bp, Zea mays
  Clone ID: LIB3150-023-Q1-N1-B12
ctccttttagcagcagcatgaacccttcaccggggtattcttacacatggggttcgacctccttgccggtgggaggaacaagaagaccaagcgtcacatcgcctgtattacgaccgttgtttaatatcaagctcccttgtcaaagctctaaccgttttcttggtcaatgaggaccaaagagcaaccttcaatgcctgtctttctcaaagaggcgtcttcaatgagcaataaccaattcgcccaccaatctttcaagcgccgtctttgtaaagttcatgga

SEQ ID NO: 8564 - DNA, 351 bp, Zea mays
  Clone ID: LIB3150-023-Q1-N1-B2
cgactccttcagttccgtcccgttcgtgacgacctccggtcccgggagggggagggggagggggagggagaggcgaggtcatggcctccggcaccggctccggccagccgcaacccgcagcagctgatgctgacccgggagccggcgacaacaagctcgtcttcgagacgccgctgcagccgcagcccgtgagggaggactacgtcgagaacgccgtcaagttcctctcccacccaaaggtcaggggctcccccgtcgtctacagacgatccttcctcgagaagaagggcctcaccacacaggagatcgacgaggccctacgaagagtccctgatcctgaacccatcacta

SEQ ID NO: 8565 - DNA, 403 bp, Zea mays
  Clone ID: LIB3150-023-Q1-N1-B3
cagctcccgcagccgcggaccagcgcgtgactctaccgggttccggcgtctccccttagcgcggcatccatggcggagcagacggaaagggctttcttgaagcagcccaaggtgtttctctgttccaagaaggccaccaaggtaaacaaacctggcaagggaggaaacagattctggaagaacattggccttggtttcaagacacccagggaagccattgaaggaacctacattgataagaagtgtccattcaccggcactgtgtctatcaggggtcgcatcatcgccggaacatgccacagtgctaagatgaataggaccatcattgttcgtaggaattatcttcacttcgtcaagaagtaccagaggtatgagaagagacactccaacatccctgcgcaca

SEQ ID NO: 8566 - DNA, 396 bp, Zea mays
  Clone ID: LIB3150-023-Q1-N1-B6
ttagcagcagcaaggacccttacaccggcggattcgcaagcattggttttgaacctgtttgccgttggagggaccaggataaccaagcccccagggccgaattccgacaatgttaatctaaagctcctggtcaagctctaccgtttcttggtcaggaggaccaagaccaacttcaatgctgtcattctcaagaggctcttcatgagcaaaaccaatcgcccaccaatctccatgcgccgccttgtcaaagttcatggaaggaaaggagaagaacattgctgtgattgttggcacagtcacagatgacaagaggatccaagaggttccagcaatgaaggttactgccctgaggttcaccgagacggcaagggccaggattgtcaatgctggtgggga

SEQ ID NO: 8567 - DNA, 253 bp, Zea mays
  Clone ID: LIB3150-023-Q1-N1-B8
gccgccccccgcccgcccgccctccgccgcgcgtcggacggtgccgagggaagaggcaccatgaggttggagaagtgctggttctgctcctctaccatctaccccggccatggaatccagttcgtacggaacgacgccaagatcttccgcttttggcgggcaaagtgccataaaaacttcaagatgaagaggaaccctcgcaaggttaagtggacaaaagcatacacgcatttgcatggcaaggacatgaccc

SEQ ID NO: 8568 - DNA, 276 bp, Zea mays
  Clone ID: LIB3150-023-Q1-N1-B9
aaaaaaaaaaaaaaaaaaaaaaaaggggggataaaaaaaaaaagaaaaaaccccacgcttccgttcgccgtggttttctgcggttctgccgtttacgcctacaatttggcctttttcctttgcaggtttaagctccaccttcaacacatgggtagggagaagtcccaactcaacattgaggacattggccactttaactttggaaagtggaacaccaccggccacctgttctacaatcttgaaggcatttacaaccgcgaaatatataggtttgat

SEQ ID NO: 8569 - DNA, 295 bp, Zea mays
  Clone ID: LIB3150-023-Q1-N1-C10
tacataagctttatcctctatatctacccacgctttctttttttcgtcctcatttattttctagcgtatttttataaaataataaaaacaaaaaaataataataataatattaaaattattaataatttattatcatattatttctaatttaaaaaatatattcctttctccctcttttatccttcaccttcccctcaaccttacctattttacctttatttactcctattatacctctccctcacattaattaaacctttattttttctaaaaattttaccctttcacattttc

SEQ ID NO: 8570 - DNA, 394 bp, Zea mays
  Clone ID: LIB3150-023-Q1-N1-C2
gcggggttggcagcacccggatcctgggccagtgcgtcgagtttctgaggcatcagtgcagcccgacggcgacgccctactgctcgcctcagtgccagtcgttgcggcagcagtgttgccagcagctcaggcaggtggagccgcagcaccggtaccaggcgatcttcggcttggtcctccagtccatcctgcagcagcagccgcaaagcggccaggtcgcggggctgttggcggcgcagatatgcgcagcaactgacggcgatgtgcggcctgcagcagccgactacatgcccctacgctgctgccggcggtgtcccccactgaagaaactatgtgctgtagtatagccggtggctagctagctagttgagtcatttagcggcgatgattgagt

SEQ ID NO: 8571 - DNA, 393 bp, Zea mays
  Clone ID: LIB3150-023-Q1-N1-C3
gccgacgccgccttttcgtccccgcgtgggcgtcgcggttccactgagcgtgcgtgtcaccggcgggaggcaaggccaggcggtggtggcgatggcgtccgctgacgcgcgcttggcggggatcgcctactccatccgcgtcatccccgacttccccaagccagggatcatgttccaggacatcacgacgttgctgctcgatcccaaggcgttccgtgacaccatcgacctctttgtcgagcggtacaaggaccaagggatcaccgtggttgctggtgttgaagctagagggttcatttttggtcctcctatcgctttagccattggcgcataatttgtgcctttgaggaagccgaagaagttgccaggcgaagtgatctccgaagagtattc

SEQ ID NO: 8572 - DNA, 423 bp, Zea mays
  Clone ID: LIB3150-023-Q1-N1-C4
cttaaaatccaaccaacccttccggccgggtcctgaaacgtccaaaatgaaaatggctaataacaaggggggactgattattgggaagggtggggagactataaagtccatgcaagccaattctggagctcgtattcaggttattcctttgcatctgcctgctggtgatacttcaactgaaagaactgtgcatattgatggtacccaagaacaaattgaagctgcaaagcaactgatcagtgaggttaccagtgagaatcgtgctaggaatccaatgtctggtggctattctcatcagggctatcagccctactcgtcctcagtcaaactggggcccgccttctgtgccaccccagcagcctggctatggttatatgcatcctgaggcttatcctgaggcaccgccacagtatggtgcacctc

SEQ ID NO: 8573 - DNA, 363 bp, Zea mays
  Clone ID: LIB3150-023-Q1-N1-C6
gggcgagccttccaagagggaacagccggccaatgggcctaggattcaattgccggaagggttttggttcctggcccctaatgtggcaaagattggaagggataaaaatgggccgtcctgccaggccgtgtataataccgttgccgcttgtttatgggtagtagcagcgagtcagctgtcagcacgccttacacctccctcgccgtgttgtaattcccgtcaccggtgctgagagtgtgcacaatatatcgttgtctgttgtccaaagttttgggtcatggacgggtttgatgatttgagttgatttattagagaagcaatgtgttgttcgattctgagcttaaaaaaccaaaaagaaatgca

SEQ ID NO: 8574 - DNA, 301 bp, Zea mays
  Clone ID: LIB3150-023-Q1-N1-C7
gtccaccactggtggttttgatgctggggtctcccatgatggccagacccgtgaacatactctccttgcgttcacccttggagtgaatcagatgatttgctgctgcatcatgatggatgcaaccactccaaaatactccaaggcacgtcatgatgagattgataaggaagtctcatcctaactcaaaaaagctgggtaccaccctgataagattgtctcaggtcccatggctggttttgagggccacaacatgatcgaaaagtccacccaccttgactgggacaaatgcccaaaccttttt

SEQ ID NO: 8575 - DNA, 270 bp, Zea mays
  Clone ID: LIB3150-023-Q1-N1-C8
agaagccgatcatcttctcgatggcgcgtctcgaccgcgtgaagaacatgacaggcctggtggagatgtacggcaagaacgcgcgcctgagggagctggcgaacctcgtgatcgtcgccggtgaccacggcaaggagtccaaggacagggaggagcaggcggagttcaagaagatgtacagcctcatcgacgagtacaagttgaagggccatatccgggtcatctcctcctcctcagaaacccaccaaccccgtccagccgccggctgtc

SEQ ID NO: 8576 - DNA, 282 bp, Zea mays
  Clone ID: LIB3150-023-Q1-N1-C9
tcgaggctcttacaaactcacctgatgacggagcatcatcccaaagagccagggacttccacattggctggtttgttgatccattgataaacggacactatccacagataatgcatgatctcatgaaggagaggctgcccatgttcactcctgagcaggctaaactggtgaagggctcggcagactacatcggtatcaacgagtacacattcatctacatgaaggtgcagtagctgttccaactggcgcccactaactactcttccgactgtcatgttcaat

SEQ ID NO: 8577 - DNA, 394 bp, Zea mays
  Clone ID: LIB3150-023-Q1-N1-D1
ttccggtcgactctggcaagtctaccacaattggccacctgatctacatgctcggcggttttgacaagcgtgtgattgagaggttcgagaaagaggccgcggagatgaacatgcggtcattcaagtatgcctgggtgcttgacaagctcaaggccgagcgtgagagaggtatcacaattgctattgctttgcggaagttcgagaccaccaagtactactgcactgtcattgatgcccctggacaccgtgacttcatcaagaatatgattactggcacttcccaagctgactgcgctgttcttatcattgactccactactgagggttttgaggctggtatctccaaggatggacagacccgcgagcatgctctccttgctctcacgcttggagt

SEQ ID NO: 8578 - DNA, 323 bp, Zea mays
  unsure at all n locations
  Clone ID: LIB3150-023-Q1-N1-D10
catcgacaacccctccgatctccttaggccttcccgtcgcataaacccccgccgccgtgacctcgcagcgaccctgccctcgttctaggctttcattgcaggcctcgcgtctccagtggcagggcaagagaaaggagaggatggcgtcgccgataccgcgcgagtgggtcgggctgcagcagtttcccgcggctacacagaccaagctgcacgaactcctcggcanactcaaggaggaggatgtgagcacattaacaattctggtgatggagaaaggtggagtgggaaagacatccactgttaactccatcgctggggagagg

SEQ ID NO: 8579 - DNA, 400 bp, Zea mays
  Clone ID: LIB3150-023-Q1-N1-D11
accgaggccgacaaaacaaatgaccagaagtctttacaacgagctcttgataataaactttatctcctgctgtatggcaatgcttatggggctcctgatggaaagcctgtatggcattttccggaaaaagtatacgaaaatgaagaaactatgcgactgtgtgcagaggctgcattaaaatctgttcttgggggacttgaccatacatactttgttggcaatgctccaatggctcatatggcagttgaacaaacagattcaagtgtttcatcattcaagcgtttctttttcaagtcacaagtggttggcacaacgaaataccatgttggaaaatgcaaggacttcgcgtgggtgaccaaggatgagctgctggagtattttcctgagaacaaggatttct

SEQ ID NO: 8580 - DNA, 365 bp, Zea mays
  Clone ID: LIB3150-023-Q1-N1-D12
attagctcttacccttttcacccatgatgacgaagtgccagaagcgcgcgagcatccaaggactttggctcctttccatggttcttctagcgtcgtcctctcttgtctgtgcaagcatggcggtagatgggcaaaccaaagaggacatcaacgcaacgagtgtgacgagcatgaacatgacgaggtcgtcgtcggcgagctacaacatgactggcggcggcggagaacttaacagaggtccgtgcgtcgtgagatctggattctactggtgccagaacattggctatccgaccatgtcggagtgcttgaagaactgcgaatcgtaaagcactggagtatagaaaaggaataaagtggtctctgct

SEQ ID NO: 8581 - DNA, 408 bp, Zea mays
  Clone ID: LIB3150-023-Q1-N1-D2
ctggattcctttaaagccgaccaacccgtccgttcataaaaagtaatcaccatggggagagaaggtagaagggagtagaggtctagggcgttgccgacgtcgtcttctgccatcacgtcatccagtgctcgtgtggaggtcctggggaaccaacgtgccgtaagggacctgggcgaacctctctcgtgcaaggattcggccgggctcgccgggaatttctcactgacgcaagccactgccgtggatcgagctctgctgtggccggagcgctacgcgacagaccctctggatgcaaatgaggcacacaaaatgaggagatccactatatcctttgtacacaaatttgagtattacacctggactacggttcccgcccgaggctgggctcgggcgaggcgagatcgcgtt

SEQ ID NO: 8582 - DNA, 419 bp, Zea mays
  Clone ID: LIB3150-023-Q1-N1-D3
cctttaaagtggaccaacccttccgttcaaggttcgtggccaatcctgcccgcggaaggtaggcagctccttgccccggggctccggcggctcggtctgggcaccggcgccgccggtgaggtgggcccggccgccgcggcggcggggatgagggcgtaccacgagcgggtggtggaccactacaacaacccgcggaacgtcggttccttcgacaaggaggaccccaacgtcggtactgggctggtcggcgcgccggcctgcggcgacgtcatgaagttgcagatccgcgtcgacgaggactccggtaaaatcgtcgacgcctgcttcaagacctttggctgcggctccgccatagcgtcctcgtccgtcgctactgaatgggtgaagggaaaaccaatggatgaagtcttgacaatcaa

SEQ ID NO: 8583 - DNA, 293 bp, Zea mays
  Clone ID: LIB3150-023-Q1-N1-D4
gttattgacgactgccccgatgatctgattgtctggtaccgccacacatttaaaggcgcatggccattctctaccggggctcacggttggtctatatctgattgcactgctggaggactaaaggcttgattattgctatgaaagacttatcctgaaattgttcgtggaccgatagaacctaataaatcttatgatgctggcagttgactgatgtcttatatgaatgatcacgtggggatagcgacttaagaacttacaagatcctatgcctggcttaagctgatcaatcctgc

SEQ ID NO: 8584 - DNA, 351 bp, Zea mays
  Clone ID: LIB3150-023-Q1-N1-D6
tcaaaacctacaaaaatctccaggatataattgctatctggggtttggatgacctcagggaggatgacaagctgacagtcccccgtccaagaaagattcaccgtttcctgagccagcctttccatgtcgctgaagttttcacgggtgctccaggaaagtatgtggagctgaaggaaagcgtgaagagtttccagggtgttttggatgggaagtatgatgacctccctgagcagtcattctacatggttggtggcattgaggaagtcattgctaaggctgagaaaattgccaaggagtctgcttcataaggaggcttcttgcttgttcaaccctgtacaagttccatttttg

SEQ ID NO: 8585 - DNA, 331 bp, Zea mays
  Clone ID: LIB3150-023-Q1-N1-D8
cttctcctccccctcttaccaagtcctcttcgggttagggttacttagggttttgtggaggggcgatggcggcggctgatgtggagtaccgttgcttcgtcggcgggcttgcctgggccaccagcaacgagtcgctggagaatgccttcgcctcctacggcgagatcctcgactccaaggtcatcaccgaccgggagacggggaggtctcgcggcttcggcttcgttaccttctcctccgagaactccatgctcgacgctatcgagaacatgaacggcaaggagctcgacggccgtaacatcaccgttaaccaggcccagtcccgttgcgg

SEQ ID NO: 8586 - DNA, 224 bp, Zea mays
  Clone ID: LIB3150-023-Q1-N1-E10
cagcgctcgtcacctccaatcaacaaaggcccaatccgccgcttcccatcccgcgttcgccgctccatttgatcgaattcccgatggcgcccaatgccgagaagaagcccgctgagaagaagccgactgaggagaaggccgagaagaagcccatggcggagaagcgcgtgccggcaaggagggcggcgagaagaatgggaagaagaaggccaagaagagcgtct

SEQ ID NO: 8587 - DNA, 72 bp, Zea mays
  Clone ID: LIB3150-023-Q1-N1-E12
tcggagcactcgtctcctcctgcctacggggacctaatccggcggttctcggcccccattctacggtccatt

SEQ ID NO: 8588 - DNA, 433 bp, Zea mays
  Clone ID: LIB3150-023-Q1-N1-E2
tggattcctttaaagcgaaccaagccttcgggaacaacctcatttccccaaaaccgaaaggcggagtccggatggcagttccttcggtccatccggccgtcacatcagccacacgccgacgcgccgccagtcgccgcacgagggggcccgtgatgccgaagaagatgggcgtgaactccaaggcggaggcggcccgcgaccgccgctccgccgcggaggccgaccgccgcgaccgccaggagcgcgccaaggaggagcagtactgggccgaggctgagggccccaagtcccgcgctgcgcgccgccgggaggaggacgccgagaagcgcgccgaggccgcggctcgcaaggccgagaaccgccgcctcgccgaggcagaggccgccgccgtcgccgcttccgcatcggcgccgtccaaggccgcagcgcgcaa

SEQ ID NO: 8589 - DNA, 195 bp, Zea mays
  Clone ID: LIB3150-023-Q1-N1-E3
ttactccatattactctgagattgccctctacaacttggcttgacttcaaaagaaaaacgaagacggtctaacttcactgttttatctccagaagatttacccatatgaatggaagaacttttcttacttgtattaacaaggattaaaatgccaaatacctttttcttttttggctcccaaatgacactacttta

SEQ ID NO: 8590 - DNA, 322 bp, Zea mays
  Clone ID: LIB3150-023-Q1-N1-E5
tcctttaaatccgaccaacccttcctaggaaagcaccctccacctgttgctccgtctaaggggtggcatgcaaatctttgtgaagacactcactggcaagacaatcacccttgaggtggagtcttcggataccattgacaatgtcaaggccaagatccaggacaaggagggcatcccaccggaccagcagcgcctcatcttcgccggcaagcagctggaggatggccgcaccctggcggactacaacatccagaaggagagcaccctccacctggtgctccgcctcaggggtggcatgcagatttttgtgaagacattgact

SEQ ID NO: 8591 - DNA, 321 bp, Zea mays
  Clone ID: LIB3150-023-Q1-N1-E6
gcattgcatacgctgttgctggatacaccgctttagcagctgaatactgaagctgagagccagtggatttcttaggtattgcagcacttatccgcataggtctcgttgaacagtacacaccattcatttctgtcattgcacggttcttttaattttcatctgcgaactttacaaatccatatcctttaaatctcccggttttggaatccgtgacaaccttagcacctttaacaaataaatagttaactcggaaggtttcctgtagtaagtaatctgtgacattaggtgccagtgcccctacaaaaatcgattgaccaaatc

SEQ ID NO: 8592 - DNA, 375 bp, Zea mays
  Clone ID: LIB3150-023-Q1-N1-E7
cagtaaagcggcacacgagcctccggtgctccctctctatctgtcctcactcactcactcactcggtcactccacagcttaattgctcccatttctcctccgcggtttggagcctgcttcctctctcgctgctcctttggaagccccaagcccgccagggcgcctgcaaggagagacgacgacagcaatgccggtggtggacaagggaggcgaggccgccgagttgcccccggacatccgtgggctcggcgtcggcggggagaccagcaggccgtcgcaactccacggtggttctggctcgccaccgatgtagtccaatccaaggcgtccaccaccgccaagcgccgccgcgagacttggggctccaagtcggtg

SEQ ID NO: 8593 - DNA, 395 bp, Zea mays
  Clone ID: LIB3150-023-Q1-N1-E8
gcgtgtcctagccaagacacgcagctgagctcagcctcacacgcagagcaagagcgaggcgtgattcgccatgggcggcctcattatggaccaggccttcgtgcaggcccccgagcaccgccccaagcccatcgtcaccgaggccaccggcatccctctcatcgacctctcgcctctgtccgccagcggcggcgccgtggacgcgctggccgccgaggtgggcgcggcgagccgggactggggcttcttcgtggtcgtgggccacggcgtgcccgcagagaccgtggcgcgcgcgacggaggcgcagcgcgcgttcttcgcgctgccggcagagcggaaggcctccgtgcggaggaacgaggcggagccgctcgggtactacgagtcggagcaca

SEQ ID NO: 8594 - DNA, 234 bp, Zea mays
  Clone ID: LIB3150-023-Q1-N1-E9
agctagctagttgagtcatttaacggggatgattgagtaataatgtgtcacgcatcaccatgggtggcagtgtcagtgtgagcaatgacctgaatgaacaattgaaatgaaaagaaaaaagtattgttccaaaaaaaataacaacacctaaaaaataactcataaattccaaaatactattctaataatataaaacaccatttagtgacaaaaagcaaaatcatttttattttt

SEQ ID NO: 8595 - DNA, 392 bp, Zea mays
  Clone ID: LIB3150-023-Q1-N1-F1
tggagtttgggggggaccaggtagaccacctggtggctgtttggagggaaccccggtcccataaagaaaaaaaggatggctattggtccaaaataagtgaaaatgttgtcatcgatgctactggcaaaggaaacatagcgcgcctgattaatcactcgtgtatgccaagctgctatgctaggatcgtgaccgtcagtggtgacaggagccagatcattcttattgcgaagagagacgtctctgccggagaagagctgacgtataactacctgtttgaccctgacgagtccgaagactgcaaggttccatgcctgtgcaaagctcctaactgtcgtggatacatgaactagggtgctgctagaagagtaaaaaccaatctaacaaacaaggac

SEQ ID NO: 8596 - DNA, 305 bp, Zea mays
  Clone ID: LIB3150-023-Q1-N1-F10
caacaagcttggtggccttctaaggcagcagtgctctggtgagcggtatcactggtggctcttctcctgcagtgttcaatgctgcacggctcatgtctaccaagctatttattggtggtcttgactggggtgatgatgacgcgaaactaagagaagcattcagcagctttggagagggtactgaagcgagggtgatcacagacagggagactggcaggtcaagaggctttggctttgtgaactactcctacagtgatgctgtcaaagaagctatttctgcaattgatggcaaggaaattgatggg

SEQ ID NO: 8597 - DNA, 293 bp, Zea mays
  Clone ID: LIB3150-023-Q1-N1-F11
ggagaacatggtggagagccttcatcggttgctttcttcgccaagactgggctggattacgtttcttgctcccctttcagggtcccgatcgcgaggctagctgcagctcaggtgcttgtctgagggtgcctcctcgttggcagcctgctgttggtgcatctggtgattaataatactactatgacagagccatatgctctgtgaagagtattagtagcagcgctcataaaagctacagttccatctattttctcagctatgtaaaacttccaaactgttcatgcttaaaactg

SEQ ID NO: 8598 - DNA, 302 bp, Zea mays
  Clone ID: LIB3150-023-Q1-N1-F12
ctgagatgctttcggcagaggaaaagggtcaagctgttgctgcagctaaagaaacactgaacttggcatgttcgttactacgcagggatggaagaccatggctgtatgctgtcgagagcagtccatttgaatcccccgatgttattttccttgagctgcatgcttctgcaatgctctgcctaccttctggagaatgtctgttaccagatgcaacatcatgcacagctttgacaagtgcactatattcaactgtcagtgaagatgatgtgctgcatcgcctgttgaaggtggatgtccaggtc

SEQ ID NO: 8599 - DNA, 473 bp, Zea mays
  Clone ID: LIB3150-023-Q1-N1-F2
acactctagaagagcatgacgtcgatgcaccctacctagcctggatccctttaaagccgaccaacccgtccggcccaggcggaagtggcggtggacctttgcttcctccgccgtcggctcagatctctgcgtgcggcctagcgatggcgtcgttctcggaggctcccccagggaacccgaaggcgggcgagaagatcttcaagaccaagtgcgcgcagtgccacacagtcgagaagggcgccggccacaagcaaggtccaaacttgaatggtctttttgggaggcagtcgggtaccaccacaggctactcctattccgcgggaaacaaaaacaaggctgtgatctgggaggagaacactctgtatgactacctgcttaaccctaagaagtacattcctggaaccaagatggtcttccctgggctgaagaagccgcaggaacgtgctgatctcattgcgtacctgaaggaagca

SEQ ID NO: 8600 - DNA, 342 bp, Zea mays
  Clone ID: LIB3150-023-Q1-N1-F4
caccagcgctcgtcacctgcaatcaacagattcccaatccgccgcttcccatcccgcgttcgccgctccatttgatcgaattcccgatggcgcccaaggccgagaagaagcccgcggagaagaagccgacggaggagaacgccgagaagaagcccatggcggagaagcgcgtgccgggcaaggagggcggcgagaataaggggaagaagaaggccaagaagagcgtcgagacgtacaagatctacatcttcaaggtgctcaaacgggtgcacccggacattgatatctcgtccaaagccatgtccatcatgaactacgtcctcaacgacatcctagataagc

SEQ ID NO: 8601 - DNA, 218 bp, Zea mays
  Clone ID: LIB3150-023-Q1-N1-F7
gccgtcgccgccgctcgtctccctgagaggtgccgggaccgaggatttggccgagttctaggtagagaatcggttttacttgtctcagcccggggtctgctgcgtctggtggtggtgaaggggagaaattcgtgagatctgttccggatcacgcatgcgagctcgtgaatcacgggtatcacacatagcttagtcgatttgttttggatgtactaatg

SEQ ID NO: 8602 - DNA, 87 bp, Zea mays
  Clone ID: LIB3150-023-Q1-N1-F9
tcgtcacaccgacatagaatctgttctcggggggttatatacctgcacactagatgtgcttatactcttgtgaactagagctagacc

SEQ ID NO: 8603 - DNA, 406 bp, Zea mays
  Clone ID: LIB3150-023-Q1-N1-G2
cttccggttgaaggaaaggaaaaaggccttcccgcccctgggttggtgcctaatgctggtcggctccctccgcctggcctccgtctggttcggcttctttgacatctgggcgctccgcgtcgccgtcttctcccagacggacatgactgatgttcatggccgtacttttggtgtctggactcttctgacctgcacgttgtgcttcctctgtgcactgaacctggaaaataggcctctgtatctggccaccttccctatcatttgtctacgctcttggccatttcctcacagagtacttgatatatcacaccatggctgcagcaaatctgagcacagttggcttctttgcaggaacgtcaatcatatggatgcttcttcagtggaattatcatgtgaatccccatgg

SEQ ID NO: 8604 - DNA, 354 bp, Zea mays
  Clone ID: LIB3150-023-Q1-N1-G3
agagccctctctgccactcgtgatccaactagtcacaatgcctgccctcgccaagcccgcctcccgcaccgccaagcccgccgcggctccgaagccgaagcctgccgccgccaagccgaaggcggccaccgctggtgcctcccacccgccttacttcgagatgatcaaggaggctatcacggcgctcaaggagaggaccggctccagctcgcaagcgatcgccaagtatgtgggggacaaagcacggcgcgtctctgccggccaacttcaagaagatgctttccatccagctccgtgggtccgcagccaagggcaagctcgtgaaggtcaaggcttcgtacaagctctcggacg

SEQ ID NO: 8605 - DNA, 431 bp, Zea mays
  unsure at all n locations
  Clone ID: LIB3150-023-Q1-N1-G6
ctggattcctttaaagcgaaccaagccttccggttggccgggcttaatggggcattgtcggttctattgaacagaaggaggagtcccgtaagaacgaagagcatgtgaaccttatcaaggaataccgtgcgaagatcgaggctgaactgagcaatatctgtgatggcatcctgaagctgcttgactcccacctagtgccttcttctactgctgctgaatcaaaggtcttctacctcaagatgaagggtgactatcacaggtatcttgcggaatttaagactggtcctgagaggaaggaatctgctgagagcacgatgatggcctacaaggctgctcangacattgcgctggctgagctggcacctacccatccgataaggcttgggcttgctcttaacttctcagtgttctattatgagattctgaactcc

SEQ ID NO: 8606 - DNA, 57 bp, Zea mays
  Clone ID: LIB3150-023-Q1-N1-G7
tcgtgtcaccctgcaaaaagagtcctgggcgcgcctactaaccacaatggggagtct

SEQ ID NO: 8607 - DNA, 401 bp, Zea mays
  unsure at all n locations
  Clone ID: LIB3150-023-Q1-N1-G9
gaagaatttcttagagaacgcgtataatgatgcgaagaccatccttacgaaacacaataaagagctacatgctctggccaacgcacttcttgagcacgagaccctcacaggagcccagataacgaacatattggcccaggtacgtaacaaacagcaacaagaacatactgtcgaagcaccacagagggccccagcttccccggcatcaccagctgccgcggcagcagctgcagccgccgcggcagcacagcaggcggcagccaaagctaagggagtggctggtatgggatcttaacacatggagcgccccaccggatgtatatnttaaccaaacaagcaaaactggtccagcgattgacaagtgatgaaggtcattggttgtattgtatgctaaactgctg

SEQ ID NO: 8608 - DNA, 416 bp, Zea mays
  Clone ID: LIB3150-023-Q1-N1-H1
ccacccttccaaaaaaaaaaaaaaaaaaaaaaaaaaaagggaaaaaaaaaaaaaaaaaaaaaaaaaaaaaaaaaaaaaaaaaaaaaaaaaaaaaaaaaaaaaaaaaaaaaaaaaaaaaaaaaattgaaaaaataaaaaaaaaaaaaaaaaaaaaaaaaaaaaaggggggggcccccccgggattttcgggccggtcccttgggggcgaccaactttcccttatagggggccttttaaaacctgggcaaaataagggcaatagcttttcccggggaaaaatttttttccgttaaaatttccaaaaaaattacaacccgaaaccttaaatttaaaacccggggggccttaatggggggcctacctcactttattgggttggccctaattgccctttttcaagtgggaaaacttttttt

SEQ ID NO: 8609 - DNA, 398 bp, Zea mays
  Clone ID: LIB3150-023-Q1-N1-H10
aaaccaaacagtgccgcagtatcccaagtcccaacaaggtcaagtcgcgtggattcgccactagcgggtattgattaccttgccgccccttgaccaaaccaaatcaacacaagtccccattgcttgcaccctacagctcctcacacccaaggtatggaggaggcaccaacgagggagccgaagaggctgcgcgaggacgccgcggttacttccgccgcggcggcggctgaggagcctcattacgtgtacctgcctatcgccgacgccatgaatgttcccggcgtccgggtttgcctcttcgccgttgtctccgaaatcggcatcaccgaccgcagccgtggcacggatttcactcttaggttgaggattgtggatcaatcatgcatggatggaatctc

SEQ ID NO: 8610 - DNA, 146 bp, Zea mays
  Clone ID: LIB3150-023-Q1-N1-H11
gcgaggcaaaagcattgcgaccacagggggcgctctcttcacggccatttttttttttacataccactctagcagaggaggtgatggcggtcacgatcacgtgggtgaaggcgaggcatatcttttacagccgcggcaaccccacc

SEQ ID NO: 8611 - DNA, 384 bp, Zea mays
  Clone ID: LIB3150-023-Q1-N1-H2
cttcgggttttgccttttgcgcctcattttcggcctttgtccctggcaggtcaagcctcgcctccaaccatgggtaaagagaagtcccacatcaacattgtggttattggccatgtcgactctggcaagtcgaccaccacaggacaccttatctacaagcttggaggcattgacaagcgtgtgatcgagaggtttgagaaggaggctgctgaaatgaacaagcggtccttcaagtacgcctgggtgctcgacaagctcaaggctgagcgtgagagaggtatcaccattgatattgctctgtggaagtttgagaccaccaagtactactgcacggtcattgatgcccctggacaccgtgacttcatcaagaacatgatcactggt

SEQ ID NO: 8612 - DNA, 405 bp, Zea mays
  Clone ID: LIB3150-023-Q1-N1-H3
ttccgttcaaccggaatgaaggaaccttaagccaaccgtttcttccgcccgttgcctgtcttcgttttggccgccgtgaaggtttccgttaaggccgccgcggggaaccccgacacgctcggcgattgcccgttctcgcagagggtgctgctcacgctggaggagaagaaggtcccgtacgaggtgaagctcgtcgacctcggcaacaagcccgaatggtttctgaacatcagcccagagggtaaggtgcctttgttcaacggtggagatggcaaatgcattgctgattctgatgtaatcacccaagtcattgaggagaagttcccgactccttctctggtcacccctccagaatatgcatcagtgggatcaaagattttcccagcctttgtcaagttcttgaag

SEQ ID NO: 8613 - DNA, 394 bp, Zea mays
  Clone ID: LIB3150-023-Q1-N1-H4
caacaagcttggtggccttctaaggcacagtgctctggtgagcggtatcactggtggctcttctcctgcagtgttcaatgctgcacggctcatgtctaccaagctatttattggcggtcttgactggggtgttgatgacatgaaactaagagaagcatttagcagctttggagaggttactgaagcgagggtgatcacagacagggagactgggaggtcaagacgctttggctttgtgaactactccgacagtgatgctgccaaggaagctatttctgcaatggatggcaaggaaattgatgggcggcatgtacgtgtcaacatggctaatgagagacctgctgggaacccgggtggtggtggctatagccgcggccgctatagatgtggtggc

SEQ ID NO: 8614 - DNA, 334 bp, Zea mays
  Clone ID: LIB3150-023-Q1-N1-H5
ctgggagtggcatatctgtttctgttgatggcacatctattgccccagaatcttattatacctatccttcagtcactgtggctgcaagcgctgtaacagctgaacattctggatactacgcttcatcagtctctgccatttctagcagtgcagcagatatcaaaacaagctcagcttctcttgtttctgcaaatagcaattcggatctaaaaaatcctgataatgttatatccaatgatgcaagtattgtgcctttcacccaagctgtagtagcaacatcagctgcaggaacgacatctgttcttgaaagttctacacagccttctagcagcac

SEQ ID NO: 8615 - DNA, 270 bp, Zea mays
  Clone ID: LIB3150-023-Q1-N1-H6
ctttaaagcgaacccacccgtccgcaaggattctgaaattgtggttggaaaggagcaagctcgagctaaagtaacacaaagcattgtctttgtaaccggcgaagcttctccttatgcaaagtctgggggtctaggagatgtttgtggttcattgccagttgctcttgctgctcgtggtcaccgtgtgatggttgtaatgcccagatatttaaatggtacctccgataagaattatgcaaatgcattttacacagaaaaacacattcggat

SEQ ID NO: 8616 - DNA, 124 bp, Zea mays
  Clone ID: LIB3150-023-Q1-N1-H7
gctaagcatttcaagcgcatcaatgtggggcttatgtcacagtcagggcaggttgacttctaccagtacatgacagagagggacataatcgttttccttctcgagcatgaacactattaccagc

SEQ ID NO: 8617 - DNA, 71 bp, Zea mays
  Clone ID: LIB3150-024-Q1-N1-A11
gtggaatttacgatgcattcgaagtgagtggtgtacacccaacaacggtaggtgttacacctgtcccaaca

SEQ ID NO: 8618 - DNA, 117 bp, Zea mays
  Clone ID: LIB3150-024-Q1-N1-B9
cggagactgagcgagaagccgggccggggctcctcctttcttcgacgtcaagcttcgccccactccatggattcgatctgggaggcgaggagctgaggccaggacagggggaggtgc

SEQ ID NO: 8619 - DNA, 111 bp, Zea mays
  Clone ID: LIB3150-024-Q1-N1-F9
tcgggcttctcctccccctccggggcgggggcgggttcgtgaggatctcctgtgttcgatatcgtgggtgagcggatcgagatggctgcttcagatgttgagaaccgttgc

SEQ ID NO: 8620 - DNA, 383 bp, Zea mays
  Clone ID: LIB3150-025-Q1-N1-A10
tcgggaccactctgtcgaccacatttacagggcatcaacggtccttccaagtgagctccaatcccctgtctgtagatggagagggtgctaaaggatgacgccgtctaggataagggcgagcgcgccaggatggcatcgtttgttggggccattgcaatctcggatttggtgaagaccacattgggcccaaaaggaatggacaagatcctgcaatcaactggcagaggacgtaatgtgactgttacaaatgatggggctaccattttgaaagtacttcacattgacaatcctgcttcaaaggtccttgttgacatcttaaaaagtcaagatgacgaagttggtgatgggacaacttttgttgttttctagctggagaacttttt

SEQ ID NO: 8621 - DNA, 331 bp, Zea mays
  Clone ID: LIB3150-025-Q1-N1-A12
ggaccactctgtcgaccacatctgcggggcatcaacggttcttcctagtgagctccaatcccctgtctgtagatggagagggtgctaaaggatgacgccgtctatgaaaaaggcgagcgcgccctgatggcatcgatagttggggccatggctatcttctgatttggtaagaccacattggtccccaaagggaagggacatgatcctgcaattaacctggcttaggacgtattgttactggttcaaaaagatggggctaccatttttgtatttctacttcacattgacaaatcttgttgctaagggcctttgttgacatttttctaaaagt

SEQ ID NO: 8622 - DNA, 382 bp, Zea mays
  unsure at all n locations
  Clone ID: LIB3150-025-Q1-N1-A9
gacccacgcggccgcacgccgccgccgccgcncgggccgggccccaacgcgaaggcccggagcaaggggcacgagccgcgggggaagagcaaggcggaaccgcaagcgcagcnnaaggagggnaaggcggagcgcgcccggcaacgcggagccaaggacaccggcggggcgcccaacaagcgccccaagagcaagggagggcgcaccaccaacgcgcgcgggcngaccgacaacgcgcagaagcaaaaaacggcgccgcgcgaggcggacaagaaaaaaaaagggggncccgcacgacccaccggcccaagaagaccccgggccaaccgcaggcgccncaacaagcaccagcgcncccnggaaaccgagagggaaaagaagc

SEQ ID NO: 8623 - DNA, 269 bp, Zea mays
  Clone ID: LIB3150-025-Q1-N1-B10
acagagctagacgcctgccgcgccgtcgcaagcatgctcctataatcacccactctcggtcgctcctccccgttgggccttcctccctgcttcccgatccttcacttacactgtctctctcctcctccctgcacgaccactggtggtctaccccccctcctttctggtcaatagcgctcaccagttttcttggatctttgagcttagaaaatgcccacgggacagagaattctctttcaccaaatcagctaattggtgaaacaacctac

SEQ ID NO: 8624 - DNA, 314 bp, Zea mays
  Clone ID: LIB3150-025-Q1-N1-B9
tcgcacgagcaaccgataatccgggggcggtgagatgttggtttatcaagatctcctatctggcgacgagctcctgtcggattcattcacctacaaggagctcgagaacggcgtcctgtgggaggtcgagggaaagtgggtcacccaacgtcctgttgatgttggacattggtgccaatccatccgccgagggtggtgaggacgaaagcgttgatgacacagctatgaaggagggtgatattgttgacacattccgcttacaggagcgaccttcttttgacaagaaatcatttgtgtcttacatcaaaaaatac

SEQ ID NO: 8625 - DNA, 326 bp, Zea mays
  Clone ID: LIB3150-025-Q1-N1-C11
taaactttgatcccttaaaatccacccattctttcctttaaacatgcccatcattcgggaagttgttcttattaccaacccctattttatatcccatcctttctacaagaaattcagtggaaacttcctttgtaaccttcttgggaagtggaaggagtcttaatactcttgccaatctattccttttggttgtcttgcttactatttaactgccccatcaaatttggctgatgttcttgcaaatacattccatgcactgttttatgtggtctttattctttcatcctgtgctcttttcttcaaagacattgattgaaatttctttt

SEQ ID NO: 8626 - DNA, 217 bp, Zea mays
  Clone ID: LIB3150-026-Q1-N1-A1
ctggaggaatttgagaaaataagagaggagaagaggaaagcactacttgcgttgaaagctgaagagaggaaagttgaagttgacaaggatctgcgttctctgcagccactttcaaacaagaaagaaaatgatgaagttttcattaagctgggttctgacaaggataagaagaaagaaaatgcttagcgtgatgagcgtgccaagaagtcggtgagca

SEQ ID NO: 8627 - DNA, 405 bp, Zea mays
  Clone ID: LIB3150-026-Q1-N1-A3
gcctgaaagacctgtacaagtcctttgtttctgagtaccctatcgagtcgatcgaagatccatttgatcaggatgactggagcacttatgccaaactcactgatgagattggacagaaagtgcagattgtaggagatgatcttctcgttaccaaccccaccagggtcgccaaggccatcaatgagaagacctgcaatgctctcctcttgaaggtgaaccaaatcgggtctgtgaccgagagtatcgaagctgtcaggatgtccaagcgcgcctgatggtgagtgatggcaagccacatgagtggcgagacagaggacaccttcattgctgacctctcatttggcctgtctacgggccaaatcaagactggagcttctttgccggtctgagcgcctggccaaatac

SEQ ID NO: 8628 - DNA, 409 bp, Zea mays
  Clone ID: LIB3150-026-Q1-N1-A4
gctgatcacccagagagaggctgtgagcagggagattaggaagattctgactgagagggccaacaacttcaatattgctctggatgatgtgtccatcacaagcctcagctttggaaaagagtttactcatgccattgaagccaagcaggttgctgcacaagaagctgagcgtgccaagttcattgttgagaaggctgagcaggacaagcgcagtgcagttatcagggcacagggtgaggctaagagcgctgagttgattggccaagccattgccaacaaccccgccttcctggctctgagacagattgaagctgccagggagatctcccacaccatggcggcctccagcaacaaggtgttccttgattccagggaccttctgcttggtcttcagcagctgaacgtgggg

SEQ ID NO: 8629 - DNA, 182 bp, Zea mays
  Clone ID: LIB3150-026-Q1-N1-A5
cctcgctagcctcgcggagccggcgcacccagcgaccctcccgaagtctaaccctagatccggaccggccatggcgtcccgccgggtcgtctcctcgctccttcgctccgcctcccgcctacgtgccgactcgcccgccgcgccgcgcccgcgcggggcgccggaccagccgtccccggtcg

SEQ ID NO: 8630 - DNA, 142 bp, Zea mays
  Clone ID: LIB3150-026-Q1-N1-A6
tctttttgtcatccaaatttcggggggggtggtgtattttgctggagtgacacctaattatctactttggaacgtgttcttgtaaatgcgttaatggtcaaacccatgttttttttttcctttgtctaattctttcgccata

SEQ ID NO: 8631 - DNA, 360 bp, Zea mays
  Clone ID: LIB3150-026-Q1-N1-A7
gccgagtcgaaaggatggttcggaaatgatgagggtgtaagaagccgagcactcaccgaggagcatgcacgagatagttttgaaaacctcctatttagtgtgtgccgtttcagagagctaactggaagatacccacagaacataactgttgttagctacgatttcaaggaggaacgttttgcacaactgcacagaaccgcactcggattcccggaaggaaggttcttcttctcaggtacaccagctacgccttctgcaagggaggctgctctgaaaggcgaagcagctgtccgagctcagttccttgaagacccgtatggatgtctaggatctcttcatgtaaagaggctgaagcgggac

SEQ ID NO: 8632 - DNA, 405 bp, Zea mays
  Clone ID: LIB3150-026-Q1-N1-A8
gaaaaccctagccgccgccaccgaagcggcctcccaggtaagcaggatcgtccagcccgccgccgccatgaagcgcaatccccgcgtcacgagctcccgccggaagtgccgcaaggcgcactttacggccccgtcctccgtccgccgcgttctcatgtccgcggggctgtcgacggagctccgccacaagtacaacgtgcgctccatcccgatccgcaaggacgacgaggtgcaggtcgtgcgcggcacctacaagggccgtgaggggaaggtggtgcaggtgtaccgccgccgctgggtcatccacgtcgagcggatcacccgcgagaaggtgaacggctccaccgtgaacgtgggcatccacccctccaaggtgatcgtcaccaagctgaagctcgacaagga

SEQ ID NO: 8633 - DNA, 394 bp, Zea mays
  Clone ID: LIB3150-026-Q1-N1-A9
tccagatattcgcagttgaccgggtcctcggagcacgatgaagtttgttgctgcctacttgcttgctgtcctcgctgggaacgccagcccctccgctgaggatttgactgccattctggagtcagttggctgtgaagttgacaatgaaaggatggaactcctgctgtcccaactgagcggtaaggacatcaccgagctcattgccgcgggcagggagaagtttgcttcagtcccatgtggtggcggtggtgtcgctgttgcggcagcttcacctgctgctggcggagctgctcctacagctgaggcaaagaaagaagagaaggtggaagagaaggaagaaagcgatgatgatatgggcttcagcctcttcgactaggctgcacagtcatcacag

SEQ ID NO: 8634 - DNA, 272 bp, Zea mays
  Clone ID: LIB3150-026-Q1-N1-B1
gttactaaccccccaatagaaattgatttcacgcctcccttcagaaggatagatatgattaaagatttggaggctatggccaatctcagtataccaaaagatctatcaagtgatgaagcgaatcgttatttgatagaagcatgtgtgaagtatgatgtgaaatgtccacctccccaaacgacatcgcggttgcttgacaagttggttggccatttcttggaggagacatgtgtgaatccaacatttatcatcaatcattcagagataatgag

SEQ ID NO: 8635 - DNA, 367 bp, Zea mays
  Clone ID: LIB3150-026-Q1-N1-B10
aagggcattgactacacatcttatcacgtcaatcctctcaccggcaaaaacatgaatgtggacttcttccgcatgaacccttccgcgaagctccctgtcttccagaatggagcgcatgtcatctatcgcgctatcgatattattcagtacatagacagacttgcagtgcatttaagtggtgaaatcccccctgtgaacactgaggtccaccaatggatgcagaaagttgatgcttggaaccctgagatgttcaccctcacgcacaccccatccaagtaccgtgcgtttgtctccaagttcataaagcgggtgctgattgctcgcatggctcaagcccctgatttagccagcatgtatcatgtcaagc

SEQ ID NO: 8636 - DNA, 393 bp, Zea mays
  Clone ID: LIB3150-026-Q1-N1-B11
ggcgtcacccgccatgccgatggctcccccggccaccccgctccggccgtggggccccaccgagccccgcaagggtgctgacatcctcgtcgagtccctcgagcgctgcggcgtccgcgacgtcttcgcctaccccggcggcgcgtccatggagatccaccaggcactcacccgctcccccgtcatcgccaaccacctcttccgccacgagcaaggggaggcctttgccgcctccggctacgcgcgctcctcgggccgcgtcggcgtctgcatcgccacctccggccccggcgccaccaacctagtctccgcgctcgccgacgcgctgctcgattccgtccccatggtcgccatcacgggacaggtgccgcgacgcatgattggcaccgacgc

SEQ ID NO: 8637 - DNA, 392 bp, Zea mays
  Clone ID: LIB3150-026-Q1-N1-B12
gaactccatgtccactgcgaccgcgaccctggccgccgcgcgatccccggctgtcgcgcttctcagcctgcgccgccgcgcacccgcggctgcccccattcgcttccccggtctccgcgtcggctctggttgccgtcacatagctatggcttccgcggcgcacgcccgcgcccccaccgacccgcttcccaagggtgctgatttatttttccgggcagtaatctcgaacatggaaaaggtttatttgagcaggaatcctacagccaaaaccattctggagcttgtgcgatcttatgatggtgatcatatttgctatgatcactttgctttccggacatttggggtcaatggttatggtataaactcactttctgattttttcactgattttg

SEQ ID NO: 8638 - DNA, 352 bp, Zea mays
  Clone ID: LIB3150-026-Q1-N1-B2
ctttgccagcgccgccgaacccgccaccagccttctcccatcctcgaagcacggaaggctcccagaaggagctctcacctcgcagccatctctggcacgtccgtccttcttctccctcggtccctccccttctccacagctatcggattggcgttggagtggagatcgacccgggctcggaattcccttcgttgttaattttctaggaagattggggtttcagctcaaactcccatgctcgacgctgaggacgaccctggcgggagatgacgaggatcttcgtgcagcgcgggaccgccggctcctcgtccagctccggccgctcgggcacgcagccagtgcagccggcagc

SEQ ID NO: 8639 - DNA, 259 bp, Zea mays
  Clone ID: LIB3150-026-Q1-N1-B3
tgaaggtgaactggagggtgatggcgaggatgatctgcttatggaaagggagttgatatgactgttgggcgcgaagagtgatcaccttattgctagatctaggctggaggctaggttacgacggatggtaaccactggggtttatattgctactaagaggaagaccactaatgtagcagatgatagagtggcagcaagattcgcggccttgatgctattggatacagttgatgatcatagagctcattattattcagag

SEQ ID NO: 8640 - DNA, 410 bp, Zea mays
  Clone ID: LIB3150-026-Q1-N1-B5
aatcttgtcatttcaagaatcaagctgctgcgcaacaggagggagttacaactaataaatatgcgcaaagaaatggttcaatatcttcagactggccaggaatcaatcgcgaggattcgagtggagcacattattcgggagcaaaatatattggctgcctatgagatcgttgagcttttctgtgaatttgttctggcaagagtccctattgttgaggtccaaaaggaatgccccttagaactgcgtgaagccattgctagtataatctttgcatcacgaaggtgttcagacttgcctgagctaatgcatctccgtaatttgtttaccaccaagtatggaaaggagtctgctgctggtgctatggaattgcgccccgacagcagtgtcaaccgcacaataattgaaaagct

SEQ ID NO: 8641 - DNA, 328 bp, Zea mays
  Clone ID: LIB3150-026-Q1-N1-B8
gcgattataagagatcgatgtgtgcgtctaaacaagtagccgctcttctagtccttgtaacggattcttctaccaatcccagcctcctgaggggtggtaagccatcattgagcgaagaacagaaggacaagattctagaggaatgcgaccggatcatacgtgtcggctaccccatctatgttgtggcccacgcatagttcctgttgcgatgctgtacgagcgggtgagaacacaaacatggactatgtggttctcctgctgacaaacgacgaggaggacatgtgcggcatcactaaaatcctggcgctccatgggctctgcgaacttt

SEQ ID NO: 8642 - DNA, 97 bp, Zea mays
  Clone ID: LIB3150-026-Q1-N1-C1
tcggcgccattccttactcttcttcgaagccatcgttcccgtcccaaccttcccggacttcaagggcaaaagcttcaacctccaaattgtgaaaggg

SEQ ID NO: 8643 - DNA, 394 bp, Zea mays
  Clone ID: LIB3150-026-Q1-N1-C11
gtcgagccgtccgtgagggcgcgtccagcacggcgcatcaaacaccagtccgtgaccgcttttccgacggcagcattgatgctgacgcctcagttgactccgatgaacgtacctgggacggtacccgttctgaagacttatcaagtccgttttttcgattgttacgctatctttcgctatcttggtcgcttgaaggatgacaacaagtcttttttggtcttcccatatggaacaagcccacgttgtgcaatgtatggattttgtcacatcacaatgtgatccttggtgttgcatgagtctcgtatccaaagcttgagtaccttcattatgttagtacaacttatgaaactgctattttttcattgatgaagtcgcttggtgccttgaacacaca

SEQ ID NO: 8644 - DNA, 392 bp, Zea mays
  Clone ID: LIB3150-026-Q1-N1-C12
cttcaaagcacttattgctgcagaatacagtgggatcaaggttgagttgaccaaggattttgagatgggtgtctccaacaagacccctgagtttcttaagatgaacccccttgggaaggttcctgttctggagactcctgatggccctgtttttgagagtaatgctatcgcacgctatgttgctcgcttgaaggatgacaaccctctttttgggtcttcccatattgaacaagcccacgttgagcaatggatggattttgccgcatcagaagttgatcctggtgttgcatggtacttgtatccaaggcttgggtacctcccttatgttagcacaactgaggaaacagctatttcttcattgaagaggtcgcttggtgctctgaacacacacc

SEQ ID NO: 8645 - DNA, 301 bp, Zea mays
  Clone ID: LIB3150-026-Q1-N1-C2
cccgtcgcatcccatcccactaccacccatctcgtcgtccgccgattcgatccggttcttccaacccaggggcagtgatggcgacgaagaggagcgtgggcaccctcggcgaggcggatctgaaggggaagaaggggttcgtgcgcgccgacctcaacgtcccgctcgacgatgcccagaagatcaccgacgacacccgcatccgcgcctccgtccccaccatcaagttcctcctcgagaagggcgccaaggtcatcctcgccagccacctgggtcgtccaaaaggtgtcaccccaaagta

SEQ ID NO: 8646 - DNA, 355 bp, Zea mays
  Clone ID: LIB3150-026-Q1-N1-C3
gtggggtgacccgagtggccgcaggcaggtggcctctggtacctgtacctccaaagccgcgcgcggggcccggcagtctccactggctgtcgcctgggccccgccctgggagccaggagaggaagggggtggtggccggaagcgcaacctggccttgcttgccgcctctgctcgcgggacggtagagagaatggagagaatcgcctcgctaggagtagtacggagtgctgccgtgctggttggttggtgttcaactctctcatcttttgggaccggtggtcaccaaaaaaacagcatgtttgtagtgcgccaacattcgtgctgatcaactaatcactgcgttgtttttggtggt

SEQ ID NO: 8647 - DNA, 97 bp, Zea mays
  Clone ID: LIB3150-026-Q1-N1-C4
gtgggataatgcttcttggaatagtcggattttgtatattattggctttgatgatagctggtatttatttggcaagaacatcaaaatatactggaaa

SEQ ID NO: 8648 - DNA, 408 bp, Zea mays
  Clone ID: LIB3150-026-Q1-N1-C5
cagaccattagctttatctactccagagcgcagaagaacccgatcgacaccatgagggtgttgctcgttgccctcgctctcctggctctcgctgcgagcgccacctccacgcatacaagcggcggctgcggctgccagccaccgccgccggttcatctaccgccgccggtgcatctgccacctccggttcacctgccacctccggtgcatctcccaccgccggtccacctgccgccgccggtccacctgccaccgccggtccatgtgccgccgccggttcatctgccgccgccaccatgccactaccctactcaaccgccccggcctcagcctcatccccagccacacccatgctcgtgccaacagccgcatccaagcccgtgccagctgcagggaacctgctgcgtt

SEQ ID NO: 8649 - DNA, 194 bp, Zea mays
  Clone ID: LIB3150-026-Q1-N1-C6
gccggataatgctatctcacaacaaccgcatcttgtatatcatcgcctctagatcatatcttttctactcatttgccaagatcatcaaaaaatactagcaaactctctcatgcatcaaacttttttcacttactactactttattaacccactcttctcttcaagccaagttataaatcccttcatataacctt

SEQ ID NO: 8650 - DNA, 411 bp, Zea mays
  Clone ID: LIB3150-026-Q1-N1-C8
gggattgttaaggtatcttgcattagcgttggtcggatgccattattgaaaaggcatgatcggactttcaagttggcggatccttctcctgagcattgcccaccaggagagtttgtccgggaaatcccactgcctacccggatccctgaagatgccactctggaagcataccgcgatgaaacggggacaggcctggagattattgtcccaaagtaccgtgttggccctgaagaacatgaggtgcatgtgtccatgagacctcccttgtcatggtgccaatgaaacttgttccgaggtgtgtgatggatgatgcccttgtagtagttactggtccatccttgttagcgcttgactgatgttttgatttctcctaaccctatatagctcgaggtgagacacatctggtgcgga

SEQ ID NO: 8651 - DNA, 396 bp, Zea mays
  Clone ID: LIB3150-026-Q1-N1-C9
acacaccacaccacacctcctcgcttgcactccgctcgtctgacatctcgtcccgtcctttcgtttcgaagcctcgcgagccccgacgatggccaccgccgcggtgtcggtcgacgagaagctcgacaagcttcgcgccgaggtcgccaagctcgaccagatcagcgagaacgagaagtccgggttcatcagcctcgtgtcacgctacctcagtggggaagcggagcagatcgagtggagcaagatccagacccctacggatgaggtggtggtgccctacgataccgtcgcgtcgccttccgaagatctcgaggagacgaaaaagctgctggattagctcgttgggcttaagcttaacgggaggcttgggacgtccataggctgttctgggcccca

SEQ ID NO: 8652 - DNA, 406 bp, Zea mays
  Clone ID: LIB3150-026-Q1-N1-D11
gcctcactgacaagagcaagctcgatgcgcagccggagctgttcatccacattgtaccagacaaggcttcgaacacgctctccatcatcgacagcggcatcggcatgaccaagtccgaccttgtcaacaacctcggtaccatcgccaggtccgggaccaaggagttcatggaagcccttgctgctggcgctgatgtgtctatgattgggcagttcggtgtcggtttctactctgcctacctcgtcgccgagagggtcgtcgtgaccaccaagcataacgatgacgagcagtacgtgtgggaatcccatgcgggcgggtcgttcactgttactcgtgacacgtctggggagcagcttggcaggggtactaagattacacttttcctcaaggaagatcagttagaata

SEQ ID NO: 8653 - DNA, 381 bp, Zea mays
  Clone ID: LIB3150-026-Q1-N1-D12
cggagcacgactcacgcagagccgcagagatccgtcacactgcaagttttgaaaactgaactgtaagatggcatcagcagagctttcccgtgaggaaaatgtgtacatggcgaagctcgccgagcaggcagagaggtacgaggaaatggttgagttcatggagaaggtagcgaaaactgttgactcggaggagctcactgtggaggagcgcaacctcctgtctgttgcatacaagaacgtcattggagcccgccgtgcctcatggcgcatcatctcctccatcgagcagaaggaggagggtcgaggcaatgaggaccgtgtaacactcatcaaggactaccgtggcaagattgaaactgagctcaccaagatctgtgatgg

SEQ ID NO: 8654 - DNA, 297 bp, Zea mays
  Clone ID: LIB3150-026-Q1-N1-D2
gcccctgcggtctcccgagtcccgaagcatccccttccaaaaccctcgccgcgccgcagccacccttgcttccgcacgctatcgcccgggaccagccatctatggcggcgtccctgctcctccgcgccgtgcgccgaagggagcttgcgtcccctctcggatccctgggtgccagcatacagtcaacatgtgttgccaacatatgctcaaaatggggaaggtttgcaagacctttcagtgcaaaagctgctggaaatgaggttattgggattgatttggggacaacgaactcatgtg

SEQ ID NO: 8655 - DNA, 309 bp, Zea mays
  Clone ID: LIB3150-026-Q1-N1-D3
gaccattagctttatctactccagagcgcagaagaacccgatcgacaccatgagggtgttgctcgttgccctcgctctcctggctctcgctgcgagcgccacctccacgcatacaagcggcggctgcggctgccagccaccgccgccggttcatctaccgccgccggtgcatctgccaccttcggttcacctgccacctccggtgcatcttccaccgccggtccacctgccgccgccggtccacctgccaccgccggtccatgtgccgccgccggttcatctgccgccgccaccatgccactaccctac

SEQ ID NO: 8656 - DNA, 304 bp, Zea mays
  Clone ID: LIB3150-026-Q1-N1-D4
ccagccgtcgtctgctgcggactccggctgcagtttggtctgtttcttgcaagttgctcttgcggtagttcccccaactgtcaccatgcataacgaggagggtcagactgtggacctctatgttcccaggaagtgctcggccacaaacaggatcatcactgtcaaggaccatgcctctgtccagatcaacattggccacttggatgccaatggcctgtatgatggtcacttcacaacatttgctctctctgggtttgtccgtgctcacggcgatgccaacagctccttggacaggcttgggcac

SEQ ID NO: 8657 - DNA, 408 bp, Zea mays
  Clone ID: LIB3150-026-Q1-N1-D6
caaaaaccctcgctccccacaacccgccgccgcccacgccgccgcctgtaccagcggcgtcaagatgagtcggcaccctgaagtgaagtgggctcagaggatcgacaaggtttacatcactgtacagttacctgatgccaaggacgctaaggtcaatttggaaccagatggtgtcttcacattctctggcagtgttggtacaaacttatatgaattgaaactagatctgaatgacaaagtaaacgttgaggctagcaaaataagtgtgggtgtcaggtccatattctgtattgtagaaaaagctgaagccaaatggtggaagaaacttgttcgagatgatcaaagggcacctcactttgtgaaagttgattgggacaaatgggttgacgaagatgatgatggtgctga

SEQ ID NO: 8658 - DNA, 403 bp, Zea mays
  Clone ID: LIB3150-026-Q1-N1-D7
cgcctctcctcctctcctcccccacccgtccatcgccccctccctccggtctgcgctcccacagcctcacccctgcgcccccgccgattcgcgtcgccctttgttggaaggaacgatggagcagaccttcatcatgatcaagcccgacggcgtccagcggggcctgatcggggacatcatcagtcgcttcgagaagaaagggttctacctcaaggggatgaagttcatgaacgtggagaggtccttcgcgcagcagcactacgctgacctttccgacaagcctttcttccccgggttggtggagtacatcatttccggccccgtggtggcgatggtgtgggaggggaaggacgtcgtgttgactggccgcaggatcattggggccaccaggccttgggaggca

SEQ ID NO: 8659 - DNA, 397 bp, Zea mays
  unsure at all n locations
  Clone ID: LIB3150-026-Q1-N1-D8
gcttcaggggctactcttccagatggcagataagctctcggtcctggtggagatcaatgagagggcatacgaggcaagaactggtggtgctctcgagggggtaccgcccaggcgcaggggtgagggtcaggataatatgggaaagtggcaggataactttgtctcgtcacaggggcggcagggtggtggcaaccggtttggatactccggcagaggtgcaatatctggtcaaagtggtggtggacaccagagggacaggggcaatcagggttaccgcgggggctatggtggcgtttcaaggtttcaggatgcaaggggtcgcaaccagtctaatccatcanccagaggtggtgatggtggtgcacgcatggtgaacctgaacagggttggtagagtt

SEQ ID NO: 8660 - DNA, 406 bp, Zea mays
  Clone ID: LIB3150-026-Q1-N1-D9
gacgcagtcggctgccgcagactggtagtagccggcgcgccgtcaccgtatcctcagatcagcggcgagcagataccacaccactctactgacgcccgacgagcagtgtaacattttccttcagccatgggtaaggagaagactcacatcaacattgtggtcattggccatgtcgactctggcaagtcgaccaccactggccacctgatctacaagcttggaggtattgacaagcgagtgattgagaggttcgagaaagaggctgccgagatgaacaagcggtcattcaagtatgcgtgggtgcttgacaagctcaaggctgagcgtgagagaggtattacaattgatattgccctgtggaagttcgagaccaccaagtactactgcactgttattgatgccccgg

SEQ ID NO: 8661 - DNA, 78 bp, Zea mays
  Clone ID: LIB3150-026-Q1-N1-E1
tcgggcgtcaaagatcgcttctacttacagtgatgtgttcactgccacagtactagatgtagagaaaatgcaagaact

SEQ ID NO: 8662 - DNA, 381 bp, Zea mays
  Clone ID: LIB3150-026-Q1-N1-E11
gccacccggttctccctcgctccagatctcccttcgcagccggccagggaccccttcacagcgcgggagatggctgatcaggaggccccagttgcagttgaggcaccaaccccagttcttggagagccaatggacttgatgactgcgctgcagctggtgatgaagaagtcaagtgctcatgatggacttgtgaagggtcttcgcgaggctgccaaggccattgagaagcatgctgctcagctttgcgttcttgctgaggactgtgaccagccagattatgtcaagctggtgaaggcgctctgtgctgaacacaatgttcaccttgtcactgttcctgctgctaagactcttggcgagtgggctgggctttgcaagattgac

SEQ ID NO: 8663 - DNA, 243 bp, Zea mays
  Clone ID: LIB3150-026-Q1-N1-E12
cggacgcgtggggattctacaaggctcggtgcacgatttgtataaattttgcgatcaagttcacatggaagaattgccacctgacagaaaaagcaccacaatcattcagggattttcttttggagatgtaggataaccattatgatgctgaaacatttcgccgtaggtagtaagctaccatggataccatggatacagaggtaaagaggtcttggttggcatgacctctgtatccacattatt

SEQ ID NO: 8664 - DNA, 363 bp, Zea mays
  Clone ID: LIB3150-026-Q1-N1-E2
ggcgaggagtgtttggaggcgtaattctgaacatgcatttgcattggaaaaaacatgaaactgtgaaggtcatatgtaagccctgcaaaccagggcagatccaggaatatgcaaacgagatagcccgactgagcggtggcatccctgtcaacgtcattggagatgacaccatagtcttctatcgaggaaagagctatgttcagccagaagttatgtcacctgttgatacactgtcaaagaaaaaggcacttgaaaaatcaaaatacgaacagtcgctggagacagttcggcgtttcattgcaatatccgagaaggaacttgagctttattaccggcatgtcgcactttatggaatttcacaat

SEQ ID NO: 8665 - DNA, 333 bp, Zea mays
  Clone ID: LIB3150-026-Q1-N1-E3
gccgcatccaagcccgtgccagctgcagggaacctgcggcgttggcagcacccccatcctgggccagtgcgtcgagtttctgaggcatcagtgcagcccgacggcgacgccctactgctcgcctcagtgccagatgttgcggcagcagtgttgccagcagctcaggcaggtggagccgcaacaccggtaccaggcgatctttggcttggtcctacagtccattctgcagcagcagccgcaaagcggccaggtcacggtgctggtggcagctcacatagcgcaacaactgacggcgatgtgcggcctgcaacaatcgactccatgcccctacgc

SEQ ID NO: 8666 - DNA, 409 bp, Zea mays
  Clone ID: LIB3150-026-Q1-N1-E4
atcaaacaagtgccagcgccctctcgcagtcgccgcaatggagagcaccttcatcatgatcaagcctgacggcgtccagaggggcctcattggtgagatcatcagccgttttgagaagaagggcttctacctcaaggccttgaagcttgtgaacgtggagaggtcgtttgctgagaagcactacgccgatctcgcctccaagcccttcttccagggcctcgtggactacatcatctctggccctgtggtggccatggtctgggagggcaagagcgtcgtcacaactggccgcaagatcattggcgccaccaaccccctggcttctgagcccggcaccatccgtggcgactttgctgtcgacattggcaggaatgtcattcatggaagtgacagcattgagagtgctaat

SEQ ID NO: 8667 - DNA, 363 bp, Zea mays
  Clone ID: LIB3150-026-Q1-N1-E5
gtcaaacaaggcccagcaccctgggggagtctccgcaatggagagcaccttcatcatgatcaagcctgacggcgtccagaggggcctcattggtgagatcatcagccgttttgagaagaagggcttctacctcaaggccttgaagcttgtgaacgtggagaggtcgtttgctgagaagcactacgccgatctcgcctccaagcccttcttccagggcctcgtggactacatcatctttggccctgtggtggccatggtctgtgagggcaagagcgttgtctcaactggccgtaagatcattggcgccaccaaccccctggcttctgagcccggcaccatccgtggcgactttgctgtcgacat

SEQ ID NO: 8668 - DNA, 341 bp, Zea mays
  Clone ID: LIB3150-026-Q1-N1-E6
aactgatactcatgaccgccttgtgtggccaactgccgaaaatgcagcaaaggaacagcgggctgaagtacaccatggctttaatatgtctcagatacgatcaactgacctgctggatgaaccgactgtgcggatcaataccatacctgatccgcccgagcgacaatcataaaaatcaatccccagaagacagggtactggtagttgaaacggtcgctgctgctacacacatacaaagtgaagtaatgctggtatcatcttaagagagatcgatttttaataatgagccgcttaataccaacatggaaagctcaaacactataggatcttgccttaactga

SEQ ID NO: 8669 - DNA, 317 bp, Zea mays
  Clone ID: LIB3150-026-Q1-N1-E7
gcatgttggtggaagtcccaacggaggggttgatactcttctcattgattgaaaactcctactctccgtcatcaataccgacattgttgcatcaattaatgcttcaaaaccttctaatggttcgactgtggctgttttctgtttaggagccgatggtcttgccaaggtgcaaggattgctctagcgtcaaggatcatttgtgtttgacctgaaccccatctcattcttagtatcttggaagtttcggttgcactgaattttttgaacctctaagaccacaatatgtcatttctatgagttacttgctttatatgacc

SEQ ID NO: 8670 - DNA, 390 bp, Zea mays
  Clone ID: LIB3150-026-Q1-N1-E8
gtcctccccccaccccatgtcaacggccaccgcaccgtctccgtccccgtccccttctccctcgtctggaactcgccctctgctccggatcggcgcggcccgtcgtttcgccatggcatttccgtcatgggcggctctgctctttgcgggggttctggtggtggtgttggcggcggcgggagcggaagcgggaggagggagcgtctgcttcgaccggatgttcagcttcggggactcgctcacggataccggcaacttcctgctctccgtgcccgatgacttcccggaccccgcgcggaaccttccctacggccagaccttcttcggccgcccctccggccgttactccgacggccgcaacctgctcgacttcttcgcggaggcatttgg

SEQ ID NO: 8671 - DNA, 99 bp, Zea mays
  Clone ID: LIB3150-026-Q1-N1-F1
cgtcgccggtgggaggaataagaagaccaagcgcactgcgcccaagtctgacgatgtctacctcaagctcctcgtcaagctctaccggttcttggtcag

SEQ ID NO: 8672 - DNA, 395 bp, Zea mays
  Clone ID: LIB3150-026-Q1-N1-F10
tgtcattatacatgctcttcttcatagctatcttcttgaactatggtgtcccgctgcacttgattcgtgagctatatgagaccttccgcagcttcagaattcgcattgcagattacatacgttacagaaagatcacttccaacatgaatgaacgctttccagaagctacatcagaagagctcgatgcgagtgatgctacatgtattatttgccgtgaggagatgactacagcaaagaaactgctctgtgggcatctgttccatgtgcattgtctaaggtcatggctagagcgccaacacacttgccccacgtgcagagctccaatcgttcctgcagataatggacgtgctgcatcatcacgacaacatggagcccaggctggggttcaacctggc

SEQ ID NO: 8673 - DNA, 384 bp, Zea mays
  Clone ID: LIB3150-026-Q1-N1-F11
ggaagtttgcacagaaagccatgggcaccacggacgtcaggatcgatgtgaagctcaacaagcacatctggagcagcgggatcaggagcgtgccgcggagggttcgtgtgaggatcgcccgcaagaggaacgatgaggaggatgccaaggaggaactctactcccttgtcaccgtcgcggagatccctgccgagggcttgaaagggctggggaccaaagtcgttgacgaaaccgattaagctgtcgcgttctccacatctttagagagttcctagtttgtatttgcaacagcaaaaccttttgtatccaaggaagtttttgtattcacaaagttgtctatttctgcaacagaattgcatggctagttttcttttcatctctgcc

SEQ ID NO: 8674 - DNA, 387 bp, Zea mays
  Clone ID: LIB3150-026-Q1-N1-F12
gcaagatcaacgtcgtcgttcaagccagcggtagtagagactacgaccgaggctagctaagctaagagatggcggatcaccagtactcggcgtggacgacttccgctgctcgtcatcgggtcttctcctgtgcgctcatggctcttgttagttttgtggctgccggacgacccatggtgctcgccgacgccatcgtctttcacgtggcgaacaggtgcccgttcccggtgtggccggcgtccgcccctaacaccggccacccggtgctcgctggcggtggcttctacgtcccgcagggcaagtcgaggcgcgtcgtcgcgccggccaactggaacgggcgcttctgggctcgcaccgggtgcaacttcaccgcgaacggcatgggcg

SEQ ID NO: 8675 - DNA, 206 bp, Zea mays
  Clone ID: LIB3150-026-Q1-N1-F3
cttaattctaaactagtcggcgcctacggtctcgccggctccaggggcgtgcggcagaaaaagcacggcttgccggggcttctgacgacatgtgtgtgccgcagcaggcccgtccgcaaagctcggattaccggccggtgcttcaacaatgcatgttcctccttcaacggacctaacgccgagcaagatgagatcagttcctttct

SEQ ID NO: 8676 - DNA, 282 bp, Zea mays
  Clone ID: LIB3150-026-Q1-N1-F4
gcagggactccttttcttctttcttttgtgggaatggccgaagtacttggctggacatataggccacctatagttgctcattgtgatcgcaagcgggtcctttcatcttgggctccatactgtaggaatgtggtaccacttgaatatcaagttgaattttcaaaggtcaggtccctgtctccacgacaatttgttgaaaggttatcaaaggatcttagaataaaaggtgtcgtggcaggtgaaaattacaggtttggttacaaagcatctggtgacgcaact

SEQ ID NO: 8677 - DNA, 193 bp, Zea mays
  Clone ID: LIB3150-026-Q1-N1-F5
gcaggtacctcgcgcccgagacgcagccccgcgccaggagtaagtttgctcttttatccatattatcgatatggcgagggaggagaatgtctacatggccaagctggctgagcatgccctaaggtttgaagaggtggttgagtatatggatgaggcggcttcaacttgcaaatttgcgagacgcttacagatt

SEQ ID NO: 8678 - DNA, 405 bp, Zea mays
  Clone ID: LIB3150-026-Q1-N1-F7
ccaaatcggatctccaggccggcagaagttgagcggactgactggtcactgtagttcgatcgaatcccagtagggctgatacagttcgattcggcgggaggcatggcgttcgaaaagcacttcaagtacgtcatcctcagcggcggcgtcccggcggggtacgcggcgcgggagttcgccaagcaaggagttaagcctggggagcttgcaatcatctccaaggaggccgtggctccttacgagcgtcctgccctaagcaaaggttacctctttcctacgaatgctgcaagactcccaggattttatgtatgtgtgggaagtggtggagagaagctattgcctgagtggtactcaaagaaaggcattgagctgatccttaatacagaaattgtcaaagctgatctt

SEQ ID NO: 8679 - DNA, 330 bp, Zea mays
  Clone ID: LIB3150-026-Q1-N1-F8
cgccggcgcccggcggcgacccgaacgagcgctactcgctggacgaggtcgtctaccgctccagctcggggggcctcctcgacgtgcgccacgacatggaggcgctggcccgctacccggggtcctactggcgtgacctcttcgactcccgcgtcggccgcaccgcctggccctacggctcgggcgtctggtccaagaaggagttcgtgctccccgagatcgactccgaccacatcgtctccctcttcgagggcaactccaacctcttctgggcggagcgcctcggccgcgagcacctcggcgggatgaacgacctctgggtcaagcact

SEQ ID NO: 8680 - DNA, 159 bp, Zea mays
  Clone ID: LIB3150-026-Q1-N1-F9
tcgctaaaaaccctactcacgttatcaaggtgagcttagacccgggattcgccggctcgttttctagagcgagagatggacggtaggatgttcggtctcgatacccccctgatggtggcgcttcatcaccttctggacgtgcccgactgctactccggc

SEQ ID NO: 8681 - DNA, 302 bp, Zea mays
  Clone ID: LIB3150-026-Q1-N1-G1
tcgctcgtagagaggaaggaaaatattcccaaaccctaacttccgatcttgatggggaaaccttgcgttttctttgacattgccggcgggggggcccccgggggcccgattgggattgaactttacccccaccaaggggccaaaaacggggagaactttcccgcgctttgcaccggccaaaaagggcttggccaattccgggaagcggttcaattcaaagggttcaactttcaacggggtattcccgaagttatggtgcaagggcggggatttaacccggggaaacggaaccggggggaggt

SEQ ID NO: 8682 - DNA, 376 bp, Zea mays
  Clone ID: LIB3150-026-Q1-N1-G11
ggttaacgagggacttgttgagcgccgtgcggcgatcaagatggtagagccaggccacctggaccagcttctccatcctcagtttgagaacccatcggcgtacaaggaccaagtcattgccacgggcttaccggcgtcacctggggccgctgtgggccaggttgtattcactgctgaggatgctgaaacatggcattcccaagggaaatcagttattctggtgagggcggagaccagccctgaggacgtcggcggcatgcacgcggctgccggaatcctcacagaaagaggtggcatgacctcccatgccgccgtggtggcacgcgggtggggaaaatgctgtgtctcgggatgctctgggattcgtgtaaatgac

SEQ ID NO: 8683 - DNA, 254 bp, Zea mays
  Clone ID: LIB3150-026-Q1-N1-G12
gcccacgcccacgcccacgccgacccacccggatgcctacctcgcctacaccagagcgatgtcaggctgggacgagggctccgtgttctacagcgaccaggcgcaggtcccacgcagcggccccggcgtgaacccagccagccgcctcacccgtcagtccggccgtttgaagtgcaaggagtgcctccgcgggttcaccggcccgaccagcaactttccttaccgggagagcctactacactagccgaaccatg

SEQ ID NO: 8684 - DNA, 251 bp, Zea mays
  Clone ID: LIB3150-026-Q1-N1-G2
gttccatttccccatctcccagatccaattcgcgagttcttcctcctctgccgccatggcgctctctgtggagaagacctcgtctggacgggagtacaaggtcaaggatctctcgcaagcggacttcggtcgcctcgagattgagctggccgaggtcgaaatgcccggcctcatggcgtgccgcgccgagttcggcccgtccaagccctttgccggcgctaggatctcggggtctctttacatgaccattc

SEQ ID NO: 8685 - DNA, 334 bp, Zea mays
  Clone ID: LIB3150-026-Q1-N1-G3
gcaacatttatgttgcagacggcatgaacatggcaatacgaaaaatcagtgatacaggggttacaaccattgctgggggaaaatcaattagaggagggcacatagatgggcccagtgatgatgcaaaattctcaactgattttgaaatcaagtacatcagcagtagctgctctctcttggtcattgatagaggaaaccaagcaattcgagaaattccactcaacgatgatgactgtgcatatcagtatgaagcttgttttccactaaggtttgcattgctttgtgctgcttgcttctttggttatatgcttgggatgcttcaacgccggctttt

SEQ ID NO: 8686 - DNA, 363 bp, Zea mays
  Clone ID: LIB3150-026-Q1-N1-G4
agatgatagaagtgtcagcgcttaatcatgttatgtcaacacatgttctacaacaagcgcaacaaattcagtatttatatgatcaggctgttgaagctacaaataatgtggagcctgggaaaggccatgacgaccttggcaagcgctgcgccaagtactacgaggccggtgcccgctttgccaagtggcgcgctgttctcaagattggccccaatgagccatcacagcttgccatcgacctgaacgctcagggtctggctcgctatgccatcatctgccaggagaatggtctggtgccaattgttgagcctgagatccttgttgatggccctcatgacattgatcgctgcgcttacgtcactg

SEQ ID NO: 8687 - DNA, 377 bp, Zea mays
  Clone ID: LIB3150-026-Q1-N1-G5
gccgccgatcgaggacgacgccttccagcagctcgacgacatcgagtcgtccgcgctgctcccgcgacggttcggcagctcggcaacgttcgtggcgtccatccccgtggcagagtaccaggggcggctcctgcaggacacgcccggcgcgcaccagggccgccccgccggcgccctggccgtgcctcgcgagccgcttgacgcggacaccgtcgcggaggccatcagcgtcatttcgtgcttctacgaagacaagacggagtgggggcggcgcatcgggtggatctacgggtcggtgaccgaggacgtggtgaccgggtaccggatgcacaaccgcgggtggcggtccgtgtactgcgtgacgcggcgcgacgcgt

SEQ ID NO: 8688 - DNA, 396 bp, Zea mays
  Clone ID: LIB3150-026-Q1-N1-G7
atttttcctagccgccactttcttctctccctggcttcttcccccacgtgcagcgacgcccttcttccccaatagcatggagcagcggcttccctctcccagctcggcctcgccatcgcgcagggaagagcagacgcccagctctccctctccatcgcgcccccatccatggcgcccaagccctagtttcttcctcctgctgatttccccatggtgcagcagcccattcttcaccacacccagcagcggtagcagcttccatggaggacgcccagattttttttcacccctccttggcctcccttgcacaggggcagcagcctccatggccgacctctcctcctctgcgcagggcgcccctgttcccctgctccttctccctcgcacaacagcagc

SEQ ID NO: 8689 - DNA, 249 bp, Zea mays
  Clone ID: LIB3150-026-Q1-N1-G8
tcgggcttatcctccccctcttaccgagtgcttttcgggttagggttacttacggtttcgtggaagggcgattgcggctgctgatgcggagtaccgtacctttgtcggcgggcttgcctgggccaccaacaactgattcgctggagaatgcctttgccttctacggcgagatcctctactccaaggtcatcaccgaccgggagacggggaggtttcgcggtttatgctttgttaccttctcctccgata

SEQ ID NO: 8690 - DNA, 375 bp, Zea mays
  Clone ID: LIB3150-026-Q1-N1-G9
gcggcagctggtgtttcggtcccttctcgccctccgacggctggttggcagccggcgccggcgccgccaaacgctaggtgctgaggccttcgccagtgtcttcgacggcgacgagcacgtaccagcatcatgtcggaaagaggtcgcctggcaggacgattgattgataaccgcagcagagggtaccatgtagtccctctagttgaggatcccagaggccatcctgaagtcctcgtggatggggatcggaggggctactctgacattcgtggggttcagcaacgtcggggctaccctgacacccatctgcttgaggaacctatgggctaccctggtgttcgtgtggtcgaccataggggctattctggcagtcgt

SEQ ID NO: 8691 - DNA, 371 bp, Zea mays
  Clone ID: LIB3150-026-Q1-N1-H10
gcgcagaaaatgaatagcggacatcagcagattggaagacctactgaagaagacttaagaagttggggacatcactgtgacccatcaactgtacctgatactatactgcagtgttctgctggcgaagaggtttcttttgttttcaccaatcaggttgatggaaaacttgttccagttgaatctatggtgcgatcagcatctcatcaacaaaacggaatagcatccaccggagaaaaaggagtgcagattcccaattcttctagcatacctggaaagcaattcttaaatggcaagaatttgaagatgggatttcatttaaagaaatcggctttgaaatgttcaaccatatccagaccaataccaaattagtt

SEQ ID NO: 8692 - DNA, 352 bp, Zea mays
  Clone ID: LIB3150-026-Q1-N1-H11
ctctctggtgggcacgatgcgcggccacaacggcgaggtgacggcgatcgcgaccccgatcgacaactcgccgttcatcgtctcctcctcccgcgacaagtccctgctggtgtgggacctgaccaacccggtccactccaccccggaatccggcgccaccgccgactacggcgtccccttccgccgcctcaccggccactcccacttcgtccaggacgtcgtcctcagttccgacagccagttcgccctttccggctcctgggatggagagctccgcctctgggacctctccaccggcctcaccacccgccgcttcgtccgccacgagaaggatgtcctctccgttgccttc

SEQ ID NO: 8693 - DNA, 397 bp, Zea mays
  Clone ID: LIB3150-026-Q1-N1-H12
cgctttggatcgattggtttcgtaactggtgagggactgagggtctcggagtggattgatttgggattctgttcgaagatttgcggaggggggcaatggcgaccgcggggaaggtgatcaagtgcaaagctgcggtggcatgggaggccggcaagccactgtcgatcgaggaggtggaggtagcgcctccgcaggccatggaggtgcgcgtcaagatcctcttcacctcgctctgccacaccgacgtctacttctgggaggccaaggggcagactcccgtgttccctcggatctttggccacgaggctggaggtatcatagagagtgttggagagggtgtgactgacgtagctccgggcgaccatgtccttcctgtgttcactggggagtgcaagga

SEQ ID NO: 8694 - DNA, 329 bp, Zea mays
  Clone ID: LIB3150-026-Q1-N1-H3
gagggcagattcatggaccaagatcattcgatttggctgatctttctctaagcgagtacaagtataatttagctgctgaagatcattagattgagcactaccatatgtctactatcctttgcaattgatcaagaatggtgagctattctaaggaagcatctgaacaatatacctgctgtcctggagtgtcacagatcaaggttgagatgattccatcatacttataccaagattttcctagcaaggaatggtttgaacaatgttgtgattaagcaagggataataagtacttgctcttggatgacttaaaaagaatgagactgatcgta

SEQ ID NO: 8695 - DNA, 307 bp, Zea mays
  Clone ID: LIB3150-026-Q1-N1-H4
ctcctcttaaacgtttggcattaaaggcactatctaaggctttaagcgaggatgaacttttgtatcttaggttgcagtttaagctgcttgaacccagagatgggttcgtgtcactcgacaactttcggacggctctgacaagatactcaactgacgccatgagagaatcaagggttcttgagtttcagcatgcgttggaaccacttgcgtacagaaagatggactttgaagaattctgtgctgcagcaatcagcccgtaccagctggaagctttggaaaggtgggaagaaattgctggaacagcttt

SEQ ID NO: 8696 - DNA, 138 bp, Zea mays
  Clone ID: LIB3150-026-Q1-N1-H5
ctcttcttatgcgcctgccctcgcggggggactatatacctctagaagctacttaacatatgtctctcacgattaaggataatcagcttgaaccctacagatatggtttactatcactctgacaaacttattcaaaca

SEQ ID NO: 8697 - DNA, 402 bp, Zea mays
  Clone ID: LIB3150-026-Q1-N1-H7
ctttactcctatccactgcggcctggacgcgtgcgagaggcttgaccaagcagcagcagcagcagcagcgatggcgcctctgaagctgtacgggatgccgctgtcccccaacgtggtgcgcgtggccaccgtgctcaacgagaagggcctcgacttcgagatcgtccccgtcgacctcaccaccggcgcccacaagcagcccgacttcctcaccctcaaccctttcggccagatcccggctctcgtcgacggagacgaagtcctcttcgagtcccgtgcgatcaaccggtacatcgccagcaagtacgcgtcggagggcacggacctgctccccgcgacggcgtcggcggcgaagctggaggtgtggctagaggtggagtcgcaccacttctacccgaacgc

SEQ ID NO: 8698 - DNA, 290 bp, Zea mays
  Clone ID: LIB3150-026-Q1-N1-H9
gggctattccccttgctggagcagcttaatgagcatgctaagctctcgatgctgaggaatgccacatggacactatcaaacttctgccgagggaagccacaaccgaacttcgatcaggtcaaaccagcattgccagcacttcagcaacttatccactctcaagatgaggaggtcctaactgatgcctgtagagctctatcatacctatctgatgggactattgacataatccaagctgttattgaatctggcgtgttccctcaccttgtggaacttctgttgcatccttt

SEQ ID NO: 8699 - DNA, 387 bp, Zea mays
  Clone ID: LIB3150-027-Q1-N1-A1
ctccgcgccgccgctcccaacatcgatctcctctaccaaggacgcgctctctcttctcaccaccctgcagacgcagctcttcgaggccgtcgccgagctgcaagagaccctcgacctgcatgatgcgcgcgctcgccttgtccgtgaggcgcgtgccaaggatgcttcgctggtaacctttgcgaagaagctgcacgaggctcaccaggtacttgaccgcctcgtcgacgattacgctgactaccggcgcgatcccaaacgcccacgtggcgccgctgcggctgacgatcccgagccggcgtcggaaggcgacttcggcacattcctacactccagccttaagctggatgacatactgacctacgcgcaccgcataagttacacaac

SEQ ID NO: 8700 - DNA, 337 bp, Zea mays
  Clone ID: LIB3150-027-Q1-N1-A10
cggacgcgtgggcggacgcgtgggcgggcgcgtgggcggacgcgtgggcaggcctgccgccacagcaccgcggatagcagagcagagcggcagccaggtcggtcgtcgtcgtcgtcgtcagccatgagcaaggacaagcaccacaagcacgagcaccacctgcggcgttgctgcgggtgcatggcgtcgtgcctcctggcgctggtcctcatcgtggccttcgtctcgctggtggtgtacctggcgctgcgcccctcgaagccgttcttctacctgcaggacctgcagctgcgcaagcccatctcgctgggcgacccgtcgctgactgcgtcggcgc

SEQ ID NO: 8701 - DNA, 383 bp, Zea mays
  Clone ID: LIB3150-027-Q1-N1-A11
ccccaaccttccaggaaaaaaaacccggaatccgcacccatccatggccgccgccgccctgctgcgccgctcgccggcggcgcgcgcgctcctctctccggcgctctcgtcccgcctcgtcgcgtccaagccccactcttcctcccccacgcagccgccccccgaggcaaagggcgcctccagcacgaagaccttctcgatctaccggtgggacccggactcgccgtcgaccaagccgcacctcaaggactaccaggtggacctgtccgactgcgggccgatggtgctggacgcgctgctcaagatcaagaatgagcaggacccgtcgctcaccttccgccgcagctgccgcgagggcatctgcgggagctgcgccatgaaca

SEQ ID NO: 8702 - DNA, 403 bp, Zea mays
  Clone ID: LIB3150-027-Q1-N1-A12
ggcctcctcaagattggagcttcaacaagcgcacactgagctttggaacctcacctttagctaccttaagtccatggcacttgagtgtgttgttcaactaaacatacccaatgttattcacaactttggtggcaatgccactctacccagtattctctctgccatccaagttcctgaacataagaagccctaccttccacgcctcatgaggtttcttgtcgtatcaagtatcctttcatttgattctcccaccttaagggaggagggtacttaccacctcaccccattatcacgccttcttgtggatgacacccacattaatggctatgggagcctcggtccatttgtgctctccaaaccacaaagtaccatggtctatcggcacgtacttgtctgagtggtt

SEQ ID NO: 8703 - DNA, 348 bp, Zea mays
  Clone ID: LIB3150-027-Q1-N1-A2
ccgcaactgccgccgccactcccacgcccgcagccatgccgcccaagctcgacccgtcgcaggtggtggaggtgttcgtccgtgtgaccggcggcgaggtcggcgcagcgtcttcgctggcccccaagatcggcccgctcggtctttcccccaagaagatcggagaggacatcgccaaggagacggccaaggactggaagggcctccgcgtcaccgtcaagctcaccgtccagaaccggcaggccaaggtctccgtcgtcccctccgccgcggcgctcgtcatcaaagcgctcaaagagccagagagggaccgcaagaaggtcaagaacatcaagcacagcggcaaca

SEQ ID NO: 8704 - DNA, 346 bp, Zea mays
  Clone ID: LIB3150-027-Q1-N1-A3
tgaaatgccatgtgaagaacaaggatgtccgaaagtttttgaaccaacaaacactggctggcaactatttaaggaatgagaaaaaggttcacattcagtctcgcaaaattgcaactcaaacgacattcatattcatctcctggcatttcggctacactgtcgctcactgctactcttcgatgacgcccttgtcgctcacatagataccgtcctgagaggcgcatagacaggcggtattcgtacttcgcttattttcggaactaaaacttgttccattttctacctggcggcgctgcaactccaccccattgcgtcgacaccatgagggaatgcatctcgatccaca

SEQ ID NO: 8705 - DNA, 367 bp, Zea mays
  Clone ID: LIB3150-027-Q1-N1-A4
gagtacgtgaagcgcaattattagcgtcgggggaggaacatggggacgccgaagactgcatgggagccatgcccgaaccggatcctggacgacgtcaagctgcgacgttcggaatgagctcgcacgctatgatacgcctttcacttgatcaagggcatctacaactgcaacaactggatacgcatgttcatgggctcgcaggccgagcccatgaacaacgccagcgtaaagggcatcttcaacgagtgcggcagcctattatcaacattaactgctgcatagtctacgcgcgccagaaggaggatacatggaactacattatcgcaggcgcattcacgggtgggtgaatctatatgcaccagggcat

SEQ ID NO: 8706 - DNA, 378 bp, Zea mays
  Clone ID: LIB3150-027-Q1-N1-A6
gtcatgcagaggcaggtccacaaactagcctggagaattcggaaggtttaccgtcaccatcagggagaacacaacctgctgtttccccacgtggccaaagctttggacaaagaattatgggcaatatgatggataatcttttggttagaagtcttacatccaaatcaaaaggtcgagccgatgatattgctccaccctcacctgtgaaggcccctgatgatgatgagacagacaaggctgaaggggaagagagccctatgatggaaactgtccggagcaaatgtatcacacagttgctgctgctcggggcaattgacagcatacagaagaagtattggagcaagttaaaagctacacaacagatagcaataatggata

SEQ ID NO: 8707 - DNA, 282 bp, Zea mays
  Clone ID: LIB3150-027-Q1-N1-A7
gtcagactgcaaggttgaattccatatggcggggaaagtgtgtggtgtcacatctgacggtgaaactgccaagtgcaagaaggtggtctgggatccttcgcatttaccaaacaatgataggcagattgatggattatctcgtgcaattgctattatgatccacctaatacctaatacaaattaatatcactcgattcaaattattttacgtcagaaacaattttgacataaatcagacatgtatgtaatatggtgctaatacacgcacaatgttgcgccaat

SEQ ID NO: 8708 - DNA, 387 bp, Zea mays
  Clone ID: LIB3150-027-Q1-N1-A9
cttcgctccccgaagcaaaagcgcagagcgcatcaacgcagagtacgacagccatggcgactgcggcggcgcaatcccatgcggcatcgatggacgcgcgccggtgggacgagtcatcggaccgtcgcggcatgcttcgtgcccgcgacctctcgtgccgcaccctcttgcgtgcacgcttctttgaccacagcgacgacccggataccgacatcctactcgccggcgcctccagcgacggctccctcgcttgcttctacctttcatactgcatatgcgcatgttccgctacctgccaagtggagaccggcgccactctggtagatcctgtctgcatcgtgcaagcgcacagcggacctgcctacgacgtcaggtgttaccccgatc

SEQ ID NO: 8709 - DNA, 316 bp, Zea mays
  Clone ID: LIB3150-027-Q1-N1-B10
gcaacacacaactccttaccgtccgagaccccaagcaccagcacgggcgtggccgcggaggccaccatgggtgaggggaagaacaagaggatctccaagggaaagaatggtggcaagaaaaagacacgttgccctatctataagaatgatggctatgacatcaacgcaccggccgtgttcattgtgcgcaacatcgggaagactctcggatccaggacacaagttactatgattgcttctgatggtctgaagcacagagtctatgaggtttgcatagctgatcttcaaggtgacaaggatcaagcttacacgaaaa

SEQ ID NO: 8710 - DNA, 398 bp, Zea mays
  Clone ID: LIB3150-027-Q1-N1-B11
ctcgcctttgccccttctgtctcccttcgtccgtagcagaccaggaacgcccaaggcgctagcgtctccaagatggtgctgcaaaacgacattgacttactcaatccaccggcagagcttgagaagctaaagcacaagaagaagcggctagtccagtcccccaactccttcttcatggatgtcaagtgccagggctgtttcagcataaccactgtgttcagccactcccagactgtggttgtgtgcccaggctgccaaactgttctgtgccaacctaccggtgggaaggccaggctcaccgaggggtgctccttccgtcgcaagggcgattaagtcctgcttctcttaacgtgagaagagataaatttggtgttttgcaactttctcaagatatgtac

SEQ ID NO: 8711 - DNA, 408 bp, Zea mays
  Clone ID: LIB3150-027-Q1-N1-B2
ctccgacccgcagcagcgcctccattgctctctctcacgagtcccggcgttccagtggggggcattcatggcggggcagtccgacccgcacctgtccatcttctcgccctccgaggtggagttcgtggctgaggatgagattgacgaaatcgttcccaacatccgcatggacgccctcaacatgatctgcggggatttcgggcccttcttcccccagattcccaccaaggtgcctatctggctcgctgtcgcgctcaagaagcgtagcaagtgcaccatgcgcaccccggactggatgactgttgaccgcttgacacaggtattggaagcggaaagagagtcgccacgagaattccagccattaccattccactatattgaaatttctaagcttctgtttgatcatgc

SEQ ID NO: 8712 - DNA, 400 bp, Zea mays
  Clone ID: LIB3150-027-Q1-N1-B3
gccaccgatcgctcctctccactttcgacattccagttccactccgcctccgctgccggtcgccgactccgaaactccgacagtccgaccacaagaaggatgagtgaagaggataagactgctgcttctgctgagcagccgaagagggcccctaagctcaatgaaaggatcctctcttctctgtccaggaggtccgtagctgctcatccgtggcatgatcttgagatcggtcctgatgctcctgctgttttcaatgttgtaagtaccagcattaccttagaaccgtttgatgtgttatatgtttggtgctgtggggagtggggacttaggttgtctggaaccatctacgggaaggttgttgagatcacaaagggaagcaaagttaaatatgagcttgaca

SEQ ID NO: 8713 - DNA, 375 bp, Zea mays
  Clone ID: LIB3150-027-Q1-N1-B4
tcggcaaaaaccccacgagagagacgaatctgtgcgaatctctcggtggcgatggcgctctccgaccgctcccgcgagtcgctcctcccgagcttcctctacggctcctcggcgcgctctttcgctgccacaggagccgccgcgcgcctccctgtctcctccccggcgcctgccgcggctggagcaggaggcggcgtgccgttctcgatccaggcgcccaaggagaagatcgagatgtactcgccggccttctatgccgcctgcactgccggaggaatcgccagctgcgggctcacccacatggccgtcacgcctctcgacctcgtcaagtgcaatatgcagattgacccagcgaaatacaagagtatctcatct

SEQ ID NO: 8714 - DNA, 322 bp, Zea mays
  Clone ID: LIB3150-027-Q1-N1-B5
tgcattctttggctcacattcacagccacatgggctatcttaggaccaaactgagtgccgaatggtgcatgtgaatggctcgtcagacgcaccatcacagcacacggtatgtgcgctcaaatgacgtacccctggaactccctcttgctgaagcgtggaacactctgctaatgaatattgttgctttaaaaggatctgaaccttgaggaatggaacgaacaatgctaagtctagcgtttctcactattgtgcaagcacttatggtgaatggacttatgatttgcaggtttctcaaaattgttaaagcactgttactgaaaat

SEQ ID NO: 8715 - DNA, 367 bp, Zea mays
  Clone ID: LIB3150-027-Q1-N1-B6
gcagcagcagcaggcggcgccgaggagcggcatcccactcagtgcttgcaaccatggctaggggattgaagaagcacttgaagaggctcaatgcgcccaagcattggatgctcgacaagcttggcggagcttttgctcccaagccatcttctggacctcacaagtccagggagtgccttcctctgatcctcatcatcaagaacaggctcaagtatgctctgaactaccgtgaggtcatttctatcctgatgcaacgccatgtacttgttgatggcaaggtcaggactgacaagacctaccctgctgggttcatggatgtcatttccattcctaagacaatggagaactacaagctgctttatgacac

SEQ ID NO: 8716 - DNA, 330 bp, Zea mays
  Clone ID: LIB3150-027-Q1-N1-B7
cggccttctgcctgtgcgtagcctgctgcctctgatccactgatcagtggcctcgcctccccgcgttccgctcccccctgccgccccctgatcccgcgatcggcggggcgcccgccctctgcctctccgtgagcgtagcaaatccggcgactcgcacgccctacggcgaccgccccgacccgccggacgatctatatccacgggaagcatctgctatcatttcgggttcttcgaagtaatccaagaaaagttgcttccagatgtcaactgcaaaagtgttagatcctgcttttcacggtgctggccaaaacgtggggacagaaatatggc

SEQ ID NO: 8717 - DNA, 119 bp, Zea mays
  Clone ID: LIB3150-027-Q1-N1-B8
tcgggtcatcgtccacaagggcgatacggggatgttacccagccacctgcgtcttccacatggagtcaccctaatgtacagcttgcagcctcttgatacaacttgtctgatctgctaaa

SEQ ID NO: 8718 - DNA, 323 bp, Zea mays
  Clone ID: LIB3150-027-Q1-N1-B9
tcgtgagggtggatggaaggattggccagcgttcaggtgcacgaaatgggctctgttcttttggcccacgttatgggatgggtatgaacgtcgaaagtgggatgagtggaacttttgatgcaaactctggtttcatcagtaactccaatgggagagcaaatgggaacatacttcaatggaagttcgaatagattgagtacttctattgcgtatcttgattatgacataggatctaatgctagttctatgtctaatgattttaatgccagcgttaacttaccaccccaatatatcaaacatgattgctgctgttgccattggaa

SEQ ID NO: 8719 - DNA, 382 bp, Zea mays
  Clone ID: LIB3150-027-Q1-N1-C10
ggatgagaaggtggactacctcaacctgccctgccccgtgcccttcgaggagatccagcgcgaggctctcatgtctttgaagcctgaactttttgaaggattgaggtttgacttcacaaaaggattgaatcagaagttttctcttagccacagcatttttatgggctccttagaagttccagcccaggcatctgaaactattaaagttccaactgcacattatgaatttggcgccaattttttagatccaaagttaatgctcattggaagggtgatgacagatggaaggcttaatgctcgtgtgaaatgtgatttgacagacaatctgacgttgaaagtaaatgcacagcttacccaagaggcacattactcacaagggatg

SEQ ID NO: 8720 - DNA, 371 bp, Zea mays
  Clone ID: LIB3150-027-Q1-N1-C11
gcagagataaataaaagtctgttagctcttaaggaatgcattcgagctcttgataatgatcagatacacattcctttcagaggaagcaaacttacagaggttcttcgtgattcatttgttggtaactctaggacggtgatgatttcttgcatttatccaaacgcatgctcatgtgaacacacactaaataccttgagatacgctgatagggtcaaaagtctttccaagggtggaaacacaagaaaagagcagcccacaggaccaactaccacttctagccgggagtcttcgtcagctccatcatattcattgccttgtgaagctgaaaaaattcctaaccagattcaagaaaagagaccagttgatactta

SEQ ID NO: 8721 - DNA, 211 bp, Zea mays
  Clone ID: LIB3150-027-Q1-N1-C12
tctgtatacataaaaaaaaaaatcttagttgttaatttacacatacggactgctcataatactcacatatacaatatcttcaaagaaagcaaacttacagaatttaatcctaattcactgattgagaactattggcccatgatgttttctaattttattcatacactatctcatttaataacactactaaatacctctaaatacacttatt

SEQ ID NO: 8722 - DNA, 179 bp, Zea mays
  Clone ID: LIB3150-027-Q1-N1-C2
tgcgacggaggggtagaccccacgatggcggggtccgcttcaacttaatctacagcggctcccagctcctacaacgcgaattggatctctcgacaaggggagagggaagagatggggctcacgttcaccaagctgatcagccggctgatcggcaagaatgagatgcggattctgatggt

SEQ ID NO: 8723 - DNA, 383 bp, Zea mays
  Clone ID: LIB3150-027-Q1-N1-C3
gccgcggcggcgaggtgatggcgatggacccggacgcggtggcaaaggccttgccggagcactactaccggacgttcgacaccaaccgcgcggcgctggtggggctgtatcatgagacctccatgctcactttcgagggccagatgttccagggcccatccgccattgccggcaagctcggatctcttcacttgcaggcctgcgagcaccaaatcgttaccgtcgactggcagccgaccaggcctcatggaggcatgctcgacttctactacggctacatccataccggcctatacgagcactccatcaaggtctgttaggcatgacatttgctgacagcagctggttccttattgatgcagaatgacatgttccgactgaac

SEQ ID NO: 8724 - DNA, 389 bp, Zea mays
  Clone ID: LIB3150-027-Q1-N1-C4
tggagtggcctgctagattaaagatcagtttgggtgctgccaagggtttagcttatcttcatgaagactgccatccaaagatcatccatcgtgacataaaggcatctaacattcttcttgacttccaatttgaagctaaggttgctgactttggacttgcaaagttcactactgataacaacacccatgtttcgacaagagtaatgggcacctttgggtatttggcacctgagtatgcatcttctggcaagctaacagaaaaatccgatgtattttccttcggagtcatgcttcttgagcttattactgggcggcgaccagttgacacaacccaaacatatatggatgacagcttggttgactgggcaaggccattactgatgcgagca

SEQ ID NO: 8725 - DNA, 388 bp, Zea mays
  Clone ID: LIB3150-027-Q1-N1-C6
ctcgtagagagaaggaaaaatatccccaaaccctagctcccgatctcgatggcgaaccctcgcgtcttcttcgacatgaccgtcggcggcgccccggcgggccggatcgtgatggagctgtacgccaacgaggtgcccaagaccgcggagaacttccgcgcgctgtgcacgggcgagaagggcgtgggcaagtccgggaagccgctccactacaagggctccaccttccaccgcgtcatccccgagttcatgtgccagggcggcgacttcacccgcggcaacggcaccggcggcgagtccatctacggcgagaagttccccgacgagaagttcgtgcgcaagcacaccgcccccggtgtgctctccatggccaacgccgggcccaaca

SEQ ID NO: 8726 - DNA, 110 bp, Zea mays
  Clone ID: LIB3150-027-Q1-N1-C8
gccgttcccggtctgcatccgccacgttgcgcggcgtcaccctccatgctccgggctgacgacgccaggccgagcctcgacactctgcgaatacggatcacgcgcgacaa

SEQ ID NO: 8727 - DNA, 177 bp, Zea mays
  Clone ID: LIB3150-027-Q1-N1-C9
gccaaaggagactagatggtgggtccatgacaacacggtgtaatgatctgctgggcatggcctgtcagccttgtgtactgcgaactgtgatgtatctatgtaagcggggagatgagatgatttatgcctatttctaagcagccttatataggattgcgaagtttaccttgctggggt

SEQ ID NO: 8728 - DNA, 379 bp, Zea mays
  Clone ID: LIB3150-027-Q1-N1-D1
tggtgatgcccagcatgttgaggaggccgagaagatgggacttgactacatggatgttgaggctctcaagaaaatgaacaagaacaagaagcttgttaagaggcttgccaagaagtaccatgctttcttggcatcagaggccatcatcaagcagattccccgtctccttggtcctggtctcaacaaggcaggcaagttcccgaccctggttactcaccaggaatccctcgaatccaaggtgaacgagactaaggcaaccgtcaagttccagctcaagaaggtcctttgcatgggcgtcgccgtcggcaacttggcgatggaggagaagcagatccagcagaacatccagatgagcgtgaacttccttgtttcccttctg

SEQ ID NO: 8729 - DNA, 409 bp, Zea mays
  Clone ID: LIB3150-027-Q1-N1-D10
tcgtcctcctggagggtaccctcctgaagcccaacatggtgactccaggctccgactccaagaaggtgactcctgaggtgattgctgagtacaccgtccgtaccctccagaggaccgtccctgctgctgtgcctgctgttgtcttcctctctggtggacagagcgaggaggaggccacccgcaacctcaatgccatgaacaagctcagcaccaagaagccgtggtccctgtctttctccttcggccgtgccctccaggcgagcaccctcaaggcctgggctggcaaggtggagaacttggagaaggctagagctgccttcctcgccaggtgcaaggccaactctgaggctaccctcggcacctacaagggtgatgctgccgccgacaccgagagcctccacgtcaagga

SEQ ID NO: 8730 - DNA, 388 bp, Zea mays
  Clone ID: LIB3150-027-Q1-N1-D11
cctggcccctgctcgtcgtcttcctcgggcgctcgtcttcctccgaacgcgcgcgggccgccgacctgcttgttctcctggaggagcgcgcccggcgggcaggcgacgcagtccagcggcgggttgaggaagaaggcgagcgaccggtggatccccgtccagccgtcccctgctcctcttcctcgggtcgggcgctcgtcatccactcttcctccagccctccatctgatccccgtacgaccgtcccctgctcgtcttcctggtgctcggctgctccagtgctcggcccctgctgcagtgctgctcggtcgcgtcggcacctgctgcagatctgctcgacctcggctgctcggcttcctgttccttctgctacaaattcatagtcact

SEQ ID NO: 8731 - DNA, 406 bp, Zea mays
  Clone ID: LIB3150-027-Q1-N1-D2
caaaaccccaaatccagttccgttccaatcgccgagaagggcagcaaaggggagaaaaaaaaggaaaacgatggcggcggccggcggcgagaacagcggcgcgggcgagggcgagggcgagttttacctgcgctactacgtgggtcacaagggcaagttcgggcacgagttcctcgagttcgagttccgccccgacggcaagctccgctacgccaacaactccaactacaagaacgacaccatgatccgcaaggaggtcttcgtctcgccctccgtcctccgcgaggccaggaggatcatccaggagtccgacatcatgaaggaagacgacagcaactggcccgagcccgaccgcatcggcccgcaggagctcgagatcgtcatggcaacgagcacatttcattca

SEQ ID NO: 8732 - DNA, 386 bp, Zea mays
  Clone ID: LIB3150-027-Q1-N1-D3
ctcggccggcggcgatggcgcggaagaagatccgggagtacgactccaagcgcctcctccgggagcacctcaagcgcctcgctggcatcgacctccagatcctctccgcgcaggtcacacagtcaacggatttcactgagcttgcaaaccaggagccgtggctctcatctatgaagttggttgtgaaacctgacatgctctttgggaaacgtgggaagagtgggcttgtggccctcaacctagatcttgcccaagttcgccaatttgtcaaggagcggttgggagttgaggtcgagatgggtggctgcaaagctccaattacaaccttcataagtgagccatttgtgccacatgaccaagagtactacctttcgattgtatctgaa

SEQ ID NO: 8733 - DNA, 391 bp, Zea mays
  unsure at all n locations
  Clone ID: LIB3150-027-Q1-N1-D4
actcaacacagcacaggcagttcgagagagagagagagagagagagagataaagatgtcgtggttcgggcaccaccaccacaaccagccggctcccccggcgtcgggccccaaccaggtgttcaagatcttctgccgcgccaacgagaactactgcctggccgtccgcgacggcgccgtcgtgctggccccggtcaaccccaaggacgaccaccagcactggtacaaggacatgcgcttcagcacccgggtcaaggacgaggaaggcatgccggcgttcgcgctcgtcaacaaggccacggggctcgccatcaagcactccctcggccagtcccacccggtcaagctcgcgcctttcagcccggaccaggangacgcgtcggtgctgtgga

SEQ ID NO: 8734 - DNA, 371 bp, Zea mays
  Clone ID: LIB3150-027-Q1-N1-D5
gtccacaaaccgccacgcctctcaaagaggcgattccctcctccctcccactcccacatggccggcgagctgcgccaccgccgcgtgccgtcggaggacggggacgagggcgccgccgcctctcaaggacccgatccagccgccggcaacggcaaggccggcacggcgtctgagggggcggagccgcggcgcggcaagagggacgcgctcgggtggctggagtggggccgcgggtggatggccgtcgtgggggagttcctattccagcgcatcgccgccagccacctcgccaacccgctcgagctgcccccgctcgacggcgtctccgtcgtcgtcaccggcgccaccagcggcattgggctcgagatcgc

SEQ ID NO: 8735 - DNA, 401 bp, Zea mays
  Clone ID: LIB3150-027-Q1-N1-D6
caagtcaaggagagcaacccccactgtggcatagactgcaacgacgttggcaccacggacatgaaagaacagaacgtcttcgagaccctgattggcaagcagcaacagatcttgcttgccacccaggtggtgaagatgatcctgaagatcgacgatgtcatctcaccgtccgagtactgacagaaagaaggaacggatggctatgctggatatgcgtaggcggcattgctgatgtgttgattggtgtacctccttatccaggcttgctgcctaccactcactccctgtgtgacgttttgccgaaattggtttgtattgtgcacgataatatctggaaatagactctagacagtccttagttatctttttattataaaaaaagtcagtcccttctcgtcagg

SEQ ID NO: 8736 - DNA, 331 bp, Zea mays
  Clone ID: LIB3150-027-Q1-N1-D7
gtcacccctgactgctcgacgacctctgcgtcctatcctaccccacccgtccatcgccccctccctccggtctgcgctcccacagcctcacctctgcgccccggtcgattcgcgtcgccactcgttggaaggaacgatggagcagaccttcatcatgatcaagcccgacggcgttcagctgagcctgatcgcggacatcatcagtctgcttactgaagaaagggttctaccttaaggggatgaagatcatgaacgtggagaggagcttcacgcaacaacagtacgctgacttggccgacaacgcctgtctttcgcgggttggtggagaaca

SEQ ID NO: 8737 - DNA, 403 bp, Zea mays
  Clone ID: LIB3150-027-Q1-N1-D8
gcaggggcccgagagcatcaccttcgaccagcagggccatacacgggcgtcgccgacggccgggtcgtcttctgggacggcgagcggtgggtcccattcgcgatggccttcccgtgctggacgcaggagctccacggagggccgaaggcctcgccgctggagtatctcccagcgagcatatctgcaaccgcccgctcgggctctgtttcgataagactggggacctgtacatcgccgacgcctacttcggcttgctcaaagtccgccgcgaggccgggctggccacgctgctcgcaacggaggccgagggcgtgcgcttcaacttcaccaacgacctcgacctcgacctcgacgacgagggcaacatctacttcactgactctagcattcactaccaaagacg

SEQ ID NO: 8738 - DNA, 333 bp, Zea mays
  Clone ID: LIB3150-027-Q1-N1-D9
gctccaactacgacgagaaccgccactcctcgaaatctccaaggattttctgcggcgaaccccttcgtgacgtgacccaatgggagaggcctcgccgtcgatcgccaaggacgtcaccgagttgatcgggaacacgccgctggtgtacctcaacaaggtgaccgatgggtgcgtcggccgcgtcgccgccaagctcgagtccatggagccctgctccagcgtcaaggataggattggctacagcatgatcacggacgcagaagagaaagggctgattactccaagcgtgagtgttctgattgaaccaactaacggcaacacacgcattggact

SEQ ID NO: 8739 - DNA, 374 bp, Zea mays
  Clone ID: LIB3150-027-Q1-N1-E1
tgatgattggacagcaaagatatggagtatgaagcaagacaaatgtgtatttgatttcaaggagcataccaaggaaatatacactattcggtggagcccaacaggcccaggaacaaacaatcctaatcagcagttgcttttggccagcgcgtcttttgattcaactatcaagctttgggaagtcgagcaaggatgccttctgtacagcttgtctggtcataggcaaccagtgtattctgttgcatttagccccgacggcgaatacttagcgagcgggtccctggatcagtgcctacacatctggtctgtgaaagaaggcaagatcctgaagacgtacagaggtactgggggcatattcgaagtgtgcttgaaca

SEQ ID NO: 8740 - DNA, 403 bp, Zea mays
  Clone ID: LIB3150-027-Q1-N1-E10
gcacgatgcgcggccacaacggcgaggtgacggcgatcgcgaccccgatcgacaactcgccgttcatcgtctcctcctcccgcgacaagtccctgctggtgtgggacctgaccaacccggtccactccaccccggaatccggcgccaccgccgactacggcgtccccttccgccgcctcaccggccactcccacttcgtccaggacgtcgtcctcagttccgacggccagttcgccctttccggctcctgggatggagagctccgcctctgggacctctccaccggcctgaccacccgccgcttcgtcggccacgagaaggatgtcctctccgatgccttctccgttgacaaccgccagatcgtctccgcgtgccgcgacaagaccattaagctctggaacac

SEQ ID NO: 8741 - DNA, 362 bp, Zea mays
  Clone ID: LIB3150-027-Q1-N1-E11
cggacgcgtggggtgaaagatgcccgggaggatgatgcctgctctgatacaccggttgctgctatgttcaatagcgtcgtcgcgatttcgatgctcacgtggcttaactacgagatgcgcaaaagcgagagatgttaaacgaatgatatggtctaacacgcgccctagcgagcccatcaagtgctcagcggcgtcacccgccatgccgatggctccgccggccaccccgctcctgccgtggggccccaacgagccccgcaagggtgctgacattctggtcgagtacctcgagcgctgctgcgtgcgcgacgtcttcgcctacccaggcggcgcgtccatggagatccaccaggcactcaccc

SEQ ID NO: 8742 - DNA, 405 bp, Zea mays
  Clone ID: LIB3150-027-Q1-N1-E12
agaacacaatagaccactgatttcacaatgaaaagggagacaatgccttcatggctagaactgttgcttgcaacacaattctttacgacttgtgctaaccatcttcttgctagtcgcaatgaatgtaacctattttgcacccagtgtgagaccaaaccagctgctttctgtaactattgtcgttcaagtgatcattccacccaccgtgtaatccagataaggcgttcatcgtaccatgacgttgtgagggtgtccgagattgaggatatccttgatgtcagcgatgtgcaaacttatgtaatcaatagtgcaaggattgtattcctgaatgagcggccacaactgcgtgcttctagtgtccccatttgtaaggcacccacatcatcaacacatagctgtgaaaca

SEQ ID NO: 8743 - DNA, 253 bp, Zea mays
  Clone ID: LIB3150-027-Q1-N1-E4
atgctataagcgcacctttcgctgtgtctagcattgttcatcgcgcgatactgcggaccgtactctgatgaacacatcaacaatgcgggctacatggtcttcgttggcagggacttgaaatgtaatggtaccacaaatgacgtcatgaacatgggcataaccatgattgaaggacaggacgttgatgcaaatcttgcggccgtcggtgagacccctacttatgtgccttcttgctgtggacaacatccagctg

SEQ ID NO: 8744 - DNA, 400 bp, Zea mays
  Clone ID: LIB3150-027-Q1-N1-E6
tgcacgccttcaaaccctggaatctataaaagaccaccaacgcttcggagaacacggtctcccttttcttgtcggtggtaaagtgagagtgaggcaacaagtggaaaacaaggggaaatggggaagggagcgcaagggagcgatgcggcggcggcgggcggcgaggtggaggagaacatggcggcgtggctggttgccaagaacaccctcaagatcatgccctttaagctcccgacgcgaggatcttatgatgtccgtgtgcgcatgaaggcagtgatgatttgcggcagcgatgtgcactacctaagggagatgcgcatcgcgcacttcgtggtgaaagagccgatggtgatcgggcacgagtgcgcgggcgttgtcgaagaggtgggcgccggcgtga

SEQ ID NO: 8745 - DNA, 395 bp, Zea mays
  Clone ID: LIB3150-027-Q1-N1-E7
tcgtccacgcgtacgaccacgcgtgcgtgggaaaaaagaaaaaaagagaaaaagaaaaaaaggaacataaaaaggaaaaaaaaaaatattaagtggaacaaaaaaaagaccaggaacaaacaataactaatcagcagttgcttttggccagcgcgtcttttgattcaactatcaagctttgggaagtcgagcaaggatgccttctgtacagcttgtctggtcataggcaaccagtgtattctgttgcatttagccccgacggcgaatacttagcgagcgggtccctggatcagtgcctacacatctggtctgtgaaagaaggcaggatcctgaagacgtacagaagtactgggggcatattctaagtgtgctggaacaaaaaaagcagcaagatt

SEQ ID NO: 8746 - DNA, 375 bp, Zea mays
  Clone ID: LIB3150-027-Q1-N1-E8
cccgctcttcgattcccaacgacgagctcggagcttcttcttccctgctcggtgctcgtcgcaacagctgccgccatgtctgccgcgaaccagctcgccgctctggtcagcaacatgtacgccacgggtttgcttgacgatcagttccagcagctccagctgctccaggaccccagcgcccctgacttcgtctccgaggtcgtcacgctcttctgtcaggacggcgagcggatcatcgaagagctggccaaactgctggagaagcccaacgtggattttgacagggttgacgcctttgtgcatcagctcaagggaagcagtgcaaatattggtgctcagaaggttaagaacacttgcattcagttccgcgaattc

SEQ ID NO: 8747 - DNA, 365 bp, Zea mays
  unsure at all n locations
  Clone ID: LIB3150-027-Q1-N1-E9
gtgatctcaacccaagtcgtgcctccgctccggtcacccgtcgctccacgcaaccatgtcgaggaggaagaccagggagcccaaggaggagaacgtcacccttggacccactgtccgtgaaggagagtatgtctttggtgtcgctcacatctttgcatccttcaatgacaccttcattcatatcactgatttgtctgggagggaaactctggttcggatcaccggtggcatgaangtgaaggctgaccgtgatgagtcgtcaccttacgctgctatgcttgctgctcaagacatcgcacagcgctgcaaggagcttggcattactgcactgcacattaaacttcgtgccaccggaggcaacaaga

SEQ ID NO: 8748 - DNA, 408 bp, Zea mays
  Clone ID: LIB3150-027-Q1-N1-F1
gcgccgtcactgaatcctcagatcacggctagccgtaatcacgccactctgctgactcccggcgagcagtgtaacattttccttcagccatgggcaaggagaagactcacatcaacattgtggtcattggacatgtcgactctggcaagtcgaccaccactggccacctgatctacaagctcggcggtattgacaagcgtgtgattgagaggttcgagaaagaggccgcggagatgaacaagcggtcattcaagtatgcctgggtgcttgacaagctcaaggccgagcgtgagagaggtatcacaattgatattgctttgtggaagttcgagaccaccaagtactactgcactgtcattgatgcccctggacaccgtgacttcatcaagaatatgattactggcactt

SEQ ID NO: 8749 - DNA, 402 bp, Zea mays
  unsure at all n locations
  Clone ID: LIB3150-027-Q1-N1-F10
agcgttcaattttggaggctgttggagctttcagttcaaatgaccttcacttgctagatttaagttttgtttatcaattgctttgtcttgggaggtgccattgggctatctatgtcattctgcacatgccgtatcttgacgatgccccatacattcatgagaaattaatcagggaagttttatcacagtattgtgagtcatggagtagagatgatgctcaaaggcaatacattgtagaacttggtgtaccagaagaatggatgcatgaagctctggctctttatcacgaatactatggagataaacagggcgcactggagaatttgattcagtgtggcaactggaagaaagctcatactattttcgtgacttcntgtgctcattctatgtttctgtcatcta

SEQ ID NO: 8750 - DNA, 344 bp, Zea mays
  Clone ID: LIB3150-027-Q1-N1-F12
gcggcggcgcgggcggacaaggagcaggcggaggaggagctgtgccaagccacaatgggtatctcgcgtgactcgatgcacaagcgccgggccaccggtggaaagcagaaggcctggaggaagaagcgaaagtatgagcttggtcgccagccagccaacaccaagttgtcaagcaataagacagtgaggagggtccgtgttcgtggaggtaatgtgaaatggagggctcttcgccttgatactggtaactactcatggggaagtgaagctgttacccgcaagacccgtatcctcgacgtggtctacaatgcatcaaacaatgagcttgtgaggacacaaaccct

SEQ ID NO: 8751 - DNA, 215 bp, Zea mays
  Clone ID: LIB3150-027-Q1-N1-F2
ctctctctctggtactgctagagctacctaggtagccagagccagcctctctctgtatctggtcagggatgaatactgccgccgcccacaaattccacctttcaagaacagcgctgcatggcggggtcgctgtacttagcagtgccctgacgttcatgctatataattaagctacgctgctaggagccatcgggagagagatgagaccgagagat

SEQ ID NO: 8752 - DNA, 328 bp, Zea mays
  Clone ID: LIB3150-027-Q1-N1-F3
ccagtttcaagcaatccctaggccgtggcgacgtgctgggaaggattcaaatcaggggcgaagcctaggtgacggcgctgttagtcgcctctagtagctgcgcgacgcgagctggcttgtccgatcggtttgcctcggccatgtcgactaagaaagttctttgcaagttcttcatgcatggagcttgcttgaaaggagagtactgtgaattctcccacgactggagtgatcaagcaaataatgtttgcacattctaccaaaaaggtgcatgctcgtatggtagccgttgcaaatatgaccatgtcaaagtttctccgaaccccacagt

SEQ ID NO: 8753 - DNA, 303 bp, Zea mays
  unsure at all n locations
  Clone ID: LIB3150-027-Q1-N1-F4
cttgtttcggaccttggtgtagcactgcaaggctaaggtttactcctccgcacatggacttttggggataggcttgccaccgtgttttgctagatgagtcgtggaataagcttttacttcctcgctgctgtgggtgaagtgactggaattcggaaatttggaactaacaaaaccccccgtggatttgtatgatatgttttgttcgacaaaaaaaaaaaaaaaaaaaaaaaaaaaaaaaaaaaaaaaaaaaaaaaaaaaaaaaaaaaaaaaaaaaaaangnnnnacaaaaaaaaaaaaaacaaa

SEQ ID NO: 8754 - DNA, 406 bp, Zea mays
  Clone ID: LIB3150-027-Q1-N1-F5
tttcggttcccctcccccctccgcgttccacaaccctcgagaagcttccaccctcccctcctgcgacgccgccagagccgcggaaaccctacccaccccggccgctcacgcaccgggcgcccgcagccgccggtcgcgtgcctgccgccgacaccgcccaaagcgattggatctcgagatcgtcaggagccacgatggaggactgggattctgaagaattccagccagttgtgcctgttgtgaaagccgagccacttaaaaatcagtgggctgatgaagatgttgaagaagatgatgtaaaagaatcatgggaagaagaggaggaggaggagaaacctaagccagcgccagtggaaaaggttgctgcaaaacctagcactaatgctcctgctaaaaagggaaaaca

SEQ ID NO: 8755 - DNA, 272 bp, Zea mays
  Clone ID: LIB3150-027-Q1-N1-F6
cataaagctggcagacgaatccttaatcgtaccctgacgtcgtcgcagccgcagccgcggccacaccatcaagcagaactagcagccatgccgtccaaattggacccctctcaggtggtggatgtcttcttgcgcattactggaggcaaggtccgcgcggcatcttgcttcgcattcaaaatctggcagatctgtttgtaccgactgaagatcgtcaaggacatcaacatggagacctataaggactggtagggccttcacgtcaccgtcaa

SEQ ID NO: 8756 - DNA, 315 bp, Zea mays
  Clone ID: LIB3150-027-Q1-N1-F7
caagggcgcattcgtgcagcctgcgttctacgaagcgttcggcctgactgtgatcgagtccatgacgtgcggtctgccaacgatcgcgacctgccatggtggccctgctgagatcatcgtggacggggtatctggcctgcacattgacccttaccacagcgacaaggccgcggatatcctggtcaacttctttgacaaatgcaagggagatccgagctactgggacaagatctcacaaggcggcctgcaaagaatctatgagaagtacacctggaagctctactccgagaggctgatgaccctgaccggcgtgta

SEQ ID NO: 8757 - DNA, 106 bp, Zea mays
  Clone ID: LIB3150-027-Q1-N1-F8
cagctcacttgaagggtggtgccaagaaggttgtcatctctgctcctagcaaggatgcccccatgtttgtcgttggtgtcaaccagaaagggtacaaatctgacat

SEQ ID NO: 8758 - DNA, 340 bp, Zea mays
  Clone ID: LIB3150-027-Q1-N1-G1
ctttcccctttcctccctccctctccccgcgggccgccagaggcaatttcgccctcgattcgaccccgattcgtccgcccgcgaccgggattccctccgccaagcgcggatctgaacgctgcgctccgtgtcgtcgctcgaatccgccatgaagggggccaaatccaagggcgccgccaaggccgatgccaagctggcggtgaagagcaagggggcggagaagcccgccaagggcaggaaggggaaggccggcaaggaccccaacaagcctaaaagggctcccagcgctttcttcgtgttcatggaagaatttcgcaaggagttcaaggagaagaaccct

SEQ ID NO: 8759 - DNA, 401 bp, Zea mays
  Clone ID: LIB3150-027-Q1-N1-G11
cttttagtaacctttcaataggcgtccgccaagaactagtaaacatggcaaaactgttgagcctgttcttagccctctcctttgtagcagctatgtttgccataggctctcatgctgatggagactgtgagaatgacctccaaagcctgataagtgactgcaagacatacgtgatgttcccagctaatccaaaggtccctccttcggatgcttgctgtggtgtcatcaagaaggcaaacgtttcttgcttgtgctccaaggtcaccaaagaaactgagaaggttgtgtgcatggagaaagttgtgtatgttgctgagcagtgtaagaagccatttgagcatggctttcagtgcggaagctacaaggttccagcaaactgatgataccataagagggaagcg

SEQ ID NO: 8760 - DNA, 364 bp, Zea mays
  Clone ID: LIB3150-027-Q1-N1-G12
ggaggcgtcctccctggcatcaaggttgacaagggcaccattgaggttgttggcactgataaggagaccaccacccaaggccatgacgaccttggcaagcgctgcgccaagtactacgaggccggtgcccgctttgccaagtggcgcgctgttctcaagattggccccaatgagccatcacagcttgccatcgacctgaacgctcagggtctggctcgctatgccatcatctgccaggagaatggtctggtgccaattgttgagcctgagatccttgttgatggccctcatgacattgatcgctgcgcttacgtcactgagaccgtacttgctgcctgctacaaagcgctcaacgagcaccatg

SEQ ID NO: 8761 - DNA, 360 bp, Zea mays
  Clone ID: LIB3150-027-Q1-N1-G2
ctgaaaagaaagaccagctcatggaacttatggacacaaaaacgggtgaccttatcctgtttgcactgggtgaacaatcatcagataatcagattcttggacgggtaagattatttattgctcataagctagaggtgatcgacacgtatgcacattcagatctttgggtgacagattttgcaatgattaaatggaacaatgatgagcaaagatacaacgtcctacattatactttcactgtaccaaatctcaaggatatgtacaatctactatcacttacggctctgacttatgacatgatgtacaatagtgtggagattgggaggggaaagttgagaatctacaaatgtgatgtacaac

SEQ ID NO: 8762 - DNA, 409 bp, Zea mays
  Clone ID: LIB3150-027-Q1-N1-G6
ttacaaccccaagaacccctactggttcaaccgcgaccgcttcgtcctctccgccggccacggctgcatgctccagtacgccctcctccacctcgccggatacgacagcgttaaggaggaggacttgaagcagttcaggcaatggggaagcagaacaccgggccaccctgagaactttgagactccaggagttgaagttaccaccgggcctcttggtcagggtatcgccaatgccgttgggttggcacttgctgagaagcacctggctgcccgcttcaacaagcctgacagtgagatcgtcgaccactacacgtacgttattttgggagatggctgccaaatggaaggtattgctaatgaagcttgctccttggctggacactggggtcttggcaggctgattgctttc

SEQ ID NO: 8763 - DNA, 266 bp, Zea mays
  Clone ID: LIB3150-027-Q1-N1-G7
ctagcaaaccgaacgaacccaaccgaagcgagagctgagcaaggcagaggcggcgtgaccggcgatggagcggctgcagcggatctttggcgcctccggcatggggcagccgccgacggactcgccgctgctcgattcctccgagcaggtctacatctactccctagcgcttctcaagatgctcaagcacgggagggctggggtgcccatggaggtcatgggcctcatgctcggggagttcgtcgacgactaacacgtcaaggtcg

SEQ ID NO: 8764 - DNA, 352 bp, Zea mays
  Clone ID: LIB3150-027-Q1-N1-G8
gcagctggttccagtgttctttggtggtggccttgctttgcccgaaaaggttggcatttcgagtgctgagacatcggcttcattgaatcctaaagcacggttgagccatggctggctcccttgctgcctcagccttcttccctggcccacgggcgtctccagcagcatccgcaaagaacttggctggtgaagtaccggatagtttgagcgtccgtggtattgttgcaaagcctaatgccaattctgggaacatgcaagtgaatgctcaagcacaaacccttgccaaggttaatggcaccaacgttaacctcaagaatgcaagctcagacacagatgatgcgataccctacac

SEQ ID NO: 8765 - DNA, 209 bp, Zea mays
  Clone ID: LIB3150-027-Q1-N1-H1
gaagaggaagcccatggcgctcatcaagaaactgcgcaaggcgaaaaaggatgctcctgctggtgagaagcccgagccagtcaagacacatctccgtaacatgatcattgtccctgagatgattggaagcattgttggggtctacaacggcaagaccttcaaccaggttgagatcaagcctgagatgatcggccactaccttgctgagt

SEQ ID NO: 8766 - DNA, 334 bp, Zea mays
  Clone ID: LIB3150-027-Q1-N1-H10
ttgatgataggttttctcagtaccgcccgcgtgaagttcatgcccctactgttataaggaatggggcaattaacagttcatggagagcctctcatcaaactaacatgtatggtgtgtcaaatggcgactttggttccgtgaggtcttcatttgcgccagcacctgctgaacctacagctggatcatttttaagatcctatggcgagcagtcgatgtccactgcacaacgaatcgataggtctttttgcagtaagccatgggagatgcatcagtattcacaacaaaagcttggttatggattcaactcctagttgagtgaggaaggatcattctt

SEQ ID NO: 8767 - DNA, 312 bp, Zea mays
  Clone ID: LIB3150-027-Q1-N1-H11
ggagccctatctatccttttgttggcacctcgcgggtcttccgaccgccccgtaccgcatacaaatcctatgctcactctcaccgccgcctcttccactgcaccccgagccaagatgaatgttaaaaagctcaagacgatggcacgtgctgtgcgcactgcggggaatggtagcatgcgcaaggaagaagatcgcagttcacaagactacgaccacagatgataaaacgcttcagagcaccctgaaatgaataggagtgaacaccattgctggtattgaaaacgtcaacatctgtaaagatgatgttgttat

SEQ ID NO: 8768 - DNA, 370 bp, Zea mays
  Clone ID: LIB3150-027-Q1-N1-H12
gggcaatgagaaggtgcaggacctgcttctgctggacgtcacccctctgtccctgggtctggagactgctggaggagttatgacagtgctgatcccgaggaacaccaccatccccaccaagaaggagcaggtattctccacctactcggacaaccagcccggtgtcctgaatccaggtctacgagggtgagaggacccggacacgcgacaacaacctgctgggcaagttcgagctctccggcatcccccctgcaccccgtggtgtgccacagatcaccgtgtgctttgacatcgacgccaacggcatcctgaacgtgtctgccgaggacaagacaacggggcagaagaacaagatcacaatcaccaacga

SEQ ID NO: 8769 - DNA, 368 bp, Zea mays
  Clone ID: LIB3150-027-Q1-N1-H3
gctgttcagacagagaaggcaccaccagcactaggcccttattctcaggccatcaaagcaaataatcttgtgtttgtttctggagttcttggcttgaatcccgagaccaggaagtttatctctgaaaatgttgaggagcaaactgagcaggttatgaaaaacatgggcgagatattgaaagctagtggtgctagctattcttcagttgtgaagacaacgatcatgttggctgatctgcaagatttcaataaagtaaacgagatctatggcaaatatttcccggcgccagcacctgcacgatcaacctaccaagtggcggcgctgccactgaatgcccggattgagattgagtgcatcgctgctctcta

SEQ ID NO: 8770 - DNA, 366 bp, Zea mays
  unsure at all n locations
  Clone ID: LIB3150-027-Q1-N1-H4
gggatgataggttttctcagtaccgcccactggaagaccatgcccctactgttataaggaatggggcaattaacagttcatggagagcctctcagcaaactaacatgtatggtgtgtcaaatggcgactttggttccgtgaggtcttcatttgcgccagcacctgctgaacctacagctggatcattttcaagatcctatggcgagcagccgatgtccactgcacaacgaaacgataggtcttctggcagtaagccatgggagatgcagcagtattcacaacagaggcctggttatggatccaactcccagttgagtgaagaaagatcatactctgatgcccangacagctatgctcctttctgtc

SEQ ID NO: 8771 - DNA, 408 bp, Zea mays
  Clone ID: LIB3150-027-Q1-N1-H5
gcaaccgacaactccctaccgaccgagaccgcaagcaccagctcggcggctgcggcggcggcgaccatggctgtcgggaagaacaagaggatctccaagggaaagaagggtggcacgaaaaagaccgtcgaccctttctctaagaaggattggtatgacatcaacgcaccggctgtgttcagtgtgcgcaacatcgggaagactctcgtatccaagacacaaggtaccatgattgcttctgagggtctgaagcacaaagtctttgaagtttgcctagctgatcttgacggtgacgaggatcaagtctacatgaaaatcaggctccgtgctgaatatgttcaaggcacgaatgtgctcacaaacttttggcgtatgaattttaccacttgttaattgagatccctactg

SEQ ID NO: 8772 - DNA, 414 bp, Zea mays
  Clone ID: LIB3150-027-Q1-N1-H6
ggcgaccaaccctctcccaacccgactaggcggactcgcagctccgccccaaagtccaggtcgaagcatggaagtcgcggcggcgtcggcgaggcccgtcctgcgcgtggctgccatctgcggctccctccgcaaggcctccttcaaccgcggcctcctccgcgccgccgcggaggtgtgcgaggactccatcccggggctccgcatcgacgagctcgacatctccgacctgcccatcatcaacaccgacctcgagaccggcagcggcagcggcaccgtcttcccgcccgccgtcgaggccttccgcgccaaggtctgccaggccgactgcttccttttcggcgcgcccgagtacaactacttcatcgccacccccctgaagaacgcgcttgactgggcctttaaaggaaagaa

SEQ ID NO: 8773 - DNA, 72 bp, Zea mays
  Clone ID: LIB3150-027-Q1-N1-H7
tcggaaagagctggccgcactgattactgggggcaaaatacaagcccggattgactcccacaaaagatcctt

SEQ ID NO: 8774 - DNA, 239 bp, Zea mays
  Clone ID: LIB3150-027-Q1-N1-H8
ctgaaagatgacaccacatgtgtgggtgtcgacatcatcccatctgatcattgttcaacaccaccagcattgtctccaaagaaaaatcagaacaagttgaagcatcttatttttggttaaaggtctcatagttctgttggaaagctcagcaaatctgcttcattggggtcagtggaaaaaatattctacgagggatttgcaatgtttgaaaaaaaggttggaagtaatttttcacccaa

SEQ ID NO: 8775 - DNA, 338 bp, Zea mays
  Clone ID: LIB3150-027-Q1-N1-H9
tgctgttcagacagagaatgcaccaccggggggaggctcttattctcaggccatcaaaacaaattatcttgtgtttgattctggagttcttggcttgaatcccgagaccaggaagtttatctttgaaaatgttgaggagctaactgagcatgttatgaaaaacatgggcgagatattgaaagctagtggtgctagctattcttcagttgtgaagacaacgatcattgtggctgatttgcatgattttaataatgtaaacgagatctatggctaatattttccggcgcccgcacctttacgatcaactctaccaagtggcggctctgacactgaatgcc

SEQ ID NO: 8776 - DNA, 385 bp, Zea mays
  Clone ID: LIB3150-028-Q1-N1-A2
cttgcagggaaagaatgaggaggaacaagctgaatgacaggtttcttgaactggggtctgcattagaacctgggaagccagtgaaagctgacaaagctgccatcctaagcgatgctactcgcatggttattcagctccgttcagaatcacagcaactgaaggagactaatggcagcctcgaagaaaagattaaagaactaaaggccgagaaggacgagcttcgcgacgagaagcagaaactgaaactggagaaggagagtctagagcaccagatgaagctgatggcatcggctccagcctacatgccccatccgaccctgatgccggcgcctttcgcccaggcgcccctaactccattccatgcccagggccaagctgcagggca

SEQ ID NO: 8777 - DNA, 347 bp, Zea mays
  Clone ID: LIB3150-028-Q1-N1-A3
tcgcttgcttgttttgttttagttttaccgcgcaacttattttttcccctgtcattgcttaacagtaacagctcaatgaacttgtccactacaatgtctttgacaagcattaccaaataacaaagcaaacacttaggcactataccttaaacataatataacctaccaaaattaactctctccggccgctaatggtggtgtgttcggcaaagaggaaatctcttgggcacgagcagatccaacttgcctggggaaaaaacccaagatatctcatctgccctttccaagcacactctcaggggctcgtttatgaaaccaaacaaccctaacatattatgggcacactc

SEQ ID NO: 8778 - DNA, 305 bp, Zea mays
  Clone ID: LIB3150-028-Q1-N1-A4
cttgcagggaaagaatgaggaggaacgggcggcatgacaggtttcgtgaactgggttctgcattacaacctggtaagccagtgaacgctcacaaagctgccatcctaaacgatgctactcgcatggctattcacctcctttcagaatcacacccactcaatgagactaatgacagcctccaagaaaagattaaagaactaatcgctgagaaggacgatcttggctactagcagcataaactggaactggtgaaggagagtctctatcacctgatgaagctgatggcacaggctccagcctacatg

SEQ ID NO: 8779 - DNA, 343 bp, Zea mays
  Clone ID: LIB3150-028-Q1-N1-A6
ctcctgtctaccatctcggctagggcgaggtcgaatggccaagtcgccatgatgcagcatcccacgccgcagcacccgcagccggtcatggagctgcctccctctacgaaggctgttggctggcagctaccgtactgggataggatcccgccgtcgatggcactgatgtacggcgcaccgactacattgcagacttaagcgatgtggaggaagactttgccgaatgcacactaaaactaggcaccaaccacgcaacagtactacaccatactcaccgtgtcgcttcaggttccagctgcatgcgctatagaagactaagtccggacgctatcgatcaggcacc

SEQ ID NO: 8780 - DNA, 358 bp, Zea mays
  unsure at all n locations
  Clone ID: LIB3150-028-Q1-N1-A7
tcccaacccaccgtaaaccctagctgcgagctatggcccgcaagcgccaggcgccgccgccgccgccgccgccgccgccgcaggaggaggaggatgagtcatcctccgaggaatctggctccgaagaggagtctcctcgcctccccgagccccgaaggccctcgcaggccgccgccgccaacaacgccgactcgtcggacgcggactcggattccgacgccgacgtccaagccttccagatgcgccaggtgccccgcttcctcaccaagcagacacacccagtctctcacccagaatccggtgccgaagaggaggagggcgagttgtcagagtcngagcacgagaacccggtgcctgt

SEQ ID NO: 8781 - DNA, 353 bp, Zea mays
  Clone ID: LIB3150-028-Q1-N1-A9
acgcactcacctccaaaatgcctgtcagggtcaaggttgcgtattttgtgaattctgggaccgaagcgaatgagttggcaatgttgatggcccggctgtttagtgggaatctcattatggttgcgctcagaaatgcatatcatggcggatgtgccgttacgataggatcgactggtttgctgacctggaaatactcaattcctcagggtgaaatacatcatgtcatgaaccctgatacttatacagggactttaggatctgatgctcgagctcatgcttaggatgtcacagaacacataacttattgaagttcaggaacgactgcaggcttcattgcagaaacattccaaggt

SEQ ID NO: 8782 - DNA, 267 bp, Zea mays
  Clone ID: LIB3150-028-Q1-N1-B1
tcggccgacatcattccttacttgccagggccgggcacgggctggcgaagcctctgctcctgcacagctgcagccgataacatggactcaacgcgggtatacggggccagctcccggagctttgttacacgctactaatgttgcaatgaacgagccggaagcgaaaagtggatagccttggataagtagaatgaggacttactccttatgaatgctgagagcttactggatgatttgcaggagcaaattctaacactccagaatggt

SEQ ID NO: 8783 - DNA, 368 bp, Zea mays
  Clone ID: LIB3150-028-Q1-N1-B10
attccatcacttccctgctttaggacggcctttgatatcttctccccgtctcagctattggtgcctcgtcatcggggaccaaaccgccggcgaccggataaactaagccagctccttcgctccgaaagacgtttctcgtaaagagcacttgctcacctgctgcccgccccccactgctggcgctggacttgctcggagtggaaatccatccggacctggttcgatttcttcatttcgggttcgattcggagtttctatcccagatcgaaagatcaatatcacctggcacaacatatcgatatcgtggaagccgaggttgcttctatgctaaatgggtggataactggattgtggaatttgctaactac

SEQ ID NO: 8784 - DNA, 345 bp, Zea mays
  Clone ID: LIB3150-028-Q1-N1-B2
cgcgaggaggtcgcggcggagcgcgcgctgtacctcgaggcactggcggtgtacgcggaggcggtggccatggtggaggagtaccatgcggctgccggcgccggcaagaagctcaactgctccccgcaggtgtacgagtctttggagcaccggttggccgtggcagaggcagcgcagaagctgaggctcccactgctctctcaggacggggaggtccatgagcaggagatcgaaaagctgagcacctattcaaggagttcattcgatagcaccctcacaagcgcgacacccagctcaagttcaatctcgacgagttacaacaattatagcagcagcgctagtgcg

SEQ ID NO: 8785 - DNA, 389 bp, Zea mays
  unsure at all n locations
  Clone ID: LIB3150-028-Q1-N1-B3
cgccgataccacctccacaccatgggcgatggatagattatcgggggcatcccccacgcgtccgggagcttgtggggatgacaaccagggaattttgtttgtcaacaatatgagctttagtggtgtggatctcacaaggttaagggccaaaaaagggcacaccgctcagtgtgtgtgcttggtcgatgcaagcggcaatcgcaccatgcgtccgtgcctatctagcgcagtcaagatacaggccaatgaatttagaaaggaggatttcaaaggctccaagtggcttattgtgagatatgcacaacagaacatggaacagattattgaagctattangattgctaaacaggaaggcctttcagtatcattagatgtggccagttttgaga

SEQ ID NO: 8786 - DNA, 334 bp, Zea mays
  Clone ID: LIB3150-028-Q1-N1-B4
tcgcgcgaggaggacgtggacaacctcggggagggcttgaagacactgggcatctaccacgcggccgtgagcatgttggaataacaccatgcgaatgccggcggccaacaaaatcatcaactactgctgtgaagcgtacaaggctaaggagcacaaattggcccacccataagcagctcagatgctgagactcacactgctatctcacgacgcggaggtgcatatgcagcacatcgaagagccaagcacctatacaaagagaggatgatatagcacgctcacaagcgctaaacccaagtcatgctcaacatagactagtaacaacaattatagc

SEQ ID NO: 8787 - DNA, 215 bp, Zea mays
  Clone ID: LIB3150-028-Q1-N1-B5
gcaaagctgagttgctgcgcgttggcggtctttagagatggctgtagctggtgtcgccccttctgggtacaagaacagcaccagcaccagcattggtgccgcaaagttgcatgatcacatgaacgagctacagattagagatgataacgaagttgcagcaaccataatgaatgggagagggaccgaagctgggcacatacttatgcaccactact

SEQ ID NO: 8788 - DNA, 386 bp, Zea mays
  Clone ID: LIB3150-028-Q1-N1-B6
tcgaggagagcccgaggctactagccgctgtgccattaggcagtggcggactactcagacgcgatcggcatactggacgagtaccatgcggctgctggcgcctgcaagaagctcaactgctccccgcaagtgtacgagtctttggagcaccggttggccgtggcagaggcagcgcagaggctgaggctcccactgctctctcatgacggggaggtccatgagcaggagatcgaaaagctgagcacctattcaaggagttcattcgatagcaccctcacaagcgcgacacccagctcaagttcaatctcgacgagttacaacaattatagcagcagcgctagtgcggtgactgttgctgctccacattggagtggtagttctgatgc

SEQ ID NO: 8789 - DNA, 357 bp, Zea mays
  Clone ID: LIB3150-028-Q1-N1-B7
tcggcgcgaggcattttgggagggccgtcgtcatgctcaacctgaagccgccggtgaccacaacggcacgggccgtggagtacagggaggatataatgagggcgctgccgccagggagtagcttcgagccgctcatgacactatacctcacagacaacacacgcccaaatgagatcaatctcgcaagaaagagtggaataatttttgctgtgaagttgtatcctgctggagcaactaccaattcccaagatggtgtcactgatatatttgggaagtgcttgccggtcctcgaggagatggtcacgcaggaaatgccgctgcttgttcatggagaagtcacagatccacatgttgaca

SEQ ID NO: 8790 - DNA, 379 bp, Zea mays
  Clone ID: LIB3150-028-Q1-N1-B9
cttcccaccgatccatttcagccgccgccgcgcgtagcaagcaggagcagcaaggatgccggctggccacgggctgcgctcgcggacgcgcgacctgttcgcgcgccccttccgcaagaagggctacatcccgctcaccacctacctccgcacctacaagatcggcgactacgtcgacgtcaaggtgaacggcgccgtccacaaggggatgccgcacaagttctaccacggccgcaccggtcgcgtctggaacgtcaccaagcgcgccatcggcgtcgagataaacaagcaggtataccacacggatcccttttcgctagctcgctgatgggttgctgggcgcacgcagttgaaatcgtttgtgcacggcgcttacgtt

SEQ ID NO: 8791 - DNA, 385 bp, Zea mays
  Clone ID: LIB3150-028-Q1-N1-C1
atcagactacagtgcggttggaggaagggaaccggacaaatcaccccgtcgtctcgtcccgtagtcactcgcagagtcgcagtcgcagcccctgcgcccaccgggaccgtgatggagagctgggtccgcgcggtggtggaggccatccactcctctcgctcccagacagtcatctacctcgccggcggtgcatcccaggcgctcggttggctcctctccgtgcccggcgcttcgggcaccgtcctcgaggtcgtcgtgccctactctagggcctccatggcgcagctccttggcaagatgcccctgcaattcactagcaagcaggctgcagaggacatggcactggccgcatacaatcgagcactcaagctttctggaccaggtc

SEQ ID NO: 8792 - DNA, 389 bp, Zea mays
  Clone ID: LIB3150-028-Q1-N1-C2
agaactatcaactgaccacgcacgcagcgcgtacgcatgcatgcattctatacagatccacccactcgtccgccagcagatcgtccgctagggttggaggctggtaccccgaatcccgctcctccaccacctcgcgtccacccttcctcttggcgcgctccgatccaagagatcgcggtgccgctgctgacaaagaagatcgtgaagaagcggatcaagcattttaagaggccccatcttgaccgctataagtgccttaaaccaagctggctcacgccaaagggtcttgacttccatgttaggaggaagttcacctgatgcactcttattccctatattggtttcgttttatacaaatctaccagactcttaccttactaaaatatatc

SEQ ID NO: 8793 - DNA, 192 bp, Zea mays
  Clone ID: LIB3150-028-Q1-N1-C3
gttcctttgatggattttcaaaaggagtcaacatttgatatgtggagtactgttggtctatcttctaaaggagaaaatgactcttccaaggacacttctacgtacatcaatatgaaactataattgaagttcaccaaagcatggctgcatttttttaagttactaacaccaatttatgtgtgcatcgaggca

SEQ ID NO: 8794 - DNA, 384 bp, Zea mays
  Clone ID: LIB3150-028-Q1-N1-C4
gttagtttctgtggaggctgcagatctgcgcaagacagtggcttccctggaagagaagattgatgcagagataactctctctatgcagcacaaaacaaatgcagacctggcagaggcgtccaaagaatcattagaggcgcagctgcagtctgcaaacacagagatagggaaactgaacgggattgtgcaaactttagagagtgaggtgaggaaagagacagattctcgtgaagaactactgaaacagatagaggctatgaaaattgagtcagagagatcactatctgtggtgtctaccaaagagtcattagaggtgcagctccaggtggcgaattcagaagttgcaaagttgcgtgggatggtgaatgctctggagtgtgatgc

SEQ ID NO: 8795 - DNA, 279 bp, Zea mays
  Clone ID: LIB3150-028-Q1-N1-C6
ataaaaaaaaaaagaggaaaaaaaaaagggaaaaaaataaaaaaaaaagaaaaagaaaaaaaaaagaaaaaaataaaaaacaatggacaaagacgtcaagatgcttgaaaaggggggagaagaaaagaaaaatgaaggtgctgcagaacaatcattatgttgaacaaaaaaaaaaataatgggggagctgccggagaatgttggagcgaatgacatatagtacaagttctattatatggaagagattgagtttgagattttgctacagaatgtatttag

SEQ ID NO: 8796 - DNA, 333 bp, Zea mays
  Clone ID: LIB3150-028-Q1-N1-C7
gcttctcctccccctccggttcgggttcgggttcgcgaggttctccggggttcggattcttgggtgagcggatcgagatggcagcctccgatgttgagtaccgctgcttcgtcggcggcctcgcctgggccacggacgaccactccctccacaacgccttcagcacctacggcgaggtcctcgagtccaagatcatactcgatcgggagacgcagaggtcccgcggcttcagctttgtcaccttctacacggaggatgcgatgcggaacgccatcgagggcatgaacggcaaggagctggacggccgcaacatcaccgtcaacgaggcccaat

SEQ ID NO: 8797 - DNA, 389 bp, Zea mays
  Clone ID: LIB3150-028-Q1-N1-C8
ggcaaaccttgtactggagtgccacatggcctagagaagttgaagccttagcaagacaatttctacaaaatccttacaaggctcacctgaacttaaagctaatcattccatacaacaaattgttgaagttatttcagaccatgagaagtatccaagtgtacaagttatacaggtgccaaaggttcacacttagccaataaaaagaccaaatattgggttcaacaaaagagcaaagggacaaccgaaggcacctctggtctggcgcaccggactgtccggtgtgccaccggacatgttcggtgtacaccggaagactccaactcgaactcgtcaccttcgggaaattccagaggcaactccactataattcactggactgtccggtgtac

SEQ ID NO: 8798 - DNA, 310 bp, Zea mays
  Clone ID: LIB3150-028-Q1-N1-C9
tctgcgtacacggtctccctcttgctgtcagtagtagagtgagagtgaggcagcgagtgggagacaaggggaaatggggaagggagcgcaagggagcgatgcggcggcggcgggcggcgaggtggaggagaacatggcggcgtggctggttgccaagaacaccctcaagatcatgcccttcaagctcccgcccgtcggcccttatgatgtccgcgtgcgcatgaaggcagtggggatttgcggcagcgatgtgcactacctaagggagatgcgcatcgcgcacttcgtggtgaatgagccgatggtgatc

SEQ ID NO: 8799 - DNA, 240 bp, Zea mays
  Clone ID: LIB3150-028-Q1-N1-D1
acctgattatggttacaaccaatagggggaggatgaacgagattattataacacagggctccgaaaaaggcggctacgtggacgacgtgatagagggcctggcggctactactgaggtgggaggcgtcactggatactgttatgattatggatatgcccccagaggaggttactatgaagagcaagacgaatactatgatgagtcctatgaatatgctactccgactggccgctgatgtg

SEQ ID NO: 8800 - DNA, 305 bp, Zea mays
  Clone ID: LIB3150-028-Q1-N1-D11
tcggttgtttaccattcctcccaaaacgggtgggcgatcctagaagcctccgccgagcatcgatcatgtgtgcctactgtggcaagtgcgcggatgaactcatgaagaatgctgcctacatcggcacccctggtaagggtatccttgctgctgatgagtcaactggcaccattggcaagcgcctttccagcatcaatgtcgagaacgtggaggagaaccggggggctctccgtgaagctctggtctgcttccctggtgccctccatttcattagcggtgtgatactcttttaggagaccctttac

SEQ ID NO: 8801 - DNA, 154 bp, Zea mays
  Clone ID: LIB3150-028-Q1-N1-D2
atgcattctatacaatccacccatgcgttcggattttgctcgtggaggccacatgggggggctaagctaaagccttaccggcacagtttctacagaattcggacatggctaacttgaactgatagctaatcatttcattcatcaaattgtcgaa

SEQ ID NO: 8802 - DNA, 206 bp, Zea mays
  Clone ID: LIB3150-028-Q1-N1-D3
tcgtatcaacagaccattatctttataggggggagatcgtatattatgtggacacacaccatgaggatgtcgctcgtttccctcactatgctggctcgcgcttcgagcttcacaatgacgtgtacaatccgccgtttaagctgccagccatcgacatcagtttatctaccgtctccttggcatgtaccacctctggtttaactgcc

SEQ ID NO: 8803 - DNA, 317 bp, Zea mays
  Clone ID: LIB3150-028-Q1-N1-D6
ggtcttcagaccattagctttatctagtgcagagcgcagaagaacccgatcgacaccatgagggtgttgctcgttgccctcgctatcctggctctcgctgcgagcgccacctccacgcatacaagcggcggctgcggctgccagccaccgccgccggttcatataccgccgccggggcatctgccacctacggttcacctgccaccttcggtgcatctcccaccgccggtccacctgccgtcgacggtccacctgccaccgccggtccatgtgccgccgacggttcatctgccgccgccaccatgccactaccctac

SEQ ID NO: 8804 - DNA, 221 bp, Zea mays
  Clone ID: LIB3150-028-Q1-N1-D9
gcttttgtttaccattccttcccaaaacgcagtggtgcgatcctcgaagccttcgcccatcatcgatcatgtcggcctactgcggcaagtacgcggatgagctcatcaagaatgctgcctacatcggcacccctggcaagggtatccttgctgctgatgagtcaactggcaccattggcaagcgcctttccagcatcaatgtccacaacgtggaggagaac

SEQ ID NO: 8805 - DNA, 387 bp, Zea mays
  Clone ID: LIB3150-028-Q1-N1-E1
aaacaacgatggcatctaaagaagggaataagctagtctcttctgtaaacaacaatcagatacttatcgacagtatttctgaagatgatatgttggtcttggatgtattgaatagcctggtgaatgcaccctctaaaatgtcagaactagagattaatattccttcaggttcgcttggaaaaactgactctgtgttaagggaggaaggccaccctaccattgatctgtctaaacaagggaagccagttcgtaaatccagtgcttccaagactaggaagaaaaaacctaagaagatattaggtgcagaggtgcctgctgaagcacaaaaaaaatgtgacgataatttagtcctgccggaaacactgagggttggtatcactgatgatt

SEQ ID NO: 8806 - DNA, 374 bp, Zea mays
  Clone ID: LIB3150-028-Q1-N1-E2
cctgcccgtacttccgttgcggcgctacgagcttcgacgggcctcgatctccacctctgaagtgactacttgtgatctagatctgaagctgtagtggtcagcagcttagtgtgaatcgaagatgagcgtggtggggttcgacctcggcaatgagagctgtatcgtggcggttgcgcggcagcgtggcatcgacgtggttctcaacgaggagtccaagcgcgagacacccgccatcgtttgcttcggggacaagcagcggttcatcggcaccgccggcgccgcgtcctccaccatgaaccccaaaaactccatctctcagattaagcgcctgctcggccgcaagttctcagatcccgagctgcagcgcgatctcg

SEQ ID NO: 8807 - DNA, 390 bp, Zea mays
  Clone ID: LIB3150-028-Q1-N1-E3
tcttaacagcgatggcatttaaagactggagcgatctcgactctttcgtgaacaacagtcagatactcattgacagtgtttatgaagatgatatgttggtcttggatgtattgaatagcctggtgaatgcaccctctaaaatgtcagaactagtgattaatattccttcatgttcgcttggaaaaactgactctgtgttaagggaggaaggccaccctaccattgatctgtctaaacacgggaagccagttcgtatatccagtgcttccaagactaggaagaaaaaacctaataagatattatgtgcagaggtgcctgctgaagcacaaaaaaaatgtgacgataatttagtcctgccggatacactgagggttggtatcactgatgatt

SEQ ID NO: 8808 - DNA, 364 bp, Zea mays
  Clone ID: LIB3150-028-Q1-N1-E5
tcgacctattgcgtggcatgtacggcggcggctactagaagctgtccaccatacatcaatactcatcgctcgtcattatgaacaggctctactgatcttgcatgcatagaataggtctcgtgaatgcaccctttatcatgttaaaactagagattaatattcattcaggttcgctcgaagaaactgactctatgttaagggatagaagccagcctaccattgatctagatagagcaatgcagcctattgggtaatacattgctttcaaaactacgaatagcaaacctagaaagatattaggtgcagacgtgcctgctgaagcacataaaatatgtgacgattatttaactctgccgaaacactg

SEQ ID NO: 8809 - DNA, 286 bp, Zea mays
  Clone ID: LIB3150-028-Q1-N1-E6
tcgcgacaggtagttcaattgtgatcttggactattacgaatccctcttgttttaatgttttatttgcctttttattttaaaaaaaaaaaaaaaaaaaaaaaaaaaaaaaaaaaataaaaaaaaaaaaaaaaaaatataaaaagtaaaaactagaaaataaaaattccttcaagttcgcttgaaaaaaactgactctatgttaaagagaggaaggccaccctaccattgatctgtctaaacaaaaggaagggggggcgcccatccagtgcttccaagactaggaag

SEQ ID NO: 8810 - DNA, 248 bp, Zea mays
  Clone ID: LIB3150-028-Q1-N1-E7
tcggtcagagaagccaaaacaggttggagagggtaaaggtgtggatactgagtccactagagtcgaatctgtgactataaatgaagatctaaaagaaaacgatccagacgatgacagatgtcgttagtatatacctgtatgaacgtctgaatacaacatctgctgatcctgctactgagatagatataagtaggcgagagacgttcttatcttgaacagactttaattagagttctgatatgtcatag

SEQ ID NO: 8811 - DNA, 228 bp, Zea mays
  Clone ID: LIB3150-028-Q1-N1-E8
tcgtaacagcagtcccatctagagacgtgcgggagccaaactctatctagtccaacccccagatcctcattcccagggtttatgaacatgacatcttcgtcttgacatctatcgaatcgcctgatgattgcaccctctaacaagccagaactagatactaatatcacttcaggctcccttgcaataactgactctgagtctacgcaggaacgccaccctacaatcatc

SEQ ID NO: 8812 - DNA, 384 bp, Zea mays
  Clone ID: LIB3150-028-Q1-N1-F1
cgccgtctgccttctgcgcctccattgcggcctctgtcccttgcaagttcaatctcacctccaaccatgggtaaagagaagtcccacatcaacattgtggttattggccacgttgactctggcaagtcgaccaccacaggacacctgatctacaagcttggaggcattgacaagcgtgtgatcgagaggtttgagaaggaggctgctgaaatgaacaagcggtccttcaagtacgcatgggtgctcgacaagctcaaggctgagcgtgagagaggtatcaccattgatatcgctctgtggaagtttgagaccaccaagtactactgcacggtcattgatgcccctggacaccgtgacttcatcaagaacatgatcactggtacc

SEQ ID NO: 8813 - DNA, 321 bp, Zea mays
  unsure at all n locations
  Clone ID: LIB3150-028-Q1-N1-F10
gagagacgacccacgcggccggcaaccagcncccgcgcancaaagacgagcgaggcagcccggagggcaagnccaccagcggcgaggaagacgccacccgcagcagccacggggacgacaagggcgacaaggcccagagcggggacaccgacaggcaggaaagggaccgcgcnagcacgagcgcggacgaccgcagagcaggaggggcgcccggcggcaacgacgacacgcggcacgncacccncgagaacgnggaaaggaggacgagggagcncaaggaccacacggacgccaacaacgggaacangcagggcgggaaca

SEQ ID NO: 8814 - DNA, 340 bp, Zea mays
  Clone ID: LIB3150-028-Q1-N1-F12
gccgctcggtcgcctcctgctggggggcacgggcggtcgaaaccctaccgccttcgccccctccctacactccattccacctcgccgtcaccagagggcgccgccgcatgtgctcgcggtcccaaggaaggaggcggcggcgcgattattctctgctttggtcgcgtctgcccggatctagtctggttccaggaggtgggggcgacatgtgtggggcgtcgacccttagcctgcgcggatcggccttggaggcatcctggctgtagtgagctcggcgctcgtatgtcactttcgggcgttgaggaacctggctgtgttgttcgcgcatcaagggggcttg

SEQ ID NO: 8815 - DNA, 377 bp, Zea mays
  Clone ID: LIB3150-028-Q1-N1-F2
tcgcgagaacatgaacggcaaggagcggggcggccgtaacatcaccggtaaccaggcccagtcccgtggcggtggcggtggcggcggtcgctactgctgaggtcgcggacgccgcagctatggtggcgggccccatgacagcagctatggcgccggtggcggctactgcggtctgcccgcgggtggtggcggcacctactgaggcggtggcggctacagcagtcggcgcgagggtggtggtggcggctactgcggccgcagcggctgctggagggactgatgtgtgcgcccatcctggcttctgccgagttatcttatctatctatagtatcgtgttaccgctcgcttctgtcaccgtgttagtgtccgttctacct

SEQ ID NO: 8816 - DNA, 382 bp, Zea mays
  Clone ID: LIB3150-028-Q1-N1-F3
caacgctccgtccccgcggcccaccaaccgccgccgccgccgcagccatgcacggccgccggcacctcgcggcgtcccttacccgggccctgatccaggcgccatcccgctccatctcttccaccccgtctctcctccaaaccctcgacccctcagtgccgtcgcctcccgccgcgggagcagggcggctcgcggagctgcggcggcggctgcaggcggacgcgccgtcgctgggtgacttcacgtactcagtggaggtggggacgcggcagcgcccgctgcccaagcccaagtggatgaaggagaccgtgcctggcggcgccaagtacgcggccatcaaggccaagctgcgggagctgaagctgcacacggtctgcgagga

SEQ ID NO: 8817 - DNA, 348 bp, Zea mays
  Clone ID: LIB3150-028-Q1-N1-F4
ttcgagatcggtccccaggtgctcaggaactcgacggtcggcgtgctgctgccccccaagcagaaggacgcgacgtcgccgctgcccggctggatcatcgagtcgctcaaggcggtgcgattcatcgacgcggcccacttctctgtccccgcggggcagtacgcggtggagctggtggccgggcgggagagcgccatcgcgcaggtcatccgcaccgtgcccaaccgcgcctacaacctgtcgttcgccgtcggcgacgcccggaacggctgccacggctctatgcttgtggaggcgttcgcgggcaacgtcacgcagaaggtgccgttcgattccgccgggaaaggt

SEQ ID NO: 8818 - DNA, 390 bp, Zea mays
  unsure at all n locations
  Clone ID: LIB3150-028-Q1-N1-F6
cagcgaaagtccctgccgcctaaaacgctagcccccgcctctacctccgctgctcgccttcccctctcagtctctcacacgcagccgcacgccaatacttagccttcagacgcctaaaatgggtcacaacgacggagagcacgagcacgagcacgagggcgacgacctctccgctgacgactcttcgtggagcgacggcgtctggtccgaggacgacgatgaggagacgttgtcgtttgaggatagcgtctccggctccgacggtgagtcccacgaggctgcggtggcggaagagagcgactcttcggaggatgaggtggcgccaaggaataccgtgggagacgtgcctcttgagtggtacaaggacgaagagcacatngggtatgacat

SEQ ID NO: 8819 - DNA, 309 bp, Zea mays
  Clone ID: LIB3150-028-Q1-N1-F8
taacgctaggtcctcgcggcccaacggcgggcgtcgtcgtctaagtcatgcactgccctcagcacctcaggctctcccttacccgcgccctgatccacgcaccattccgatacatatattcgaccccatctctcgtccaaaccctctacccctcagaggcgacgcctcccgccgctgaagcatcggccggtagcgaagctgcggcggcggatgcaggcggacgcgcacacgctgcgtgacttgacgtactcagcggaggtgacgacgcggcagaacccgctgcctaagcccaagtggatgaatgagacc

SEQ ID NO: 8820 - DNA, 376 bp, Zea mays
  Clone ID: LIB3150-028-Q1-N1-G1
cagtccgcgaagacatggcggggaagaagcgcaagtccggctccgagaagccgactaagcaccgcctcccgctgggagccgatgccgacgctgtcgccgaagcctcgaagcgccgccgatcgggcgccaccaagcagcaccaggcggacgaggaagcgtccatcccgccctctctcagcgccaagatcctccgcgaggcgcgcaagcagcaggaagaggagatgcgcgccgactccagcgacgaacagcgaccctcagccgccgaggcgaccgcggggccgtccacgtcgtcctcgtttcccgtccccgccgccgatggcgagaatgaggaggacgacgttgatgagttcgacgggtttgacgcgctgagcgagta

SEQ ID NO: 8821 - DNA, 317 bp, Zea mays
  Clone ID: LIB3150-028-Q1-N1-G11
ggcggcttaaaccctacttcccaggcgatcttcgtttccgctccgtcgccgtcgatggagttctggggtctcgaggtcaaacctggatccactgtcaagcgtgagcctggacatggctatatgctgctcgtttcccaggctgccctttgggaatcaaataaaagtgacagtgcctcaatgtatgtcaaagttgatgtccagtaatttgccattggaacgctctctattgacaaatacccactgatacaattcgagttggttttcaataaagagtttgagctggcacacacatcgaatactactattgtatttttctc

SEQ ID NO: 8822 - DNA, 105 bp, Zea mays
  Clone ID: LIB3150-028-Q1-N1-G2
actgttagagatcggtccccacgtggtgagggactttacggagggcgtgctgccgcccccaaagcagaaggacgcgacgtgcccagatgcgccggctgcgatcat

SEQ ID NO: 8823 - DNA, 337 bp, Zea mays
  Clone ID: LIB3150-028-Q1-N1-G3
ctccgagggcaccggcattctctgccagagcaacgaattactacaggagctgtttcgaggtgttcgcctataattagaccgattcattaacaagcttaaggattgtgactagcagaaggccgaggttgatctggggcatagctacaaaacaggcaaggcgaaattcattgtggatcatgtttgaaacatggcgagtcatgctgataaaaatattggatacgctagacaaggacatcaataacttcttcttgctagtcaatgtatagatcgcatggcacttctctattcttgtcaagattgtggatggcgagaacatagatttcaagcttgatgagat

SEQ ID NO: 8824 - DNA, 378 bp, Zea mays
  Clone ID: LIB3150-028-Q1-N1-G4
gaagaattcgaccagacttgttataagtgcagtggcaacagtgggagctctcctattggtggctttaatgtgtttctggggttgctttctttacaaaaattttggaaaaaaagatatgcgtggtttcagagtggagctctgtggaggctcttctgtcgtgatgttccatggggacctcccttactcctcaaaagacatcctcaagaagctagagactatagatgaagaaaatatcattggagcaggaggcttcggaactgtttataaacttgcaatggatgatggcaatgtctttgctttgaaaaggatagtgaaaacaaatgaagggctagatcggttctttgatagagaacttgagatattgggaagtgtaaaaca

SEQ ID NO: 8825 - DNA, 174 bp, Zea mays
  Clone ID: LIB3150-028-Q1-N1-G5
tcgatctcggtaccacctactccgggggcggggtctacaacaacaggcctctttacatacatctctattaccaaggcgaccccattacaaccttctgggtttcctttacccatagacagagggtcattagtgagggtttcacaaaccatgcagcctccaacccttagaggacca

SEQ ID NO: 8826 - DNA, 308 bp, Zea mays
  unsure at all n locations
  Clone ID: LIB3150-028-Q1-N1-G6
tctcagacgatgctgtcgtgtctcaagtcccgccgaccgtcgatccagcaacagcgacaccatgaggaagtgcattacgatccacatgcgaanaacgcgcatccaggtaagaaacgccttctgggagctaaactgtcttgagcatggaattcaggctgacagtcagattaccgtgaaaaaaacgcataggcgaggcgatgatgcttgcaacaaatgcgtcagtgctactggtgatgagaagcaactgccaggtgctgcatgtgttgacgttgaacacactgttatggatgaagttagatctgcaactt

SEQ ID NO: 8827 - DNA, 384 bp, Zea mays
  Clone ID: LIB3150-028-Q1-N1-G7
tcgatctcggtaccacctactcctgtgtcggtgtctacaagaacggtcatgtcgagatcatcgccaatgaccagggtaaccgtatcacaccctcatgggttgccttcaccgatagcgagaggctcatcggtgaggctgccaagaaccaggcagccgtcaaccctgagaggaccatctttgacgtcaagcgtctcatcggaagaaagttcgcggacaaggaagtccagagggacatgaaacttgttccctacaagattattaacaaggatggcaagccctacattcaggtcaagatcaaggatggggagaacaaggtcttcagccctgaggagatcagtgccatgattcttggcaagatgaaggatactgctgaggcataccttg

SEQ ID NO: 8828 - DNA, 217 bp, Zea mays
  Clone ID: LIB3150-028-Q1-N1-G8
cttcaaagaaagccacattctctgagggagcaacgacctaccatacgagctcatctcaccattacgtattgaatttaactcctcattcaacaatctcaaagattttgaataaaagaagtctcagctctaccctgtctatagctacaaatccaccatctcgaacatcatactcaatacttaacacaacatggagatctacacactttatatacatgat

SEQ ID NO: 8829 - DNA, 158 bp, Zea mays
  Clone ID: LIB3150-028-Q1-N1-H1
ttcgcctcattgctacacaagctgccgaggcgtatgtcaacgcgcacctcaccaacaccgaaatatacattccccaattctactccaccaggcgcgctctgcagaactcatccggattcttccgctctgatcgagagagtagatctggactcagtgcc

SEQ ID NO: 8830 - DNA, 280 bp, Zea mays
  unsure at all n locations
  Clone ID: LIB3150-028-Q1-N1-H11
agcaaggaaccactagagacaacccacgcgcccgctcgaaaaggaacccgaagccaggccagcgggcaacaaaagaagggcggggaagngccacacgacacgaagcagccaaaccgacacaaaaggacacagaacacgggaacccaacacgacaggaagagaaaaagcgagcccgacacaaaagggcggacgaacaccaacgaaccccgagaccaaaaccaagaacggccgcaccaaaaaccagaggaagagcaaccgggacccccacaaaaaacgcaag

SEQ ID NO: 8831 - DNA, 383 bp, Zea mays
  Clone ID: LIB3150-028-Q1-N1-H2
tcgatctcggtaccacctactcgtgtgtcggtgtctacaagaacggtcatgtctagatcatcgccaatgaccagggtaaccgtatcacaccctcatgggttgccttcaccgatagcgagaggctcatcggtgaggctgccaagaaccaggcagccgtcaaccctgagaggaccatctttgacgtcaagcgtctcatcggaagaaagttcgcggacaaggaagtccagagggacatgaaacttgttccctacaagattattaacaaggatggcaagccctacattcaggtcaagatcaaggatggggagaacaaggtcttcaaccctgaggagatcagtgccatgattcttggcaagatgaaagatactggttgagcatacctt

SEQ ID NO: 8832 - DNA, 66 bp, Zea mays
  Clone ID: LIB3150-028-Q1-N1-H5
cgaggcggtcgccggcatcctccggcgggacctctcggacgccgagctggtccgctccgagtgctc

SEQ ID NO: 8833 - DNA, 376 bp, Zea mays
  Clone ID: LIB3150-028-Q1-N1-H7
caggatctgtgccgcgatggcgacgtcgaacaccgctcggatggaggacggcggcggtgacctgcggagcaccatcaagaagtggaacatcatctaccctgtctacctcaactccaagaagacggtcgccgagggccgccgcatcgccgctgccaaggcctgcccggaccccacctgcatcgagatcgctgactgctgttcgcacctcaggatccctcacgccatcgagttggataaggcgtaccctcgggatttctttcaggtggggagggtcagggtgcagcttaagaaagatgacggctcccccgtcaatcctgctattaaaacaaagaagcagctgatgatccaagtagtagagctagttcccaagcatcac

SEQ ID NO: 8834 - DNA, 325 bp, Zea mays
  Clone ID: LIB3150-028-Q1-N1-H8
cgcataactagggaactcactgcattgtatagtctaatagtggttgattttacgctgaaggaagatggcgtgaatactgcaagctatgatccaatacctcatgtcaatgcaagcatgtaacctgataaccctgccttagaactgccagatctactagtactgatactatatgatatcaactgcgtaagtcatcttcaagaacaaagactatagacgcgacctagcgagctacgtgctcagcaatatggaggtgtacatttactaggtctgcaactgacatattacctgcatagctgttattcgatactagctgaaggtacgaatg

SEQ ID NO: 8835 - DNA, 367 bp, Zea mays
  Clone ID: LIB3150-028-Q1-N1-H9
gaggctaacttactgagatctaggcgacactctgcactatgatcaatgacctagctgcattaacggagatgattgagactgtcaaacagcacgttaacgatgctaaatctcctgaactaaaagacactcgcatgctgcgcgatgtgctcattgaggctgttcattgatctgggaagaaccatcgacagaattctaatgcagcaccttgccaattcaaaccatcaactgagcttttgaatgctttctgcacgagtggccgactcatactggaactcatatacaaagcacacacacagtgctatgaggatgcttatctgatgcaagctgttgctgaaatcataagaacactgcatgaccaagatgtcct

SEQ ID NO: 8836 - DNA, 299 bp, Zea mays
  Clone ID: LIB3150-029-Q1-N1-A1
cgttgaaggaaatgagtatccgagtaccgagaacaaaagaagagcttttggatataaacggcctcggcaagacaaaggtcaagaagtacggggaccgcttgcttgcaaccatcgaggactttctcagcaaacacccaaatccaaggagaaacagcggcggaggtggcgacggcaacgagcactccgatgcggcaaagaagcgaaggggctccaccgccatctctgcagcgagttacggcgacgatgacttcgacgaacgcacgggccagcagtccaagaagcgcgcggccaagacgcga

SEQ ID NO: 8837 - DNA, 403 bp, Zea mays
  Clone ID: LIB3150-029-Q1-N1-A10
ggaccactctgccgaccacatctacaccgcatcaacggtccttccaagtgagctccaatcccctgtctgtagatggagagggtgctaaaggatgacgccgtcgaggagaagggcgagcgcgccaggatggcatcgtttgttggggccatggcaatctcggatttggtgaagaccacattgggcccaaaaggaatggacaagatcctgcaatcaactggcagaagacgtaatgtgactgttacaaatgatggggctaccattttgaagtcacttcacattgacaatcctgctgcaaaggtccttgttgacatctcaaaagttcaagatgacgaagttggtgatgggacaacttctgttgttgttctagctggagaacttttgaaggaggctgagaagtaattaa

SEQ ID NO: 8838 - DNA, 368 bp, Zea mays
  Clone ID: LIB3150-029-Q1-N1-A11
ggaccactctgccgaccacatctacaccgcatcaacggtccttccaagtgagctccaatcccctgtctgtagatggagagggtgctaaaggatgacgccgtcgaggagaagggcgagcgcgccaggatggcatcgtttgttggggccatggcaatctcggatttggtgaagaccacattgggcccaaaaggaatggacaagatcctgcaatcaactggcagaggacgtaatgtgactgttacaaatgatggggctaccattttgaagtcacttcacattgacaatcctgctgcaaaggtccttgttgacatctcaaaagttcaagatgacgaatttggtgatgggacaacttctgttgttgatctagc

SEQ ID NO: 8839 - DNA, 256 bp, Zea mays
  Clone ID: LIB3150-029-Q1-N1-A12
tgaccactctgccgaccacatttggaccgtattaacggtccttccaagagagctccaatcccctgtctgtagatggagagggtgcttaaggttgacgccgtcgaggattatgtctagcgcgccatgatggcatcgtttgttggtgccatggcaatctcggatttgttgaatactacattgggcccatatggaatggacaatatcctgcaatcaactggcatttgacgtaatgcgactcgtactaatgatggggctt

SEQ ID NO: 8840 - DNA, 341 bp, Zea mays
  Clone ID: LIB3150-029-Q1-N1-A2
ctccgatcgtcggcgtcttcgccgccggcgatctatctctctgacagtggcggcgcccatgtcagccatcgactcagcgtggcagcttctgatcgccaacttcaccgagttccagctcgacaccgtcgtcaccttcctgctacacgagaccgtgttattcctctccggactcccctacctcctgttcgagcgctgcggactctgcgacaagtacaagatccagaagacgagcaacacctctgcttaccaaaacagatgtgtcttgcgcctcattctctaccatgtgtgtgtgaacctgcctgtcatgattttctcgtatcctgccttcaaattcatgggtc

SEQ ID NO: 8841 - DNA, 383 bp, Zea mays
  Clone ID: LIB3150-029-Q1-N1-A3
ctccggagagtccagcggagttgggtggcaagatctatgagatgatggcgattgccctcggcgggagatggggaaggtccgacatggaggaggccgaagcgtcgacgggtgaggccagcgcagaggcagactcatctgaaggcaccgtagcagaggtgattgagccctcggaagttagacccgagagcgatccgtggagggaccagtgagttctcccacgggcatcctttgttagaactccatatttagcagtgccggggaaaaaaactaagccatgggcaagaacatatttggtcacagttgcttctatatgggttcttgccgtggcaattttttgtaggcttagacttttgccgccactaaaatcttattgaggaggtagt

SEQ ID NO: 8842 - DNA, 349 bp, Zea mays
  Clone ID: LIB3150-029-Q1-N1-A4
gcgctccaccgccagaattatcgtcaccccggagcctctacttcccggtctcttccgaccgttgccttactacactacatctacagctgcgacgccggcgagcccgacaccgcgaatcggatccgacgacaaggcgagagggaagagatggggctcacgttcaccaagctgttcagccggctgttcgccaagaaggagatgcggatcctgatggtggcactcgacgccgtcggaaagaccaccatcctctacaagctgaagctcggcaagatcgacaccaccatgccgaccatacgatacaatgctgaaactgtggagtacaagaacatcagcttcactgtctgggatg

SEQ ID NO: 8843 - DNA, 299 bp, Zea mays
  Clone ID: LIB3150-029-Q1-N1-A5
gcctaaagcccttcctctctcctcggcgccggaatggcgaaaagcggcggcgagtccactgtggaggttcctattcccgcttccgcgtcggctacgaggccgaaggcgaaacaccgtatagagatcgaggggtaccctgtggatggcgtctccattggcggtcaagagacttgcgtcatcttcccgactctgagcctcgccttcgacatcggccggtgcccgcagcgcgccgtctcccaggagttcctcttcgtctctcacgggcacctcgaccacatcgggggccttcccatgtatgt

SEQ ID NO: 8844 - DNA, 370 bp, Zea mays
  Clone ID: LIB3150-029-Q1-N1-A6
cgagaagcgagagcatggacaccacaacagcaagcttcacctgggccgctgcagtgtccatagccaccgcaggagactgagatggggggttttgtcaagacccacaagagcaatgcgtacttcaagcgtttccaggtgaagttcaagagaaggcgcgctggcaagacagactacagggccaggataaggctgattaaccaagacaaaaacaagtacaatacacccaaatacagatttgttgtgcgatttaccaacaaggacatcacagcacagatcatctctgctagtatagcaggtgatatggatcttgcttctgcttactcgcatgagttgccacgatatggtcttgaagttggtctgaccaactatg

SEQ ID NO: 8845 - DNA, 347 bp, Zea mays
  unsure at all n locations
  Clone ID: LIB3150-029-Q1-N1-A7
tcgctcgggttgtctctctcatcggcacacccgagctcgcgccctccttccacgtcgaggtatgagtcctgctatgatggcgaccgacgtgactgagactagctcgccgctggtggatgctgtcatagaggcgcccgccgacaccacggaggcgcctgctgcctacacgaaaccggccaaggccaataaagccaccgcgcccaaaaagtgcgcgagcccgacctactcgccgtacgccaagatggactcggaggcgagcacgctgctcaaagagaggacngagtccaccagctgcgccattgccaagatcgtgcaggacaagcgcaatgcctagctcccgtccaact

SEQ ID NO: 8846 - DNA, 402 bp, Zea mays
  Clone ID: LIB3150-029-Q1-N1-A8
caggactgtcatctctcagttgcaattgcaaaaaaaatacagagagagagagagagagagatccctaccctgcaaagagagactgacaatggacgcaaaaccggcgagtgtctgcatcttcctgctgcttcttctggcgcagaatccttcttcctcctctgcagacgaccagaagtgcttttacaccactgaccgggtggcgacctggtgcgtggactgggcgtgcaagttcggctgcctgatcgacgccaagcagtaccataccaagtacaagaacagctggtgcgaaagctccaggagaggcatctgtcactgccacttctgcgactgattctcacgaacagtcatctcgaaataaacaaatcatgtaataaaagccccgtggtcgtacgatataatttt

SEQ ID NO: 8847 - DNA, 393 bp, Zea mays
  Clone ID: LIB3150-029-Q1-N1-A9
ctcgccgccgccgccgctcgtccctcgccccatcgcgatggcccggatcaaggtgcacgagctgcgggggaagagcaaggcggatctgcaagcgcagcttaaggagtttaagtcggagctctccctgctacgcgtagccaaggtcaccggcggggctcccaacaagctctccaagatcaaggttgtgcgcacctccatcgcgcgcgtgctgaccgtcatctcgcagaagcagaagtcggcgctgcgtgaggcgtacaagaagaagaagctgctcccgctcgacctccgccccaagaagacccgcgccatccgcaggcgcctcaccaagcaccagctctccttgaagaccgagagggaaaagaagcgtgagaagtatttccccatgaggaagta

SEQ ID NO: 8848 - DNA, 385 bp, Zea mays
  unsure at all n locations
  Clone ID: LIB3150-029-Q1-N1-B10
gttcgtctccctcctcgcgttcctctgttgcgctcgccgccgccgccgcatccgtcaccttcacactgcgctccctccctccctccctgtctgcgacgactgggtggtctaccgccgccctcgctttcgcgggcgaagagcgctcaccagtttccttggatctttgagctttggaagatgccgaggtggacagagaattctgcttccaccaaatcagctgaattggtgaaacaacaagaccgtttggagtttgacgatcctgatgaggtagacgaagaggaagaagttgagtatgaggaagttgaggaggaggtcgagtatgaagagacagaggacgagtatggacaganctgagctgtacgccaagttgatgctaaacatgaca

SEQ ID NO: 8849 - DNA, 404 bp, Zea mays
  Clone ID: LIB3150-029-Q1-N1-B11
gttcgtctccctcctcgcgttcggctgttccgctcgccgccgccgccgcatccgtcaccttcacactgcgctccctccctccctccctgtctgcgacgactgggtggtctaccgccgccctcgctttcgcgggcgaagagcgctcaccagtttccttggatctttgagctttggaagatgccgaggtggacagagaattctgcttccaccaaatcagctgaattggtgaaacaacaagaccgcttggagtttgacgatcctgatgaggtagacgaagaggaagaagttgagtatgaggaagttgaggaggaggtcgagtatgaagagacagaggacgagtatggacagactgaagctgtacgccaagttgatgctaaacatgacagtaaaatggtggatgctga

SEQ ID NO: 8850 - DNA, 302 bp, Zea mays
  Clone ID: LIB3150-029-Q1-N1-B2
cagtgcgtagagaggatcgtcgaacagaacagcatgaagatggtcatcgttctcgtcgtgtgcctggctctgtcagctgccagcgcctctgcaatgcagatgccctgcccctgcgcggggctgcagggcttgtacggcgctggcgccggcctgacgacgatgatgggcgccggcgggctgtacccctacgcggagtacctgaggcagccgcagtgcagcccgctggcggcggcgccctactacgccgggtgtgggcagacgagcgccatgtaccagccgctccggcaacagtgctgccagca

SEQ ID NO: 8851 - DNA, 409 bp, Zea mays
  Clone ID: LIB3150-029-Q1-N1-B3
gcgagctgagctcccaagtcgacgtggcggggatggctgcgacggccggcgtcggcggtggtggaggggctaacgcgggggtggcagagcagatagcacaggcagtgcggtccacctgcaatctcctgcagctcatggagcagtcctcccccgctcaggttcacttggcaaaactacccaagaacctgttggaaaaagcatcctttgcaaagaacacggagcatgtactgcaccagctacctcaagtaatttcatccttggatgcttatatggacaggagtttgcaaagtgcatctcaaattaagactgtcacacagctcttgtcaaacatggagaagacacagctgaagtccatgttgcctttctctcaaaggaaggaagatcagaagagtactgaacccttaagaac

SEQ ID NO: 8852 - DNA, 411 bp, Zea mays
  unsure at all n locations
  Clone ID: LIB3150-029-Q1-N1-B4
ctcaaaaccaagcaacaccgtggcgacgcaagactatcagagatgaagaccggcgtcgtggcactacagctactcaccatcaccatgtttctcgtgttgtcgtcgcctgcagatagcacgatagccaggattgggccagactacttccaagacacctgctcggcgaggatttctccgggggcacggtgccggcctcgcaagtgcgccgcggactgcaccaggcaattcaggggcggcgtgggcggctgtgaccgctcggngtgtacttgcgtatacacctgccctgcggtcccgccatcggcaaagaatcgatcggtcgcgtgactctaactgcctcgatgcataagtagtgacggacgggctagtagccgacctgtgacggctttgcgtctgatgaaatcgtgaaatgag

SEQ ID NO: 8853 - DNA, 406 bp, Zea mays
  Clone ID: LIB3150-029-Q1-N1-B5
gctaagtcgcctcgaattcttcccagctagtagcgtgtgccgtaccccgtcgctcaaccgggatggcgtcgagtggggatccgcccggatctgctgatgagaagaaaactccaatatccgaagggtcttccgacgaacgtcaagggcttcctccagcaggcttttcaaatccttttgattttggttctatgcaaagtttgctcaatgatccatctattaaggagatggcagatcaaattgcaagggatcctgcattcaaccggatggctgagcagctacagaaaagtgctcaaagcacaggagaacagggcacacctccattaaatcctcaacaatacatggaaacaatgcaaaaggtcatggaaaacccccagtttatgaccatggcagagcgtctggggaatgc

SEQ ID NO: 8854 - DNA, 345 bp, Zea mays
  unsure at all n locations
  Clone ID: LIB3150-029-Q1-N1-B6
ctcacacattgctgtcaagtttgctgagctcgttaccaagattgataggcgatccggcaaggagctggagaaggagcccaaatttctcaagaacggtgatgctggtatggtgaagatggttcccactaagcccatggtggtggagaccttttctcaatatcctgctcttggtcgatttgctgtccgtgacatgaagcaaacggtggctgtcggagtcatcaagagtgtggagaagaaagacccaactggagccaaagtgacgaatgctgctgccaagaagaaatgatctatcntgctggtgacgaaggctgctgccaagacgaaatgatctnatctgctggtgct

SEQ ID NO: 8855 - DNA, 384 bp, Zea mays
  Clone ID: LIB3150-029-Q1-N1-B7
accacaccacacctcctcgcttccactccgctcgtctgacatctcgtcccgtcctttcgtttcgaagcctcgcgagccccgacgatggccaccgccgcggtgtcggtcgacgagaagctcgacaagcttcgcgccgaggtcgccaagctcgaccagatcagcgagaacgagaagtccgggttcatcagcctcgtgtcacgctacctcagtggggaagcggagcagatcgagtggagcaagatccagacccttacggatgaggtggtggtgccctacgataccgacgcgttccctgctgaagatctcgaggagacgaataagctgctggataagctcgctgtgctcaagcctaacggatggctcgggacgaccatgggctgcact

SEQ ID NO: 8856 - DNA, 347 bp, Zea mays
  Clone ID: LIB3150-029-Q1-N1-B8
tcgcattgataagataaaggagttcaactggagctttgaaaatttagagaaagccttagacgaagggggcgagcttcatggtaaaacagtttatctgtttggaagcactgagccccaactattggatgttaatggcgaatcaaagatagtgcttattccaatcgtagttgctgtagactgccctttccctgcatcagacaaaattggcataaactctgtccaaagggaaaatgaggaaatagtgccaatgaacgccatgaagatggcatgggtgccttatgttccccttgaggaccggcttagcaggattgacagtttgaagactaaaatattcactctccgatgca

SEQ ID NO: 8857 - DNA, 381 bp, Zea mays
  Clone ID: LIB3150-029-Q1-N1-B9
cacgagcaaccgataatccgccggcgttgagatgttggtttatcaggatctcctatctggcgacgagctcctgtcggattcattcacctacaaggagctcgagaacggcgtcctgtgggaggtcgagggaaagtgggtcacccaaggtcctgttgatgtggacattggtgccaatccatccgccgagggtggtgaggacgaaagcgttgatgacacagctgtgaaggtggttgatattgttgacacattccgtctacaggagcaacctccttttgacaagaaatcatttgtgtcttacatcaaaaaatacatcaagaatctcactgctgtgttggagccagagaaagcggatgagttcaaaaagggtgtcgagggtgcaac

SEQ ID NO: 8858 - DNA, 238 bp, Zea mays
  Clone ID: LIB3150-029-Q1-N1-C1
gtgcaagcagagcggattccagcaggtgccagctaggaggaacgatgcggagatgacgaaaaacctatcctcgggcattgcgtcgagttgaataagcatgataacgcacgcacatgagacacgctaatggtatcgacaatgccagtcctgtgcgacaatagaggtgtcagcaattgatgctactggagccacttgaccggactcatgcaatcattggctagagtgtacaatacatact

SEQ ID NO: 8859 - DNA, 395 bp, Zea mays
  Clone ID: LIB3150-029-Q1-N1-C10
cccacgcgtccgcccacgcgtccggcgagcggccgtcctttttttttttttttttttttttttagaaacaaggcctgggtgcataatggttatccaatccgagagcgtcactgcctttatcagtgcatcagcccaaaggaatacagaagttattttaggatccatcttcataggctctggtggaaatcaatggttcttgaaccaagttcaaaaacccatgactaccaagtatgatcttatatggaggtaaggatctgagagacatgaaccaagttcatactgcacggttcttaataaacagaattaactttttaaccaacacggcttgtgaaccatatacaggtttttttcctttactgatccatttttttttcaagcctgatggttttgcatta

SEQ ID NO: 8860 - DNA, 412 bp, Zea mays
  Clone ID: LIB3150-029-Q1-N1-C11
cttcaaacatgcccatcattcttcactctgcgctgattaccaacctctattttatatcccagcttctctacaggaagtacagtggaaacttccttgttaaccttcttgggaagtggaaggagtctgaatactctggccattctattcctgttggtggtcttgcttactatgtaactgccccatcaagtttggctgatgtccttgcaaatccattccatgcactgttttatgtggtcttcatgctgtcagcctgtgctctgttctcaaagacatggattgaagtttctggttcatcagcaaaggatgttgctaagcagctcaaggaacaacaaatggtgatgccaggccatcgtgagtcaaacttgcagaaggaacttaaccgatacatccccactgccgctgcatttggtgg

SEQ ID NO: 8861 - DNA, 366 bp, Zea mays
  Clone ID: LIB3150-029-Q1-N1-C2
cttttcgcgtttagaacctctaaaatttcccccactcgccagtcgcagcagcacctgtagccatggacgccagcggagccggtagcaaggggaagaagggtgcggccgggcgcaaggcaagcggccccaggaagaagtcggtgacgcggtccgtcaaggccgggctgcagttccccgtcggccggatcgggcgctacctgaagaagggccggtacgcgcagcgcgtgggcactggcgcccccgtctacctcgccgccgtcctggagtacctcgccgccgaggttctggagttggcagggaacgcggcgaaagacaacaagaagacgcgcatcatcccgcgccacgtgctcctggcgatccgcaacg

SEQ ID NO: 8862 - DNA, 392 bp, Zea mays
  Clone ID: LIB3150-029-Q1-N1-C4
cgcaacctcaatgccatgaacaagctcagcaccaagaagccgtggtccctgtctttctccttcggccgtgccctccaggcgagcaccctcaaggcctgggctggcaaggtggagaacttggagaaggctagagctgccttcctcgccaggtgcaaggccaactctgaggctaccctcggcacctacaagggtgatgctgccgccgacaccgagagcctccacgtcaaggactacaagtactgagttgcttctctttgcgtgcccgttttggaactcctgcctacgagctaggttgcggagtgtggtttgctcgttagagcttattttcggacatccaaaaaacatgcttcctatgtgggatgatgggtaatcttaaatattggatgtaatta

SEQ ID NO: 8863 - DNA, 363 bp, Zea mays
  Clone ID: LIB3150-029-Q1-N1-C5
gaaaaagtagagtagactacgacagcgtccggcgaggaggcggaggcgaagatgaggaagaagctcggtacccggtttcgcgcggctcgaatcaaaaagataatgcacgcacatgaggatgttggaaagattgcactagcagttcctgttttagtttacaggtctcttgaatcgtttttacaagatttaattgaccgtacttatgaaattactgttcaaagtggagcatagacactgaataccttccacctgaagcaatgtgtgaagagctacagttcttttgatttgctaactgaagttgtcagcaaggtaccatatcttggtggcgctgattcctgtggagatgaaagaggattacctaga

SEQ ID NO: 8864 - DNA, 304 bp, Zea mays
  Clone ID: LIB3150-029-Q1-N1-C8
gtctgccttctgcgcctccatttcggcctctgtcccttgcaagttcaatctcacctccaaccatgggtaaagagaagtcccacatcaacattgtggttattggccatgtcgactctggcaagtcgaccaccacaggacaccttatctacaagcttggaggcattgacaagcgtgtgatcgagaggttcgagaaggaggctgctgaaatgaacaagcggtccttcaagtacgcgtgggtgctcgacaagctcaaggctgagcgtgagagaggtatcaccattgatatcgctctgtggaagtttga

SEQ ID NO: 8865 - DNA, 89 bp, Zea mays
  Clone ID: LIB3150-029-Q1-N1-D1
agagcgatcacggacgatgcacgcacgcgtacgcaagcatgcattctagacagccgacgcatgcgttcgttgcataccataccatccca

SEQ ID NO: 8866 - DNA, 377 bp, Zea mays
  unsure at all n locations
  Clone ID: LIB3150-029-Q1-N1-D3
caacaccacctcgcctgcgatctccgtagcctccgtcgcgtcgagcatcgatcatgtcggcctactgcggaaagtacaaggatgagctcatcaagaatgctgcctacattggcacccctggcaagggtatccttgctgctgatgagtccactggcaccattggcaagcgcctttccagcatcaatgtcgagaacgttgaggagaaccgccgggccctccgtgagctcctattctgctgccctggtgctctccagtacatcagcggtgtgatcctcttcgaggagaccctgtaccagaagaccaggatggcangccttttgtcgatgtcctcaaggaggggagcgtactccctggcatcaaaggtgacaagggcacca

SEQ ID NO: 8867 - DNA, 414 bp, Zea mays
  Clone ID: LIB3150-029-Q1-N1-D4
cacgttcctttccccaactccccagcgcctctccgcgccgcgatccagatccaggttgttcagcatgggtctggtgaaggaaggcgtcgacatggaggagggaaccctagagatcggcatggagtacaggactgtatctggtgtggccgggcctctggttatcttggataaagtaaagggcccaaagtaccaagaaattgtaaacatccgacttggagatggcaccactcgccgtggtcaagtccttgaagttgatggagaaaaagctgttgtacaggtttttgaaggaacttctggaatagacaacaaatacacaaccgtgcagtttacaggcgaggttttgaaaacttctgtctcactcgatatgcttgggcgcattttaatgggttctgaaaacctattgacaatggcccc

SEQ ID NO: 8868 - DNA, 243 bp, Zea mays
  Clone ID: LIB3150-029-Q1-N1-D5
tcggaagagagcagagggccagaggcgcagaaggcagtcgcggacaggaggaagaggaagaagaagcggcagcgagcgaggatgctgtgcctgaacgtgttgaccaacgtgaacctggaggggtggacacctccgcatccatggcgaagcttcaagccgtcgccacattatgggcaagcccgaggcctacgtgatggatgttctcaagggttcggtgcctatggcatttggaggtacccagga

SEQ ID NO: 8869 - DNA, 406 bp, Zea mays
  unsure at all n locations
  Clone ID: LIB3150-029-Q1-N1-D6
atctctagccaacacacacataatactctccattccattccattccatctcaaaggatagaataatgggcggtctctccaccaagcttttcgtggtcctcctcctgctcgtttgttacaccgggacgcaaggcgggccggtgactatggtgtcggcgaggaagtgcgagtcgcagagcttccgcttcaagggaccttgctcgagggacgccaactgcgcaaacgtctgcctgaccgaaggtttcaccggcggcgtgtgcaagggcctacgccaccgctgcttctgcaccagggactgctagtactgcctcgcctcgtgtcctgcgtgtgcatatatagccgcagcggatcagtaaaacatgcatgcatgcgttaccaaatatntggcagtaccagcaagttaatga

SEQ ID NO: 8870 - DNA, 349 bp, Zea mays
  Clone ID: LIB3150-029-Q1-N1-D7
ccctcactctcgttccatttccccatctcccagatccaattcgcgagttcttcctcctctgccgccatggcgctctctgtggagaagacctcgtctggacgggagtacaaggtcaaggatctctcgcaggcggacttcggtcgcctcgagattgagctggccgaggtcgaaatgcccggcctcatggcgtgccgcgccgagttcggcccgtccaagcccttcgccggcgctaggatctcggggtctcttcacatgaccatgcagaccgccgtcctgatggagaccctcaccgcgctcggcgccgaggtccgctggtgctcctgcaacatcttctgcacgcaggaccacg

SEQ ID NO: 8871 - DNA, 284 bp, Zea mays
  Clone ID: LIB3150-029-Q1-N1-D8
gagctatgtcggaccatgcacgcgcgcgtacgctagcatgcattctagagagtcgacgcatgcgttcgcattcaatctcactaccatacatcatgtgggacgtcgaatccatgcggtttttctaaactacgggcatggatgtcgacgaagagaagatctagcacggaacgcaaggcaagatctaagatcactaaagtgtttactctcgcccacttcatattgatctttcacaatgcgcaaaggatcgcctgatgcactggcgtgcgcacatccgaccggaccat

SEQ ID NO: 8872 - DNA, 335 bp, Zea mays
  Clone ID: LIB3150-029-Q1-N1-D9
cacgctccttacctcgcggcgagtcgggccaagcattcctccgcgaaaaacgcattctctccaaggggagtcgatcgagaagcgttggtggacatgggtcagatccagtactccgagaagtactttgactacacctacgagtacaggcacgacgtttctcccgccagaggtcgtcaagctcctttctaagaaccgcctactatcctagaactagtgtcgcgcgatcggagtgcatgcatatccgcgcttgggtgcactactcgatccaccagcccggagccgtacattatgctgttccgccgcccgatcaactaccatcattattatgaggctgc

SEQ ID NO: 8873 - DNA, 316 bp, Zea mays
  Clone ID: LIB3150-029-Q1-N1-E1
tcgctgtgaacatgaccataactatttactctgcgctgataaccaactctttgttttatatcacaccttctctacagggagctcatgcgggaacagcttaaggaacctcgctccggaggggttcgaggacgaatactctggacgttatatttctgcgggtggcgtcttttacaagtgtataagtccagtcaacattggctcgtagaacatgaacatccattgcatgcactgttttatgggaatgctattctgccatcctaagctatgttgtcaacgacctaggttgaagagattcgatcatcatgcaagcatgctg

SEQ ID NO: 8874 - DNA, 409 bp, Zea mays
  Clone ID: LIB3150-029-Q1-N1-E10
tcggattcctctttaccagcacatcgcaaatcttgctgggaacaaaactctggtgctccctgtacctgcctttaatgtgattaatggagggtcacatgctggaaacaagcttgccatgcaggagttcatgatcctcccaactggtgcctcctcgttcaaggaggccatgaagatgggagttgaggtgtaccacaacctgaagagcataatcaagaagaagtacggtcaggatgcgacaaatgttggggatgaaggtggttttgcacctaacattcaggaaaacaaagaaggccttgaactattgaaggcagccatagaaaaggctggctacactggaaaggtggtcattggaatggatgttgctgcttctgagttcttcggtgagaaagacaagacttatgatcttaat

SEQ ID NO: 8875 - DNA, 410 bp, Zea mays
  unsure at all n locations
  Clone ID: LIB3150-029-Q1-N1-E11
ccgcatcatcaagcataccctggagatcattcacctgctcaccgatgccaaccccatccaggtcgtcgtcgacgcgatcatcaacagtggaccccgtgaggatgccacccgtattggttccgctggtgttgtgaggaggcaggccgtggatatctcacccctgaggagggtgaaccaggccatctacctcctcaccactggtgccagggagagtgctttccggaacatcaaaaccattgccgagtgccttgcagatgagctgatcaacgctgccaagggctcatccaacagttacgccatcaagaagaaggacgagattgagcgtgttgccaaggccaaccgttgaactgagcttgtatcctggtgcactctgcgctggaanactttatgtcgctggcagtcgtatcggt

SEQ ID NO: 8876 - DNA, 406 bp, Zea mays
  Clone ID: LIB3150-029-Q1-N1-E12
ctccactcatcttttcgcgtttagaacctctaaaatttcccccactcgccagtcgcagcagcacctgtagccatggacgccagcggagccggtagcaaggggaagaagggtgcggccgggcgcaaggcaggcggccccaggaagaagtcggtgacgcggtccgtcaaggccgggctgcagttccccgtcggccggatcgggcgctacctgaagaagggccggtacgcgcagcgcgtgggcactggcgcccccgtctacctcgccgccgtcctggagtacctcgccgccgaggttctggagttggcagggaacgcggcgaaagacaacaagaagacgcgcatcatcccgcgccacgtgctcctggcgatccgcaacgacgaggagctcgggaagctgctggcaggcg

SEQ ID NO: 8877 - DNA, 69 bp, Zea mays
  Clone ID: LIB3150-029-Q1-N1-E2
gtcgcatcccatcccactaccacccatctcggcgtccgccgattcgatccggttcttccaacccaaggg

SEQ ID NO: 8878 - DNA, 203 bp, Zea mays
  Clone ID: LIB3150-029-Q1-N1-E3
ggaggagggtccttctctgctggtgggcctggaaagggaatgcattctcgattgtatctccgcgtcttgaccaacttccaacagattgaatcattctctgctttcaatagcgtctataacaattcgggcctttttggaatttatgcagtcactagcccaaacttttcatcgaaagcttgggatttggcaacaggggaactcct

SEQ ID NO: 8879 - DNA, 406 bp, Zea mays
  unsure at all n locations
  Clone ID: LIB3150-029-Q1-N1-E4
gtgcgaaggcgaccattccttcttcgctccttcgccgccgctatggttaagtactcgcaggagccgggcaaccctaccaaatcggccaaggccatgggaagggacctgagggtccacttcaagaacacaagggagacagcttttgcgcttcgcaagctgcctttgaccaaggctaagcgataccttgaggatgttattgctcacaagcaggcaattcccttccggagatactgtggaggtgttggtcgcaccgcacaagcaaagtctcgccactccaatgggcagggtcgctggcctgttaagtcagccaggttcatatgggatttgctgaagaatgctgagagtaacgctgatgtgaaaggctnggacgtggacaacctctatgtttcacacatncaggtgaacc

SEQ ID NO: 8880 - DNA, 201 bp, Zea mays
  Clone ID: LIB3150-029-Q1-N1-E5
gacgatgcacgcacgcgtacgcaagcatgcattatatacagtccacgcatgcgttcggaacgagagcgaccatctttactcggcgcagataacggatctttattttagatcatcacaagctctccacgacgtcatgcaggaagatctttatgtaccttgttccgatggggtacgactaagaaacatcgggccgacatattt

SEQ ID NO: 8881 - DNA, 357 bp, Zea mays
  Clone ID: LIB3150-029-Q1-N1-E6
tcggtgcgaaggcgaccatttattattcgttccttcgtcggcggtatggataagtactttcaagagccgggcaaccctaccaaatcaaccaaggccatgggaaggtacctgagggtccacttaaagaacacaagggagacaggttttgcgctctgcaagctgcctttgaccaaggctaaacgataccttgaggatgctattgctcacaagcaggcaattccattccggagatactgtggaagtgtgggtcgtacagcacaagcaaagtctcgccactccaatgggcagggacgctggcctgataagtcagccaggttcatattgcatgtgctgactaatgctgatagtaacgctgat

SEQ ID NO: 8882 - DNA, 377 bp, Zea mays
  unsure at all n locations
  Clone ID: LIB3150-029-Q1-N1-E8
ggagaggctatggggtgagaacttctttgaccctgccacaaagaagtggaccaccaagaacacaggttctcctacctgcaagagaggatttgttcagttctgctatgagccaatcaagcaaatcatcaagacctgcatgaatgaccagaaggagaaattgtggcccatgctgcaaaagctcaatgttaccatgaaggctgatgagaaggagttgattggcaaagctttgatgaagcgtgttatgcaaacgtggcttccagctagcactgctctgcttgagatgatgatattccacctttcttccccagcanaggctcaaaagtatcgtgtggagaactngtacgagggaccccttgatgatgtgtatgcaactgcta

SEQ ID NO: 8883 - DNA, 261 bp, Zea mays
  Clone ID: LIB3150-029-Q1-N1-E9
tcgacagaagcggcggctgcggagcaaacgcatgctaaggcgagggtgtgagggaaggagcaccagccatggtgcacgtcaacttctaccgcaactatggtaagacgttcaagaaaccaaggcgttcttatgagaaggagcgtcttgatgctgaactgaagctggttggtgagtatgggctgaggtgcaagcgtgagcttatgatggtccagtttgcactgatctatatccgttatgctgcaatgcactttctcacccttt

SEQ ID NO: 8884 - DNA, 255 bp, Zea mays
  Clone ID: LIB3150-029-Q1-N1-F1
cgccaccaccacacgttcacggtagcgagagcttatcgtcgtcggcggcgaagatggtgtcgctgaagctgcagaagcggctcgccgcgagcgtcctcaagtgtgggaaaggcaaagtctggcttgaccccaatgaagtcagcgagatctccatggctaactcccgccagaacatccggaaattggttaaagatgggtttatcatcaagaagcctcagaaggttcactctaagtcccgtgcaagaagggcacatg

SEQ ID NO: 8885 - DNA, 381 bp, Zea mays
  Clone ID: LIB3150-029-Q1-N1-F10
cgccgccgtctttgccggtcatgtcatgtgaccctgatggtccccagaaagggcgtcctctgcggcggcggcggcggcggcggcagcgatggccccatctggacctgctgctggtgctcgctctgccgggcggtcgagatcttcagctccaggtccggcgccaggccaccagcctttgccgccgtcagcggcgaagaagggtggttctgtttcggcggcgccagggccaggctcggcgccgtgcggccaattcccgccgagcaccgcggcagctgcagggacagcaagctgctcggaggcagcgcggcgtggtcaggcctcgctagcctgccgacgccgagcgacagggccggcgggagctgtgccgtcgttccggttccg

SEQ ID NO: 8886 - DNA, 368 bp, Zea mays
  Clone ID: LIB3150-029-Q1-N1-F11
ctcccgctcccagctcgtgttccgcttcttgcagccgtcgccgcgaagcgctccagagaacttccgtcaacatggggaagacacgtggtatgggagccgggcgcaagctcaagacccaccgcaggaaccagcggtgggctgacaaggcatacaagaagagccatttgggcaatgagtggaagaaacccttcgctgggtcatcccatgccaagggcattgtcctggagaagattggtattgaggccaagcagcccaactccgctatccgtaagtgtgctcgtgttcagcttggtaagaatggcaagaagattgctgccttcgtgccaaatgacggttggttgaactacatttgaggaaatgatgaggtc

SEQ ID NO: 8887 - DNA, 396 bp, Zea mays
  Clone ID: LIB3150-029-Q1-N1-F12
ctcgttaccaaccccaccagggtcgccaaggccatcaatgagaagacctgcaatgctctcctcttgaaggtgaaccaaatcgggtctgtgaccgagagtatcgaagctgtcaggatgtccaagcgcgccggatggggagtgatggcaagccacaggagtggcgagacagaggacaccttcattgctgacctctcagttggcctgtctacgggccaaatcaagacgggagctccttgccggtctgagcgcctggccaaatacaaccagctgctcaggatcgaggaagagctcggtgatgccgcggtctacgccggagcaaagttcatggcaccagtggagccctactaagaaaggaagaggatggggatgttttcttgtggagctatactagctcgc

SEQ ID NO: 8888 - DNA, 407 bp, Zea mays
  Clone ID: LIB3150-029-Q1-N1-F2
ccgagtcgccgccgtctgctccgggctgctgttctgcgcctccacaaggctttggcctctgtgttgtaagttttaagcttcacctccagccatgggtaaagagaagtcccacatcaacattgtggttattggccatgtcgactctggcaagtcaaccaccactggccacctgatctacaagcttggaggcattgacaagcgtgtgattgagaggttcgagaaggaagccgctgaaatgaacaaacggtccttcaagtacgcctgggtgcttgacaagctcaaggctgagcgtgagagaggtatcaccattgatattgctctgtggaagtttgagaccaccaagtactactgcactgtcattgatgcccctggacatcgcgacttcatcaagaacatgatcacgggta

SEQ ID NO: 8889 - DNA, 185 bp, Zea mays
  Clone ID: LIB3150-029-Q1-N1-F3
cacgaatacaccaaccagactccagcgtctgcaactctccatcgcgtctgctacgcctctgctgcaggacgaccaatggcttccaggaagtacttcgtgggtggcaactggaaatgcaacggtactggcgaggacgttaagaagatcgtcaccgagctcaaccaagccgaggtgccctctgaaga

SEQ ID NO: 8890 - DNA, 394 bp, Zea mays
  unsure at all n locations
  Clone ID: LIB3150-029-Q1-N1-F4
ggcgaggcaaaagcattgcgaccacagacagcgcgcgcttcaaggccttttttttttgagataacaaggaggagaggaggagatggcggtcacgatcacgtgggtgaaggcgaggcagatcttcgacagccgcggcaaccccaccgtcgaggtggacgtgggccttagcgacggcagctacgcgaggggggccgtacccagcggcgcatacactggaatatatgaggccttggagttgagggatggaggatctgattatcttggcaagggtgttcttaaggctgtcagcaatgtaaataacattattggaccagcaattgttggaaaggaccccactgagcaggttgagattgacaacttcatggtccaacagcttgatggaacctncaatgag

SEQ ID NO: 8891 - DNA, 389 bp, Zea mays
  Clone ID: LIB3150-029-Q1-N1-F5
gctgaagctagcacaacagctcctgcgaccagtgccaaaaggaccactgctgcccctcaaaagcctttgtacaagttcttaatctatggcaggactggatggattggtggccttcttgggaagatttgtgacaagcaagggataccatatgaatatcggaaaggacgcttggaggaacgctcttaactgttggaggacaatagaaatgtgaagccaactcacgtttttaattgctgcggagtcactgggagaccaaatgttaattggtgtgagacctataaacaggacaccatccgcaccaatgttgtatgcatattgaatcttgctgatgtctgtcgcgagcagggtctgctaatgattaattatgctacaggctgtatatttgagta

SEQ ID NO: 8892 - DNA, 366 bp, Zea mays
  unsure at all n locations
  Clone ID: LIB3150-029-Q1-N1-F6
gttacgccttctttcgcgccgccggcgacgtcgccgctacgcccggtacctcgcttgaatttgtgtcgccaagatgaccaatcccaccaanaatgcagggatggttggcaaatatataaccaggattggtgctagctcgcgtaagcagatcaagatgatggaggtctctcagcattaccagtactgctgcgagttctgtgggaagtttgctgtgaagagggaagcagttggaatgagcgggtgcaaggactagtacaaggtgaaggctggtggtgcttacaccatgaacactgatagtgcagtcaccgataggagcacgatcacgctgctgacggagcagactgaagcatgatatagctttttata

SEQ ID NO: 8893 - DNA, 258 bp, Zea mays
  Clone ID: LIB3150-029-Q1-N1-F7
ctggcgaggcaaaagcattgcgaccacagacagtgcgcgctgcaaggtcttttttttttgagataacacggaggagaggaggagatggcggtcacgatcacgtgggtgaaggcgaggcagatcttctacagctcgggcaacaccaccagtgaggtggacgtgggccttagcgacggcagctactcgaggggggccgtacccagcggcgcatccactggaatatatcaggccttggagtggatggatggaagatctgat

SEQ ID NO: 8894 - DNA, 201 bp, Zea mays
  Clone ID: LIB3150-029-Q1-N1-F8
gcggatccgtgcctgcacaccgcatagggagtgctggactgccctgctcttttggggcagccgggcgccgatgaggatactgctcgcacgcacacagagcagacagccggttcgagatcggagacgcggagaggggaaaggctagacgtcgacctggcactgcggctctcctacgtctcctgtggggccggcttacctagc

SEQ ID NO: 8895 - DNA, 252 bp, Zea mays
  Clone ID: LIB3150-029-Q1-N1-F9
tcgcgccggctgactagagcgccttcagtggggcctctgacccttgcaagtacactctcacctactaccatgggtaaagagaagtcccacattatcattgcgcgtattggcgcatgatgactaccgcaagtccatcaccacaggacaccttatctacaagcttagaggcattgacaagcatttgatcaatacgtttgagaaggaagctgctgaaaagaacattcttttctttaagaacgccattgtgcttca

SEQ ID NO: 8896 - DNA, 322 bp, Zea mays
  Clone ID: LIB3150-029-Q1-N1-G1
gaaggcttggtcctccttgtatcccgacctcctccggcacaaacccgtttccccgctagagttatcggtcctctgcagcgatggcgatcaaaccgaccaaggccgaaaagaagatcgcgtaccacaagaagctgggcaacctgctcgatgagtacaacaagtgctcattgcctcgcgacacgtcggtccaagcagctcagacattcgcgggccctagggcgacttcgtgtgctatggcaagaaacgctcatagcgctgatcaagtctacccagagaccgaaccaactttgaccgtatgacctgtgcgcacgtggctatttac

SEQ ID NO: 8897 - DNA, 397 bp, Zea mays
  Clone ID: LIB3150-029-Q1-N1-G10
gagaacggctggaagaaccgagagcgctccggaaatgtcggcgggtgagctgcggttggagctggacgagctgcggcggctggagagcctcgccaagcacccccgcgtccagatcctcctcgccaacgaaatccgcaacgttgaagcgaagttggcgaaggcaaccgaaccatcgcctgagccactggcggcggcttctgcgccagcgcccgcgcccgctgcgcgtcctgttttaagctacgtcactcttgggtcgttcagctgggagcaggacaacgagaagattaggatatatgtttcccttgagggagttgagcaagagaaggtggagactacttttaagccaacatcagtggatataaagtttcatgatgtcaaaggcaagaattacccgtgt

SEQ ID NO: 8898 - DNA, 391 bp, Zea mays
  Clone ID: LIB3150-029-Q1-N1-G11
accaccggaaaagaaattccccaattctactccacccggcgcgctctccccacgcgcatccggatccgtccgctctgatcgagtgagttgatctggactctgtgcctgcctgtgagggcgaggagggcatggacgagttcgagctggaggacaacctcgagttcatcctccagagcatccaggagctgatggaggacccgggggacaacaacgccttcggagacgccaaccagaacgagctcttcgccagcatcgttaactacgaccaggagaacatgctgcccgacgtgtctgcagcggacgttgctgcagggaaggacattcaggggatcccgtgggagaagatgctcttcgggagggataagtaccgggagatgaagatgaagaactt

SEQ ID NO: 8899 - DNA, 300 bp, Zea mays
  unsure at all n locations
  Clone ID: LIB3150-029-Q1-N1-G12
gacgncgcagcacgcgnacgaaagcangganccccgagagacgacccacgcgaccggancacacgcacncgcgcaagcggggggccccgcgccnaaaggcaaaccgaggcgccggcgacaccgcgncagcgcaaccgagggccagaaacccgcacggcaacaacgaaaaggacggcccgcacacagacacggagggcaacaacacggaggagcaagagaagaaccnagcgagggacgacaaggggagcgaccggacgcacaaagccaagaagaagggcaagaaagcggacgaggcagccc

SEQ ID NO: 8900 - DNA, 119 bp, Zea mays
  Clone ID: LIB3150-029-Q1-N1-G2
gagccaaggatccatatagatgagcggggtgctaccagggcagcactcattgcagatagtgagattggtcattgatcgtcaatactgatccagagctatattggaggatgtgcaaacag

SEQ ID NO: 8901 - DNA, 369 bp, Zea mays
  Clone ID: LIB3150-029-Q1-N1-G3
gttccttggaactataccaatgatgttcaacgttgttatcctttctcctcatggctacttggctcagtccaatgtgcttggataccctgacactggcggtcaggttgtgtacattctggatcaagtgcgtgctttggagaatgagatgcttctgaggattaagcatctaggcctcgatatcactccgaagatcctgattgttaccaggctgttgcctgatgctgctgggactacgtgcggtcagaggctggagacggtcattgtgactgagcacacagacattattcgcgttccgctcagaaatgagaatggcatcctatgcaggtggatctctccgttcgatgtctggtcatacttggagacatacac

SEQ ID NO: 8902 - DNA, 401 bp, Zea mays
  Clone ID: LIB3150-029-Q1-N1-G6
gccttcctcctgcgtctcgctctcgccggaggtcaggcgcaccgccgccgggcgatggacgcctcctaccgccgcgccggcaccgggagcggctccgctccccgctccgtcgaggacatctacaaggactaccgcgcccgccgctccgccatcctccgcgccctcacccacgacgttgaggagttctacgcgctgtgcgatccagagaaggagaacctgtgcctgtacggctacgcgaacgaagcgtgggaggtagcgctgccggcggaggaggtgcccacggagcttccggagccggcgctcgggatcaacttcgcgcgcgacgggatgaaccgtggcgactggctcgcgctcgtcgccgtacactctgactcgtggctcgtctccgtcgcattctacta

SEQ ID NO: 8903 - DNA, 336 bp, Zea mays
  Clone ID: LIB3150-029-Q1-N1-G8
gtcgaaccgaggcaggggaggttcggcggagaacaagttccgcatgtcgctgggattgccggttgcctcgacggtgaactgcgcggacgacattgtcgccaagaacctgtacatcatctccgtcaagggcatcaagggccgcctcaaccgcctagcgtacgcctgcgttggcgacatggtcattgacaccgtcaagaagggtaagcccgacctcacgaagaacgtgatgcccaccgtcataatccgtcagcgcaagcccttgcgccacacggacagcgtctacatgtacttcgaagataatgctggagcgattgtgaatcccaatggtgagatgaa

SEQ ID NO: 8904 - DNA, 386 bp, Zea mays
  Clone ID: LIB3150-029-Q1-N1-G9
ccgccgtcctcatcgagaccctcaccgcgctcggcgccgaggtccgctggtgctcctgcaacatcttctccacgcaggaccacgccgccgccgccatcgcgcgcgactcggccgccgtgttcgcctggaagggggagacccttgaggagtactggtggtgcaccgagcgctgcctcgactggggcgaggcgggcggccccgacctcatcgtcgacgacggcggcgacgccacgctgctcatccacgagggtgtcaaggccgaggaggactacgagaagaccggcaagatccccgatccggagtccaccgacaacgctgagttcaagatcgtgctcaccatcatccgcgacgggctcaaggctgaccccaagaagtaccgcaagatg

SEQ ID NO: 8905 - DNA, 287 bp, Zea mays
  Clone ID: LIB3150-029-Q1-N1-H1
cgccctttaccacatctgaatctcacccacccacccccgggtgccccacctcatggcgccggcgatggggctgaagcggcctgcggcgggagcaggggcggcagcagcgcaaaccgtcacgctgtccgcgcctgccgtgcgggacgcggtgcgcaccgacgtaagggaagccgaggccaccgcgaaggctactcgccccgccgtcagggtcccggcgactgcggcagtgccggcggagatcgctagggatggggtgctgtgcctggaggaggtctacgggaggcggt

SEQ ID NO: 8906 - DNA, 328 bp, Zea mays
  Clone ID: LIB3150-029-Q1-N1-H10
cgccgccgctccgccttagcgcatcgcccgccgcgacctcatcgatcaccttcagctttcaatcatggcggacgtcgatgtcgaaccggaggttgccgccggagctcccaagaagaggacgttccgttagtacagcttccgcggcgttgacctttatgctcttttcgacatgtccacggactatcttgtccagctttttcccgtgcgcgcctttgtaaggttccagaggggtctgtataggaagcccatggcgctcattaagaagctgcgcatggcgtaaaaggttgctcttgctgtggagttgcctgtgccagtcaagactcatttt

SEQ ID NO: 8907 - DNA, 342 bp, Zea mays
  Clone ID: LIB3150-029-Q1-N1-H11
tacaccagaaaaattcccagttctttggtccgcgtcagagaggcggcggcgatgtctgggcgcggcaagggcggcaagggtctgggcaagggcggcgcgaagcgccaccggaaggtgctccgcgacaacatccaaggcattaccaagccggcgatccggaggctggctaagaagggtggcgtgaaacgcatctcggggctcatctaccaagagacccgcggcgtgctcaaaaacttttttgagaaccttaatcgggacccccttacctaaacgaacaacccccccggaagaccgtgaccgccatggacgttgtctacacgctcaagcgccaaggacgcaccc

SEQ ID NO: 8908 - DNA, 214 bp, Zea mays
  Clone ID: LIB3150-029-Q1-N1-H4
cgtcacagcgccgcccccgaaccataaacctccacctcgccggcggccatggcgttctccggcaggatccaggagctcgtgaggaagtatggcaaggtggccatttgcgtccacctatccgtcttctgcgccttcatcgccggcctttacgtcgccatcaacaacaacgtcgacgtcgaagccgttttccggaggttcggtatctcccccggcg

SEQ ID NO: 8909 - DNA, 115 bp, Zea mays
  Clone ID: LIB3150-029-Q1-N1-H5
tgagcaggtctcatctcagacatataacttggatgcaaatctcagccttcttcgcttgtaccagtttgagccagaaaggatgagcatacagattgtggcccacatactgattaaa

SEQ ID NO: 8910 - DNA, 141 bp, Zea mays
  Clone ID: LIB3150-029-Q1-N1-H6
aaaaatcattgggtaaacgatgtaatgatggctatcacggggaatcgggtgtgctggaagctaggcatcaagtagaacggcacactagctaagcaggaaggagcgagctcctgtctgatctgctcggaatatatgaagaac

SEQ ID NO: 8911 - DNA, 325 bp, Zea mays
  Clone ID: LIB3150-029-Q1-N1-H8
tcgcagcaccgtccccgaaccataaacctccacctcgccggcggccatggcgttctccggcacgatccatgagctagtgaggaagtctggcaaggtggccatttgcgtccacctatccgtctcctgcgcctccatcgccggcctttacgtcgccatcaacaacaacgtcgacgtcgaagccgttttccggaggttcggtatctcccccggcgttaccgtaggcggcgaggccttacccgccctcgtttcccgcgatgaacacctgcgcgacgttcctctgccgtccatggccaacgaggtactgcaagaagagacggagcgagag

SEQ ID NO: 8912 - DNA, 367 bp, Zea mays
  Clone ID: LIB3150-030-Q1-N1-A1
cgaactcggtgaactctttctcctcgcgcagcaccggagcacaatcaaggattccagtccagtcctgccaatggagtgcgttttgggcttggttggccgcgacttctcggtggtggcggccgacacctccgccgtgcagagtatcctcgtccacaagactgacgaggacaaagtaatggtcctcgactcgcacaagctgttgggcgcttcatgggagcctggtgaccgggtgcagtttacggagttcatacagaagaaccttcacctgtaccagttccgcaacaccatcccgctgtcaaccgccgctgctgccaacttcacacgcggcgagctcgccacagcccttcgtaagaattcatacatggtc

SEQ ID NO: 8913 - DNA, 246 bp, Zea mays
  Clone ID: LIB3150-030-Q1-N1-A10
cgcagagtagcagacatatcagcgatcgaacacccgacgatttttacctgccacaccgttcatcctctcccgcgcgcttggcccttttcgcttggccttccgcccctcctcttctccgcacggagcgcctccacggtgattgctagggtttcggggccgccgcctgcagcatccctaccgtcagcgctcctacgcctgtgttcctgttcctctccgtcccgatctgccggcgtaccacggctgacg

SEQ ID NO: 8914 - DNA, 423 bp, Zea mays
  unsure at all n locations
  Clone ID: LIB3150-030-Q1-N1-A2
ggccaaccgcgccaccctgccgcggcagccatggtgcatgttaacttctaccgcaactatgggaagactttcaagaagccaaggcggccgtatgagaaggagcgcctagatgctgagctgaagctggttggtgagtatggcctgcggtgcaagcgcgagctatggcgcgtgcagtatgccctgagccgtatcaggaatgcagctagggagctgctcaccctggatgagaagaacccacgccgtatctttgagggcgaggcactcctccgccgcatgaacagatattgtcttcttggcgagggacagaacaagcttgattacgtgcttgccctcactgttgagacttnctncagcggcggctncagaccatcgtcttcaagaatggcatggccaagtccattcaccatgctcgtgtcctgatca

SEQ ID NO: 8915 - DNA, 345 bp, Zea mays
  unsure at all n locations
  Clone ID: LIB3150-030-Q1-N1-A3
cgtttctcgagcgccgcgagtcggagcgcgctctccactttgtcaaataccaaggcctcggcaacgacttcataatggtggacaacagggattcgtcggtgccgaaagtgacgcccgaggaggctgcgaagctgtgcgaccgaaacttcggcattggcgccgacggtgttatcttcgtcatgccgggggtcaatggtgccgactacaccatgagaatcttcaactctgatggcagcgaaccagagatgtgtggtaatggagtccgttgcttcgctcgggttatagccgagattgaaaatctgcangggacatatagattcactattcatactggtgctggaaaga

SEQ ID NO: 8916 - DNA, 263 bp, Zea mays
  Clone ID: LIB3150-030-Q1-N1-A4
ggtcgttagagcaccaattatctcatcgacttctgatcggtgaactcgacaccatgctggtgctgatcgttgtacttgctctcctggcgctttctgcgagcgccgacttcagtacaagcgacggctgtgacttccacacaccaccgtttcatataccggctccgtgctatatgccgcctacgctctatctgcctgcggagcagcagccgctgacattgctataccccactcaaccaccgcaactaatcccgtgccatcagttc

SEQ ID NO: 8917 - DNA, 377 bp, Zea mays
  Clone ID: LIB3150-030-Q1-N1-A5
gcttattggtgattctggtgttgggaaatcatgcttgcttctcagatttgcggatgattcatatttggacagctacatcagcacaattggggttgattttaaaattcggacagtatagcaagatgggaagaccataaaacttcaaatttgggatactgctgggcaagagcgcttcaggaccatcactagcagctactaccgtggagctcatggaatcattattgcatatgacgtgacagaccaagaaagcttcaataatgtgaagcaatggttaaatgaaattgatcgttatgcaagtgacaatgttaacaagctccttgttgcgcacaagatacggtctcttgattaaaacaccatccatgcatttgctgatgaga

SEQ ID NO: 8918 - DNA, 365 bp, Zea mays
  Clone ID: LIB3150-030-Q1-N1-A6
agcaaactcggagtcaaatatcattacaacaattactgttgatgagattgcaacaccagggctgaagaccatcttaagctttgctgttcctgatcagagatctggaaaggttgagctccagtatttgcatgattatgctggagttaatgcaagcatcggtctgacagccaatcctgtagtcaacctctctgctgcctttggtactaaagctgttgcagttggtgccgatatctcacttgatactgcaactgggaacttgactaaatacaatgctgcactgaggttcactcatgaagaccttgtggcatccctgaacctgaacaacaagggcgacagccttactggagcctactatcacaaggtga

SEQ ID NO: 8919 - DNA, 171 bp, Zea mays
  Clone ID: LIB3150-030-Q1-N1-A7
tcgacactctcaagttgaaatgccctgtccacattgtcggatgattagactccatcacccgacggtcaatagcctggtaagcaaggctggatcggctccgaaagccgatccggtcgagcctcagcatgtgtgcgaccatgccttaggcactggcgcccactgctttatctg

SEQ ID NO: 8920 - DNA, 379 bp, Zea mays
  Clone ID: LIB3150-030-Q1-N1-A8
cgctcggccatttcccaacaccgattcacaagtggaatctgcccaatttgccggaaggaacggaagtgtggatcaagcgagacgatttatcaggcatgcagttgagtggaaacaaggtccggaagctggagttcttgatggcagatgccgtagcacaaggcgcagactgcgttattactgttgggggtatacagagtaaccactgccgtgccacagccgtggctgctaagtatctcaatcttgattgctacctgatactacgtacctccaagcttcttgtggataaagaccctggtttggttggcaatcttcttgtcgagagactagttggggcacacgttgatcttgggtcataagaagaatatggaaaattggtagt

SEQ ID NO: 8921 - DNA, 294 bp, Zea mays
  Clone ID: LIB3150-030-Q1-N1-A9
ggggaatttacgatgcattcaaagtgatggttggactctcaacaacgggaggtgttacacctgccccagcagcagaggctgtattgaaagcctgtgcttgatttttttttctgtgttctctgagatcatatttggtgagtggaattgtatcatcctgtctagagcttatttcccgtaatttttttaatcttaacggaaaatttgttcgttattcttttgatgtgaggaattcatttaacaggctaaattttgtttttttttgcgcttggaaatgtttacgccttgtagcttaat

SEQ ID NO: 8922 - DNA, 287 bp, Zea mays
  Clone ID: LIB3150-030-Q1-N1-B1
gaaggttcaagtgatggctgatgccaggacctcaaagttggatgaagctgaattttctaagtaccactcaagtgtgaagcgaggtgatattgttggcatatgtggatatccaggaaaaagcaaccgaggggagcttagtgtatttccaaagagatttgtcgtcctctctccatgtcttcatatgatgcctcgacagaagggtgaaagaagtgcaatgcctgtaccgtggactccaggaatgggtaggaacatcgaaaattatgttttgagggaccaggaaactcggt

SEQ ID NO: 8923 - DNA, 55 bp, Zea mays
  Clone ID: LIB3150-030-Q1-N1-B10
aataaaataatataaattagggggtaattatatattattaaaaaaatataaaaat

SEQ ID NO: 8924 - DNA, 240 bp, Zea mays
  Clone ID: LIB3150-030-Q1-N1-B2
cccacttcgtgcgagcgtcccgaactaagttgctcgtggtggaggtggtttgtggcgatggccttcaagctggtcaccaagcccgcggcggcgtcgcccgctgctgctcactggggagatctcgcccgggggccgcaaggtacgaaccgcggtgccttcgaccagcgcccagaacaaggggctccgacggccatctctcgaatcgccatgctatgaagagagggtatcgagtgaatattg

SEQ ID NO: 8925 - DNA, 165 bp, Zea mays
  Clone ID: LIB3150-030-Q1-N1-B4
ctccttcccctcttaccatgtcctcttagggttagggttacttagggttttgtggaggggcgatggcagcggctgatgtggagtaccgttgcttcgtcggcgggcttgcctgggccaccatctacgagtcgctggagaatgcctttgccttctacggctagatcc

SEQ ID NO: 8926 - DNA, 137 bp, Zea mays
  Clone ID: LIB3150-030-Q1-N1-B5
tgcatttatttgtcactgggcgttgaggagcctagctagctagcgctgttttcctgtgtgctaatggcgcccgttcaatgtgcgcgttcgcaaagggtgtagcactttggcaagggcgaaaagcgagggcaacacga

SEQ ID NO: 8927 - DNA, 360 bp, Zea mays
  Clone ID: LIB3150-030-Q1-N1-B6
atcccgtcgcatcccatcccactaccacccatctcgtcgtccgccgattcgatccggttcttccaacccaggggcagtgatggcgacgaagaggagcgtgggcaccctcggcgaggcggatctgaaggggaagaaggtgttcgtgcgcgccgacctcaacgtcccgctcgacgatgcccagaagatcaccgacgacacccgcatccgcgcctccgtccccaccatcaagttcctcctcgagaagggcgccaaggtcatcctcgccagccacctgggtcgtccaaaaggtgtcaccccaaagtacagcttgtagcctcttgttccacgcttgtctgagctccttggagttgaagtcgtgat

SEQ ID NO: 8928 - DNA, 268 bp, Zea mays
  Clone ID: LIB3150-030-Q1-N1-B7
ttcaattttcaaaatccaggttcaattcggcttcggttgccggtggcgaattccaaacctccaccggccggccaccagaagggtgagtgaagaggataagactgctgcttctgctgagcagccgaagagggcccctaagctcaatgaaaggatcctctcttctctgtccaggaagtccgtagctgctcatccgtggcatgatcttgagatcggtcctgatgctcctgctgctttcaatgtttgtgttgagatcacaaagggaagcaaa

SEQ ID NO: 8929 - DNA, 253 bp, Zea mays
  Clone ID: LIB3150-030-Q1-N1-B8
tcgaaggattgcactgatgcttggtgcgccgcctcttccatggcaaccctcaaccctctggaactggcgggcgaacacatcctcgacgaccggcagctgccgattgcgacggtggcgggtgtcactgaatccgccgcgggcaactagcaccccgtagcccctgtttgctggtctggcacacacgcagggacgactcttgtgcgcacgtagcatgctccgcggttcatacggtcagattgcgaacggatgcagg

SEQ ID NO: 8930 - DNA, 331 bp, Zea mays
  Clone ID: LIB3150-030-Q1-N1-B9
cggagactgagcgagaagccccccctccctccctccttccttcgacgtcaagctccgccccactccatggattcgatctgggaggcgaggagctgaggccaggacagggggaggagctgctggggggcagggacagatagcgcggctaagcggcaacggcggcagccatgagctggagacgaggcggaagcggaggcgatggcggggtctcgaggaggtgggccgtcctgctctgcgtcggcagcttctgcctcggcctgctcttcaccaacagaatgtggacgctgtctgaggcaagtgagattgctaggccgaatgcgaatgtggagga

SEQ ID NO: 8931 - DNA, 226 bp, Zea mays
  Clone ID: LIB3150-030-Q1-N1-C1
caggaagcactgcctgctcattttctgcctgtgcgcgtacagagatactactagcgagcacgccatggagcaaaccggggcggctgctcgcggcgcgcctggagcgggagtggaaggtggcgacaagacggcgaggaaggcgctgaaagtggtggcggccgtggacgctagcgaggagagcctgcacgcgctgtcgtgggcgctggacaacgtcaagcggtgccac

SEQ ID NO: 8932 - DNA, 342 bp, Zea mays
  Clone ID: LIB3150-030-Q1-N1-C12
gctgagacgtttccctattgaatctaaggggcggcaaaagaagctttatgaggttgggactgtgacagcaatttgtgttacctgcttcctgataagatgtgttgtggttgcattatctgcgtttgatgccgagtatctctcgaggttttggaccatccagtcctagatttcttctattatatgcttgcggagatactgccttctgcgctagttctcttcgtccttcggaagctttcttctcaagcgggttttggcacaataccaccctattaactagagagttttttttaatgatgttacatgctaagaactccggataatctgaaactactggaaacctac

SEQ ID NO: 8933 - DNA, 366 bp, Zea mays
  Clone ID: LIB3150-030-Q1-N1-C2
gctctctaccgtccgagaccccaagcaccagcgcggcggcgggggcgggggcggcggcgaccatggctgtcggaaagaacaagaggatctccaagggaaagaagggtggcaagaaaaagaccgtcgaccctttctctaagaaggattggtatgacatcaaggcaccgtcggtgttcagtgtgcgcaacatcgggaagactctcgtatccaggacacagggtaccaggattgcttctgagggtctgaagcacagagtctttgaggtttgcctagctgatcttcatggcgacgaggatcaaagctacaggaaaatcatgctccgtgctgaagatgtgcaaggcaggaatgtgctcacatactttttgg

SEQ ID NO: 8934 - DNA, 293 bp, Zea mays
  Clone ID: LIB3150-030-Q1-N1-C3
gcagccgcccggtgctccctctctgcagatctcccttcgcagccgccgaggaaccccttcacagcgcggaagatggctgaacaggaggccccagtcgtggttgaggcaccaaccccagttcttggggagcctatggacttgatgactgctctgcagctcgtgatgaagaagtcaagtgctcatgacggacttgtgaagggtctccgtgaggctgccaaggccatcgagaagcacgccgctcagctttgcgtgcttgctgaggactgtgaccagccagattacgtcaagctggt

SEQ ID NO: 8935 - DNA, 430 bp, Zea mays
  unsure at all n locations
  Clone ID: LIB3150-030-Q1-N1-C4
cgcagagtagcagacatatcagcgatcgaacacccgacgatttttacctgccacaccgctcatcctctcccgcgcgcttggccctttccgcttggcctttcgcccctcctcttctccgcacggagcgccgccacaggtgattgctagggtttcggggccgccgcctgcagcagccctaccgccagcgctcctacgcctgtgtccctgttcctctccgtcccgttctgccagcgtaccacggctgacggccgacgccctgcagatccagcaaaggcaacgctgagatccctacgacttcgaacggcctgtgacctgtggatctgtgccagcctgttggtcgagctacctgctccagcccgagcagnccgtgttaaagctagctaaagaaacatggcctaaatgagctccagaataaaaaaggaacggaatg

SEQ ID NO: 8936 - DNA, 415 bp, Zea mays
  Clone ID: LIB3150-030-Q1-N1-C6
ctcggccctcgcccacctctcgctagtcgctctccacttccaagtctctgcggccggacgccccggcgaggatgaggacaccggcgcccaggtcgcgcccatcgtgaagctggaggaggtcgccgttaccaccggagaggaggacgaggacgcgctcctggacatgaaggcgaagctctaccggttcgacaaggaggggaaccagtggaaagagcgcggcacaggcactgtgaagctgctcaagcacaaagacaccgccaaggtccgcctcgtcatgcgtcaggcgaagacgcttaagatctgcgccaaccatctcgtggtggcgacgactaagatgcatgagcacgcggggagcgacaagtcgtgcgtgtggcacgcgctggacttcgccgacggcgagctcaaagaggagatg

SEQ ID NO: 8937 - DNA, 368 bp, Zea mays
  Clone ID: LIB3150-030-Q1-N1-C7
cgcacgctggccgactacaacatccagaaggagagcaccctccacttggtgctgcgcctcaagggaggcatgcagatcttcgtgaagaccctgactggcaagactatcaccctcgaggtggagtcttcagacaccatcgacaacgtcaaggccaagatccaggacaaggagggcatcccaccggaccagcagcgtttgatcttcgctggccaagcagctggaggatggccgcacccttgcggattacaacatccagaaagagagcaccctccacctggtgctccgtctcatgggtggcatgcagatctttgtgaagacactcactggcaagacaatcacccttgaagtggagtcttcggataccattg

SEQ ID NO: 8938 - DNA, 269 bp, Zea mays
  Clone ID: LIB3150-030-Q1-N1-C9
aattcttgaaggaatattctgccagagttgcatgagctgcacataactgatgtcgccaagatcatgacccattggagtgaaagtaaagccttcagagaggactactagaagagaattctcacatccttaaatagcgacaacgttacttgagatgtgcagatgaggaatcctgattatacgcccatatttatagagtcacatgctccagcttcagctacagcttcagaaccgatttcctgtaaaattgtctgcaaaacaagcctaggaag

SEQ ID NO: 8939 - DNA, 160 bp, Zea mays
  Clone ID: LIB3150-030-Q1-N1-D1
aacaccacctagcctgcgatctccagagccttcgtagcgtcgaacattgatcatgtcggcctactgcggaaaggacaaggatgagctcatcaagaatgctggctacattggcacccccggcaagggtatccttgccgcttattaatccactggcaccatt

SEQ ID NO: 8940 - DNA, 215 bp, Zea mays
  unsure at all n locations
  Clone ID: LIB3150-030-Q1-N1-D2
tcgcgaccctgcatcttcgccgcggtctagagccgcagccgccggtggcgcccggttcaggttgcgtgcgaaaaggttgtaagcatcgacctggggaccacaaattccgcggtggcagttnttgagggcggcaaggccacgatcggttccaactcccatggggcgcgggacacgccctcggtggtggcttaaaccaactccnncgagcttcttgt

SEQ ID NO: 8941 - DNA, 276 bp, Zea mays
  Clone ID: LIB3150-030-Q1-N1-D3
gtttcccgtctcccgcatagagaggttcccaaaccattctctttcgctttcgtctccgcaccctatggtttctgtgcctcgccagcgaagcgatgcagccgccgcaccaaccgccgatgaacgggcaacactcccagcctccgccgcaaggacccggggtgcccatgcctccgcagcagcaggcgcccccgctgccgtactaccagcagcagcaagcgccgcaattactaccaacaggcccctcccgcaccgtgggggcagcagcagcagtacgct

SEQ ID NO: 8942 - DNA, 372 bp, Zea mays
  Clone ID: LIB3150-030-Q1-N1-D4
cgctcggctcggcgaacgcgatctgttccccaacctccgcagccgctccaccgtcctccactccggctgccgaatcgacccgccccgatccagatcaggagctgagggatggacgcgaacaggcgccagagtgggatccagcagttgctggctgcggagcaggaggctcagcaaattgtgaatgccgctagagctgccaagtcagcgaggctcatgcaagcaaaagatgaggctgagcgggaaatagccgaataccgtgcccagatggaggctgagtttcagaggaaggttgcagagagcaacggcgactcccgtgcatacgtcaagcgtctcgaggaaggaacggctgcgagatcgaggcactcacccagc

SEQ ID NO: 8943 - DNA, 263 bp, Zea mays
  Clone ID: LIB3150-030-Q1-N1-D5
cgcgacccaaagcaagctcaagctcagctcctccagtctccagtctccaccgcccgccaaccccgagatatacctcccttcttctcgaagcttcgtctgcagacgaagtcgccggctcttccctcggcgctggtgccggtgggttgccagtggcggtgggtgggtggcccggctggtggtgttgctgggatgccctccgagacggctaccgctgacggactcctaatacgagggtgataagcccattaaccctttccgtgctc

SEQ ID NO: 8944 - DNA, 216 bp, Zea mays
  Clone ID: LIB3150-030-Q1-N1-D6
ctcgattcgctctcaccgatccggccatccgtcctatcctgggagtagtgttaacagcgccgcaccacctcgtgccgtgggaggtcgagctcgtcgatgcgacgctcctcggagagcagcgcctcctcctgcgcggtcttctttggcgcgagggcgggcgggacgaatggcaccgaggaggatgcggcggcagaagagctagggttagggttcgcc

SEQ ID NO: 8945 - DNA, 296 bp, Zea mays
  Clone ID: LIB3150-030-Q1-N1-E1
acagaagcggcggcggcggatcatacgcaagcgaaagcgagggtgtgagggaaggagcaccaaccattgtgcacgtcaacttctaccgcaactattgttagacgttcaaaaaaccaaagcgtccttatgagaaagagcgtcttgatgcttaactggaagctgttgagtgagtatgggctgaggtgcaagcgtgagctttggagggtccagtatgcactgagcaggatccgtaatgctgcaaggcacttgctcacccttgacgagaagaacccccgtcgtatctttgagggtgaggc

SEQ ID NO: 8946 - DNA, 331 bp, Zea mays
  Clone ID: LIB3150-030-Q1-N1-E10
ctcagaaaacccagccgccgccgcatcggcctcccaggtaagcagtagcgtccaccccagccgccgccatgaagcgcaacccccgcgtcacgagctcccgccggaagtgccgcaaggcgcacttcacggccccgcctccgtccgccgcgtgctcatgtccgcggcgctatcgacggagctccgccacaagtacaatgtgcgttccatcccgatccgcaaggacgacgaggtgcaggtcgtgcgcggcacctacaagggccgtgagggcaaagtggtgcatgtgtaccgtcgtcgctgggtcatccacgttgagcggatcacccgccagaag

SEQ ID NO: 8947 - DNA, 212 bp, Zea mays
  Clone ID: LIB3150-030-Q1-N1-E11
ggcttctcctccccctccgggtcgggttcgggttcgtgaggatctccggggttcggtttcgtgggtgagcggatcgagatggcggcgtctgatgttgagtaccgctgcttcgttggcggccttgcctgggcctggacgaccacttccttcacaacgccttcagcacctacggcgaggtccttgagtccaagatcattctctttcggtagact

SEQ ID NO: 8948 - DNA, 353 bp, Zea mays
  Clone ID: LIB3150-030-Q1-N1-E12
ggcaagtgcgatttcgatctcgcagcgaccttttttttgttctgttgtgtatctagtagttggaggagatatgcagtttgcacttgcattggacacgaactcaggtcctcaccagataagatcttgtgagggtatgggattgacaggttggaaaaattaagtattgggggcagaaagcaggagaaagctttgagaaataggtgctttggtggtagagttgctgcaactacacaatgtattcttacctcagatgcttgtcctgaaactcttcattctcaaacacagtcctttaggaaaaattatgctgatgcaaaccgtgtatctgctattcattttgggcggaagcactggat

SEQ ID NO: 8949 - DNA, 219 bp, Zea mays
  Clone ID: LIB3150-030-Q1-N1-E2
cgcgtcactcaacacatcacaagcagttcgagagagagagagagagagagagagattaagatgtcgtggttcgggcaccaccaccacaaccagccggctcccccggcgtctggccccaaccaggtgttcaagatcttctggcgcgccaacgagaacttcttgcttgcccgtccgcgacagcgccgtcgttcttgccccggtcaaccccaatgacgacca

SEQ ID NO: 8950 - DNA, 125 bp, Zea mays
  Clone ID: LIB3150-030-Q1-N1-E3
caataagtgcattcacctatgggaaccgacttcaaattactggaacgttaattccaacccatttggtggacacctctgctaggggtggaaatctacaagggagtcccaccggagccgacatattt

SEQ ID NO: 8951 - DNA, 233 bp, Zea mays
  Clone ID: LIB3150-030-Q1-N1-E4
tcgggaaaaatatccccaaaccctatctcccgatctcgatggcgaacccttgcgtcttcttcgacatggccggcggcggggccccggccggccggatcggggttgaacctgtcccccaccaaggtgccaagaacggggaggaacttcgggcccctgtccccggccaagaaggccttggccaagtccgggaagccgttcaattacaagggctcaaccttcaacggggtattccc

SEQ ID NO: 8952 - DNA, 386 bp, Zea mays
  Clone ID: LIB3150-030-Q1-N1-E5
caggaattgaactaggaaacaacttctctgaagtcatagctcctcaagacgtggcagtctatggtgccctttgtgcacttgcttcttttgaccgttcagacctgaagagcaaagtcattgacaatatcaacttccgtaactttctggagctggtgcctgaagtaagggagctggttaatgatttttatgcaagtcgctatggatcttgcttgggtcatcttgagaagctaaagcctaacctgctcctggatatccatttgcatcagcatgtagagactctgtatatggagattcgccacatagcgatcatacagtacacacttccttttatatctgttgacctcaacacgatggcagccgcctttaagacttcggtctccatgctg

SEQ ID NO: 8953 - DNA, 423 bp, Zea mays
  Clone ID: LIB3150-030-Q1-N1-E6
ccggcctccaactctaaccccgtcgcttccggctcccgcagcgtcgccgaccttcacagccggttccttcatccgccaccatggggaagacacgtggtatgggagctgggcgcaagctcaagacccaccgcagaaaccagaggtgggctgacaaagcatacaagaagagccacttgggcaatgagtggaaaaaaccttttgctggatcatctcacgccaagggcatcgttctggagaagattggtattgaggccaagcagccaaattcggccatccgtaagtgtgcccgtgttcagctggtgaagaatggaaagaagattgctgcctttgtgccgaatgatggttgcctaaactacatcgaggagaatgatgaggtgttgattgctggatttggtcggaaggatcatgctgtgggagacattc

SEQ ID NO: 8954 - DNA, 387 bp, Zea mays
  Clone ID: LIB3150-030-Q1-N1-E8
tctgcaaccgtgcctttttctctccgcccaatctcccattaccccagcggcccagcgtgcggagacgggagacgcgctccccagtccccacccccctctcgtgtcgtggcgacgactgggggggctgtcgctgccgccctacgtcaggtggccaggtcgtattagggcacttcgccggcgacgagtaccacaagtttgcaggcagtggacactttctctggtatcagagggtcaatgtccaattattatgatgactacgatgacattgacgagatggaggatgattatgatatggatgatcccattgatgacatggtagacgaacagcaagggattagggattctgatgcggaagataatgattatggacaaccaattgataagatc

SEQ ID NO: 8955 - DNA, 129 bp, Zea mays
  Clone ID: LIB3150-030-Q1-N1-E9
gctaatcattaagacctgcttgaatgggcagaatgagaaattgtggcccttgctttataagcttaatgttaccatgaatgctgatgagaatgagttgattggcaaatctcttatgaatcgtgttttgca

SEQ ID NO: 8956 - DNA, 290 bp, Zea mays
  Clone ID: LIB3150-030-Q1-N1-F1
tgctcatcctagtggatatcttggcgaggacccacgaggaattcccaacaatcttatgccctatgttcagcaagttgcggttggtaggaggccagctctaacagttttaggaaatgactatgcaacaagagacgggactggggtccgagattacatccatgtggttgaccttgctgacggacatattggctgcattgcagaagccttttgagaactctagcataaggggtgaagcgtacaaccttggaaccggaagaagtacatctgtgctggagattgtaaagcatttg

SEQ ID NO: 8957 - DNA, 393 bp, Zea mays
  Clone ID: LIB3150-030-Q1-N1-F10
ctgtctgccaattgccatcctaccaaatcatcccggaaccatctgttccaaatcatggtttactctagatatattgactgacaaccataggcattagctgttccactctgacaacgacttatacaatagagaataaaaaaaaattgtggggcatgggttttatgtcaccatagttatgtacttgctcactctgatatgatgactttgattcagagaattatcggtttcatgtagcctgatcattttcttgcccttttagaagcatatttatggagcatttggatttgcggttgagttctttactctctcttcttcatgcagctctctttcagatcatcaagacagcatcaaacgctggtctattctgaggtgaatcggttgacacatgcaagt

SEQ ID NO: 8958 - DNA, 309 bp, Zea mays
  Clone ID: LIB3150-030-Q1-N1-F11
ccgagatctctccccacctcccggtccgctagcagatagcgggggccagagagatcgagatccggaggcgctagcgccacccatcagcgtctgcggcaatggcgggcacggtgacggtcccggggtcgtcgaaccctccacgccgctgctcaaggacgagctcgacatcgtgatcccgacgatccgcaacctcgacttcctcgagatgtggaggcccttctttcagccctaccacctcatcatcgtgcaggacggcgacccgaccaagaccatcaaggtgcccgagggcttcgacttctagctctacaa

SEQ ID NO: 8959 - DNA, 369 bp, Zea mays
  Clone ID: LIB3150-030-Q1-N1-F12
tgcagatgaagccgagcgtggcatcacaatcaaatctactggtatctctctttattatgagatgactgatgagtcactgaagaactacaagggtgagagggatggtaaccaatacttgatcaaccttattgaccacccgggcacgtcgatttttcttcggaagtcacagctgctcttcgcatcaccgatggtgctctggttgtggttgattgtattgaaggtgtctgtgtgcaaactgaaactgtgcttcgccaagcccttggtgagaggattaggccagttcttaccgggaacaagatggacaggtgctttcttgagcttcaagttgagggtgaggaagctatcatactttctccctgttattgataa

SEQ ID NO: 8960 - DNA, 304 bp, Zea mays
  unsure at all n locations
  Clone ID: LIB3150-030-Q1-N1-F2
aatccattgtcactcgattgttaaaagctccagcaaatgttggcactcaaaaagcttcagcaactgatgcagccacagcttccgatgagaggataactgtactggtcattggtggcggaggcagggagcatgctctttgttatgccttgaaccattccccatcatgtgctgcagttctatgtgcccctggcaatgctggtattgctcagtcccgggatgcaacatgtatcccaganttggacatctcgagtagtgatgatgttatctcattctgccgcaagaggggagtgggaattggtgtagt

SEQ ID NO: 8961 - DNA, 254 bp, Zea mays
  Clone ID: LIB3150-030-Q1-N1-F3
ggtctcggaaggatcggcaggctcgtggccagggtcgccctgcatagcgaggatgtctagctcgtctccgtcaacgaccccttcatcaccacggattacatgacctacatgttcaagtacgacaccgtgcacggccaatggaagcacagcgacatcaccctcaaggagctcaagacgcttctcttcagcgatgagccggtcaacgtctttggcatcaggaaccccgaggagatcccagtgggtgaggctggtgc

SEQ ID NO: 8962 - DNA, 341 bp, Zea mays
  Clone ID: LIB3150-030-Q1-N1-F4
cgcgtcgtttcgactcccgccgccgaaaggccgagcccgtgcccgtgcccgtgctcgcaaccctaatcccctttccccgttgcctctcgccgggaagaagagggagccgcgtggcgtcgccagccagcacgcgccccctcccttcccggctccctccgcaccgtgggcgaggcgcatccaacccgatccgccctcaccgcgaggcggaggacctggaggggagggagacaggtctggtgcaccctctctcgtccgcgccggcgagcgccaagtgtcccccacaggcttggctgaggaaaacccgtgctctgtgggtcttggacactgcttcaccatttacc

SEQ ID NO: 8963 - DNA, 300 bp, Zea mays
  Clone ID: LIB3150-030-Q1-N1-F5
ctcgtagatcattgtacacatatcgagacagctatctagctagcgcgctcataatctaacccgtattacggcatggcttacaagcatatccgagtcttgtcctgcttcattgcgatcagcgctcttgcatgcgctcgctgcgcatccgacgtacccatggacggtggcaggtgcaacggcggcgccacctggtacaggcccggcaatggcgctggatgcgacggtaacgcgtgtgggtaccactgtgccgtcgaccaaactgagatctagggaatgatcaccgacatgggggaatccatc

SEQ ID NO: 8964 - DNA, 374 bp, Zea mays
  Clone ID: LIB3150-030-Q1-N1-F6
gaactatcattcttcgcaggaactacctccactttgtaaagaaataccagaggtatgagaagaggcactccaacattcctgctcacatctccccatgcttccgtgtgaaggaaggtgaccatgtcatcattggccagtgcaggcccctgtcaaaaactgtgaggttcaatgtcgttaaagtcattccagctggatccgcagctgctggaaagaaggccttcacagcagcctgagtttatagactatgttccatgagtagtctatagaatgatgtctttttaattcaaaagaaatctctcttctaggctggtgcttttcgactataatttggagattgttccgtgtccgtgcaatcatctgaacatgttactact

SEQ ID NO: 8965 - DNA, 386 bp, Zea mays
  Clone ID: LIB3150-030-Q1-N1-F7
gccgtcgccgctgcagtgtgcactgccaccgcttgagactgagatggggggtgttttcgaggcggccctccgccatgcctgctcacatcttcccatgcttacgtgtaaaagaaggcgcccatgccagacttggcccgggcacgcccttgtgctaatctgcgaggtccaatgccagtacagtactcccagctgcatccgcagctgctgaaaagaaagcctggacatcaccctgagtttatagactatgtgccatgagtggctatagaacgatgtctttttaattcacaagatatctctcttctaggctggtgctttgcgactataaattaggagattgttccactgtccgtggcatcatttgaacatgttacttcttattgtaccct

SEQ ID NO: 8966 - DNA, 237 bp, Zea mays
  Clone ID: LIB3150-030-Q1-N1-F8
atgaggtaacaactgtacagtgtatgatggaccctggggaaatggtttctttttcatatagcttgtaccgtagatagaaacaaaagaaatccttcttatgttttactgtgtagcgttataatgagattttgatgggtctatcatcgttcttgattttgttttttttttctttaaaaaaaaaaaaaaaaaaaaaaaaaaaaaaaaaaaaaaaaaaaaaaaaaaaaagggggggcgccc

SEQ ID NO: 8967 - DNA, 345 bp, Zea mays
  Clone ID: LIB3150-030-Q1-N1-G10
gatcagcaaagcggcagtgcgtagagaggatcgtcgaacagaacagcatgaagatggtcatcgttctcgtcgtgtgcctggctctgtcagctgccagcgcctctgcaatgcagatgccctgcccctgcgcggggtgcagggcttgtacggcgctggcgccggcctgacgacgatgatgggcgccggcgggctgtacccctacgcggagtacctgaggcagccgcagtgcagcccgctggcggcggcgccctactacgccgggtgtgggcagacgagcgccatgtaccagccgctccggcaacagtgctgccagcagcagatgaggatgatggacgtgcagtccgt

SEQ ID NO: 8968 - DNA, 326 bp, Zea mays
  Clone ID: LIB3150-030-Q1-N1-G11
ctttcattcgccgccgccgcctgctctctgctgccgtcgccatggggagaaggcctgcgagatgctatcgccagatcaagaacaagccataccccaagtccaggtactgccgtggtgtccctgaccccaagataggatctactatgttggcatgaagagaaagggtgttgatgagttcccctactgtgtgcaccttgtctcttgggagaaggagaatgtcttcagtgaggctcttgaggcttcccgtattgcctgcaacaagtacatgacctagtcttgatgaaaggatgccttccaccttctgttccgggttcaccccttccatg

SEQ ID NO: 8969 - DNA, 172 bp, Zea mays
  unsure at all n locations
  Clone ID: LIB3150-030-Q1-N1-G3
gcgagaggaagaggcgcgcgtgggtgcagtgcanacgtgcggggcagagcacaacagctggggatccggggagggagggaagccatgggcgaggaggcggccaagatagaggaggtggagaagccctaccagctcatcatcgtgcaggacggcgacccgaccaataccatca

SEQ ID NO: 8970 - DNA, 411 bp, Zea mays
  unsure at all n locations
  Clone ID: LIB3150-030-Q1-N1-G5
gcaaaccgtgtatctgctatcattttgggcggaggcactggatctcagctctttcctctgacaagcacaagagctacgcctgctgtacctgttggaggatgttacaggcttattgatatccctatgagtaactgcttcaacagtggtataaataagatatttgtgatgagtcagttcaattctacttcgcttaaccgccatattcatcgtacataccttgaaggcgggatcaactttgctgatggatctgtacaggtattagcggctacacaaatgcctgaagagccagctggatggttccagggtacagcagactctatcagaaaatttatctgggtactcgaggattattacagtcacaaatccatngacaacatngtaaatctgagtggcgatcagccttatcggatg

SEQ ID NO: 8971 - DNA, 293 bp, Zea mays
  Clone ID: LIB3150-030-Q1-N1-G6
tagcacctgagcttgtttttcaaaagcagtactggacagatagtttcattcagtggtcccctctgggaacctacatggcaacggttcataggcagggatcacaggtgtggggcggtgaaaatggcttcgagcgtttgatgcgttttgctcattccatggtgaaactgattgacttctctcctggtgagaggtatttggtcacatacagcagccatgagcccagcaaccctagagacacacatagaggtgtcctgaatatatttgatgtaaggactgggaaagtgatgcgagac

SEQ ID NO: 8972 - DNA, 354 bp, Zea mays
  Clone ID: LIB3150-030-Q1-N1-G7
tagcacctgagcttgttggtcaaaagcgagtactggacagatagtttcattcagtggtcccctctgggaacctacatggcaacggttcataggcagggatcacaggtgtggggcggtgaaaatggcttcgagcgtttgatgcgttttgctcattccatggtgaaactgattgacttctctcctggtgagaggtatttggtcacatacagcttccatgatcccagcaaccctagatacacacatagagttgtcctgaatatatttgatgtatggactgtgatagtgatgcgtgactttaatggaagcgctgattatttttctactggcgggtatattggggtttctggggtttta

SEQ ID NO: 8973 - DNA, 198 bp, Zea mays
  Clone ID: LIB3150-030-Q1-N1-G9
tcgtaataatataagaaataaggtcattcggactaatttatggaaaggactcataaattaataatgcaccactttatttaaaatggaatgattttttcaaccaaacaccttctaatggaaccaaattcccctggttgattgcatgcattaatattgaatctggatttgtttcttacagccctgttgcatacttgttat

SEQ ID NO: 8974 - DNA, 310 bp, Zea mays
  Clone ID: LIB3150-030-Q1-N1-H10
cggaaaagaaggagacgccgaaaattcgaaaggggaggggaaagcaaagctgatggcggaggcccaggggaaagcaaagcaaatggcggaggccccgagcaagatcgaatccatgaggaagtgggtcgtctagcaaagctccgagccgtatgttgcctctggctaggtgggatcagcagttcgatcgcctacaactggtctcggcccaatatgaagcctatcgtcaagatcattcacgcaaggttgcatgctcaagctctaaccctggctgcattagttggttctgcatgcgtggagtactatgaccaga

SEQ ID NO: 8975 - DNA, 287 bp, Zea mays
  Clone ID: LIB3150-030-Q1-N1-H2
gttggcttctcctccccctccggttcgggttcgggttcgtgaggttctccggggttcggtttcgtgggtgagcggatcgagatggcggcgtcggatgttgagtaccgctgcttcgtcggcggcctcgcctgggccacggacgaccactccctccacaacgccttcagcacctacggcgaggtcctcgagtccaagatcatcctctatcgggagacgcagtggtcccgcggcttccgcttcgtcaccttctccacggatgatgctattgcggaacgccatctactgca

SEQ ID NO: 8976 - DNA, 344 bp, Zea mays
  Clone ID: LIB3150-030-Q1-N1-H3
cccacccactcgcttcagccgcctccgccgcgcgtaccaagcaggtggagacaggatgccggctggccacggcctgcgctcgcggacgcgcgacctcttcgcgcgccccttccgcaagaagggctacatcccgctcaccacctacctccgcacctacaagatcggcgattacgtcgatgtcaaggtgaacggcgccgtccacatagggatgccgcacaagttctaccacggccgcaccggtcgcgtctggaacgtcaccaagcgcgccatcggcgtcgaggtcaacaagcaggtcaatgggcgcatcatcaggaagcgtatccatgtccgtgtggagcatgtgc

SEQ ID NO: 8977 - DNA, 387 bp, Zea mays
  Clone ID: LIB3150-030-Q1-N1-H4
cgcaaaatccccaaatccgcggcggagaggagagagccggagagaggggcgcagccagagagatcggagaaggggaagaagatggtgcgggtggcgacctacttcgcgatgaccttcggggcgttcctcttctggcagtccatggacagggtccacgtctggatcgcccttcaccaggacgagaagaaagaaaggatggaaagggagctggagataaagagaatgcaggcagagttactggcccaagctaaagagaatgaatcatgattgtcatttgtccaatggtttcaggcagttcctttatcgtatttcctctgctgtattttccatgcaatatcttgactgatgtatgctcatgctcagcaccttcaatatagcgagacatgc

SEQ ID NO: 8978 - DNA, 291 bp, Zea mays
  Clone ID: LIB3150-030-Q1-N1-H5
gccacgtctaggtcaccgccatggccggggactggcaggagctgggccaagcggcggccatcggcctcctcttcgccttcctggtcgccaagctcatctccaccgtgatcgccttcaaggaggacaacctccgcatcacgcgctcccctccgacctcccccactgccgccgccgcagccgcgcctcccgtcccctcccacagacggctccaccgacggcggcagcggcagcgacagcgacagctactgggagggcgtggagagcaccgagctcgacgaggagttcagcgcc

SEQ ID NO: 8979 - DNA, 375 bp, Zea mays
  Clone ID: LIB3150-030-Q1-N1-H6
cccacactgacgtggtgccgtcggagccgaacaagtgggagttgaggagtatggaggggagcgacggccgccgaccgggccaccgcagcagcagcaggggcttcccggcgacgagccatccggtcgcatctacgcgcgaggctcccaggacatgaagtgtgtggggatgcagtaccttgaagccattcgccgtctccgttctgcaggatttgttccagatcgaaatatctatataacatttgttcctgacgaggagattggtgggcatggcggtgttgaaccatttgtttcatccaaggagttcaaagatatgaacgtggcattagtccttgatgaagggcttgcctctccaggggaggagtaccgtgtgttcta

SEQ ID NO: 8980 - DNA, 289 bp, Zea mays
  unsure at all n locations
  Clone ID: LIB3150-031-Q1-N1-A1
caacccagtcgctcaaaaccctagagcgctcgcctgctcgcctccgccgccggagcgagctccccatcttcatccgtcaaccatggcgacccagatcagcaagaagaagaagttcgtcagcgacggtgttttctacgccgagctcaacgagatgctgacgcgggagctggcggaggacggctactctggcgtggaggtgcgcgtcacgccgatgcgcacggagatcatcatncgcgccacgcgcacgcagaacgtgctcggcgagaaaggccgtaggatcagggagctc

SEQ ID NO: 8981 - DNA, 171 bp, Zea mays
  Clone ID: LIB3150-031-Q1-N1-A11
tctttctctcttccttcctgcctgcttcggtggcggtgttatatccccgctcgggttgccatggcagaccagctcaccgactaacatatctccgatttcaaggaggccttcaccctcttttacaagtactgctacagctgcatcaccaccaacttactatgctctgtgatg

SEQ ID NO: 8982 - DNA, 414 bp, Zea mays
  Clone ID: LIB3150-031-Q1-N1-A12
ttgcgacgccaaccccgacccgcggccccacgacccagggccaaattcccctgcgatcctctgtgtccacctctcctttctcacacctcgacgcctctctctctttccccgagctctcgaaaccctaggtgcgtgccgaccggcggcggcggcgaggtgatggcgatggacccggacgcggtggcgaaagccttcgtggagcactactaccggacgttcgacaccaaccgcgcggcgctggtggggctgtatcaggagacctccatgctcaccttcgagggccagaagttccagggcccatccgccattgccggcaagctcggatctcttcccttccaggcctgcgagcaccagatcgtcaccgtcgactgccagccgtcggggccccagggaggcatgctcgtcttcgtctcc

SEQ ID NO: 8983 - DNA, 411 bp, Zea mays
  unsure at all n locations
  Clone ID: LIB3150-031-Q1-N1-A2
cgctcggcatgggcgcgcagaaggcctcgttccacgccggcgaacgccacgccatggaaaaactttatgaatggatcctgaggcagcacgaaaatggtttgaggctaacagttgctgatgtagcctcccatatccagcatgagattcagtatggaggtgacaatgcatcagcctctccaaggtcacaataccctagccaaagcactgcaccgacaatgcacattcccaacacaagcaaccagcaaccatcgccaagcttatttgctccaggaaaccctgggttgacacagtccaagaattccatggtcttttcaagcgcattatccagccccatccggcggagcctgcaaccttaccacctagagcaagacggggatgcanggtactttgcgaacggtgcaagccgcgacg

SEQ ID NO: 8984 - DNA, 380 bp, Zea mays
  Clone ID: LIB3150-031-Q1-N1-A3
gcctcgggtcaaaccctaagcagggagtggatttatccgctgcagccatgagtaagttgcagtctgagtctgtcaaggatgccatctcccagattgttggggatgccaaggagaagaataggaagttcactgagactgtggaacttcagattggtctgaagaattatgatccacagaaggacaagcgtttcagtggctctgttaagttgccccatatccctcgtcccaagatgaaggtgtgcatgcttggtgatgcccagcatgttgaggaggccgagaagatgggacttgactacatggatgttgaggctctcaagaaaatgaacaagaacaagaagcttgttaagaggcttgccaagaagtaccatgctttcttggca

SEQ ID NO: 8985 - DNA, 197 bp, Zea mays
  Clone ID: LIB3150-031-Q1-N1-A4
tttcctcggctcaaaccctcaccaagccttcgattttttctctgaacccatgcctaactaaaaacctgattatttcatgcatccccatctccacaatggattcaatctcacagataataatctcaccttcaatattactcatgagcttcatatatgtcttaacaattattatccctatactgccactctatacccta

SEQ ID NO: 8986 - DNA, 411 bp, Zea mays
  Clone ID: LIB3150-031-Q1-N1-A5
ctcgtagagagaaggaaaaatatcggcgaaccctagctcccgatctcgatggcgaaccctcgcgtcttcttcgacatgaccgtcggcggcgccccggcgggccggatcgtgatggagctgtacgccaacgaggtgcccaagaccgcggagaacttccgcgcgctgtgcacgggcgagaagggcgtgggcaagtccgggaagccgctccactacaagggctccaccttccaccgcgtcatccccgagttcatgtgccagggcggcgacttcacccgcggcaacggcaccggcggcgagtccatctacggcgagaagttccccgacgagaagttcgtgcgcaagcacaccgcccccggtgtgctctccatggccaacgccgggcccaacaccaacggctcccaagtcttcatc

SEQ ID NO: 8987 - DNA, 332 bp, Zea mays
  Clone ID: LIB3150-031-Q1-N1-A6
tcgtacaaaagggccgcacacaagaattatgacttgtatatgaaagcctcaaggtttattttcagtgagatcagccacatgttcccaatcatgccttttactgctagggcattagaagagaagcgcgcgcgtttaggcttggtggaatgcatgaaccatgaactattgcagccgtaccctgtacttcatgacaagccaggcgatcttgttgcacacataaagttcactgtgctgctgatgcccaatggatcagataatattacattacattctacacaggagttaaaccccaccagattcattgaatactatgcagagaataatgcatggct

SEQ ID NO: 8988 - DNA, 343 bp, Zea mays
  unsure at all n locations
  Clone ID: LIB3150-031-Q1-N1-A7
tcgcccaacaccacctcgcctgcgatcgcgggagcctccgtcgcgtcgagcatcgatcatgtcggcctactgcggaaagtacaaggatgagctcatcaagaatgctgcctacattggcacccctggcaagggtatccttgctgctgatgagtccactggcaccattggcaagcgcctttccagcatcaatgtcgagatccttgttgatggccctcatgacattgatcgctgcgcttacgtcactgagaccgtccttgctgcctgctacaaggcgctcaacgagcaccatgtcctnctggagggtaccctcctgaagcccaacatggtgactccaggctccgac

SEQ ID NO: 8989 - DNA, 218 bp, Zea mays
  Clone ID: LIB3150-031-Q1-N1-A8
tctcctaactgttcagaatttcttcaacccgtcagtttctgtttctgtgcaagcaaccttcccttataaattcgttgtgagcaagttcttgcagcctggagcctatgatctggttggttacatagtgtatgagatcgaccagcacccttaccagaatgtattctacaatggcactattgaggtcgttgaggctggacgcttactcagtgttgagtctg

SEQ ID NO: 8990 - DNA, 133 bp, Zea mays
  Clone ID: LIB3150-031-Q1-N1-B1
tcggcgagcgccgctcttttttttattttcgggggggtaattactatcaaaagacctgccgctaatcaagcagaccatgggagaacttttacaacatggttacttgggagatttctcccggggagcttgatgt

SEQ ID NO: 8991 - DNA, 372 bp, Zea mays
  unsure at all n locations
  Clone ID: LIB3150-031-Q1-N1-B10
ccctattctcanattacttttctttcatctgactaccaatgcanaagagatgctttctaacaaaacaacactccacccattcaaatcctcaantattctnaacaaaattcaattaaataattttcacaccatcactaaaatanaagctttnatattacttactgtnattcattaattgctaaaaanttnctanactattttcacaagatcaaatcccaacagctaacgaaacaagtactgcatcttctgctgctaccattccatctcatgatacttcactgcattctgttaatttctgttaaaccacaataaaaaatttaacttgttctatttttccttaaaaaccagtctcaacttgccacactaataacc

SEQ ID NO: 8992 - DNA, 324 bp, Zea mays
  unsure at all n locations
  Clone ID: LIB3150-031-Q1-N1-B11
atcatccccccccccactttnncaaatcaaaaatatttctctaataaacaccccatcattctccaatcaactccatcaacttaaattataacatcccacaaaattccattataacaccaccctttttctcaattacaccccttcttcctactctttcttacactcttttaccttttttatccaanctaccttctctcatcccatcttataaccttaacaaaccttcttaaataaacatcatcaaccaaaccaacaatacaaaccaaataataaattcctattattttaattctttcttttaaatttccatttcttatacaaaaa

SEQ ID NO: 8993 - DNA, 371 bp, Zea mays
  unsure at all n locations
  Clone ID: LIB3150-031-Q1-N1-B2
tcgtctccacctcgtcgtcttccaccaccgcggagcgcgagccctagcccgatctagccggcggcaggcaccagatcccgccgcccgcggcgtcccgggacgcgccccggcgaatccgccggttcttgcactggaacacgcccggaccacggtgcatttgaatccgcccggccggctacacgatgtccaagtcgggagcgctggatctggcttctggcctcggagggaagatcaacaaggtggaagtcaagtcggccgtcgatgagtatgagaaatattatggatactatggagggaaggaggaagcanggaagtccaactatactgatatggttaataaatactatgatcttgccactagcttctatgag

SEQ ID NO: 8994 - DNA, 388 bp, Zea mays
  unsure at all n locations
  Clone ID: LIB3150-031-Q1-N1-B3
tcttgcggatcttgtttacttcgatcggcccganggctcggactagatgctccaatccccccacagccaccacatcatcacaaatgatggggcgaccatcctggagcagatggatgttgacaaccagatcgcaaagatgatggtggaactgtcccgtagacaagactacgaaatctgcgatggtaccacctgtgtggtactcatggcaggggcgctccttgagcaggccaagaagcttttagaacgtgggattcaccccattagggttgctgaatgctatgagatcgcatcaaaggttgcttttgatcacctataacgaatctccgaaaagtttgagttcagcgcagacaacattgagcccttggttcagacatgcatgacaacttta

SEQ ID NO: 8995 - DNA, 348 bp, Zea mays
  Clone ID: LIB3150-031-Q1-N1-B5
tcgtgcgagatccaggacaccacccagagcgacacccacatgtgctactccaacttcaacgacatcatccactcgatcatcgacatggacgcggacgtgatcaccattgagaactcgcggtccgacgagaagctgctctccgtgttccgcgagggcgtcaagtacggcgcgggcatcggccccggtgtctacgacatccactcccccaggatcccgtcggctgaggagatcgccgaccgcatcgacaagatgctggcggtgctggacaccaacatcctctgggtgaaccccgactgcggcctcaagacccgcaagtacacggaggtcaagcccgccctgaccaacatg

SEQ ID NO: 8996 - DNA, 381 bp, Zea mays
  unsure at all n locations
  Clone ID: LIB3150-031-Q1-N1-B6
tcgagtagatgcacatcctatgacacaggtgaccactggagtaatggctcttcatgttgagagtgaatttcaaaaggcttatgacaatggattgccaaagtcaaagttttgggagcctacttatgaagactgcttaaatttgattgctcggcttccaccagtggcttcttatgtttaccggagaattttcaagagtgggaaatcaatagaagccgataattctttggactatgcggcaaatttctcacacatgcttggttttgacgaccaaaaaatgctggagctgatgcggctctatgtaacaattcacactgatcattgaggcnggaatgtcagtgctcatactggtcatctggttgggagtgctctgtcagatcctta

SEQ ID NO: 8997 - DNA, 377 bp, Zea mays
  Clone ID: LIB3150-031-Q1-N1-B9
agcagacctgaaagaaatctttattataattcatgccccccacaaactctactcacttcttcttagctatctcttcttcataaacttttaaaacattcacttcttaatactcctaaaaattatttttttttttctttctattcttcattataccattcacccattaccattttaattctttatttattaacacatacatatcatcatacaactaccattattcactccttctttaaataatatattaatatcaatttcttttttcaccttaataaatttattctctttctccaaactcccatcttttcttatcttaaatatcaccttctttaaccacaaaactatatattgtttctcaaaacatttattgctctttt

SEQ ID NO: 8998 - DNA, 241 bp, Zea mays
  unsure at all n locations
  Clone ID: LIB3150-031-Q1-N1-C11
acacccccaccacccccttatcctacaaaatggccgccgccgccccaagattttcttataaaaaaccataccaccccacatanctactnattccaccccaaccnttcctctctctaatttaataaaaacctctattctaccccacatcttcaccttcttccacnacaatatatccaaaaacatccttcaaccctattccntctccaaactcccctttcaccaaacttcatcttaatccttt

SEQ ID NO: 8999 - DNA, 111 bp, Zea mays
  Clone ID: LIB3150-031-Q1-N1-C2
ttttaaggggggaaaaaaggaaaggggatcgggggggcagcgtcgccgcaacagcaaggccagggcggccctggcaacggcgggtggaatcctcagcagttctggtcgctg

SEQ ID NO: 9000 - DNA, 406 bp, Zea mays
  Clone ID: LIB3150-031-Q1-N1-C3
tttttctcgtcatggtcccgcaaaaggcctcgttctacttcgtcgaactctacgccattcaaaaactttattaatggatcctgaggcagcacgaaaatgttttgaggctaacagttgctgatgtagcctcccatatccagcatgcgattcattatggaggtgacaatgcatcagcctctccaaggtcacaataccctagccaaagcactgcaccgacaatgcacattcccaacacaagcaaccagcaaccatcgccaagcttatttgctccaggaaaccctgggttgacacagtccaagaattccatggtcttttcaagcgcattatccagccccatccggcggagcctgcaaccttaccacctatagcaagacggggatgcagggtactttgctaacggtgcaag

SEQ ID NO: 9001 - DNA, 412 bp, Zea mays
  Clone ID: LIB3150-031-Q1-N1-C4
ctccccactgcctcgtgtggccgtcgcgcgcgttcggaacgccaagccccccctccggcgaaatggcccccaagcgaggtggcagggcgccggtgccggccaagaagaagacggataaagtgacgaaccctctattcgagaagaggccgaagcagttcggcatcggcggcgcgttgccgcccaagaaggacctgcaccggttcgtcaagtggcccaaggtcgtgcgtatccagcggcagcgccgcatcctcaagcagcgcctcaaggtaccaccggcgctcaaccagttcacccgcaccctcgacaagaacctcgctacgaactcttttaagatgcttctcaagtaccggcctgaagacaaggctgccaagaaggagaggcttttgaagagggcccaagctgagaatgaagg

SEQ ID NO: 9002 - DNA, 361 bp, Zea mays
  Clone ID: LIB3150-031-Q1-N1-C5
tcggtcgccgttccagttcgcttcgcgtcgcccagagctcgacggcctacgtccccgtgagaagcgagagcatggacacccaggtgaagcttgctgttgtggtgaaggtgatgggcaggaccggctccaggggtcaggtgacccaggtcagagtgaagttcttggatgaccagaaccgtctcatcatgaggaacgttaagggccctgttcgtgagggtgacatcctcaccctgctcgagtctgagagggaggccaggaggctgctctgaagccctggtggccttggatgtaatactgttaatcttgttctatgtctggcgaacttgctgtgtgacattcacaacatctgctttgagattac

SEQ ID NO: 9003 - DNA, 313 bp, Zea mays
  Clone ID: LIB3150-031-Q1-N1-C6
tcgcttccgaggaaactcaccagcccagggggacccgagcggaagaagccatgtccgggcgcggtaagggtggcaaggggctcggcaagggcggcgcgaagcgtcaccggaaggtgctgcgcgacaacatccaaggcatcaccaagccggcgatccggcggctggcgaggaggggcggcgtcaagcgcatctcggggctcatctacgaggagacccgcggcgtgctcaagatcttcctcgagaacgtcatccgcgacgccgtcacctacactgagcacgcccgccgcaagaccgtcaccggcatgggacgtcg

SEQ ID NO: 9004 - DNA, 393 bp, Zea mays
  Clone ID: LIB3150-031-Q1-N1-C7
aagaaacacaacaacccaccggagattcttacctcaaaacacctattctatcacgatatgtcttccaaccacatcaacaaccgcctaacttagcctgaacatcatgcacttcaccattcactactgcttgtccttaaatctaaagagcagcatgatcctcagagggatccaagtggacatatctcatgactacaatcacaatactcattctgattatcaagagaatgacgacaatcaacattctgcgcatataaacatcagggagccctcactccacaaaaggaagctccacacatatacttcttttcccacatcaagctctcatgaaggcacctagaggtcttatccccatactttcacaatggacatcaacaagtctttcacaaattcaac

SEQ ID NO: 9005 - DNA, 312 bp, Zea mays
  Clone ID: LIB3150-031-Q1-N1-C8
cgcgcgcggcggcgctggatccatatagacacaccacgcggtcgttccataacacattaagcactccggggggcgtctttatagggaaatactggctacagccatctaaccctatccaatggcacaaggccgttgtaagcggacccccagtacactgaccgagaggagaaaaggctgcttatgctcatgccatctagaaagttgcagatcgggacggcgccgcccaagaacgatttgtacctgatgcgcgagtaccctttggacggacgtataaacgcgcccctcagaatcctcattcagatctacaaggtg

SEQ ID NO: 9006 - DNA, 421 bp, Zea mays
  unsure at all n locations
  Clone ID: LIB3150-031-Q1-N1-C9
aacatccnttcccccttattctatataaccagatgcctgaacaccatgaatgaacttttttaaaacatgatgagccaccccaatttnncnnaacaaaaatatttatctaataaagaccctcatattctccaatcaagtccatcaacttagattacaacatcccacaaaanttcattatattaccaccctttttttcaattccaccccttcttcctactttgtcttgcaatcttttaacttttttatccaaacttccttctttcatcccatcttataacgttaacgaacctccttaaataaacatcatcaaccataccaacaatacaaaccaaataaaaaaagcccattatttatgttcgttcgctcaagttcccattgcttagacaaaaatataagcttcaaatcaatnttaaacttctta

SEQ ID NO: 9007 - DNA, 417 bp, Zea mays
  Clone ID: LIB3150-031-Q1-N1-D1
ctttcagataagatgaaagacgatgcaagaaagatacttagctcaaagcacctattttatgaggagatgtgttcctaccacaacaacaaccgtgtaaatttgcctgaagatcatgcacttcagcattcactactgcttgcccttagatgtaaagaggagcatgatcctcagagggatccaagtggagatgctgatgaatacgatcaaagtgctgattctgattatgaggagaatgacgacgatcaacatcctgtgcatataaacatgagggagccctcaatgcacaaaaggaagcgccacagtgatgtggctttggtcacatcaagttctcatgaaggcagtgagaggtctgatcctcatgctgtcacagtggacatcaacaaggctttcacagatgcaaccaacatggttttgttg

SEQ ID NO: 9008 - DNA, 409 bp, Zea mays
  unsure at all n locations
  Clone ID: LIB3150-031-Q1-N1-D10
attctcacaccatcaatnncgacagatagatttacaaaaanctgcccttcaaacaaanagatatacattgtcatttaaaccatgaaaaacatacatgcttcgtatcatcaatgctgcactgaatgaaaaactgttttttatgattgccggccatcaactcactgtcgtcgaagttgatgccacatacgtgaaaccttttaaaacagacaccatcgttatatccccagggcagaccacaaatttccacgtaacaacccatcttctttcctgaaagtacttgattcccccctctcctttcatgtacgcacccaattcattctacaacctgacccccacttctaccttacattacgccagtttctcttacgaatttccttcactacttttcttatcacccccttcctaaaaa

SEQ ID NO: 9009 - DNA, 398 bp, Zea mays
  Clone ID: LIB3150-031-Q1-N1-D12
gtctatattcctgaccaatagcttctcctgccatacaagccaattgtaaccgataaacaaccatggacttacaccggtaccgacaccacgatgagggagagcatcggggcgcacatccgcaaggccggcatgcaagtgaggaacgcgtgctgggagctgtactgcgtcgagcatgacattcaggctgatggtctgatgcgcggcgacaagaccattgggtgaggtcgatgatgcttgcaacacctccttcagtgagactggcgctgggaagcacgtcccccgtgctgtttacgttgaccttgaccccactgtcatcgatgacgtgaggactgacacatatcgacagctcttgcatccagagcagctgatcagtggcaaggaggatgcatgcaacaact

SEQ ID NO: 9010 - DNA, 319 bp, Zea mays
  unsure at all n locations
  Clone ID: LIB3150-031-Q1-N1-D2
caaaaaccaaacagaacaaggacccaggcgggatccactgacggcaagagataggagggagatctcgtgatttccggtggcaaggttcggttttgatcccaaccccaagttcctcaccccgaggagaaaaggatccagattttcttcctctctagtaagttgcaattcgcggtggcgccgccccccgccgcttcctacgtgttgcgcggttccggattggaatgagggggagcgcgtgccgtgngattcccgttcggatctacggagtgggcagctttcctgctccaattcggtcggccagcaacgaaggcccttgaat

SEQ ID NO: 9011 - DNA, 317 bp, Zea mays
  Clone ID: LIB3150-031-Q1-N1-D3
gtgacacaccatctccagatgggagagtagcccctgaaaggtttgcaagactggaaagggataccccacctccagacggggatatatctcgtccaagtgaaagttcacatgtccattctgagacgatggagatggagccagaatatcccgccaatgatgatccccacctcagacggaggatgtcttctccagttgaaaagttcacaatgtctcattctaaagaagatggagtcacaacaccatgccaaagatgttggtgagttagctcgttgtgaaagcccacacgtaagacatccgtcccgatcttctgaaaaaca

SEQ ID NO: 9012 - DNA, 300 bp, Zea mays
  Clone ID: LIB3150-031-Q1-N1-D4
tagatcggatcggaaagccacggcgccgagggcgttggcgacgccgcagcgcatgcagaccaatcccgatgatggccacagccaggtgccagccgacaagcgccgtcgaccggagcaccctgagacctccgacacggactcagactatcgcgacaatgatgataacggacgtcgagagcggaggttggccgactagaaggtgcgcgcatatgacattctgatcaagcacgagggctaacgccgtacggccatatggcgggagccagaacgcgttgacagctcagacacgacacgtgacga

SEQ ID NO: 9013 - DNA, 151 bp, Zea mays
  unsure at all n locations
  Clone ID: LIB3150-031-Q1-N1-D5
ganaaaaaaaaaaaagacaagcggcgatgatcttaaatgaaagcacgctatatgagacatttttctacacacactaccgtgtaatttgctgaagacatgcacttctctcactctgtggccttaaattaaagggcttgttcctcaaggatcc

SEQ ID NO: 9014 - DNA, 341 bp, Zea mays
  Clone ID: LIB3150-031-Q1-N1-D8
ttgaatctagaagcgcccctctccctcgcgctctctctcttcgccgtccgaagctccgcaccccaatctaatcgacacctcgccgagatgggccgcaagttcttcgtcggtggcaactggaaatgcaatggaaccacagatcaggtcgagaagattgtcaaaaccctgaatgaaggacaggttcccccttcagatgttgtggaggtcgatgtcagccctccttatgtcttccttcctgtggtcaagagccagctgcgccaagagttccatgttgcggctcataactgctgggttaagaagggaggtgctttcaccggtgaagtcagtgctgagatgctcgt

SEQ ID NO: 9015 - DNA, 281 bp, Zea mays
  unsure at all n locations
  Clone ID: LIB3150-031-Q1-N1-D9
cactcccccacnncccccttattctacaaaatggccgccnccncccgcacgattgtctttatacaaaccatagggcctcacatanctactnatnccaccccaaccnttcctctctcttattttataaaancctctattctaccctacatcntcaccttcttccacaacaatatatccaaaaacatccttcaaccctattccatctccaaacactcctttcaccaaacttcatcttaatcctttnntacctntcntcccctctctcntatccctcntattcc

SEQ ID NO: 9016 - DNA, 360 bp, Zea mays
  Clone ID: LIB3150-031-Q1-N1-E1
aatctggcaaaaatgtccttattgaatagtaggccttctgctgcggacactgcaagaagctggcgcccatcttggacgaggcagccaccactctccagagcgacgaggaagtcgtgattgctaagatggacgcgactgccaatgacgttcccagtgagtttgacgtccaaggctacccgaccttgtacttcgtgaccccgagcgggaaggtgacatcctacgacagcggcaggacggcggacgacatcgtcgacttcatcaagaagagcaaggagaccgcaggcgccgtcaccaccaccaccactcaagcgccaccggcatccgagaaggcagccgtcgccgagcccgtcaaggacgagc

SEQ ID NO: 9017 - DNA, 383 bp, Zea mays
  unsure at all n locations
  Clone ID: LIB3150-031-Q1-N1-E11
caaggaagcaggcggccaccatgatagatggtctctacggcacagcgcgtcaccctctacntccggggcaccatcctcggatacaagaggtccatgtcgaaccagtacgagaccacttcgctcgttcagatcgagggggtgaacaccaaggaggacgtctcgtggtacgctggctagctcatggcttacatctacaacgctaataccatgagcagcgagacctgctacatgtgcatttggggcacggtcacccgcccgcacagcaactcgtgcgtcatccgcgccaagtgtaagtgcaacctccttgctgactccatggtgcgcaaggtcagagtgttcatgtaccctaacaacatctaaagttaggtttttgttgatgtaaa

SEQ ID NO: 9018 - DNA, 317 bp, Zea mays
  Clone ID: LIB3150-031-Q1-N1-E12
ttgcttcagaccattagctttatctactccatgtcgcagaagaacccgatcgacaccatgagggtgttgctcgttgccctcgctctcctggctctcgctgcgagcgccacctccacgcatacaagcggcggctgcggctgccagccaccgccgccggttcatctaccgccgccggtgcatctgccacctccggttcacctgccacctccggtgcatctcccaccgccggtccacctgccgccgccggtccacctgccaccgccggtccatgtgccgccgccggttcatctgccgccgccaccatgccactaccctac

SEQ ID NO: 9019 - DNA, 391 bp, Zea mays
  Clone ID: LIB3150-031-Q1-N1-E2
tgtcctcgtaaattggactgtttagcaggtgactatgaaaggctcaaagagatccgtgaatatcatcggcggaacccatctgcccgctttgtcagtacaactgatgactatgaagagcttctaaaggaggaaccagttattgaattcactggcgaggaaacttttggccgttaccttgacttgcatgagctttataacgagttcataaattccaagttcggaacactgatggaatattcagcttatgttggctgtttctcccagacggacaagatctcacatagtcataaagctaccagaaaatacagagaatacttggaacacattttggaatatctgacatcatttctgtatcgcacagagccattgcaagacattgataagatttttt

SEQ ID NO: 9020 - DNA, 392 bp, Zea mays
  Clone ID: LIB3150-031-Q1-N1-E3
tcgtttctctccgaacataccctccctacgtcgccgttgtcggggcatctgcgatgcgggcatacaagtacgtctaggagttatggagaaggaagcaatccgacgtgatgcggttcgagcaacgcgtgcgctgatgggagtacaggcagcagccggccatcgttcgcctcacaaggcccacccggcctgacaaggcccgccggctcggcttcaaggccaagcaggggtatgttgtttaccgcgtccgatgtgaggcgtggtggcaggaagaggcctgtgccgaaaggtattgtctatggcaagcccatgcaccagggtatcacccagctcaagttccagaggaacatgagatctgttgctgaggaacggactggacgaaagcttggtggact

SEQ ID NO: 9021 - DNA, 387 bp, Zea mays
  unsure at all n locations
  Clone ID: LIB3150-031-Q1-N1-E4
ttgctcgatctcgcacctagggtttcgtctcgcngtctcgtcctccgcgaagatgccnaanaacaagggtaagggaggcaagaaccggaagcgaggaaagaacgaggctgacgacgacaagcgcgagctcgtcttcaaggaagacgggcaggagtacgcgcaggtgacccggatgctcggcaacgggcggtgcgaggccatctgcgtcgatggcacgcgccgcctctgccatatccggggtaagatgcacaagaaggtctggatcgcggctggggacatcgtcctcgtcggcctccgcgactaccaggacgacaaggccgacgttatcctcaagtacatgaacgacgaggcgcgcctgctcaaggcctactgggagctttctgacac

SEQ ID NO: 9022 - DNA, 396 bp, Zea mays
  unsure at all n locations
  Clone ID: LIB3150-031-Q1-N1-E6
tcgcagcttctcaaccggataggtagcaccggagcatgtagaacgctgcacaatccccttcgccgccgccaagatggtgaacgttcctaagaccaagaagacgtactgcaagaacaaagagtgcaagaagcacacactccacaaggtgactcagtataagaagggcaaggatagcctgtctgcccagggaaagcgccgttatgaccgcaagcagtcaggatatggtggtcagaccaagcctgtcttccacaagaaggccaagaccaccaagaagattgttctgaagctgcagtgccagagctgcangcactactcacagcacgccatcaagagatgcangcattttgagattggtggagacaagaaggccaagggcacatcttttttttaagcttt

SEQ ID NO: 9023 - DNA, 163 bp, Zea mays
  Clone ID: LIB3150-031-Q1-N1-E7
ttaaaactctgcacactccccctaacaatacataatatatttaacgtacataataccaataatacttactgcatcaacaacaaatcattactcactcactccacaagatcactcagtatcacaacgtcttcgatagcctgtctacccatacaacgcacaacta

SEQ ID NO: 9024 - DNA, 326 bp, Zea mays
  Clone ID: LIB3150-031-Q1-N1-E8
acttcgccaacttcttttcccagccagcggattttaaaccaacgccgctcaccataatcatccccaaaaagaaccacaatgagatctgcaaatacctcttcaaggaggacctgctatatcccaagaaggactacaaccaggcgaaccacccgcaaatcgatgtgcccaacctccacgtgatcaagctcatgcagagctttaagtccaaagagtatgttagggagacctactcctggcagtactactactggtatctcaccaacgatggcattgagcacctactcaactacctgaacctcccgtctgagatcgtgcctgccacgctc

SEQ ID NO: 9025 - DNA, 343 bp, Zea mays
  unsure at all n locations
  Clone ID: LIB3150-031-Q1-N1-E9
aaaaaaaaatttaaaacaaaattataaaaaaaaaaaaaaaaaaaaaaaacaagcagaatttttaaaaaaaaaagaccccccacaaacccctaaactaaaaaacaccaaaacaaaacaccaacaaacctaacataacactaaaaaccctacttccccaaaaataataaaaaacatcccacccccaacccaacacaccaaaaccatttacattttacccccaaacaaaaaaaaacctccccaactttaacaaccataccacccaaaaacctccaccctaccccacatcaaattctttncaacacatacccccccccccaaaatataaaaacaactaaaccccccc

SEQ ID NO: 9026 - DNA, 412 bp, Zea mays
  Clone ID: LIB3150-031-Q1-N1-F1
gaaaactagggttttgctcctggaatcgggtcgcccgcagccgccgcccgaccgtgcgccaacgatacatccttctccctcctccgatccggcctttttgatccccggatcccgtacaatatgcttcccctctcgctcctcaagaccgcccaggggcaccccatgctcgtggagctgaagaatggtgagacatacaacgggcatctggtcaattgcgacacgtggatgaacatccatcttagggaggttatttgcacctcaaaggacggtgacaagttttggaggatgccagagtgttacattcgcgggaacaccattaagtatcttcgagttcctgatgaggtgattgacacggttcaggaggaaacttctaaaagccgatcagatagggagccaccaggtgttggccgtg

SEQ ID NO: 9027 - DNA, 281 bp, Zea mays
  Clone ID: LIB3150-031-Q1-N1-F10
aatcacattctaattatctctaccaacatcaacactatcactaccaaacttctcttacctctcatactcaaaacaaactcctataaatctcaccaaacatcatcaaaaacatttcctcctccctaaataacttaaaacttccatatccttcaaaaaactaaaataacatattacattccaattttaactaatatccattaaactattcatcattaatcacaccaaataaaacctcatattattcatactccatcattcttatctcaacatactaatcttct

SEQ ID NO: 9028 - DNA, 396 bp, Zea mays
  Clone ID: LIB3150-031-Q1-N1-F11
agcagttcgaaaccaaggatccatccagaggtcgaggaggaagagggagaagggcgcgcgcgcgcgcagcgttcaagtggtgctggtgtcggccatggatcgggttcgcggatccgcgttcctgctcggcgtcctgctcgcaggatccctgttcgcgttttcagttgctaaggaggagaccaagaagctcggcaccgtgatcggtatcgatctcggaaccacctactcctgtgtgggtgtgtacaagaacggtcatgtcgagatcatcgccaatgaccagggtaaccgtatcacaccctcatgggttgccttcaccgatagcgagaggctcatcggtgaggctgccaagaaccaggcagctgtcaaccctgagaggaccatctttgacgtcaagcg

SEQ ID NO: 9029 - DNA, 409 bp, Zea mays
  Clone ID: LIB3150-031-Q1-N1-F12
gcccaaaaccctactgctcccgctccgcgcctgcttgatcgagatcacttcgcccccgccgctttcgagatctcccggtggagcaagcgagcaaaggcagcagccatgtcgctccgcgtgctgaaccctaacgccgaggtgctcaacaagtcggcagcgctgcacatgaacatcaacgccgccaagggcctccaggacgtgctcaagaccaacctcggccccaagggcaccatcaagatgcttgtgggtggagctggcgacctgaatctgacgaaggatgggaacaccctctagaaggaaatgcaaattcagaacccaactgcaatcatgattgcgaggacggctgtggcacatgatgacacaagtggtgatggcacaacctccactgagctatttatcggggagctaa

SEQ ID NO: 9030 - DNA, 329 bp, Zea mays
  Clone ID: LIB3150-031-Q1-N1-F2
gccgccgtcgccgcctcctctccccagcgcggggagctcgaccgaacgccgctcaccatgatcatccccaagaagaaccgcaatgagatctgcaagtacctcttcaaggagggcgtgctgtatgccaagaaggactacaacctggcgaagcacccgcagatcgatgtgcccaacctccaggtgatcaagctcatgcagagctttaagtccaaggagtatgttagggagaccttctcctggcagtactactactggtatctcaccaacgatggcattgagcacctacgcaactacctgaacctcccgtctgagatcgtgcctgccacgct

SEQ ID NO: 9031 - DNA, 399 bp, Zea mays
  Clone ID: LIB3150-031-Q1-N1-F3
tcgcgatggctaggcctgttattgctaaggcggtggttgatgttgccaaggaagttggtgcggatgcagttgcccatggatgcactggaaaaggcaatgatcaggttcgctttgagcttacattctatgctttaaatcctgaacttaaagtggtggcaccttggagggagtgggatatcacaggacgtgaagatgctattgaatatgcaaagaaacataatgtacctgttccagtttcaaagaaatcaatatacagccgagatcgaaacttgtggcaccttagccatgagggtgacatcctggaggacccagcaaatgagccaaaggaagatatgtatatgatgtcgattgctccagaaaatgcgccctcgaaacctgagtatttggagaatggtatca

SEQ ID NO: 9032 - DNA, 395 bp, Zea mays
  Clone ID: LIB3150-031-Q1-N1-F4
tcgccacaagccgccgccgccgccgtgaggagtcgggcgaatggcgtcccgcgtcgcctccggcctcctccgccgacgcgccggcgccacactaggcctactaaggagttatgcacatgtcagaagctacaacagtcaactgtcagctttggtttctgctacatctgaatgctcaaatctgccgagatgctattacttacctaatccctctccataccaagtgtggagtaggtcatttgcttcagacaacggacacaagtttgaggctgttgtgcccttcatgggtgaatctgtaactgatggaactcttgctaacttcttaaagaaacctggagacagagtcgaggctgatgaacctatatcgcagattgaaactgaataggtcactatagatg

SEQ ID NO: 9033 - DNA, 318 bp, Zea mays
  unsure at all n locations
  Clone ID: LIB3150-031-Q1-N1-F7
tctcataactaaacctcttatcactaaaccggtcgtttttatcaccaacaaacttcacacaaatccatctccccatctatacactaaaacatccaatcatcatcatccatcacaacttacattctatcctttaaatcctaaaccaaaactaacctcacctcactattaacttctataaacaccacttcacataatccctntaatatgcaaacaaacataatctaccagttccacattcaaaaaaatcaatatacagccaaaacctaaacaagagccaccttaaccaatatctttacatcctttagaacccaccaaatc

SEQ ID NO: 9034 - DNA, 281 bp, Zea mays
  Clone ID: LIB3150-031-Q1-N1-F8
gctgcattacgattctattgttacaagacaaaacacaagcctttcgcaagggtgcataatccacatcccatggttatccatcccaggcactcaagttcagatgacatggttaaaatcacatttgcacggagaaatgctaatggttgttctcgcgcaagtgagacatataaccaagctagcagtggtccacgtgacatccatttatgttaaagtggaaatatgttcatttctatccaagttcttctcaatgtgaccaacaacttcagctaggacaacatcct

SEQ ID NO: 9035 - DNA, 393 bp, Zea mays
  Clone ID: LIB3150-031-Q1-N1-G1
ttaaaagggaatgtctgagcactccacgggtgttcagcatcaagtcgagtcttcacatattccgttcgcgctaactctaaaagaaatcatcaattctgcatgatccatcacccagagtttgtcatcggagttacttgatggcaatcgcaggctactggcacttgttacttatgggaatgccattgcacataataccagtgctttgcagcccattaatggtcctatgggtggatcccaggaggttgaggctcctgtagatcctatgaacgagcgtggcagactgatatctgaacgcatgtatgacgaaccagttacaatggctcttgaaaggagtgatgtttccatagtatcgtggctatgctcccaggttgatttgcgggcattatgtgcaat

SEQ ID NO: 9036 - DNA, 346 bp, Zea mays
  Clone ID: LIB3150-031-Q1-N1-G10
cctcctatctatagaaacttttctactaaacccttctatcactctacacaaaacccatcatcacataaacccaacaaatataactccatttttccaaaacctcctctcacacatacaaacaagaatctactccatgtcgcaaaacattaagacaaagatataccaaatagtaaccaaaattgatcacctctatcagatcatcaacgatctccaaatcaatattgtcactctgactcctcccaaaatactcatacatccaaatcctttctaccatttcttactattccataactcacaaaaatttcataaaacacacaaataccacacattccacaaatcccacaaa

SEQ ID NO: 9037 - DNA, 346 bp, Zea mays
  Clone ID: LIB3150-031-Q1-N1-G11
tccatcaccacataacctccataactttactgcaaaaaaaaaccatcccactaaaaacattcaaaacaaatttcctcaccatattctcacaacaccgtatcaaaataaatataaaatatcatccaagattcattaactcaaccaactcacctaccaactcataccttattttaacaactaaacccaatcctccactccttttaacacctaacctccatcaacgtttcactattcttttactcaacttattttcccttacaaatcaaccccaaacactatcattagaacaatcataataaaaggccttaccctctatcacttaaaatcacaccttcaaaaataccct

SEQ ID NO: 9038 - DNA, 383 bp, Zea mays
  unsure at all n locations
  Clone ID: LIB3150-031-Q1-N1-G2
gctggctcagtggctggtacagttgctggactaggccttgttgctgcattaggattctattgttacaagagaaaacagaagcctttcggaagggtgcagagtccacatgccatggttatccatccgaggcactcaagttcagatgacatggttaaaatcacagttgcagggggaaatgctaatggtggtgctcgcgcaagtgaaacatataaccaagcgagcagtggtccacgggacatccatgttgttgaaagtggaaatatggtcatttccgatcaagttctccgcaatgtgaccaacaacttcagcgaggacaacatcctnggtcgaggaggggttgggcactgttacaagggtgaacttcatgatggcacgaaaattgc

SEQ ID NO: 9039 - DNA, 422 bp, Zea mays
  Clone ID: LIB3150-031-Q1-N1-G3
ttgtctggctcagtggctggtacagttgcgcggctaggccttgttgctgcattaggattctattgttacaagagaaaacagaagcctttcggaagggtgcagagtccacatgccatggttatccatccgaggcactcaggttcagatgacatggttaaaatcacagttgcagggggaaatgctaatggtggtgctcgcgcaagtgagacatatagccaagcgagcagtggtccacgggacatccatgttgttgaaagtggaaatatggtcatttcgatccaagttctccgcaatgtgaccaacaacttcagcgaggacaacatccttggtcgaggagggtttggcactgtttacaagggtgaacttcatgatggcacgaaaattgctgtaaagcggatggaggctggtgtgatgggtaacaa

SEQ ID NO: 9040 - DNA, 374 bp, Zea mays
  Clone ID: LIB3150-031-Q1-N1-G4
ggggattttattttattaccgaagctgggtgctaacagaacccaactaactaagaggtagcagcgatcctttctttattggccgtcccaaaccagcaaactacgttgcgcagcacagagaggtagtagatagcaggcgccaggcaagtcggagaggcggcgcattagcgccggaccgtgaacccaccgtcaggcgccagcccagtacggcagcgtcacacgaacggcgcctccttgcctagcgcgaagaaagctccggtggggccgccttccgggagcagcgccaccttgacgacgttggccgcgccctgcgcgggcttcagcaggcccgtctgcctggtcatgtcggtcttcacggtacccgggtgcgcgcag

SEQ ID NO: 9041 - DNA, 416 bp, Zea mays
  Clone ID: LIB3150-031-Q1-N1-G5
ttgcggagctggaagcggagatgctccctgccgccttggtgaagacggagccgttggtggatgggctcgacgactaggtggtgcacaagatcaccaagcaggtggaatactattttagtgacatcaaccttgctactacagaacatctgatgagattgattaccaaggattctgagggatttgtgccaatatcagtaattgctggctttaagaaagtaaacacttctgtgcgcaataatgtgatgcttgctgcggctctcctaacctcatcaaaacttgttgtaagcgatgacggtaagagagtcaaaaggcagcagccatttacagaatctgatttgcaggagcttcagtctcggattgttgtagcagagaatcttcctggtgatccctcctaccagaatcttaagaagatattt

SEQ ID NO: 9042 - DNA, 417 bp, Zea mays
  Clone ID: LIB3150-031-Q1-N1-G6
ccagaactatcccaacagcccgccgtgagtaagatttacttctgagatgtggcatccgaatgtttatcctgatggacgtgtttgcatttctattcttcatccacctggtgaagatcccaatggttatgagcttgcaagcgaacgatggacaccagtgcacacggttgaaagtatagttctgagcatcatttcgatgctctctagtccaaatgacgagtctccagcgaatatcgaagctgccaaggattggagagaaaagcgggatgagttcaagaaaaaggtaaggcaatgtgtccgcagatctcaggaaatgctctgaaggagaaacatatggggagttgaacgagtgctgcaacttcacaaccagttacctagccagcattcttttgcttttcccctgtatattttccattcagt

SEQ ID NO: 9043 - DNA, 416 bp, Zea mays
  Clone ID: LIB3150-031-Q1-N1-G7
ttcgcagaactatcccaacagcccgccatcggggtatttacttctgagatgtgtcatcctaatgtttatcctgatggacgtgtttgcatttctattcttcatccacctggtgaagatcccaatggttatgagcttgcaagcgaacgatggacaccagtgcacacggttgaaagtatagttctgagcatcatttcgatgctctctagtccaaatgacgagtctccagcgaatatcgaagctgccaaggattggagagaaaagcgggatgagttcaagaaaaaggtaaggcaatgtgtccgcaaatctcaggaaatgctctgaaggagaaacatatggggagttgaacgagtgctgcaacttcacaaccagttacctagccagcattcttttgcttttcccctgtatattttccattc

SEQ ID NO: 9044 - DNA, 409 bp, Zea mays
  Clone ID: LIB3150-031-Q1-N1-G8
ctcgcttccactccgctcgtctgacgtgtcgtcccgtcctttcgtttcgaagcctcgcgagccccgacgatggccaccgccgcggtgtcggtcgacgagaagctcgacaagcttcgcgccgaggtcgccaagctcgaccagatcagcgagaacgagaagtccgggttcatcagcctcgtgtcacgctacctcagtggggaagcggagcagatcgagtggagcaagatccagacccctacggatgaggtggtggtgccctacgataccgtcgcgtcgcctcccgaagatctcgaggagacgaagaagctgctggataagctcgttgtgctcaagcttaacggagggctcgggacgaccatgggctgcactgggcccaagtctgtcattggagtccgcaatgggttcacat

SEQ ID NO: 9045 - DNA, 415 bp, Zea mays
  Clone ID: LIB3150-031-Q1-N1-G9
ccgaccgccggcgagcccctcctcctccgtacacgcgcttccccggctatcatggattcagatccatcatcacagaacccaacagatatgactgcatttgtccagaacctccttggacagatgcaaacaaggttcgagtccatgtcgcagaacattgtgtcaaagatagatgaaatgggaaccaagattgatgagctcgagcagagcatcaacgatctcaaagctgagatgggcactgagacgccggtcaagaagcctgatgagccaaagcctgctgactctgcctaacttgggtgtaacccagagattgttgtgtgaagatttgatgatggtacgtgatcgtatctgttttcatgagtcctggcagttatgtagacacgaacccatcgtatgaaagatgaatccatgtttgggc

SEQ ID NO: 9046 - DNA, 420 bp, Zea mays
  Clone ID: LIB3150-031-Q1-N1-H1
tcggcccaacgtgctctccctcccatttccggcgaggtggttggtggcgatggccttcaagctgatcaccaagcccgcggcggcgtcgcccgctgctgcttactggggagatctcgcccgggggccgcagggtacgagccgcgttgccttcggaccagcgcccaggaacaaggggctccgcgcggccaacaactccgcaacgcccatagctaaggtagagagggttgatcgaagtgacatattgacattggatagcatcagacaagttttgattagactagaagacagcatcatatttggccttttggagagagcacagttttgttacaatgctgatacatatgatagcaatgctttccacatggatggttttggaggatctttggttgaatatatagttagagaaactgaaaagctcca

SEQ ID NO: 9047 - DNA, 249 bp, Zea mays
  Clone ID: LIB3150-031-Q1-N1-H10
ctccaacctctttaattattttaaaccaaactaaaatttactactcccatctcacaatactttttatcatataacaactaaccaacctatccatttcaacacatttttaattaatcaacatctcaaacccttcaaaaaaataaaaacttattactaataaaatcataaaatacataacttctattatcaaatattaaaaactgatcaaaaaacacataacactgctacaataaactccaatggaagtgt

SEQ ID NO: 9048 - DNA, 237 bp, Zea mays
  Clone ID: LIB3150-031-Q1-N1-H2
ttgtcctcctccaaccccggtctcgcgcgatgccggttccggtttccccgcgcccggccgcccgtcccgatcccgccgttgtgtcggcggcccggttccgccctccgttccgtcgccttgcggcctgccgttgatgtggcgtggcacggggcccgtgcttcggttttgagagctctcgtgtcggtgcggagaggcccgcggcggtctttcaatgaggcggcggccggtcctgccggc

SEQ ID NO: 9049 - DNA, 254 bp, Zea mays
  Clone ID: LIB3150-031-Q1-N1-H3
caccgaacaagctctcgccttgaagagagccttgtggactgcagcggagatgacaacgaagaaaagaatccagaaaccgccttttcgaacaagaaaacagcgcttttgaagattatcgaggagtctcctgtccgcaaaacaattgttttctgcaacaagattgagacatgtagaaaagttgagaatgcgctgaggcggtttgacaggaacgcctcacagatcaaagttctcctcttatatgctgcgctggatca

SEQ ID NO: 9050 - DNA, 290 bp, Zea mays
  Clone ID: LIB3150-031-Q1-N1-H6
tcgggaagacgagaaggccccgaggcgagcgggggatcaaagaagaagatgaaggtccgtgcggcggtgaagcgcctgtgccggttctgcaaggtggtgaagcgccggggaatcgtcttcgtccaatgcacggccaatgccaagcacaagcagcgccagggcttctccaccatcgccgaagcagccgccgtctcgtgcgttcacctgcctccgccgccgcccgctagcggttccgcctccgccgcagcgttcgcagaggcttcgaaagtggcgaggcaagagatgtctat

SEQ ID NO: 9051 - DNA, 296 bp, Zea mays
  Clone ID: LIB3150-031-Q1-N1-H7
ttggaaaaagagagtgcctcatgttgaaggggccaagcaaaggacagcagatgcattttctacagtggagtcccttcctcgccccaccagcacaaggttcctttcatacgaagaactgaaagtggctacaaataacttcgagccttcaagtgtgcttggagcaggtggttttggccgtgtctgtaagggggtactgggtgatggcactgctgtcgctatacagaagcttactaaccgacggcaccaacgagataaggtgtttttagttgaagtggcaatgcttagcacgttgcacc

SEQ ID NO: 9052 - DNA, 390 bp, Zea mays
  unsure at all n locations
  Clone ID: LIB3150-031-Q1-N1-H9
cccctaataccaaggaggtcttttttcaactctgggcgcccctaattnntnctnnccnnntattttccatcactttcctgggaaaaaaaagcataaaatgaaaaagtttcaggacaaatgtactcagctattcgttcgttaccgttcaatggaagtgtaagatattatcaacggtcgtctgatggaaccaacttgcctaacgatgcttgtttggttttaacaacggatcccaagcctctactccttttgacagctgagctccatgaacgtttcgtcgatgctaatactcaactctgtggccctgacaaatcaaccccaaagactattttgataacaatacgatcaaaaagccttaccctttattacttaaaatcacacctttataaatac

SEQ ID NO: 9053 - DNA, 290 bp, Zea mays
  Clone ID: LIB3150-032-Q1-N1-A10
gagctgagctgccggaggcagaataggagaggcaggctatgaccatggcgacgaaggcggcgtgcgtgctggcggtgtgggtgctcatatcatccggcctgtccgacctgagctcagcgcgcgcgcccatgggcagtaagccttagtgggagttggactacttgctgctctcacttcagtggcgcggcatcatatgagcatccacacggcactgatgcacgaccaacggctgctgacggtcggagcctgtctatacgattacgattcacggactatagctggactaccac

SEQ ID NO: 9054 - DNA, 380 bp, Zea mays
  Clone ID: LIB3150-032-Q1-N1-A11
tcgggctcgcctcgggggaccgcgtgtgcgtggcgagctcggtgctgccggctgccgccccagtgcgaggcgatggggaggaggctggacgtgctgctggggcggacgacgaagcagacggcgcggctcaagtcgctgctggggctggcggcgacgcgcctcggcgtggtgcggggccaccgccaggtgcggtgcgggcaggcgcgcggggacgtggagcagcttctccgcctcggccacgcggaccgcgcgctggcccgcgccgagcacgttgtgcgggagcagaacgcgctcgacgtccttgccgagctcgaagcctgctgcaacctcatcgccgagcgggccgcgctcgtcgacgacgcgcaccagggggagtgccc

SEQ ID NO: 9055 - DNA, 355 bp, Zea mays
  Clone ID: LIB3150-032-Q1-N1-A12
tgcaaataatgcggctgcctactactgcccgcagcagcagcagcagcaggtgacagtcatgtaccagcagtacccaacaaggatggagatcgggcaggacaagacgacgacgccaccggccgccacgttccagcaggccgcagcaccgcgcggtgccgcgagcaccaccaccccaccgcaggtgctgcactcgcagtccccgcccgccattaataacggcgcccgcgggccagcggatcagcgcgtcggccgccccagccgcgaccgcgacctcgagacgctgcagctgttcccgctccagcccaccttcgctcagctgcggcgcgacaaggggaacgccgccgctggcagcagc

SEQ ID NO: 9056 - DNA, 346 bp, Zea mays
  Clone ID: LIB3150-032-Q1-N1-A3
gtgagccaccggaagcggagacgtgagcacgcgaccaaccccgtcgatccggctgcggcgcggcgtgctagatcgctaccgaccatggtggtggaggagatcgccgagggggtgaagaacctaaccgtcaccggagatgcggcggcttcaggcggagaggggcagaggaggggcggcggcggcagcagcaaccgcatccaggtgtccaacaccaagaaacccctcttcttctacgtcaacctcgccaagaggtatatgcaacagcacggcgatgtagagctatccgctcttgggatggccatagcaacagttgtgaccgtggcagaaattctgaagaacaatggat

SEQ ID NO: 9057 - DNA, 409 bp, Zea mays
  Clone ID: LIB3150-032-Q1-N1-A4
agcgaggagagcatgaacgcgctgcagtgggcgctcgacaacctccgcctgcgccccgacggcgagctcgtcgtgctgcacgtccagccgctgcccaacatcgccgcgggactcaacccggcgcccatccccttcggcggccccagcgggttggaggtgccggcgttcacgcaggccatcgaggcgcaccagcggcgcataacgcaggcgatcctggagcacgccctgaagatttgttccgataagaatgtggaggtgaagacggaggtggtggtcggggaccccaaggataaaatctgcgagattgcggccaaccgtaaggccgatctgctcgtcatgggctgccgtgccattgggccgctcaagagggtgttcttgggcagtgtgagcaactactgtatcaaccatg

SEQ ID NO: 9058 - DNA, 354 bp, Zea mays
  Clone ID: LIB3150-032-Q1-N1-A6
gccggtgcctgtcgtgggtggatctcgccttcctcggattcggctccgtcgtcggctcgggcgtcttcgggctcaccggccaggaggcgcggttcgacgccggcccggccatcccgctggcctacgccggcgcgggcttctcggcgctgctctcgtccttctgctacgcggagctcgccggcgagatcccatcggctggcggctcgttctcgtacctgcgcgtcgagctcggggacctggccgcgttcatcggcgacgggaacatactgctcgaggctcgggtgggcgcggcctgcctgggccggtcctggacgtcgtacctcgcggcgctcatcggccgcgacagcgacacgc

SEQ ID NO: 9059 - DNA, 243 bp, Zea mays
  Clone ID: LIB3150-032-Q1-N1-A7
tcgcctttttatggaagtgcatccatggcggctcgttcttggggaagaagatgtctgatgctgatcttatgtgcctgacacagaagtccccaggttctatgcagtgcctgagtctaataccctcaaacacccgtccgccggatggattgaaagctgttttaaagagtaatctacagttaacaaaggcgggcatgtttcggtgctttccggattaccttataaggtcttattgacaggtttccc

SEQ ID NO: 9060 - DNA, 359 bp, Zea mays
  unsure at all n locations
  Clone ID: LIB3150-032-Q1-N1-A8
attcattccacccccgtctcctgcgatcggacggaccaccgggccagcagcggggcggatcgcgtcagcagccatggtgaaggcctaccccacggtgaacgaggactacctcaaggcggtcgacaaggccaagcgtaagctccgcggcctcatcgccgagaagaattgcgccccgctcatgctccgcctcgcatggcactccgcgggcaccttcgatgtggccaccaaaaccgggggccccttcggcaccatgaagaaccccgccgagcaggcgcacggagccaacgccggactggaaattgccatcaggctgctagagcccatcaaggagcagntccccatcctatcctacgctgact

SEQ ID NO: 9061 - DNA, 280 bp, Zea mays
  Clone ID: LIB3150-032-Q1-N1-A9
cgcgagggcgccatcggcctcctatgtgtgctccgtcgcgctcggtgtcacctccttcttcatccccaggctgtgccggaagctcacgtcccgggtcgtctggtccgtcagcagcctgatggtgttcgtcctcatgacagccatggtcgtcctcggcatggtctccatgaagggctacaggccctcgctcgccgccttcctctctggccccgaccactcgttcaagggcggcgccctcgccatcttcgcgctcatcggcatccctcaggccgtgctctac

SEQ ID NO: 9062 - DNA, 410 bp, Zea mays
  unsure at all n locations
  Clone ID: LIB3150-032-Q1-N1-B10
ctggcaccggcgtgctcttcactaggagccccaacaccggagagaagaagctgtacggcgagttcctggtgaatgcccagggcgaggatgtggttgctggaatcagaaccccggaggatcttgatgccatgaaggacgttatgccacaggcctaccaagagctagtcgacaactgcaggatactggagagccactataaagaaatgcaggacatcgaatttactgttcaggagagcaggttgtggatgttgcagtgcaggacagggaaacgtacgggcaaaagcgccgtaaagatcgccgtggacatggttaacgagggacttgttgagcgccgtgcggcgatcaagatggtagagccaggccacctggaccagcttctccatcctcagtttgagaacccatncgcgtac

SEQ ID NO: 9063 - DNA, 410 bp, Zea mays
  unsure at all n locations
  Clone ID: LIB3150-032-Q1-N1-B11
gtagcgtgtgccgtaccccgtcgctcagccgggatggcgtcgagtggggatccgcccggatctgctgatgagaagaaaactccaatatccgaagggtcttccgacgaacgtcaagggcttcctccagcaggcttttcaaatccttttgattttggttctatgcaaagtttgctcaatgatccatctattaaggagatggcagatcaaattgcaagggatcctgcattcaaccggatggctgagcagctacagaaaagtgctcaaagcacaggagaacagggcacacctccattaaatcctcaacaatacatggaaacaatgcaaaaggtcatggaaaacccccagtttatgaccatggcagagcgtctggggaatgctcttatgcangatcctgctatgtccagtatgct

SEQ ID NO: 9064 - DNA, 401 bp, Zea mays
  Clone ID: LIB3150-032-Q1-N1-B2
gccgcgtccgcctcgccaagcgcagcaggcgccgcagcacatcgctctcttgatctcagccatggcggaggtggagcagcaacaggacacgccgaagctcttcaaccgctggaccttcgatgatgtccaggtgaacgacatctcgctgaacgactacctcgctgtgaacgcgacgaagcacgcgatgtacctgccgcacaccgcggggcgctactccaagaagcggttccgcaaggcgcagtgcccgatcgttgagcgccttacaaactccctcatgatgcacgggcgcaacaacggcaagaaggtcatggctgtccgcatcatcaagcataccctggagatcattcacctgctcaccgatgccaaccccatccaggtcgtcgtcgacgcgatcatcaaca

SEQ ID NO: 9065 - DNA, 402 bp, Zea mays
  Clone ID: LIB3150-032-Q1-N1-B3
aaaatccgccgccggtgcccagaactcgacgggaaaaccggggctttggtcgccggacgccggctgcctcgagatgctcgtgtgggcggccaccgcgtcaccacccagcactccatccgccgtgccatttgctcctccccaccgcgccgccgctccccgccctccaccgcctctctgccgctcgctcccggggctgctgtgcgcgggcctgatccctccgccgcgcgccgccgcttctgacggcgacgtcttctgggaggagccagacgacggctccgggagcgactacgaggacgacggcccggagcaaaggagggccttgcgtttcccatcttcctcgccgtcctacaggctcgaggcgtcggcgcagcaagaacaggacctccggagagagatcgagct

SEQ ID NO: 9066 - DNA, 400 bp, Zea mays
  Clone ID: LIB3150-032-Q1-N1-B5
ctatgagtatggttggggtgaatccttgcactttgctcacagatggaatggagaatccttacgtgaaagcatcaagcgacatgagcattttcttgccctgcaacttggtttgaaaccaggaatgaaggttttagatgtgggctgtggaataggtggaccactgagagaaattgcaagatttagctcaacttcagttaccggattgaataacaacgaataccagataaccaggggaaaggagctcaaccgtttagcaggaattagtggaacatgtgattttgtcaaggcggacttcatgaagatgccgttcgatgacaacacttttgatgctgtttacgccattgaggcaacatgtcatgcacctgatccagttggttgctacaaggagatatatcgtgtg

SEQ ID NO: 9067 - DNA, 400 bp, Zea mays
  Clone ID: LIB3150-032-Q1-N1-B6
ggccttcacgcacgagccttcgccgcctatacttgcgcttcgtcgagccggtgaattgtggtctaagcacacgaaggaaggatctttctccagacttcgcaattttggacgacgagatgcacttccttgcatcatttcatgtccctacaggttttgtgttatctggtttgtcgggatggatgccaaaaagttcctgcagctggtcgaagagaagaaaaggaggatcctcgagaagaaagaagccccactaaagtggcagcagaagctagaagcagcagttaacgtcaaagctgatgcagaagcgaaggcgaaaaaactaaaatcaagaaagcataggaggagaggagattcttcctcggactctgacagtgactatgacagcgatgttgatcggaaacac

SEQ ID NO: 9068 - DNA, 378 bp, Zea mays
  unsure at all n locations
  Clone ID: LIB3150-032-Q1-N1-B8
ccctagccctcgcgccgccgcctggtgcgccacccagcgctcgagctcctcgcgtcctgcgagcgcgcgccgcaacgccaccatgaagttcaacatcgcgaacccttccaccgggtgccaaaagaagctggaaatcgatgacgaccagaagctgcgtgccttttatgaccgaaggatatcccaggaggtcagtggtgatgctctgggtgaggagttcaagggttatgtcttcaagatcatgggtggatgtgacaagcaaggcttcccaatgaagcaaggagttttgacttctggtcgtgttcgtcttctgctccataggggcactccctgcttccgtggttatggcaggcgtaatggtgagcgcangaggaagtctgt

SEQ ID NO: 9069 - DNA, 391 bp, Zea mays
  Clone ID: LIB3150-032-Q1-N1-B9
gttccccttctctgctcgccatctggtgctctccgcttggctcgtcaatcacctcctacgctccacacgccgccggcgactacaactgcttctgccgtggttacagagaagaagggtttggggagaagacaacctaaatcaattggatctgggagtatcagatctaaaaaggttttcatcaaggtagaaaaagaaacttttctgtccggtcatggctttcccaactgcagcagctgttttgcttaatgagaacatgcagattcataaaggaaacagggttgatgcaccaagtgccaaaccactgaaatcatcagccaaacctgagagaaaggctcttcaggatgtgtctaacattcctaaaggcactgctttaaagaacagatccacagtc

SEQ ID NO: 9070 - DNA, 333 bp, Zea mays
  Clone ID: LIB3150-032-Q1-N1-C1
ggattcttttaaagtcgaccaacccgtccgcaaatccccaaagcctccgaccccttgggtttttacctccgccgacgttgcgcacgcatggaacaagcgacatgggcgtatacacctttgtgtgccgcaacaactgcggcgagtggaccgacaagcagcactccggcgagatcgaggcttacgccgctaccccatacgagctgcagcgcctgctcatcactgacgcctccgcggccgactctgcctacggcgtgcagtcgtccttatacatggtcacccccagctacgtcgtgttccaggtgatcgtcggtgctgtcggtggtggtgcaatga

SEQ ID NO: 9071 - DNA, 383 bp, Zea mays
  unsure at all n locations
  Clone ID: LIB3150-032-Q1-N1-C10
gcacatgcgccacaaatttgatgttgacacccgtctggttgagggtctggtcctggaccacggttctcgtcaccctgacatgaagcgcagggcagagaattgttacatcttgacctgcaatgtctcattagaatatgagaaaagtgaaatcaatgcaggatttttttactcaaacgcagaacaaagagagaaaatggttgctgcagagagacgccaagttgatgaacgtgtcaaacagattattgaattgaaaaataaggtttgtgctggaggcgataaaaactttgtggtgatcaatcagaagggcattgaccctccatctctggacctccttgctagagcggggattattgctcttcgaagagcanagaggagaaatatgg

SEQ ID NO: 9072 - DNA, 415 bp, Zea mays
  Clone ID: LIB3150-032-Q1-N1-C12
ctcaacttcgtgccgctaagattatgggggcaatatgtaatggctatgagccggtaccatcctctggtaaaacaagccaactcttccatttcgccaaggaaaaaatggcggctcgctgggctagacttcgtgcagctgtggcagcctcagacatctttactctcccttatgagctatctggctattgtagcttttccaatgagactgtcaccgccaatcctccatttgcatggcttcgctacaacaaggatgatattgaagatctggaggccttcctactcgagaaaaagattatcactcgaggtggcacaaggtttggagtggatgcaagggctgtcagagttagtatggttgacacagaccaagccttcaatgtgttcatcaatcgtctggccacaatgaagtgaaatttcaa

SEQ ID NO: 9073 - DNA, 324 bp, Zea mays
  Clone ID: LIB3150-032-Q1-N1-C3
tcgcgcgaagcgcgcccgaggcggcacccgacggtcgtattagaagacacgggacgcacccccgcagcctcgctcgctcgctcccctcacttcctccccgcgcgatccacgggccccgccccccgcgctcctgtctgctctccctctccgcaatggcgacgccctcggccgtgggcgccgcgtgccttcttctcgcgcgggccgcctggccggccgccgtcggcgaccgggcgcgcccgcggcggctccagcgcgtgctgcgccgcctgtgctgttcggagctgaacagggaggggcccgcgccgcgcccgctgccacccgcgc

SEQ ID NO: 9074 - DNA, 398 bp, Zea mays
  Clone ID: LIB3150-032-Q1-N1-C4
cgcaaattgcaccaagaaatccatcgagaggccgtcgacaggggaattaatggcgtcgtcgtctagcagcagccaccgccgcctcatcctcgcagccgccgtcctgctctccgtgctcgcggctgccagcgccagcgccgggacctcctgcgtgccggggtgggccatcccgcacaacccgctcccgagctgccgctggtacgtgaccagccggacctgcggcatcgggccgcgcctcccgtggccggagctgaagaggagatgctgccgggagctggcggacatcccggcgtactgccggtgcacggcgctgagcatcctcatggacggcgcgatcccgccgggcccggacgcgcagctggagggccgcctagaggacctgccgggcttgccgcggg

SEQ ID NO: 9075 - DNA, 422 bp, Zea mays
  Clone ID: LIB3150-032-Q1-N1-C5
cttttaaagtcaaccaacccgttcggcaatttttaaaacattgccaccaggatggcatatgaaccctatacagtttgagaaggatgatgataccaatttccacatggacttgatcgctggctttgccaacatgcgggctaggaattacagcattcctgaagttgacaaattgaaggcaaagttcatagctggaagaatcatcccagccatcgccacctcaactgcaatggccaccggccttgtctgcctggagctttacaaagtccttgctggtgggcacaaggttgaagactaccggaacacatttgcgaacctggcgatccccctcttctccatggcggagcctgtgccacccaagaccatcaagcaccaagacatgtcctggaccgtgtgggaccgctggacggtaactggcaacatga

SEQ ID NO: 9076 - DNA, 262 bp, Zea mays
  Clone ID: LIB3150-032-Q1-N1-C8
gaagagggtgggaatgctgggggtagcagcaaggtgcgtgtgaaggtgctaatgaagaaaggacacaagcaacagacaagacaaatgttaattccggccgatagttcaattgtgcaaagcacgaagcagcaggaagctgctgagcttgaggagaagcagagcatcaagcggaggatccttgagtacaatgagagggaggaagaattgaatggagcatcccaaatggggaactggggccaaggagctaccagtaccagcagta

SEQ ID NO: 9077 - DNA, 391 bp, Zea mays
  unsure at all n locations
  Clone ID: LIB3150-032-Q1-N1-C9
atctcctcccgatccatccgagcccgaaccctagtccagccagatctgcaccgccgccggcgagagcacggcatcagatccgccgcgatggcgttccgccgcatcttatccacagcggtgcgccgccgctcggccatcgccgcggcagcgtccgggaacgcgcgcgaggcctccacggccgtcgccgcggcgcccggcgtgctagcccccgacgcgaccccggtgcgcgctcccgtgatgccgtacgatcgcatcgccgaagccgttaacgccaggctccggcggcttgagcacccaaacccgcgctttcttcgctatgcaagccccgttccgtnccacgccgaccacacggtcatccttgcggcgccggagacccgggtcaccacgctga

SEQ ID NO: 9078 - DNA, 356 bp, Zea mays
  Clone ID: LIB3150-032-Q1-N1-D10
cgcagaagtaggagctctcgtttctgcatcagtagtgattgggcagcatcgtcatcgatcgatcgccatgaggctccgcggcttgctgcgcctcgtcctcgcgctcctcctcgccgccaccgccatcgtgccggtgctgctccttagcgagaacggcggcggcggcgtcgcacctgcgccgccgttcaactcctcgcgtgtcaaggccgtctcgtggcatccaaggatcttcgtgtacaaggggttcctctccgacgccgagtgcgaccacctcgtgactctggcgaagaagaagatccagcggtccatggtggcggacaacgagtccggcaagagcgtcaagaacgaggtgcgca

SEQ ID NO: 9079 - DNA, 325 bp, Zea mays
  Clone ID: LIB3150-032-Q1-N1-D11
cgcaaagcggagtccggattgcagtgcgcttcggtccatccggccgtcacatcagccacacgccgacgcgccgccagtcgccgcacgagggggcccgtgatgccgaagaagatgggcgtgaactccaaggcggaggcggcccgcgaccgccgctccgccgcggaggccgaccgccgcgaccgccaggagcgcgccaaggaggagcagtactgggccgaggctgagggccccaagtcccgcgctgcgcgccgccgggaggaggacgccgagaagcgcgccgaggccgcggctcgcaaggccgagaaccgccgcctcgccgaggcag

SEQ ID NO: 9080 - DNA, 375 bp, Zea mays
  Clone ID: LIB3150-032-Q1-N1-D12
gccgccgcctttcgtaccgcggccccgaaacccctttcctcgttcccctccgtctctcagttaggcacaatgatgctagctaataagcttggtggtctgctcaagaatgctacgagttcaaatatgtctgtctaccaagcaatcagatgcatgtcatcatccaagctttttgttggagggctttcttatggaaccgatgatcacagtctcagagacgagtttgccaaatatggacaagttattgaagctaagattatccttgatcgtgagtctgggaggtccagaagttttggctttataacttacacgtcttctgaggaggcttcggctgccatcactgccatggatggaaagactctggatggacggaacata

SEQ ID NO: 9081 - DNA, 420 bp, Zea mays
  unsure at all n locations
  Clone ID: LIB3150-032-Q1-N1-D5
gtccggccgaaccccgacctgaccaaggcgggggcggcaatggaccggctgcagcggatctttggcgcctccggcatggggcagccgccgacggactcgccgcttctcgactcctccgagcaggtctacatctcctccctcgcgcttctcaagatgctcaagcacgggagggccggcgtgcccatggaggtcatgggtctcatgctcggcgagttcgtcgatgactacaccgtcagggtcgtcgacgtcttcgccatgccgcagagcgggactggggtcagcgtcgaggccgtcgaccacgtcttccagacaaacatgcttgacatgctcaagcagaccggcaggccagaaatggttgtaggctggtatcactcacatcctggcttcggttgctggctatcangcgttgatatcaatact

SEQ ID NO: 9082 - DNA, 402 bp, Zea mays
  Clone ID: LIB3150-032-Q1-N1-D7
gcaagccgggcatgtccgacccgatgatgcagtcggccatcgactacgcctgcagcaagggggccgactgcgcctccaccaccaagggcgcgccgtgctacggcaacggcaacaaggtggccgtctgctcctacatctgcaacagctactaccagagccgcagcggcatgggcgccacctgcgacttcaacggcgtcgccaccctcaccggcaccgaccccagctccgggacctgcaagttcgcctccggccccagcagcgtaggcaccggcggcggcgctggtatgggcaccggcggagcaggcgctggcgtcggcggtggcacgggcgccggcgccggcactggagcaggcacgggcgcgggcatgggtgccggcgctggaaccggagcaggcacgggca

SEQ ID NO: 9083 - DNA, 413 bp, Zea mays
  Clone ID: LIB3150-032-Q1-N1-D8
cgtttttattgtccaccctccgccggcggcgtctctccaaaacccaaccaaaccctagatccgccgcactcagttccggtgagaccctcctttccagcgaaaatgccgaacctcgagtgccggatgtatgagcagcggttcccggaggtggacgccgcggtgatgatccaggtgaagcacatcgctgacatgggcgcgtacgtctcgttgctcgagtacaacaacatcgagggcatgatcctcttctccgagctctcccgccgtcgtatccgctccatctcctccctcatcaaggttggccgccaggagcccgccatcgtgctccgtgtcgaccgcgacaagggctacatcgacctttcgaagcgtcgcgtctccgaggaggaggcgcatgcatgcgaggacaggtacaacaa

SEQ ID NO: 9084 - DNA, 412 bp, Zea mays
  Clone ID: LIB3150-032-Q1-N1-D9
tcggcgccatgtaccagccgctccggcggcgagtgctgccagcagcagatgaggatgatggacgtgcagtccgtcgcgcagcagctgcagatgatgatgcagcttgagcgtgccgctgccgccagcagcagcctgtacgagccagctctgatgcagcagcagcagcagctgctggcagcccagggtctcaaccccatggccatgatgatggcgcagaacatgccggccatgggtggactctaccagtaccagtaccagctgcccagctaccgcaccaacccctgtggcgtctgcgctgccattccgccctactactgattcatgatatttgggaaatctcctctatccatccctctctatctatatatgtaataatgcagtaagacgacacacattatcatgtgtggtatga

SEQ ID NO: 9085 - DNA, 310 bp, Zea mays
  Clone ID: LIB3150-032-Q1-N1-E10
tcgtaggcgggcacgactccggtcaacggggcgggcggcacccagattccaaactctagcacacgcaccatggctgagcagcataagatccggtggggggagctggaggaggacgataagcttgggacctcgattatacttctccagcccagtagtagggtcagacataacgagaacagcctgaagaacgtaatgaaggaccgatttgacaacaactgcaacaaggtcagtgtcacgaccacaatccgcgtacgtaaactcgctcgggcgcgcatgtatcgcagcgccatcgagcgcgcggcagtggcct

SEQ ID NO: 9086 - DNA, 363 bp, Zea mays
  Clone ID: LIB3150-032-Q1-N1-E11
cggctgcggctgccagccaccgccgccggttcatctaccgccgccggtgcatctgccacctccggttcacctgccacctccggtgcatctcccaccgccggtccacctgccgccgccggtccacctgccaccgccggtccatgtgccgccgccggttcatctgccgccgccaccatgccactaccctactcaaccgccccggcctcagcctcatccccagccacacccatgcccgtgccaacagccgcatccaagcccgtgccagctgcagggaacctgcggcgttggcagcaccccgatcctgggccagtgcgtcgagttcctgaggcatcagtgcagcccgacggcgacgccctactgctc

SEQ ID NO: 9087 - DNA, 375 bp, Zea mays
  Clone ID: LIB3150-032-Q1-N1-E12
cttcaattcccgccgcctcctcgggcgttctttccacctccacctccgtatccctttattggaccacctccaccccatgattagccgccgcgcggcggccacggcagccctacgcgcctctgtgcggcgtgcctgctcttcctcctcccgcgccgccgaccctgacgaccaactgcttggcctcttagaagcccctgagccgcagcgcgaaccccgcctctcagccaaggacttcgcctttcttcaggtgcccacccctgtcctccgcgccgcggccctcccgccgccggaggctgttcttatatccaaggcgatccgagcctacgcctccgactttgacgggaaagcggagcggttcctgcggcggcaccggga

SEQ ID NO: 9088 - DNA, 381 bp, Zea mays
  Clone ID: LIB3150-032-Q1-N1-E4
agctctctctactatctcaagatgtagctggagtagtagttagtctcggtgggagctctgctaggagtctggagtagtctccaagagtctgaattatctacatgagcataagaaatatcaacagacagcaggccctaaaagataccaaacctatagttgactcgaaagcaatgtctttggaaaatgaaagcgcactacagacggtgcacgtaagaagaggcggaagaaaatgtcaatcctatgggagctatcttactggaaagacttagaggtccaccacaacatcgatgtcattcacgtgaaaaaaaatgttagtgggagtttgcttgggacactcatgagtgatagatggaaaaccaacgaccatgcgaaagcacgagc

SEQ ID NO: 9089 - DNA, 402 bp, Zea mays
  Clone ID: LIB3150-032-Q1-N1-E5
ccgccagcgctgatgatgtcgtccggagtggggctgaacgacaatgtccagggggtgaccttccacagtggccacgacttcggctacctcctcaagctgctcaccggacgggaaatgcccaacaccttggatgagttcctgaaactcaccaagaccttctttccggtgatgtacgacatcaagcatctcatgaagttctgtggcggtggcctatatggcgggctgagcaagcttggggagctgctcaagattgagcgtgttgggatcagccaccaggctggatctgattcgctgctgaccctgcagtgcttcatgaagctcaagcagttgtatttaaaggagtctgttaagttgtatgatggtgtgttgtttgggcttattcctggggaaagtgagatcaaa

SEQ ID NO: 9090 - DNA, 426 bp, Zea mays
  Clone ID: LIB3150-032-Q1-N1-E6
cctggattcttttaaagtcgaccaacccgtccggctaaccaattgtgcccgtcagataacgcgtgtggaatatgctggttttccttaccccagtgttgccttaaagcgcatcatggcagaatctgatctagggtgcatgttgctgatgtgtggcactggaatgatatcccaagtcaacatttgctccaggattcgaaaggtggcctctagatatatgacctacaaaggacctggatgttttgctgctgctgccaccatgatggccaccacacaggacgccaaattgatcagtggactgctaaagaacagatgtagggaaaataatggtccattctcaaagagtgtctttatcaagaaatggaccattgcagctatgtacagaatatgtgaggaatgttctgctgtggaagagtctacaaggggcta

SEQ ID NO: 9091 - DNA, 387 bp, Zea mays
  Clone ID: LIB3150-032-Q1-N1-E8
ctttggaggttctccgtcaggtggacgagatatttgttcagtctattaaagacgcaggcctgtatgataaaatttggcaagcttttgctgtgttcttgccagtacagacagttggagttcagggtgaccagcgaacccactccaatgccgttgttttaagggcaatcaccagtgaggatggcatgactgcagattggtactattttgagcaagcattcctggtagatgtggtaaacaagatttgcaacaatgtgcgtggcatcaaccgcgtttgccaggacatcacatctaagccgcctgcaacggtggagtgggagtaggaggattggaaggaccctatggtctggtctggtctgtctgtcttgggttaaaacccgcttagtcatg

SEQ ID NO: 9092 - DNA, 375 bp, Zea mays
  Clone ID: LIB3150-032-Q1-N1-E9
cgcacccaggagatacagcgagcgagcgaccaaagccatggctctccgcaccctggcatcgaagaaggtcctatccttcccgttcggcggcgcgggccggccgttggcggcggcggcgtctgcgaggggggtgacgacggtcacactccccgacctctcctacgacttcggcgcgctggaaccggccatctcgggggagatcatgcgcttgcaccaccaaaagcaccacgccacctacgtcgccaactacaacaaggcgctggagcagcttgacactgccgtctccaagggcgacgcctccgctgtcgtccagctgcagggcgccatcaagttcaacggcggcggtcatgtgaaccattcaatcttctggaagaa

SEQ ID NO: 9093 - DNA, 404 bp, Zea mays
  Clone ID: LIB3150-032-Q1-N1-F10
caggaactatgtacagagcaacacttgcagatggttcattccttgctatcaagaggttgcaggacactcagcattcagaggaccaatttacatctgagatgtcaactctgggaagtgtaaggcaacgtaacttagtgccgcttttgggatactgcattgtcaagaatgagaggctcttggtgtataagtacatgccaaagggttcactttatgataatttacaccagcaaaacagtgacaaaaaggcattagaatggccattgaggctaaaaattgccattgggagtgctagaggtttggcgtggcttcatcacagttgcaaccctcgcattcttcataggaacattagttccaagtgcatattgcttgatgatgactatgagcctaagatttctgattttggc

SEQ ID NO: 9094 - DNA, 403 bp, Zea mays
  unsure at all n locations
  Clone ID: LIB3150-032-Q1-N1-F11
actacgacaagtgctgaggcctttgcgctttcttcgccggcgacgagcacccaccaactaaggtcatggaagagatgatagatctaacgggggatggaggtgttcttaagacagtagtgcggaaagcaaaagatgatgctatagcgccatccgagagcctgcccttggttgatgttcattacgaaggtacacttgctgagactggtgaagttttcgataccacccatgaagataactctattttctcatttgaaattggacaaggcgctgtcatcaaagcatgggatatagccttaagaactatgaaggttggcgaggttgcaaaaattacatgcaagtcagaatatgcatatggagctgcaagctcgccaccagagatacctnctaatgcaacccttatttt

SEQ ID NO: 9095 - DNA, 408 bp, Zea mays
  Clone ID: LIB3150-032-Q1-N1-F12
agtcgatgtcgccgcgctgcgcggtggagagcgacttatgtcgctggaattactgaagactgaagtcgacgtctggaagccggagatcacaaagaaggtggaggacttatcactagaggtggcgagggttggcaagttcctcgaacgggaatttcgacctcacgtcgtcgaccaacctggcatcttcggtccatatcagtcggcgtccgcgcgaccaccaggcggaatccaccacgccgacgggccttttggccgccgccctgatctgcactaccgggatcgtgagtccgggccccaaggggttccgactcacatcccggtcaagggtacgttctcagcgcatccttctcgtctctccgggttcatggctgagcaatattatccgcatgaatcccctagagaatacat

SEQ ID NO: 9096 - DNA, 394 bp, Zea mays
  Clone ID: LIB3150-032-Q1-N1-F4
cactgagctcgacgcggtcgccggcttcagcgagatcgtgccggacaccgtcgtgttcgatgatttcgagagtgagctcgtcgctgctgcttgggatcactgggctcccagacactaagttcaagagtgcgatagatactgcactggcagatggtgagtgcaacgcactggagaaggctgaggacaggatgtcctgttacctcaccaaggctcttgcaaatgttggcgctgaactggctcatcaagtccctgggagagtttcgacggaaatagatgcccggttagcttatgacacccagggcataatccacagggtacatgaactgttgaatctatacaaccaacatgatgtctcaactgaccgcctgttattcaaaattcctgctacatggca

SEQ ID NO: 9097 - DNA, 361 bp, Zea mays
  Clone ID: LIB3150-032-Q1-N1-F6
ggcggctgcggctgccagccaccgccgggggttcatctaccgccgccggtgcatctgccacctccggttcacctgccacctccggtgcatctcccaccgccggtccacctgccgccgccggtccacctgccaccgccggtccatgtgccgccgccggttcatctgccgccgccaccatgccactaccctactcaaccgccccggcctcagcctcatccccagccacacccatgcccgtgccaacagccgcatccaagcccgtgccagctgcagggaacctgcggcgttggcagcaccccgatcctgggccagtgcgtcgagtttctgaggcatcagtgcagcccgacggcgacgccctact

SEQ ID NO: 9098 - DNA, 388 bp, Zea mays
  unsure at all n locations
  Clone ID: LIB3150-032-Q1-N1-F7
cgtcgtttcgccgcctccgccgacacgcgactgcctccctcagctgtcgtcgccatgggcagaaggcctgctagatgctatcgccagatcaagaacaagccgtaccctaagtccaggtactgccgtggtgtccctgaccccaagatcaggatctacgatgtcgggatgaagaggaagggtgttgatgagttcccctactgtgtgcaccttgtctcttgggagaaggagaatgtctccagtgaggcgctcgaggctgcccgcattgcctgcaacaagtacatgaccaagtctgcaggaaaggatgctttccaccttaaggtccgggttcacccgttccatgtcctncgtatcaacaagatgcttttcggtgccggggcttgataggctc

SEQ ID NO: 9099 - DNA, 387 bp, Zea mays
  Clone ID: LIB3150-032-Q1-N1-F8
tcgcaatccgcctccgcctccgcctccgtagggttttgctctcggctcgtcggatccagttcgggggatcctccatggcgtcgcgtccgtcgctgaagtcgaagcccaagggcaagggcgggaagaaggccaccgctgacgacgaggacgccaccgcggcggcgaccacggtgaggctcatgaaggagtggaccacgtggacgatgaagaaggcgaaggtggtggcgcactacggcttcatccccctcgtcatcgtcatcggcatgaactccgagcccaagccctccgtcttccagctcctctcccccgtctgatcggatcatgacagggcccggatgaagtcggtcccgaatagtttgtagctggtacttcatttgcttacatatg

SEQ ID NO: 9100 - DNA, 341 bp, Zea mays
  unsure at all n locations
  Clone ID: LIB3150-032-Q1-N1-F9
actagatcgagctctggcggcgacgaggatgcctgttatgcccacggacacacgcaatccaatgttactttatacaggggagcgtgttcaacgggcacctgcatctggacccgagcgggcaatacgtcacggcgtaaaaccaaccatatttcgtatatacgtgtgctggtccagcggcaaccatctggacgtcgagtgcctccgtccaccgatattaggacggtcgcggccgaacctgacgacgtcgtatggagggtgctacgacgtcaatctaggacgacnttggctgcggagagctactacgcacgaggagaaaattgaccatgctgaaattcggaaga

SEQ ID NO: 9101 - DNA, 373 bp, Zea mays
  Clone ID: LIB3150-032-Q1-N1-G10
gccggtatccaggtcggaaacgcgtggtgggagctgtactgccttgagcatggcattcaggctgacggtcagatgcccggtgacaagaccattgggggaggtgatgatgctttcaacaccttcttcagtgagactggtgctgggaagcacgtgccccgtgctgtttttgttgaccttgaacccactgtcatcgatgaggtgagaactggcacctaccgccagctcttccaccctgagcagctcatcagtgggaaggaggatgcagccaacaactttgcccgtggtcactacaccattggcaaggagattgttgacctgtgccttgatcgcatcaggaagcttgccgacaactgcactggtcttcagggctttc

SEQ ID NO: 9102 - DNA, 364 bp, Zea mays
  Clone ID: LIB3150-032-Q1-N1-G12
ggtcggcgaggagggcaggaagacggcgggaccgagccgtgcgggggctcgggacgggaacgggacaggaccccaaaatctcagatccttcctgcccgcccgcccgtgcccgtcgacgcgtcgttcttgccggccgcgccccacctccgccctctcctcctccagggggatcggatacgccacaggctgcgcgatggtgctgtgggtcttcggctacggctccctcatctggaaccccggcttcgacttcgacgacaaaatcctcggcttcatcaagggctacaagcgcacctttaatctcgcttgcattgaccacagaggcacaccggagcatccggcgaggacctgcacgcttgaaaccgac

SEQ ID NO: 9103 - DNA, 217 bp, Zea mays
  Clone ID: LIB3150-032-Q1-N1-G2
ttcaatcggccctggtggcgggtctaagggctcggcggaatctccctatgcgcctctccgtccgcgcctccgctactgcagcagctgcacctggagcggagacggatcctaagaagcgggtggtgatcacggggatggggttggtctctcgtgttcatgcacgacgtagacgcttactaccaccgcctgctatccctggagagcggcatacggccca

SEQ ID NO: 9104 - DNA, 399 bp, Zea mays
  Clone ID: LIB3150-032-Q1-N1-G6
tcttttaaagtcaaccaacccttccgccgcgcccaaacttcgaaaagttcgggggtttcaaaaccttaaagcgaaacaacattagttccaccggaggcagcggccgtgggaaggcgaagccagcgaccaagtctgtgtcgcggtcttccaaggctgggctccagttccccgtcggccgcatcgcgcggtacctcaaggccggcaagtacgcggagcgcgtaggcgccggggctcccgtgtacctctccgccgtcctcgagtacctcgccgccgaggtgctggagctggccgggaacgctgctcgggacaacaagaagaaccggatcgtgccgcgccacattcagctggcggtgcggaacgacgaggagctgagcaagcttctgggcactgtgacgatcg

SEQ ID NO: 9105 - DNA, 395 bp, Zea mays
  Clone ID: LIB3150-032-Q1-N1-G7
gccatcaccaattcatttggaaaagaggtttggcgaagatcattggttgtgttgacccatgctcaactctcaccacctgatggaatcgactataatgatttctttacaagaagatcagaggcacttttgcgatacatccactcaggagcaggaatcaacaaacgagaatatggggacttccccttgccaatagcattggtggagaacagtggaaggtgcaagactaatgagcatggggagaagatacttccggacggaactctgtgggttccaaacctgatgaaagaaattactgttgtcatctcaaacgggagcagtcccactcatgttgatcagaagttaattgatggtccaaaccctaacaatcgccgaaagttgttcataccacttattct

SEQ ID NO: 9106 - DNA, 167 bp, Zea mays
  Clone ID: LIB3150-032-Q1-N1-G8
acgggcgctgacccactggcaactcaacgggatactgttgtattgcgtcttaccaattcttatctatcatcgttgtagttggtggctgctgaacgtagttactatctcatcacttctcaacacaataaagcactacgcatcatctggcgaaactcgcgtgcctacta

SEQ ID NO: 9107 - DNA, 404 bp, Zea mays
  Clone ID: LIB3150-032-Q1-N1-G9
cagaaacgagagggccggagcagccggagtcccggcgatcccgccgccggtcgccctcatacttcctcgtcactgccttcgtttctctttccaacaatcaagatgagccgtggcggtagcgcgggtggtggtcaaagttctctgggttacctctttggaagcggtgagccccccaaaccagcagtggcaccagctgtaagtgctccacctgctgctgcaggtgctccacctgctgagaaaccacctgctgcaaagcctgatggcaccagtcagattgctgctggggttaccagccaaaccaataactaccacagggccgacggtcagaacaccggaaacttccttacggaccgtccttcgaccaaggtccacgctgctcctggcggtggctcttccctgggata

SEQ ID NO: 9108 - DNA, 217 bp, Zea mays
  unsure at all n locations
  Clone ID: LIB3150-032-Q1-N1-H1
ttcggcgaaaacggggggcttccttaagttgtggtcgccttggccaaaaggcctgttaaatcctttcgccagatcaagaacaagccgtaccctaagtccaggtcctgccgtggtgtccctgaccccaagatcaggatctacgatgtcgggatgaanaggaagggtgttgatgagttcccctactgtgtgcaccttgtctcttgggagaaggagaatg

SEQ ID NO: 9109 - DNA, 274 bp, Zea mays
  Clone ID: LIB3150-032-Q1-N1-H10
ggaagttcgagaccaccaagtactgctgcactgttattgatgccccgggacaccgtgacttcatcaaaaatatgatcactggcacttcccaagctgactgtgctgttcttatcattgactcaaccactggtggttttgaggctggtatctccaaggatggccagacccgtgagcatgctctccttgctttcacacttggtgtgaagcagatgatttgctgctgcaacaagatggatgctactacacccaagtattcaaaggcccgttatgatga

SEQ ID NO: 9110 - DNA, 332 bp, Zea mays
  Clone ID: LIB3150-032-Q1-N1-H11
agcagccaaaacctacctagccgccgccgcaggcggccccccatcgccgccaagatgcatatctttgtgaagactctgacggggaagaccatcactttggaggtggagtcctccgacaccattgacaatgtgaaggccaagatccaggacaaggagggcatccccccggaccagcagcggctcatcttcgccggcaagcagctcgaggacggtcgcaccctcgccgactacaacattcagaaggagtccaccctccacctggtgctccgcctccgcggtggcgccaagaagcgtaagaagaagacgtacaccaagcccaagaagatcaagca

SEQ ID NO: 9111 - DNA, 392 bp, Zea mays
  Clone ID: LIB3150-032-Q1-N1-H2
gccgccgccgcctgctctctgctgccggcgccatggggagaaggcctgcgagatgctatcgccagatcaagaacaagccataccccaagtccaggtactgccgtggtgtccctgaccccaagatcaggatctacgatgttggcatgaagagaaagggtgttgatgagttcccctactgtgtgcaccttgtctcttgggagaaggagaatgtctccagtgaggctcttgaggctgcccgtattgcctgcaacaagtacatgaccaagtctgcaggaaaggatgccttccaccttcgggtccgggttcaccccttccatgtccttcgtatcaacaagatgctttcgtgtgctggggctgataagctccagactggaatgaggggtgcctttggc

SEQ ID NO: 9112 - DNA, 443 bp, Zea mays
  unsure at all n locations
  Clone ID: LIB3150-032-Q1-N1-H3
ctggattcttttaaagccacccaacccgtccgattaagtccgcccccttttccctaagggaacccttttctttttcccgcggtctgctcgttcgatctgtgcagcagatctgaggtctcgagcgaccgtgaagcagcttcaatcgtcggcatggccctcgtattgcatagtggggctggaaacaagaatgccttcaaagcacttattgctgcagaatacagtgngatcaaggttgagtngaccaaggattttgagatgggtgtcttcaacaagacccctgagtttcttaagatgaaccccccttggaaggttcctgttcttgagactcctgatggcccttgttttgagagtaatgctatcgcacgctatgttgctcgcttgaaggatgacaaccctcttttttggtctttccatattgaacaagcccacgttgagcaatggat

SEQ ID NO: 9113 - DNA, 385 bp, Zea mays
  Clone ID: LIB3150-032-Q1-N1-H4
gcggtggcggcgcatcctgcataccccggcgtagtggcagcgagccagcgacctcgagtagcagcagaggctccgcaggggcaaaaaggtgtgaagcttccttcggagatcccagtagcagaagcaacgcaggcatcggcttgcgacaggagaggacggagatgacgcagaagcagaccctgttcaaggggcagagcaagaagaagactatccctcccaaccgccacggcaaggcgcctcatgttcgtaaaggaaagagagccgtcaagcccaccaagttcacaaaggacatggacgccgagaaggaactcaccaagttcatcaaccagtgcaacgaaataaaagctgcgaatcttgctagcaaagagggcggtgacctcaacat

SEQ ID NO: 9114 - DNA, 257 bp, Zea mays
  Clone ID: LIB3150-032-Q1-N1-H6
cggacgcgtgggcggacgcgtgggccggcgcagccaaaccctccccagcagccgtcgtcgccaccgctgcagcgcggaggcgaccccccatcgccgccaagatgcagatcttcgtgaagaccctgacggggaaaaccatcacgttggaggtggagtcctcggacaccatcgacaacgtgaaggccaagatacaggacaaggagggcattccgccggaccagcagcggctcatcttcgccggcaagcagctcgaggac

SEQ ID NO: 9115 - DNA, 268 bp, Zea mays
  Clone ID: LIB3150-032-Q1-N1-H7
cgtgcatccttttcctaccgtgccgcccatctgtcggctggcgggcgcggcaagctaatccatggatctgtactacagtgcaaggctcggagaggccatgtgcgcaggcgaggcaaggtacattggcaccgcgggctccggcataagaggacgactcttaaccggggtagaagcggcgactcgcgagtcgacaacacaagcacataggacggtgagacagcacacattccacaagacatgggagaacaagcgcgccaccagacacgca

SEQ ID NO: 9116 - DNA, 391 bp, Zea mays
  Clone ID: LIB3150-032-Q1-N1-H8
ctactccattcataaggagccgtggagctctgtggcaagaggggcatactgcttttgcgaataaagaagaggcagatgaagaggttctccaaatactggaattgtacagaaggatatatgaagaatttttagcagttccagtgtccaaagggaggaaaagtgagatggaaaaatttgcaggtggactttataccaccagtgttgaggccttcattccaaacactggtcgtggcatccaaggcgcaacttcacactgtcttggtcaaaatttcgccaagatgtttgatatcacttttgagaatgagaagggtgttagggaaatggtttggcaaaactcttgggcctacacaacccgctcgattggagtgatggtgatgacacatggtgatga

SEQ ID NO: 9117 - DNA, 414 bp, Zea mays
  Clone ID: LIB3150-032-Q1-N1-H9
ttcgcgttcatgcagtgaaagttggtggaaatctggcagctgaagaggcaaatcaggaaaagattgtagaagcaggtggcctcacttccctccttatgctacttaggagctctgaggatgagacaattcgtagagtagcagcaggagcaattgctaatcttgcaatgaatgaaacaaatcaagatcttatcatggcagaaggaggtgtaaccttgttgtctatgacagcatctgatgcagaggatccacaaactcttagaatggtggctggagcaatagctaacctttgtggcaatgacaaactgcaaatacggttgaagggagaaggtggaattaaagcattgcttgggatggttaggtgtgggcaccctgatgtccttgctcaagttgcacgtggcattgcaaattttgcaa

SEQ ID NO: 9118 - DNA, 355 bp, Zea mays
  Clone ID: LIB3150-033-Q1-N1-A10
cacgagttcaaccgccgggacgagccctacaagctccgcctcaaccgcttcggcgacatgaccgccgacgagttccgacgccactacgcgggctccagggtcgcgcaccaccgcatgttccgcggcgacaggcagggctcctcggcgtcggcgtcgtcgttcatgtacgccgacgcgcgcgacgtcccggcctccgtcgactggaggcagaagggcgctgtcaccgacgtcaaggaccagggccaatgcggtagctgctgggcgttctcgacgatcgccgccgtggagggcatcaacgcgatcaagaccaagaacctgacgtcgctgtcggagcagcagctggtggactgcgaca

SEQ ID NO: 9119 - DNA, 342 bp, Zea mays
  Clone ID: LIB3150-033-Q1-N1-A12
gccgccgtcatgtcgaagcgaggtaggggaggttcggctgggaacaagttccgcatgtcactgggtctaccggtggcggccacggtgaactgcgcggacaacacgggcgccaagaacctctacatcatctccgtcaagggcatcaagggccgcctcaaccgcctcccgtccgcctgtgtcggcgacatggtcatggccaccgtaaagaagggaaagcccgacctcatgaagaaagtgatgcccgccgtcatcgtccgccagcgcaagccgtggcgtcgcaaggacggtgtctacatgtacttcgaagataatgctggagtgattgtgaatcccaagggtgag

SEQ ID NO: 9120 - DNA, 183 bp, Zea mays
  Clone ID: LIB3150-033-Q1-N1-A2
gagctacgcatattgataattaaatgggtgatctgatactggagaccaaagcaaactaattatggattgccacccatccaaacaagtcttgaagcgcacctagactagtgatacactacctactaattgattaccatcttgaattagaggagggaatccttgacttactcattcacgcaactt

SEQ ID NO: 9121 - DNA, 225 bp, Zea mays
  Clone ID: LIB3150-033-Q1-N1-A3
gaaagctccaatctttctcgccctctcgcggttcggaggagggacccgggcgcaaagactctaaagcgcacgtgagctccgggcggggaagatgttctccagcctgatccaccacgctcgccacggccgacccgacgtcgctgtcgacgaggacgcaccacgcagtggctgcggcttagggctgcccgggcacggcggtgggaccagcgtggtgctcacggccga

SEQ ID NO: 9122 - DNA, 171 bp, Zea mays
  unsure at all n locations
  Clone ID: LIB3150-033-Q1-N1-A6
gganacctctcaaacnctagccgcctggtgcaagtttcaaagctcaggaatcttcgccatggcgagtgagacggagaccttcgcattttaagctgagatcaaccagctggtctcactcatcatcaacaccttctacttcaacaaggggaactttctccgcgagcttatttt

SEQ ID NO: 9123 - DNA, 235 bp, Zea mays
  Clone ID: LIB3150-033-Q1-N1-A8
tgatgctccttttgctactacatttgtgcttccattgtctcattgctgatgctccttttacaatataaaaaaaaaaaaaaaaaaaaaaaaaaaaaaaaaaaaaaaaacaaaaaaaaaaaaaaaaaaaaaaaaaaatggcgaaacaacaccaaaagtgtcaacgacaccatcaagatgggcacccggcgcatgtgatacaaaaatacaagcgtgcgagcctataacaaacagcatt

SEQ ID NO: 9124 - DNA, 349 bp, Zea mays
  unsure at all n locations
  Clone ID: LIB3150-033-Q1-N1-B10
gggagaggaggaggaggaggagatggccggtagggagagcggcgggatggcggcggcgctgcgctgcgctggaaggatcgggatcctggccaccgtcgcagtgaacctcgcgtggatcgcgacgtacatccgccggcgctacttcggcggcgggaaccgatccgacaacaacggtggcggcggggaggtggagccgtcaagagggaagccgccggtcacttcggactccatcgtcaacctcgatcatggcgacccgactatgtacgaggagttctggcgcggcacaagagatagcgcctccatcttcatncctggttggcaaacaatgagctacttctccgacctcggc

SEQ ID NO: 9125 - DNA, 350 bp, Zea mays
  Clone ID: LIB3150-033-Q1-N1-B2
ctgaaggagagcagcccggaggagggggagcaagcagcagccgtcggtggaagatgtcgtacctgctgccgcatctgcactcggggtgggcggtggaccaggccatcctcgccgaggaggagcgcctcgtcatcatccgcttcggccatgactgggacgagacctgcatgcagatggatgaagtgctagcagcagtagctgagaccataaagaactttgcggtcatctaccttgttgacatcacagaggtccctgatttcaacaccatgtatgagctgtacgacccttcgacagtgatgttcttctttcggaacaagcacatcatgattgatctctggactggaaacaac

SEQ ID NO: 9126 - DNA, 370 bp, Zea mays
  Clone ID: LIB3150-033-Q1-N1-B3
gttcggtatcgttgagggtctgatgaccactgtccatgccatcactgctacccagaagactgttgatgggccctcgtctaaggactggaggggtggaagggctgctagtttcaacatcattcccagcagcactggagctgctaaggctgttggcaaagtgcttcctgtccttaacggaaagttgactggaatgtctttccgtgtcccaaccgtcgatgtttctgttgttgatttgactgttaggcttgagaagtcagcaacctatgatgagatcaaggctgcggtcaaggccgaggcagaaagtagcctcaaaggcatcctgggttacgttgaggaggaccttgtttccaccgatttcagggtgacagca

SEQ ID NO: 9127 - DNA, 320 bp, Zea mays
  Clone ID: LIB3150-033-Q1-N1-B4
gggggctatgaaggaggcaggggaggcggctatgaaggtggcaggggagggggctatgaaggaggcaggggtggcagtgctcagggtggaaggggttacggtggccgtggaaggggtagaatgggtggtcgcggacgagggaactagtgcagttctggcgtttccttcaaaatgcatgcctcacctataccaggggaaacgacaagttatctgagcattttatgtttgaagccatgtgactgaggtctgttattttttcccctgagcgcgaagtttggttgtgagcataatgcatttgcaaagttttatcttgtacgtca

SEQ ID NO: 9128 - DNA, 372 bp, Zea mays
  Clone ID: LIB3150-033-Q1-N1-B5
cttgcatagggttgatcttctcccctcctctgcccccatctcgcttctcgcacacggcagccggattccgaagcgcgccccctcggccccagccaaaagcatcgcagtttctaatcgtttggagagcacacaagaatgtcgttcgtgcagctctctggtgctggagtcgctgcagtggccttcacgaacaagagcctagtctctcggcacgcagcgctacgggtctgctcgtcgaggcgctcgatccgtagcctggtcgttaaggctgcaactgtcgtcaccccaaagtacacttcactgaagcctctgggagatagggtgcttgtgaaagctggtgccgcagaggagaagacagttggtggcattttgctt

SEQ ID NO: 9129 - DNA, 368 bp, Zea mays
  Clone ID: LIB3150-033-Q1-N1-B7
gaaagttcggagccgccggcccgtccgcctccctctccgcctcccgtccccaaggccaatagttttcaagtggcaatggcggaccaggctaaccaacccactgtccttcataagctcggtggccagttccacctgcgctcgatcatctctgaaggtgtacgggcccgtaacatatgcccatctgtctcatcttatgaaaggagatttgccacaaggaactacatgacccacagcctttggggcccttcaatgtctgttagcggtggcatcaatgtcccagtgatgcagaccccgctctgtgctaatgctcctgctgagaaaggaggcaagaacttcatgattgatttcatgatgggcggtgtttcagc

SEQ ID NO: 9130 - DNA, 357 bp, Zea mays
  Clone ID: LIB3150-033-Q1-N1-B8
cttacacacagggttctcatcttctaggtagtcttggtattgatgttttctaaagaagctatgtgatgttctaggagaacccctttcagcacactaccagaatattctcaaatcacttctgaaagaattgccaggtcgattttgggagggaaaagatgctattctggatgcattggcttcattgtgtgcttgctgtcatgttgctataactgcagaagactccagcttgccaagtgttatactaaattctgtttgtgctgcatgcagtaggaaatcaaaattgtaccgtgaagcagctttcttgtgtttacacaaagtgattacggcattcagagatccaagatttttcaatagtgt

SEQ ID NO: 9131 - DNA, 122 bp, Zea mays
  Clone ID: LIB3150-033-Q1-N1-B9
ctggcgaggcaaaagcattgcgacgacaaacagcccccgcttaaaggcctttttttttaaaataacaaggaggaaaggaggaaatgccgttaacaacaacttggttaaaggcaaggaaaatt

SEQ ID NO: 9132 - DNA, 370 bp, Zea mays
  Clone ID: LIB3150-033-Q1-N1-C1
cgatctcgtttcaaatccatccatcctcggttcctccgtcccgcagcatctcaaccccatggccaagatcaagatcgggatcaatgggttcggcaggatcggaaggctggtggccagggtggccctgcagagtgacgatgtcgagctcgtcgccgtgaacgaccccttcatcagcaccgactacatgacctacatgttcaagtacgacactgtgcacggacagtggaagcaccatgaagtcaaggtgaaggactccaaaacccttctctttggtgagaaggaggttgctgtgtttggctgcatgaaccctgaggagatcccgtggggttcggttggtgctgaatatgttgttgagtctactggtgttttc

SEQ ID NO: 9133 - DNA, 225 bp, Zea mays
  Clone ID: LIB3150-033-Q1-N1-C11
ctcgagagctgtttcacacattcggagcccgaagcctacccacatcgcctgcaccacacgtttatctactgacccacatgaattttcataaccggatcttgctctctcacttctctaatcttgccaagaaaatcaacttaaattatctagcctcatccccaatgagaccaggttacacaattcttcacctgcacccactgcttatcagatatgtttactgatact

SEQ ID NO: 9134 - DNA, 321 bp, Zea mays
  Clone ID: LIB3150-033-Q1-N1-C2
atgtcataaagcactttatgcagctttccaatgagaaagctgaacaagctaagagtcaggtagaagccctggaagatgctctggatgttgaagatctggaagcagacaagcgtctcgaggacctcatgctcagttttgttagtggggagaaaggaaaggaccgatcagattaagaggttgtaactccatggtttaagttcctctgggagacatacaggactgttctagagatactgaggaacaattcatagcttgaagcgttatatgctatggctgctcatagggcttttgcattctgtaaacagtataagaggacaactg

SEQ ID NO: 9135 - DNA, 308 bp, Zea mays
  Clone ID: LIB3150-033-Q1-N1-C3
tctcgctctccgacaaggcgacgacgggtaggccaccgccgccggcgccgtcccactacgacaagtgctgaggccttttcgctttcttcgccggcgacgagcacccaccaactaaggtcatggaagagatgatagatctaacgggggatggaggtgttcttaagacagtagtgcggaaagcaaaagatgatgctatagcgccatccgagagcctgcccttggttgatgttcattacgaaggtacacttgctgagactggtgaagttttcgataccacccatgaagataactctattttctcatttgaa

SEQ ID NO: 9136 - DNA, 365 bp, Zea mays
  Clone ID: LIB3150-033-Q1-N1-C5
ctcccctgttcggttttaggagacctgcgccgcccctccggccacgcgagctcgccgaaatggtcgcccacaggttccatcagtaccaggtggtgggtcgcgcgctgccgaccccgaccgatgagcaccccaagatctaccgcatgaagctctgggccactaacgaggttcgcgccaagtcgaagttctggtacttcctgagaaagctgaagaaggtgaagaagagcaatggccagatgctcgccatcaacgagatcttcgagcgcaacccaaccaccatcaagaactacggcatctggctgcggtaccagagcaggacggggtaccacaacatgtacaaggagtaccgcgacacgaccctgaac

SEQ ID NO: 9137 - DNA, 313 bp, Zea mays
  Clone ID: LIB3150-033-Q1-N1-C6
gcaaagcaaagcgctagccttcctactgtcccgatggcccgcacgaagcagacggccaggaagttcactggcggcaaggcgcctatgaagcacctggccactaaggccgctcgcaagtttgccacggctaccggctgagtgaagaagccccaccgtttccgtcccgacaccgtcgagctcctggagatccgcatgtaccagaagagcacagatctgctgattcacaagctgccgttccagcatcatgtgcgtgagatcgcccaggatttcaagaccgaccttcgcttgcagagctgcgtcgtcgccgcgctga

SEQ ID NO: 9138 - DNA, 364 bp, Zea mays
  Clone ID: LIB3150-033-Q1-N1-C7
caggatcggaaggctggtggccagggtggccctgcagagcgacgacgtccagctcgtcgccgtgaacgaccccttcatcagcaccgattacatgacctacatgttcaagtatgacactgtgcacggacagtggaagcaccatgaggtcaaggtgaaggactccaagacccttctctttggtgagaaagaggttgctgtgtttggctgcaggaaccctgaggagatcccatggggttccgttggcgctgaatatgttgttgagtctactggtgttttcactgaccaagagaaggctgcagctcacttgaagggtggtgccaagaaggttgtcatttctgctcctagcaaggatgcccccatgttc

SEQ ID NO: 9139 - DNA, 205 bp, Zea mays
  Clone ID: LIB3150-033-Q1-N1-C8
cgcggcactcccatgaacgtcggatcgctggaggagatcatcgacgagacccatgccatcgtctcctcgtccgtcggtcccgagtactacgtcgggatactttccttcgttgataaggaccagctcgagcctggatgtgccattctgatgcacaacaaggttctgtcagtggttggtattttgcaggacaaagttgatcctatgg

SEQ ID NO: 9140 - DNA, 304 bp, Zea mays
  Clone ID: LIB3150-033-Q1-N1-C9
gcaggggagaggaaaaaaaaaatcgagccctagcatccgcagcgctagggttcgggggttgcgatggcggcggcggcgagacagcgggggacggtgaagtggttcaacgacaccaagggcttcgggttcatctcccccgaggacggcagcgaagatctcttcgtgcaccagtcgtcgatcaagtcggagggcttccgctcgctcgcggagggcgaggaggtggagttttccgtctcggagggtgacgacggccgcactaaggccgtcgacgtgaccggccccgacggatccttcgtcaggggct

SEQ ID NO: 9141 - DNA, 294 bp, Zea mays
  Clone ID: LIB3150-033-Q1-N1-D1
ctccccgctcgctctcctgcctccgcgcgggccgcggatcccttcactcgccacagcaagcgctagaagagggaatggagcccggcctcgcatcccgcgtcgcccgttcagccgctcagccgcttttcggctgcctgtcgcggcactcgctctcgccgtggctcaagatccagaaccacatttatcctatgccaagtctctgtcacaaggttcctagcacgggaaaatgccacgcttctatgacaacaagttacatcagggaaacatcagatgtcactgatttggactgggaaa

SEQ ID NO: 9142 - DNA, 338 bp, Zea mays
  Clone ID: LIB3150-033-Q1-N1-D10
gcagaaccccttcgccattttcacgaactccctccgatcccggccatggcgggggaggactgccgctccggcgcggaaatggacgcgctcgtacgacgcttgaagctccaccagccgtccccatccccctacgaccccgatccggccgcggcccccgtccccgccaccgccggcgacggcgagctgttccggccgcggagagctgccgtgcttgtctgcctcttccggggagactgcggctagcttcgcgtcatcctcactaagcgctcgttcttcctctacacccactctggaggaaaggtcgaggagggtgatcctgatgatttatctacatcgtt

SEQ ID NO: 9143 - DNA, 265 bp, Zea mays
  Clone ID: LIB3150-033-Q1-N1-D2
tcggtcgctgatgaacttcgagaactcctgcgggaacagtcaccatagagtggggctggctctctacagagtcatgtgtgttcagccaattctcggctttttcaggccagaaagaggcgtcaaggtgaggagcctatggtacttattacactggctcctcgggatcgcggtctgcgccacggtgatctgcgacgtctacatctggcatcggacctactcacgagaggaccgcccagagcgtgaggctatcgacggcgctcctcac

SEQ ID NO: 9144 - DNA, 128 bp, Zea mays
  Clone ID: LIB3150-033-Q1-N1-D3
gccgccgcctccgctagggttttggagtgaggatcgccgatgtcgacggctcccaagcgccccttccgaggccgcggcgccccccccccttgcaccggctacgttccacccgggccccccccttgccc

SEQ ID NO: 9145 - DNA, 312 bp, Zea mays
  Clone ID: LIB3150-033-Q1-N1-D5
ctcatgaatattgctatgactactcttagttcaaaaatactttcccaagacaaggtgtacttcgctgaacttgcggttgatgctgtcttgaggcttaagggtagcaccaacttggaatctattcaaattctgaagaaacctggaggatctcttaaggattcctttttggacgaagggttcattcttgacaagaaaattggcattgggcagcccaagcgcattgagaatgccaaaattttggttgcaaacactgctatggacacagataaaagttatatatatggagcacgggtccgggtggattcaatgtct

SEQ ID NO: 9146 - DNA, 359 bp, Zea mays
  Clone ID: LIB3150-033-Q1-N1-D6
attacgagcaacgttttatattctgtgcttgcataatgaatcgaagaaatcctgacaccaatcgaactgaagatcctgaaacgcacgttaataccgttgacgtccgcttcacccagctcgattttcagtcttgtaatactaatcgctccatgagtctgaagtgtgcaaaaatttaggtcgcagctacacaaatttacatgctggttctgttcaacccgtgaatctcctattttggaaaggtcacagcgtttttatttcattctatattatatttcagtctggactaatgttgagatctccatatgtatctacgtctaagcatttttcatttgtatttaccatgttggtcaattgggata

SEQ ID NO: 9147 - DNA, 331 bp, Zea mays
  Clone ID: LIB3150-033-Q1-N1-D7
ggccctctctctggtgctgcagctcgccccccccctctgctcaccatctcctccctggttcccatggcgccctcccctttttggtggccgacgccccccctctctctcctcttggcgacgactgggcggcatgtgcctaggtcttcttgggacccttcgccggcgacaagcactaccagcatcgcgtcacgcctgctgcttgtacgtgcgtgctctctccgtcacgcgtcgggggtggattggatcagagccgatcgagtgcggagaacaccacgccaggggtgcttcagatggcagtaaagttcagtcatgagtgggcttctcatgagct

SEQ ID NO: 9148 - DNA, 350 bp, Zea mays
  Clone ID: LIB3150-033-Q1-N1-D8
ccagttcgtggactggtgcccgactggcttcatttgcggaatcaactaccagcctcccagcgtcgtccccggcggtgacctggccaaggtgcagcgtgccgtgtgcatgatctccaactccaccagtgttgtggaggtcttctcccgcattgaccacaagttcgacctcatgtacgccaagcgcgccttcgtgcactggtacgtcggtgagggtatggaggagggcgagttctacgaggctcgtgaggatctggctgcgctcgagaaggactactaggaggtcggcgctgagtaagacgagggtgaggacggcaaccagggtgactagtactaaacgctctactggcgcg

SEQ ID NO: 9149 - DNA, 357 bp, Zea mays
  Clone ID: LIB3150-033-Q1-N1-E1
gtgccgccgcctggcctatccgatctggcacctccttccgtctcgcacgttccttcccaactccgcagcgtagcctctccgcggcgcgatccagatccaggtttttcagcatgggcctggtgaaggaaggcatcgacatggaggagggaacccttgagatcggcgtggagtacaggactgtatctggcgttgctgggcctctggtcatattggataaagtgacgggcccaaagtaccaagagattgtgcacatccgacttggagatggcaccaatcgccgtggtcaagtcctggaagttgatggcgaaaaagctgttgtgcacgtcttttaaggaacttgtggaatagacaacaaat

SEQ ID NO: 9150 - DNA, 358 bp, Zea mays
  Clone ID: LIB3150-033-Q1-N1-E10
cgcgcatctctcctctcttcttgcccttccttcccccaacccacacagcctcactaggggtctaccggcggcggcaacgagatggtgcagcgcctcacctaccgaaagcgtcacagctacgcgacaaaatccaatcagacccgggtcgtgaagaccccaggtgggaagcttgtgtaccaatacaccaagaagagggcgagcggtcccaagtgccccgtcaccgggaagaagatccaggggatcccccacttgagacctgccgagtacaagaggtccaggttgtctaggaaccacaggactgttaaccgtccttatggtggagtactctctggaattgctgttagggagagaattatcc

SEQ ID NO: 9151 - DNA, 358 bp, Zea mays
  Clone ID: LIB3150-033-Q1-N1-E11
ggaaaagtgagcacattcttgcacgaagcttgccgccgccgagctggggaactgggaagaggaagagatcttgcctaggtctagcgaggaggaggtcgatcgatcgattggctaggactctaggaggaggagctggctcataagcaggtcagtgcgcccctttctactatcgctctaactattactcgatctccctcgactgcacattcctgacaagatcctagaaggtgggaaggtttctccgaggatgttttttagggaacccgccgtttcaattcgattcgtgcgtgtctctcttcttgtagacctactgacccacccatcgactgtacttgttcggaggaagggatggccgatc

SEQ ID NO: 9152 - DNA, 358 bp, Zea mays
  Clone ID: LIB3150-033-Q1-N1-E12
cgccgagaagaccggtaaccacacggttgacccgctcatggacctcctggtcggcaacgtaggcctcatcttcaccaagggagacctcaaggaggtgcgcgaggaggtcgccaagtacaaggtgggggctccggctcgtgttggtctggttgctccagttgatgttgttgtgccccctggcaacactggtctggatccgtcccagacctctttcttccaggtgcttaacatccccaccaagattaacaagggtaccgtggaaattatcacccctgtggagctgatcaagaagggtgaaaaggtgggctcgtccgagtctgccctgctcgccaagctgggtatccgccccttctcgtat

SEQ ID NO: 9153 - DNA, 358 bp, Zea mays
  Clone ID: LIB3150-033-Q1-N1-E2
gccgccgaatccgagactctgatctcgggggcaccgtagcgcacagagcacccctgactcccggcccgatccgcgctcttctgtccgacgcttcagtcatggcacgaatggcaccccagggttctcagtttgatgctaagcactatgattctaaaatgcaggagctgctgagcactggtgagactgaggagttcttcacttcatatgatgaagtttttgaaagttttgatgacatgggccttcaagagaatcttctgagaggcatctatgcatatggttgtgagaaaccatctgcaattcagcagagaggaaccgatcccttctgcaatgggcttgatgtcattcagcatgcacaatc

SEQ ID NO: 9154 - DNA, 308 bp, Zea mays
  Clone ID: LIB3150-033-Q1-N1-E3
gtccgatccccattccccacctttcctccctccgccgccagctcccgcccccttctctcccctcctcgcctccccgcgcgcgcgtttttataagggtttcggcggaggcgcccggtcgctggcgatggccgacgacggcgggagccacgagggcagcggcggcggcggaggcgtccgggagcaggaccggttcctgcccatcgccaacatcagccggatcatgaagaaggccgtcccggccaacggcaagatcgccaaggacgctaaagagaccctgcaggagtgcgtctccgagttcatatcattcg

SEQ ID NO: 9155 - DNA, 267 bp, Zea mays
  unsure at all n locations
  Clone ID: LIB3150-033-Q1-N1-E4
tgatgctccttatgctacttcatttctacttccattgtctcattgctgatgctccttttacaatntaaaaaaaaaaaaaaaaaaaaaaaaaaaaaaaaaaaaaaaaaaaaaaaggggagaaaaaaaaaaaaaaaaaaaagcggaaacaacaaaaaaaacagcggcgccaaaggcgaggccaaaaaaagacaagggaaaaacaaagccacaaccgcggcctgatcaaaaaaaaaatccnctcagaaaacgacacaaaatactaagacg

SEQ ID NO: 9156 - DNA, 105 bp, Zea mays
  Clone ID: LIB3150-033-Q1-N1-E5
tcgggccgataaccagtgcccacctatgatggctccgaaaccgacttctaccgacttctgtagcctcctaggatgataagaacccctttttataaggggctcaca

SEQ ID NO: 9157 - DNA, 359 bp, Zea mays
  Clone ID: LIB3150-033-Q1-N1-E8
acgagatcaacgaagacctcggcacggggaaaaaaaatctatagccaaacataataatggctatgattgatgaacctctctacccgattgctgtactgattgatgaactgaaaaatgaagatattcagttgcgccttaacttcatcaaaaagctttctacaattgcccgggcattgggtgaagaaagaacaaggaaagagctgattccattccttagtgaaaacaacgatgatgaagatgaggtgcttcttgcaatggcagaagagttgggcgtttttattccttatgttggaggagtagagcatgcacatgttttgcttgcaccactggaaacattgtgtactgcggaggagacctgc

SEQ ID NO: 9158 - DNA, 306 bp, Zea mays
  unsure at all n locations
  Clone ID: LIB3150-033-Q1-N1-E9
atcgcgagcggaggtgttatgcctagcatccatcancatctgctccccaagaaggctgcctcctccaaggccagtgtcgacgactacgacaactgagactgcttcctgcagaaatgatccgaccaccgccttgttttgtaggaataggatgatgttgtcttcggggaggagtcgggtttgttgggaaggaaaattagattagtatcagtttttttgaatgggatgggaacgtggctgtgaatctcagggttgtatgctctttgagaaagaaatggaaggacttctttataaaaaaaaaaataaaaa

SEQ ID NO: 9159 - DNA, 177 bp, Zea mays
  Clone ID: LIB3150-033-Q1-N1-F1
tcgcgccggcaaccgccgccatcgatcgatcgcgcggaaactgacctctaccgatgtctggagccggccaggaggataaaaaacccgcggagggcggcgcccacatcaaccttaaagtcaagggacaagattgcaatgaagggttcttttgcataaagagggccaccccactgaaaa

SEQ ID NO: 9160 - DNA, 357 bp, Zea mays
  Clone ID: LIB3150-033-Q1-N1-F11
accaggtaagcagcagcaggaaccggagcaccgccgcatccgcagccatgggtatcgacctcgttgccggtgggaggaacaagaagaccaagcgcacagcgccgaagtccgacgatgtttatctcaagctccttgtcaagctctaccgtttcttggtcaggaggaccaagagcaacttcaatgctgtcattctcaagaggctcttcatgagcaaaaccaatcgcccaccaatctccatgcgccgccttgtcaagttcatggaaggaaaggagaagaacattgctgtgattgttggcacagtcacagatgacaagaggatccaagaggttccagcaatgaaagttactgccctgaggt

SEQ ID NO: 9161 - DNA, 319 bp, Zea mays
  Clone ID: LIB3150-033-Q1-N1-F12
ctgggatgtccttcgtgctgcttgcggggctgaccggggcgcagaaatcagacaagccagcgacggtcgcggaagagaaggagaggttgatagctgtgggcaatgccgcagcagatgccatcaacgaggcgaggcatggagagggtaagtaggtggtagaggagagagacgagtaagttgatggtgcatcatctcagactcgtttgctggttcttggacatagaccaagaaactcacctagtcacctgtagagttggttggaataaggagtggagtgaggttcataacttcttttttaaaaaactctgtttgtggttta

SEQ ID NO: 9162 - DNA, 349 bp, Zea mays
  Clone ID: LIB3150-033-Q1-N1-F2
tacaatcccaagaagcttttcggggttgcgcaccctggatgttgtcagggccaacacatttgtggcgcagaagaagaaccttaagctcatcgatgttgatgtcccagttgttggtggccatgctggaatcacaattctgccactgttatcgaagaccaggccatctgtcaccttcacagatgaggaaactgaggagctgacaaagaggatacagaatgccgggacagaggtggtggatgccaaggctggtgctgggtctgctaccctgtccatggcctatgccgcttgcagattcgttgagtcttctcttcgtgcgctggctggcgatccggatgtttatgagtgcaca

SEQ ID NO: 9163 - DNA, 149 bp, Zea mays
  Clone ID: LIB3150-033-Q1-N1-F3
tcgctaaggcaggccaccaaggaccccggtgggattgctggcctcaatgtgatgcgtatgatcaacgaccccactgctgctgctattgactacggtcttgacaagaacgccaacaactcctgcgagaagaacgtgctcatgttctacct

SEQ ID NO: 9164 - DNA, 275 bp, Zea mays
  unsure at all n locations
  Clone ID: LIB3150-033-Q1-N1-F4
gcgccgccaccggtccatttccgctccgcgagcccccccaaaagaacctcgtaaccctactcgcgggattccgcaggccgccgcttgcttagggttcatcactcctgttcacacccgatggccgtggacgaggcgagcagcaatggccgtggggaggaggggggcggntcnttnacccccnagcagganaaggcgttcgagaacgccgtggccaccatgggcggtgaggaggacggggacgcgaggtgggagaagctagcggaggccgtcgaggg

SEQ ID NO: 9165 - DNA, 353 bp, Zea mays
  Clone ID: LIB3150-033-Q1-N1-F7
ccgccactcaccaacaactgttcaatggtgacacttctcaagatcaacaaggaccttgcctacttgcagttcgagttgcgggcatgcatgaaccaatatgatggaatggtttactacggggtggttaataacattgctgacgaagaatctaagcttggaacaaagtactctgtgccccagatcgcattctacaagggactgctagaagcaatagttcaggaagctggaaatgatgggagcataaccagtatcgacgcgctcaatgtccggcttgataaccaggtcgcagtattagacggttcacaggacagccagtctcgccttcctagctccataaagaacttctcaatgag

SEQ ID NO: 9166 - DNA, 158 bp, Zea mays
  Clone ID: LIB3150-033-Q1-N1-F8
tcggcccggcccctgtgcttcccttgccggcggacgagagccaaaagcctttcgccccacgactcgcctcgccctgctgcgacgcccttgaggacgtttgccgcaccgaccggcgaccaagccttgattgccttcgccccatggctactcgggcgcgg

SEQ ID NO: 9167 - DNA, 343 bp, Zea mays
  Clone ID: LIB3150-033-Q1-N1-G1
ccgcattcccttccacaacaccgagacgcggggatgacggcgcagactgcggaggagctcgccacccagatcgagcagcagaagctcgaggagcagaagaccgaggcagaggaggttgtggtggaggatgaggaggacgaccaccatgaggacgatgaggatgatgatgaacttgacggacaagaaggggatgccagcggcaagtcaaagcaaagcaggagtgagaagaagagccgcatagccatgctgaagcttggcatgaagcccatcactggtgtcagccgcgtcactgtgaaaaaaagcaagaatatactgtttgtcatctcgaagccagatgtgttca

SEQ ID NO: 9168 - DNA, 380 bp, Zea mays
  Clone ID: LIB3150-033-Q1-N1-G12
aaatccgttacttcccatatacatagagagaatacacagagataagcatgggagtgagtgagcaacatatgataccgaaggaaggttcatgccagtgaacctggagaacatgttcaccaagtatgcactcacaaagcccgacaatttatcactcaaggagttgtggcagatgactgagggaaatcgggccgctttcgactatcttggatggatggcatccaagttggaatggttgctgttgtattatgtagccaaggacaagcagggttttctgtccaaagaagctgttagagggtgttttgatgggagcttgttcaagaacatttccaaaatgtacaaggactcagatagaaagagtaaataaaaaacactacccatca

SEQ ID NO: 9169 - DNA, 317 bp, Zea mays
  Clone ID: LIB3150-033-Q1-N1-G3
cttccgttctcaaaccaacctaggcaattcgccgcagcctctcaccctcgcgagtcccgacctcccgcagccgccgcacagatggcacccaaggcggagaagaagccggtggccaagaagcccgcggaggaggagcccgcgacagagaaaggggagaaagctcccgcggggaagaagcccaaagccgagaagcgcctcccggcgggcaagtccaaggagggcggcgagggccagaaggggaaaaagaaggcgaagaagtccgcggagacctacaagatctacatcttctaggtgctgaagcaggtgcaccccgacat

SEQ ID NO: 9170 - DNA, 370 bp, Zea mays
  Clone ID: LIB3150-033-Q1-N1-G4
cgaagagggaagggggagaagcgaccgcgccgccaaaccctagccccgcgcaagcgaccgtgggggagctccactccgccgcgccgccccccgtccccgtttcgcgacatggccgattccccgcgcaggaggtactcaaggtccccttcatacagcagggggcacccaaaagggaggtcaagatcacaatctccagctcggtctcagtctaggtcacctgtccctgatcctagatctcaggcgaggtcaagatctagaagccaagagagggaggaggatgctgttaaccgtgggaatactctgtatgtgactgggctctcttcgagggttactgaaagggatgttaaggattatttttctaagcatggaa

SEQ ID NO: 9171 - DNA, 352 bp, Zea mays
  unsure at all n locations
  Clone ID: LIB3150-033-Q1-N1-G5
ccgtcatcgatctcgtttcaaatccatgcatcctcgtttcctccgtcccgcagcatctcaaccccatggccaagatcaagatcgggatcaatgggttcggcaggatcggaaggctggtggccagggtggccctgcagagtgacgatgtcgagctcgtcgccgtgaacgaccccttcatcagcaccgactacatgacctacatgttcaagtacgacactgtgcacggacagtggaagcaccatgaagtcaaggtgaaggactccaaaacccttctctttggtgagaaggaggttgctgtgtttggctgcangaaccctgaagagatccccgggggttcggttggtgctgaata

SEQ ID NO: 9172 - DNA, 276 bp, Zea mays
  Clone ID: LIB3150-033-Q1-N1-G6
cgtcactcacctcgaccaccggcatgggcatggccttggcctccgcgaccgtcgccgcactcttgcgctccgacctgttcgagccacacggcgccggcgcgcgcgtacggccgcagcgccagcagccgttcttggctacgctccacgcggcgaatggccccggctcggcgccggtggtgctggaaggcaaggccaaaggaaagaagaagaaggggcccagctacaggaacctttccgcagaccttgacgttgagatcagggaggcgcaggagtacc

SEQ ID NO: 9173 - DNA, 170 bp, Zea mays
  Clone ID: LIB3150-033-Q1-N1-G7
cacactttgctttatagagaccggacgcgtggatgcagcggacgtaacatataacagccgaacatttatcttaaatgggcctgcaccagagcgggttgcttttgagtacagcgaagtgtagacaaaccgtctgctgaaagctcttcgcctaggttgcactcttcgctcca

SEQ ID NO: 9174 - DNA, 272 bp, Zea mays
  Clone ID: LIB3150-033-Q1-N1-G8
tcgcacaacatccaatgagaaagcagagcgggcctatccacccagggagaaagaggccaaaagggaggggagagtgtcatcatggcttccattgtcgcttccaggagggcctttcctctagttcgcgctctggataagctcatcgcagcatcctccgctcccggcactgtctccgcccttattccttttgcagacgcccgcggtcttcaagtatacaacacctgcccttcgctacaactctactaaggggccgagtctgaagacgatagcgt

SEQ ID NO: 9175 - DNA, 362 bp, Zea mays
  Clone ID: LIB3150-033-Q1-N1-G9
ggctgctgaagagcgtgctgcagctgccaaggcttctggcaagaagaaagaatctgggaagtcatcagttttacttgatgtgaagccatgggacgatgagactgacatggccaagcttgaggaagctgttaggagtgtccagatggaagggctgctctggggcgcatccaagcttgtcccagtcggatatggtatcaagaagctgcaaatcatgatgaccatagtcgacgatcttgtctctgtcgacactctcattgaggactatctgtgcgctgagccagttaacgagtacgtccagagctgcgacatcgttgccttcaacaagatctaggcgtgactttcgatcagtccttcccctgggg

SEQ ID NO: 9176 - DNA, 102 bp, Zea mays
  Clone ID: LIB3150-033-Q1-N1-H10
cgtatcgttctttatcttatccaattctttattcaactctgacgggcatgctatggggtcatgttcatataaaactgtagaattcactcttgctaaattcta

SEQ ID NO: 9177 - DNA, 376 bp, Zea mays
  unsure at all n locations
  Clone ID: LIB3150-033-Q1-N1-H2
cccaagctcaccctanagggggaagagggcgaccgaaggcggcgatgggtttcatcatggacttcgcggagaatctgatcctccgtctgatggaggacccggacaagcgcgaccaggttcggcgggagcatgtctacaagatgaaggagcggtgcgagcgcactaaggcggcgtggagcctccctctgcgcccctacggcttctggaccttcgaccgcttcaactcgcagctctcctgggatccccagatcagccaggccgccggccgtcgggacccctacgacgacctcatcgcacgccactctggctcgccgccgtctttctgaacacccgttccgatctttgcccagaaggtctacttgggcatcaataagaa

SEQ ID NO: 9178 - DNA, 211 bp, Zea mays
  Clone ID: LIB3150-033-Q1-N1-H3
ggataaaacgcgagtttgaaagttatggtgctattaaaagggtgcgtcttgtaactgagaaagatgcaacgtaaacctataggatatgcattcattgagtatgtgcacacacgagacatgaaaaatgccttcaagcaagcagatgggaggaaaagtggacaacacgagggtattagttgatgttgagccaaggaaaaactgtttccaaatt

SEQ ID NO: 9179 - DNA, 115 bp, Zea mays
  Clone ID: LIB3150-033-Q1-N1-H5
tcgtgccgtgctgccgactgttaccatgcagcgcctctcgcgaaggctaagccttttctctataagaaccagtatcgcggcatccggcagctgccgtggtgcatgttggctgtgg

SEQ ID NO: 9180 - DNA, 363 bp, Zea mays
  Clone ID: LIB3150-033-Q1-N1-H6
ctcctcccccaccggttcgtgttcaggttctggttcgtgggcgagagggaagagatggcggcgtcggacgttgagtaccgttgcttcgttggcggcctcgcctgggccaccgacgaccactccctcaacaacgccttcagcacctacggcgaggtcctcgagtcgaagatcatcctggatcgggagacgcagaggtcccgcggcttcggcttcgtcaccttctccacggaggacgcgatgcgcagcgccatcgagggcatgaacggcaaggagctcgacggccgcaacatcaccgttaacgaggcccagtcccgcggcggccgtggaggcggcggtggcggataccgtggcgggcgccgtgat

SEQ ID NO: 9181 - DNA, 258 bp, Zea mays
  Clone ID: LIB3150-033-Q1-N1-H7
cgcaggtgatgagtacatccctgatcgggtgaggcagcttgataagcctttcttgatgccgatagaagatgtgttttctattcatggtcgaggaactgctgttactgggcgtgttgaacagggaacaatcaaaactggtgaagatgttgagatcttgagtttggcacatactggtcccttgaagactacagttactggtgttgagatgttcagaaagatactgcaccatggacaggctggtgacaacgttggccttct

SEQ ID NO: 9182 - DNA, 361 bp, Zea mays
  Clone ID: LIB3150-033-Q1-N1-H9
attagctttatctactccagagcgcgagaagaacccgatcgacaccatgagggtgttgctcgttgccctcgctctcctggctctcgctgcgagcgccacctccacgcatacaagcggcggctgcggctgccagccaccgccgccggttcatctaccgccgccggtgcatctgccacctccggttcacctgccacctccggtgcatctcccaccgccggtccacctgccgccgccggtccacctgccaccgccggtccatgtgccgccgccggttcatctgccgccgccaccatgccactaccctactcaaccgccccggcctcagcctcatccccagccacacccatgcccgtgccaacag

SEQ ID NO: 9183 - DNA, 231 bp, Zea mays
  Clone ID: LIB3150-034-Q1-N1-A1
ttctttcattcgccgccgccgcctgctgtctgctgccgtcgccatggggagaaggcctgcgagatgctatcgccagatcaagaacaagccataccccaagtccaggtactgccgtggtgtccctgaccccaagatcaggatctacgatgttggcatgaagagaaagggtgttgatgagttcccctactgtgtgcaccttgtctcttgggagaaggagaatgtctccagtga

SEQ ID NO: 9184 - DNA, 325 bp, Zea mays
  Clone ID: LIB3150-034-Q1-N1-A10
ggcttctcctccccctccggttcgggttggggttcgtgaggttctccggggttcggtttcgtgggtgagcggatcgagatggcggcgtcggatgttgagtaccgctgcttcgtcggcggcctcgcctgggccacggacgaccactccctccacaacgccttcagcacctacggcgaggtcctcgagtccaagatcatcctcgatcgggagacgcagaggtcccgcggcttcggcttcgtcaccttctccacggaggaggcgatgcggaacgccatcgagggcatgaacggcaaggagctggacgggcgcaacatcaccgtcaacg

SEQ ID NO: 9185 - DNA, 253 bp, Zea mays
  Clone ID: LIB3150-034-Q1-N1-A11
tctttcttctcctccccctccggttcggggtagggttctttagggtgttcggccttccttcccatcggtgagccgatccagatggcggcctctgatgttgagtaccgctgcttcgtctgctgcctcatcttggccacggacgaccactccctacacaacgccttcatcacctacggcgaggtcctcgagtccaagatcatcctctatcggtagacgcacaagttccgcagcttcagcttcatcaccttctcca

SEQ ID NO: 9186 - DNA, 334 bp, Zea mays
  Clone ID: LIB3150-034-Q1-N1-A12
tcgggcgcttctcctgcgcctcgctgctaggtcggtgccgccccggcggagctccggcctcagagcattgccgcgcgtcgtccttccggaggtcgtttccaaacaatcatttcttcgtttactagttgacagcactgcaagtatgccctgtcctattaagtgttctgcggctcggtgtgccccatcattgactgaacacaacgattctaggaataatggcatccatgcatctagtgtatatggacatgatctcatgaagtccatgtctgatctccaggaagttgtattttcctcctttagcaaagcatgtcttctcagtagttgtatcatatat

SEQ ID NO: 9187 - DNA, 402 bp, Zea mays
  Clone ID: LIB3150-034-Q1-N1-A2
ggcaaacatatcacttcttttgcattcggagaggatttggaaccagggtttgtaggtgaagtaagaattgcaggagacattaaattgttatctgtgatagcaagtggcctgcctacaacagaggacttcgagcatgtcactgacttagaaatattgaaggctccacctgtgcccatggataaaccggttgatcttttcattggggtcttctctacagcaaataatttcaaacgccgaatggcagttcgcagaacttggatgcagtatgattctgttcgatcaggaaaagttacagttcgattctttgttggcctgcacaaaaatgagttggtcaatgaggaactctggaatgaagcacgaacatatggagacatccagttgatgccatttgtggattactat

SEQ ID NO: 9188 - DNA, 329 bp, Zea mays
  Clone ID: LIB3150-034-Q1-N1-A3
gtttgatgaagctatctctgagttagacagccttggtgaggagtcatacaaggatagcactctgatcatgcaactcctgagggataacttgaccctttggacatccgacctcacggaggatggtgctgatgaaggcaaagatgccccgaaaggcgatgcaagcgagggacagtaatcttcggaggggggtgcaaagttgttcgagccccaatgttttaaatgctctgtgctgtcgaagctgtgccgtgctattattgtagctgatttcgtctccattcacttcttttttttcttggtagtaggcttgtagtggtcgaattagtacccca

SEQ ID NO: 9189 - DNA, 389 bp, Zea mays
  Clone ID: LIB3150-034-Q1-N1-A4
gcctgatggccaagtaatcaccatcggggcagagagattcaggtgccccgaggtcctcttccagccatccatgattggtatggaggctgctggaatccatgagacaacatacaattcaatcatgaagtgtgatgtggatatcaggaaggacctctacggcaacattgtgctcagtggaggttcgactatgttccccggtatcgctgatcggatgagcaaggagatcacttcccttgcaccaagcagcatgaagatcaaggtcgtcgcgccacctgagaggaagtacagtgtctggataggagggtcgatcctagcctcgctcagcactttccaacagatgtggatatcaaaggaggagtacgatgagtctggcccggcatttgttcaca

SEQ ID NO: 9190 - DNA, 397 bp, Zea mays
  Clone ID: LIB3150-034-Q1-N1-A5
caccgctgttaggttctaccaggagagcttcggcgtccctccggccacgcgagctcgccgaaatggtcgcccacaggttccatcagtaccaggtggtgggtcgcgcgctgccgaccccaaccgatgagcaccccaagatctaccgcatgaagctctgggccaccaacgaggttcgcgccaagtccaagttctggtacttcctgagaaagctcaagaaggtgaagaagagcaatggccagatgcttgccatcaacgagatctttgagcgcaacccgaccaccatcaagaactatggcatctggctgcgctaccagagcaggactggttaccacaacatgtacaaggagtaccgcgacaccaccctgaacggcgcagtggagcaaatgtacaacgagat

SEQ ID NO: 9191 - DNA, 381 bp, Zea mays
  Clone ID: LIB3150-034-Q1-N1-A6
ggccgaggaagttgaggtggaggaggtggtggacggggacgaggcggtcgatggggagggcgacggtgacgaggacgacgatggggaaggcggtgacgaggaggatgatgatgaggaggtggatggggaggagaaggaggcggcaggggttgtggagatctccgacgaagacgacgacgacggtgacggggaggcggacgacgacgactacgatgacggggatgacgacgacgacgacgacgaggactcatacgacgaggaagaggtcgacggtgaagacgatcaggaggaggagctgggaaccgagtatctggttcagcctcttgggcgggctgaagacgaagagcactcgagcgactttgaaccggaagaaaacggtga

SEQ ID NO: 9192 - DNA, 393 bp, Zea mays
  Clone ID: LIB3150-034-Q1-N1-A7
ggttcgggttcgggttcgtgaggttcggcggggttcggtttcgtgggtgagcggatcgagatggcggcgtcggatgttgagtaccgctgcttcgtcggcggcctcgcctgggccacggacgaccactccctccacaacgccttcagcacctacggcgaggtcctcgagtccaagatcatcctcgatcgggagacgcagaggtcccgcggcttcggcttcgtcaccttctccacggaggaggcgatgcggaacgccatcgagggcatgaacggcaaggagctggacggccgcaacatcaccgtcaacgaggcccagtcccgcggcggccgtggaggcggcggcggcggcgggtaccgtggtggccgtggaggcggcggctaccgcggtggccgg

SEQ ID NO: 9193 - DNA, 405 bp, Zea mays
  Clone ID: LIB3150-034-Q1-N1-A8
gtcagtgcagagtgacatgaagctatgggctttcaaggtcatcccaggtcctggtgacaagcccatgattgtagtcaactacaagggcgaggagaagcagttcgctgctgaggagatatcctccatggtcctcatcaagatgaaggagattgctgaagcctaccttggttccaccatcaagaacgcagtggtgacagtgccggcctatttcaacgactcgcagaggcaggccaccaaggacgccggtgtcattgcgggcctcaatgtgatgcgtatcatcaacgagcccactgctgctgctattgcctacggtcttgacaagaaggccaccagctccggcgagaagaacgtgctcatcttcgaccttggcggtggcacgtttgatgtgtcgctcctcaccatcga

SEQ ID NO: 9194 - DNA, 348 bp, Zea mays
  Clone ID: LIB3150-034-Q1-N1-A9
gcctattcaccatcgtctctgactcatgccatagtggtggcctgctggacagtgctaacgagcagataggtaatagcaccaagcagaataagacccagtcccgtgaacctgatgagcctcgtcattctggttctggcagcggcttccggtcatttctcaaagagactgtccgcgatgtgttcgagtctgaggggattcacatccctcatagccgccgccatggggatgatgaccaggacgacggttacgcacagccaactggaaatggccacactaaaaaccgctccctgccactctcgaccctgatagagatgctcaaggaacaaactgggagagatgacattgatg

SEQ ID NO: 9195 - DNA, 390 bp, Zea mays
  Clone ID: LIB3150-034-Q1-N1-B1
cgtcttcacaaacgccggcgcaaactgtggcccgagcccgacagatcttcaattccccattccgcccaccgatcgaccttcacgccagtctcggtctcttccgaaggcgtcgcgcgcggttgtttgagaggagaggaggaagatgagggagtgcatctccgtccacatcgggcaggccggcatccaagtcggcaacgcgtgctgggaactttactgcctcgagcacggcatccagcctgatggccaagtgcctggagataagaccgcgggacatcacgatgatgccttcagcaccttcttcagccagactggtgctgggaagcacgttccccgtgcaatcttcgttgatctagaacccactgtgatcgatgaggtgcgcactggcacgta

SEQ ID NO: 9196 - DNA, 342 bp, Zea mays
  Clone ID: LIB3150-034-Q1-N1-B10
tgatgagatcctgttctgcaacattgggaatcctcaatcccttggtcagcaacctgtgacgttcttcaaggaggttcttgctctttgtgatcatccatgcctcttgggaaaagaggaaaccaaatcattgttcagtgctgatgctatttctcgagcaaagcagattcttgcaactattcctggacgggcaacaggtgcatatagtcacagtcagggtatcaaaggattgcgtgatgcaattgctgctgggatcacctcacgtgacggattccctgcaaatgcagatgacattttcattacagacggagcaagtcctggggtccacatgatgatgcaattact

SEQ ID NO: 9197 - DNA, 271 bp, Zea mays
  Clone ID: LIB3150-034-Q1-N1-B11
ttccttttccgaaccaccggagcgcaggagggcggctcgagacccttcccggcttctactcctccgatcctacgcaccggctgacgagtagcccactcactgggggacgtgggatcgatcggcggctgatgggaggctagattccgcaatcccacagactagacacatccccttcgcggttgactttggcgaatcgaccttgatctgaaaatggggctgttccggacggcgtccggcctagcccgtttggctctgcgaaggaacctcttgc

SEQ ID NO: 9198 - DNA, 354 bp, Zea mays
  Clone ID: LIB3150-034-Q1-N1-B12
aaaaaggagagagacagagggggaggcggagagcttgccatcccaagcaaaggttccctctccttccccacctcgcgctcaacccccctcatcctcccacatccgattgtgccctgcgctctgccgttctcttatccaagatttcgccggcggcggctcaaggagcggacaaagattgtttttttttcgggctatggagacgaggcctgattcattcagccccgggcggtggagtggcttcctgaccgggtctgattcgtattggttcaaatgatctgggcggcttaattggttgcatccgcttccaccggggaatcggagctagggctgtggtttgttggccggctggtggga

SEQ ID NO: 9199 - DNA, 425 bp, Zea mays
  Clone ID: LIB3150-034-Q1-N1-B2
cagcatccaggccttgggacaaggatcgtgatggttttgtcatgggtgaaggagctggagtcctggtcatggagagcctagagcatgcaatgaaacgtgatgcaccaataattgcggagtatttaggaggtgctgtgaactgtgatgcttaccatatgactgatccgagatctgatggtcttggtgtttcatcttgcatcaagcaaagtcttaaagatgctggtgtggcacctgaggaggtcaactatattaatgctcatgcaacatcaacccttgctggtgatctggcagaggtgaatgccatcaagcaagtcttcaaggacccatctgggatcaaaataaatgcaaccaagtccatgataggacattgccttggcgcagcaggcggtttggaagccattgctactattaaagcgataactact

SEQ ID NO: 9200 - DNA, 400 bp, Zea mays
  Clone ID: LIB3150-034-Q1-N1-B3
cgccgccgaatccgagactctgatctcgggtgcaccgcagcgcacagagcacccctgactcccggcccgatccgcgctctcctctccgacgcttcagtcatggcaggaatggcacccgagggttctcagtttgatgctaagcactatgattctaaaatgcaggagctgctgagcactggtgagactgaggagttcttcacttcatatgatgaagtttttgaaagttttgatgacatgggccttcaagagaatcttctgagaggcatttatgcatatggttttgagaaaccatctgcaattcagcagagaggaattgttcccttctgcaaggggcttgatgtcattcagcaagcacaatctggtacaggaaagacagcaaccttctggtctgggatcttgc

SEQ ID NO: 9201 - DNA, 420 bp, Zea mays
  Clone ID: LIB3150-034-Q1-N1-B4
agaagctcagtcaaagggatctgcatgccctatattcttgttcttctcagtgaatacaagtgggcagtttgttggtgttgctgaaatgactggcgccgttgattttgagaaaaccctagagtattggcaacaggacaagtggaacggctccttctctgttaagtggcacattgtcaaggacgtgcccaacaatattctcaagcacatcatcctggagaacaatgagaacaagcctgtcacaaacagccgtgacactcaggagatacgcctcgaacaaggccttcagatgctcaagatattcaaggatcatgtcagcaaaacttccatcctcgacgactttgccttctatgagagccgccagaagttgatgcaggataagaggtccaaacagcagcagctccgaaagcaggtctgggacac

SEQ ID NO: 9202 - DNA, 282 bp, Zea mays
  Clone ID: LIB3150-034-Q1-N1-B5
cccacgcgtccggatcctccgaggcgggggtgcttgaccgatccatggacacccacatcggatccgtgaacggggcggcgtcgaaccaaacggttggctgcccggcgtcagcgccggggtgcccgatggcgtccacgccggcgcaacccgcggcgaccctgttggcgggggaggcgtcgattgggcgccaccttgcgcgttgccttgagcaagtcggcgtcaacgacgtctttgcggtttcgggggactttaaccttacgctgtttgaccacctgattggcg

SEQ ID NO: 9203 - DNA, 342 bp, Zea mays
  Clone ID: LIB3150-034-Q1-N1-B6
ggaggctgctgcgtttcgctgcaggaggccttacgtgaccccgcggcgttcgtttgcttctcaatatgtctgcaagtctactgccagttccactgaccactacaacgctccagctaactcgaagggtgactccaacaatgtagacatctatgctcctagcaaggatgccatcatgtatgtcagcggtgtccacaagcaagagtacaagctctgacatcaacatcgcctccacatgctagctgcacaaccaactgccttgttaatgttgctaacgtcatgaatcacaagttgggcatcattgatggtatgatgaccactgagcatgccatgactactacgcac

SEQ ID NO: 9204 - DNA, 391 bp, Zea mays
  Clone ID: LIB3150-034-Q1-N1-B7
ccttggcatgctgaatcttcaaatggtgcaaatgctgatgcacagccaccttctcatcctgctggaaatgcattgatcaaagccaaccttgacattgggccacagcaagcatattctcatgtacattctccagattattatcctgtacaaactatgcgtgactgggatctgctctggaatgaaactgggcaggtcatacgaagtgagggtgccacaccacgtgcacatcatgataatgttgagaggacctctcctgtaaccatcagccatcatatgaaagatgcccctcagagaaccgatcatgattcccgtgctggtcgatacaacattgaatactaggatcaaaaccgatcattcaaagaccttatgaagagtgatgcctgataaagtc

SEQ ID NO: 9205 - DNA, 326 bp, Zea mays
  Clone ID: LIB3150-034-Q1-N1-B8
cggacgcgtgggtgctacgccacgaccgcacgttcacggtagcgagagcttatcgtcatcggcggcgaacatggtgtcgctgaagctgcagaagcggctcgccgcgagcgttctcaagtgtgggaaaggcaaagtctggcttgaccccaatgaagtcatcgagatctccatgggtaactcccgccagaacatgcggaaattggttaaggatgggtttatcatcaggaagcctcataaggttcactctacgtcccgtgcaagaagggcacatgatgccaagcataagggaaggcactctggatactgcaagcgcatgggtaccaggg

SEQ ID NO: 9206 - DNA, 296 bp, Zea mays
  Clone ID: LIB3150-034-Q1-N1-B9
gaagttttgagggtagagcagttgggggattacgacgaagagagatgggcctcctcgacaagctgtgggacgacaccgtcgcaggcccgcgcccggacaccgggctcggccgcctccgcaagcagcctgtgcgtcccgccgccgtcaagatcagtgatccggccggggacgctgcggcgttcgtgccgccctcgccggcttcgggtagcgaggagacgccggtgaaggtgacgcgcagcatcatgatcaagcgccccgcggtgtacccgtcgtcgccgaggagcgcggcaagcacg

SEQ ID NO: 9207 - DNA, 396 bp, Zea mays
  unsure at all n locations
  Clone ID: LIB3150-034-Q1-N1-C1
cgcaaactctcgcccgagcccgacagagcttcaattccccattccgcccaccgatcgaccttcacgccagtctcggtctcttccgaaggcgtcgcgcgcggttgtttgagaggagaggaggaagatgagggagtgcatctccgtccacatcgggcaggccggcatccaagtcggcaacgcgtgctgggaactttactgcctcgagcacggcatccagcctgatggccaagtgcctggagataagaccgcgggacatcacgatgatgccttcagcaccttcttcagccagactggtgctgggaagcacgttccccgtgcaatcttcgttgatctagaacccactgtgatcgatgaggtgcgcacttgcacgtaccgncagctctttcaccctgagca

SEQ ID NO: 9208 - DNA, 318 bp, Zea mays
  Clone ID: LIB3150-034-Q1-N1-C12
ctcctcctcgcctcctctccctagtctgcacgacgcaagggagagtgacggaaagcgacgcggcgcgagcgaggagggccaaggcgaagaggggaagcaccgcaccatgacccttgttcgccgccgccgcctctgatctccgcgaggttgtcaggattcaatatgtcgaccagcacattcgctacttcctgcacgctgttgggcaatgttagaacaacgcatgcctcccagacagcggtgaagagcccttcgtctctaagcttcttcagccaagttacgaaggttccaagcctgaatacctccaagaaactggatgtc

SEQ ID NO: 9209 - DNA, 409 bp, Zea mays
  Clone ID: LIB3150-034-Q1-N1-C2
aaacaatggtgcagccctcctcttcttgtagatgagttttctcaggttaaggagtccgtatacggcgatgagaatttctcggttagcgtcaacaggtcggctttcgagatcgttgctacatacaaaaaggaggagacaggaatcgaccttgtcatacgcctcccgagctgttaccctctgcgccacgttgatgtcgaatgcacgagaagtttgggtatcagtgaagtcaagtgcagaaaatggctgctttccctcacgtcattcgtccgcagccagaatggcgcgatagcagaggcgatccgcacgtggaagagcaatttcgacaaggagtttgagggcgtggaggagtgcccaatctgttacagcattctccacaccagcaaccacaacctgccgcggctggcgtgca

SEQ ID NO: 9210 - DNA, 428 bp, Zea mays
  Clone ID: LIB3150-034-Q1-N1-C3
acaatgaaaagggagacaatgccttcagggctagaactgttgcttgcaacacaattctttacgacttgtgctaaccatcttcttgctagtcgcaatgaatgtaacctattttgcacccagtgtgagaccaaaccagctgctttctgtaactattgtcgttcaagtgatcattccacccaccgtgtaatccagataaggcgttcatcgtaccatgacgttgtgagggtgtccgagattgaggatatccttgatgtcagcgatgtgcaaacttatgtaatcaatagtgcaaggattgtattcctgaatgagcggccacaactgcgtgcttctagtgtccccatttgtaaggcacccacatcatcaacacatagctgtgagacatgtagccgtgtgctacttgatgcatttcgcttctgctctcttggatg

SEQ ID NO: 9211 - DNA, 399 bp, Zea mays
  Clone ID: LIB3150-034-Q1-N1-C4
gttccaactcctgagcactttctcctggggcgagacaagccaatcgaagccgagatacgaccatggactccaccggcaccggagcagggggtaaggggaagaagggagcggccgggcgcaaggtcggcgggccaaggaagaagtcggtgtcgaggtccgtgaaggccggtctccagttccccgtcggccgcatcgggcgctacttgaagaagggccgctacgcgcagcgtgtcggcaccggcgcccccgtctacctcgccgctgtcctcgaatacctcgccgctgaggttctggagctcgccggtaatgctgccagggacaacaagaagactcgcattattccgcgccacgtgcttctggcgatccggaacgacgaggagcttgtgaagctgttgggcg

SEQ ID NO: 9212 - DNA, 400 bp, Zea mays
  Clone ID: LIB3150-034-Q1-N1-C5
tcgcggacgcgtgggcagaaacacacgcaagcgaagcgcactagcagcgacctaacaacaatggctaccaagatattagccctccttgcgcttcttgccctttttgtgagcgcaacaaatgcgttcattattccacaatgctcacttgctcctagtgccattattccacagttcctcccaccagttacttcaatgggcttcgaacacctagctgtgcaagccaacatgcaacaacaagcgcttgcggcgagcgtcttacaacaaccaattgcccaattgcaacaacaatccttgccacatctaacaatacaagccatcacaacgcaacagcaacaacagttcctaccagcactgagccacctagccatggtgaaccctgccgcctacttgcaagagcagc

SEQ ID NO: 9213 - DNA, 413 bp, Zea mays
  Clone ID: LIB3150-034-Q1-N1-C6
gcccaacccagcccagcaaccgcgaaggcgtgttcatctccctactcgatcggcagccgcaagagctgaccctccgctcccccccccaaaaaccctagccatcccaggttgctccggccgcatccccgccgaccgccgaccgccgacgatgcctcccaaggccaagaaggacgctgcgccgtctgagcgccccatccttggacgcttctcctcccacctcaagatcgggatcgttgggttgccaaatgttggcaaatcaacttttttcaacatagtaacgaagttggctatcccagctgagaattttcctttctgtaccatcgaaccaaatgaagcacgggtgaatgttccagatgaacggtttgattggctttgcaaactttacaagccaaagagtgaggtgcctgcatatc

SEQ ID NO: 9214 - DNA, 357 bp, Zea mays
  Clone ID: LIB3150-034-Q1-N1-C7
atcccccagaaaatcaactcctgggcagatccacgctgccaccaactcgccgtcctccgcgccaagcaccaaagctccgatggcccgcactaaacagacggcgcgcaagtcgacgggcggcaaggcgccccgcaagcagctggcgaccaaggcggcgcgcaagtctgcgccggccaccggcggcgtgaagaagccccaccgcttccgccccggcaccgtcgcgctccgggagatccgcaagtaccagaagagcacggagctgctcatccgcaagttgcccttccagcgcctcgtccgtgagatcgcgcaggacttcaagaccgatctccgcttccagtcctccgacgtcgccgcgct

SEQ ID NO: 9215 - DNA, 419 bp, Zea mays
  Clone ID: LIB3150-034-Q1-N1-C8
accagtcctcacataatcatcttgattgactcactctcttcgatcactgtactgaagataccatggccaagtcgaccgcgatgtttgtagccgccctggccctggtggtggtgatggcgacgacgagcacaggcggtggcagggcggcagcggcgtgcgatcccaagccgctggtggtgtgcgatccggcgttcatggacggagcgaaacccgcggcagcatgctgctccaccctgcgtgcgcaggaggcatgcttgtgcgtgtacgccaaagaccccaagtttgcaaaatacatcaacaaccccaacaccgccaaaacctttacctcgtgcggcatagccatccccaaatgctaagcaagcgctctgcgtcgtcgcttcgcttgctcttgctcttgtgtgtaacatatccagcttatg

SEQ ID NO: 9216 - DNA, 368 bp, Zea mays
  Clone ID: LIB3150-034-Q1-N1-D11
ccgtcatcgatctcgtttcaaatccatgcatcctcgtttcctccgtcccgcagcatctcaaccccatggccaagatcaagatcgggatcaatgggttcggcaggatcggaaggctggtggccagggtggccctgcagagtgacgatgtcgagctcgtcgccgtgaacgaccccttcatcagcaccgactacatgacctacatgttcaagtacgacactgtgcacggacagtggaagcaccatgaagtcaaggtgaaggactccaaaacccttctctttggtgagaaagaggttgctgtgtttggctgcaagaaccctgaagagatcccgtggggttcgggtggtgctgaatatgttggtgagtctact

SEQ ID NO: 9217 - DNA, 338 bp, Zea mays
  Clone ID: LIB3150-034-Q1-N1-D12
gaataggcaatctattggatcaaaaagaaagtagatgttatcacaggatggctacataaaccttctgagtgaagtaaactgtgagtacaaagtcaatccctggaaccagaatatgcaaaagagatctacgtgcacgaagtagctctgccactactggacttcactaccacctttctctcacatcatccgatttgttctgttttccgcaaagaggtggttcgctatcaattcaagtcactggcaagccgtggctgtggatcatcaccttcacgaagagaatatcgaaagaatagtcttcttaacgatgaattcatcagctttggaaagactgattgact

SEQ ID NO: 9218 - DNA, 373 bp, Zea mays
  Clone ID: LIB3150-034-Q1-N1-D2
cttgctcccccagccttccatggcgtccctgctcctcctctccatggccaacgccctgctcaggtgatgaatcccgcgctccctgtgccacatctccagccggcttttgtttcccttgctctacggccagcagcaaacctccatggacgcccccctatttttcttcctagcacagctgttgggagcccctgctcagacagcagccatggcgccatgattctctgcgcatcgatgccggtccaaaaacagcagccccggatcccctccgcatcgtgtgcttcgctcgatctacgcagccccgacccacgccgttgcgttggtgtttgggggacagcccatgcctcgtcgttgatctgcacggttcgaccgtcta

SEQ ID NO: 9219 - DNA, 247 bp, Zea mays
  Clone ID: LIB3150-034-Q1-N1-D3
tcggcaatcggaattctctgcgatttctctagatctcgactaccccccactagttttggttcctcctttcgttcgagagagcgattctggtggcaatggcgaaaagcgagggtccggcgatcgggatcgacctcggcaccacctactcgtgcgtcggcgtgtggcagcacgaccgggtggagattatcgccaacgaccaggggaaccgcaccacgccgtcctatgtcggctttaccgacaccgagcg

SEQ ID NO: 9220 - DNA, 398 bp, Zea mays
  unsure at all n locations
  Clone ID: LIB3150-034-Q1-N1-D4
ctgatccaggtgtacgagggtgagcgcgcgaggaccaaggacaacaacctcctcggcaagttcgagctctccggcatccctcctgctccccgcggcgtgccccagatcacggttaccttcgacatcgatgccaacggcatcctcaacgtctctgccgaggacaagaccaccggccagaagaacaagatcacgatcaccaacgacaagggccggcttagcaaggaggagatcgagaagatggtgcaggaggctgagaagtacaaggcagaggacgaggaggtcaagaagaaggtggatgccaagaacgcgctcgagaattatgcctacaacatgaggaacaccatcaaggatgacaagatcgcctncaaagctcccgctgangacaagaagaagatcga

SEQ ID NO: 9221 - DNA, 416 bp, Zea mays
  unsure at all n locations
  Clone ID: LIB3150-034-Q1-N1-D6
gtcgccagaaaaatgttggataggcttgaagaattaagcaagaaatcagatgggaaggtcttggcaatcgatttgcggaccgacttgctggaaaagaagagttgcaagacaaccagtggcgctcgaagaaaaggctgctataaccctaatgaggtcctggctttcctgaggagtgttggcttctctgctaatactaccatctacttgacagagacatggtggcacaaaggcctgaatgatctgaaggaggaatttccaaatacttataccaaggatgacattatgccagctgagaacaaaggtgaattcctgaaatccagcaatgcagacctagcaagcgctttggaccttgagatctgctcgcagagtgacgtgttcatccctgctgtcgcttgcctgttctacnggcatgtcac

SEQ ID NO: 9222 - DNA, 394 bp, Zea mays
  Clone ID: LIB3150-034-Q1-N1-D7
ccggttgcgatccgccgccatcggttgaagcagcgaaccctagccgccctcagcgacggattgcagatctcccagccatgacgttcaagcggaggaacggcggacgcaacaagcacgggcgcggccacgtcaagtacatacgctgctccaactgcgccaagtgctgtccaaaggataaggctatcaagcggttcttggtgaggaacattgttgagcaggctgctgtgagggacgtgcaggaggcttgtgtgcatgatggatatgttcttcccaaattgtacgcaaaggttcatcactgtgtctcatgcgcaatccatgcacacattgttcgtgtccgctctcgtgagaacaggaggaaccgtgagccctcgcagcgcttcaggcgccgggatga

SEQ ID NO: 9223 - DNA, 296 bp, Zea mays
  Clone ID: LIB3150-034-Q1-N1-D9
tcggtggcattggattggaccgcactagaagacaggttcttcatggagaaagaggacatgatcatagctcgtgcatggcgaaagttccttgagaagacgagactgcaaaagctgttctcaagaaagaaaaatagtatgccaaagatagattccaagaagaatgatgatttagctagtgaaatagaagacaaggagctttatgttgaacgcatacgtcttgaaacaatggatttaagctttgggaatttatttggcaaggtcacaattcaagagcctacatttgaagaggtgattgt

SEQ ID NO: 9224 - DNA, 360 bp, Zea mays
  Clone ID: LIB3150-034-Q1-N1-E1
cacccggttccgcgtgcctttccccacctactctcgcggctctcgccagccagtctagggtttcggtcccggcgtgcttatccgcccccgccggccatgtcgaagcaaggagggaaggccaagccgctgaaggcgcccaaggccgacaagaaggagtacgacgagacggatcttgcatatctgcagaagaagaaagatgaggaaaaagcactgaaggagcttaaggccaaggcacagaagggcgcgattgggggctcgggtctgaagaaaagtggaaagaaatgagactggtcacccgtctccaatacctagaggatgataaggcagctgtctatctgtgttgcgcttcactaagtgtga

SEQ ID NO: 9225 - DNA, 294 bp, Zea mays
  Clone ID: LIB3150-034-Q1-N1-E10
caacaaaaattggtatttagcttaaaggggaaagagctagaccggtctgttactctatatcagtcaatcctgcaagatcatatcaatgcagggtctgagataattctggacatgcagttttggcgcagtgtacatgacataactttcagagctgctaatccagaagcaaatagaacagctgttaacccagaagcaaatgattctcctatgcattcctctactgcaatgtcatcaataaatgagaatacaactgggtttacatggcagatagctccattgctttctagtatgttg

SEQ ID NO: 9226 - DNA, 352 bp, Zea mays
  Clone ID: LIB3150-034-Q1-N1-E11
actgcacagccaattccccatcgcgataggcccgttcgcacgaatcactgctctgctttcaccccccgcatcgaacctcacccccgatctgatcgaatcgaaagctgcggcggcgatgggcggtgaccatggcggtgggcacgccggcggcgacttccgccagaaggtatggagcatgacgggcggcccctactgccgccccgtccactggcgccgtaacaccgccatcgccatgttcggcgtcttcctcatctgcatccccatcgctatgaagtccgcagagctcgagcaacgcccgcatcacccagtccggccaatcccatctcaactgtggtgcaaaaactttggtaag

SEQ ID NO: 9227 - DNA, 333 bp, Zea mays
  Clone ID: LIB3150-034-Q1-N1-E12
caaagaagcctgctgctaaacccttggctgcagttgcgaaaaatggttcgaagacagtcaagcaagagagcagcagcgatgaggacagttctgaagatgagtcggatgacgacagtgatgatgaacctgcaaagaaggctgctgctaaacccttgggtgccgttgctaaaaatggtttgaagaaaggcaagcaagaaagcagcagcgatgggagcagttctgatgatgagtcagacgatgatgttaaacctgctgccccactaaagaaaacatctgtggctgttgcacaaaagaaaaaaggagattcttctgagagtgactctgatgatgact

SEQ ID NO: 9228 - DNA, 309 bp, Zea mays
  unsure at all n locations
  Clone ID: LIB3150-034-Q1-N1-E2
tcgntttttttttttttttttttttagagtgaactgatttgattaaaagtttcacggcgacacatagacctgacaaaatatgagccattaatgctcaaccaaccactaggatacacccaacatagtttcagacattccgatggaaaaaaatttattctcggaagcacttttctccgggggggaagaagacaactcgctcgtatcaccagaccttgagttcttcatcttagttggtgctgttcatgtggcggatcaggtcgaccacgcgggtgctgtatccccactcgttgtcgtaccaggacacgagct

SEQ ID NO: 9229 - DNA, 416 bp, Zea mays
  Clone ID: LIB3150-034-Q1-N1-E4
tcgctggtgctgataaaattattgaagcataccggtgggtgcaagctaacaaaaagaatctcaggcaagaagtttacgggcctgttctccttgaggtaaatgttcaggataagcttcatgccacttacttggaagaccatgttccaaactatttatggaagtcattcatcactctggatgcttcggaccgtgactacattgctagagaaatgaagcagtatggcattcctgttctgaactacttagtgcgcgaaggcacaaggagacggccattaaacatcactccagagatggagcaacttgggatctactcccgacttgatcaagtatttcaagcccctgacactgtgaaagatgttttgattagtcaggcgggtttggatgattcgtacataggtacagatgaaactcatcgc

SEQ ID NO: 9230 - DNA, 376 bp, Zea mays
  Clone ID: LIB3150-034-Q1-N1-E5
tcgcgccaccatcgtctaggttaggcgggggttcgaccagctagcggaaatggtggccttcaggttccatcagtaccaggtggtggggcgcgcgctgccgacgcccggcgatgagcaccccaagatctaccgcatgaagctctgggccaccaacgaggtccgcgccaagagcaagttctggtacttcttgaggaagttgaagaaggttaagaagagcaacggccaggtcctggccatcaacgagatctttgagcgtaacccgacgacaatcaagaactactgcatctggctgcgctaccagaacagaaccggataccacaacatgtacaatgagtaccgcgacacgacccttaatggcgctgtggagcacatgtac

SEQ ID NO: 9231 - DNA, 419 bp, Zea mays
  Clone ID: LIB3150-034-Q1-N1-E7
gttggtctggatcagttcatcacgaagggcgctacactcactaatgagaaggaggctgatgcatgcccaatcagggcaatgaagttctctgtctcccctgttgtgcgtgttgctgttcagtgcaaggttgcttccgaccttcccaagctagtagaaggtttgaagcgtctggcgaagtccgatcctatggttctgtgtacaatggaagaatctggtgagcatatcattgctggagctggtgagcttcatcttgagatttgcctgaaggatctgcaagaggacttcatgggaggtgctgaaattattgtttctcctcctgttgtgtccttccgcgaaaccgatcttgagaagtcctgccgcactgtcatgagcaagtcacctaacaagcacaaccgtctgtacatggaagcgcgccccct

SEQ ID NO: 9232 - DNA, 419 bp, Zea mays
  unsure at all n locations
  Clone ID: LIB3150-034-Q1-N1-F1
acaaagctcaacagtgagccggatcagcccggcagctaaattactgatcaaggaacatggactggatacatcatcactgagagcatcaggcccccgtggcacccttctgaaaggggatgttctggcagcattgaagtcaggtatcaattcaagttcaaccaaagaaaagaagtctccagctcaaccttcgtctcagccaactcgagattcccaatctcaagcatcctctatttcacaaaaggatgatacatatgaagatattccgaatagtcagatacgcaaggtcattgccaaaaggttgctcgaatcaaaacagacgactccacatttgtatctatccaaagatgtngtgctggatccctngctcgctttcaggaatgaactaaaagagctacatggcattaaagtttcagtaaatg

SEQ ID NO: 9233 - DNA, 365 bp, Zea mays
  Clone ID: LIB3150-034-Q1-N1-F10
ccctgcggtctcccgagtcccgaaggagtccccttccaaaaccctcgccgcgccgcagccacccttgcttccgcacgctatcgcccgggaccagccatctatggcggcgtccctgctcctccgcgccgtgcgccgaaaggagcttgcgtcccctctcggatccctgggtgccagcatacagtcaacatgtgttgccaacatatgctcaaaatggggaaggtttgcaagacctttcagtgcaaaagctgctggaaatgaggttattgggattgatttggggacaacgaactcatgtgtttctggtatggagggaaagaaccccaaagttattgagaatgctggaggtgcgagaacaacaccatctg

SEQ ID NO: 9234 - DNA, 375 bp, Zea mays
  Clone ID: LIB3150-034-Q1-N1-F11
cgtcaatgtaaatagcccgttgcttgatctggaattctctcagtcacaagtcaatgttcatggtaaagtctcatgcaaagagcaatgcagccagaacattctggtctcacttgttagattggctggcggagttgaacaggaaaagaagacaactacgttggaacaagataatgttaattttgtgtttaagaaagtatttcctggaaaatatcgtgtagaggtgaagaattctttacccgaaggcttagctaaagatgattggtgctgggaccagagtatctagaatatagatgttggtactgatgatgtgagagacattgtgtttgtacataaaggctattggattgagctagtttcaactcatgatactaatgc

SEQ ID NO: 9235 - DNA, 333 bp, Zea mays
  Clone ID: LIB3150-034-Q1-N1-F12
cgcacgcagcccccggcgtgcgctcgcctatctccaatcatccaccgcgccgccgcagaggcctcgtcctcaccttccccgtaggaagccgaagtacagccagcagcgtcgccatcagcaccgatcatggccgactacgagcaggagcaggatatggaggtggaggcactgcaggccatcctcatggacgacatcaaggagatcgacccgagtgagagtgggatcgccaccaccgcccggtgcttccagatcctactctctcctcaagatgatgattttgatgagtcagcttatgtcccagttcaactggccctgatttttgcgcacactgag

SEQ ID NO: 9236 - DNA, 417 bp, Zea mays
  Clone ID: LIB3150-034-Q1-N1-F2
acacaatagaccactgatttcacaatgaaaagggagacaatgccttcatggctagaactgttgcttgcaacacaattctttacgacttgtgctaaccatcttcttgctagtcgcaatgaatgtaacctattttgcacccagtgtgagaccaaaccagctgctttctgtaactattgtcgttcaagtgatcattccacccaccgtgtaatccagataaggcgttcatcgtaccatgacgttgtgagggtgtccgagattgaggatatccttgatgtcagcgatgtgcaaacttatgtaatcaatagtgcaaggattgtattcctgaatgagcggccacaactgcgtgcttctagtgtccccatttgtaaggcacccacatcatcaacacatagctgtgagacatgtagccgtgtgcta

SEQ ID NO: 9237 - DNA, 371 bp, Zea mays
  Clone ID: LIB3150-034-Q1-N1-F3
tcgccgggatcgagaaggggaacgagcgcgtgcggtgctcgccactcctcgccgatggcgtcctccactctgccagcctcccccttccgtatgtctcttcccggactacgagccccggaccctgctaaggttaagcacgtatccgttcgagcccccgctcgccgtcttcccgttgcagcctccgcggcaccatcatgcgccgcggcggcggcggcggcggcgagggagcgcacgcgtttcctggagcgctacgggctcaacccaaacgacttcgaggaagatgcagaggagaatccgagggaagagagaaaggacaggcggaagcggcggcagtcggcgagaggggagcaaactgcggaagcggcagtgac

SEQ ID NO: 9238 - DNA, 402 bp, Zea mays
  Clone ID: LIB3150-034-Q1-N1-F4
ccaggacgtatatttttactgaaatgatgctgggaagagcaaaaaaacagaagtacagacgcagcaaagaagattacaattattctctagcgggctcctcgtgaggtctcctccccatcgccacgcccacgcgccgcacaccgcccgcccgctcgccccgcctccgatcccaaatcaatcggcctgaccctagcccgccgccggccgcccacgcccgcccgcctcggctcgtctcaaatcgggcgccccaggggagcgaggcctcgatcgcggcggaccccgatgccccgcattccggcccctccggcgacgtcggcggcagcggaggcatgatccggtggggactcggcggacctgccagccatggacgccaccgcacgcccggccatcgtcatcgacaac

SEQ ID NO: 9239 - DNA, 340 bp, Zea mays
  Clone ID: LIB3150-034-Q1-N1-F5
gccgccgcgtctggctcggcaccgtggacaccgccgaggaggccgccgcggcctacgtcgccgcgcgcctccgcatccgcgggcccaaggcgtccgggagcaacctgctcccgtccggtgctcacgcgggctcgctccctccgcccgcgcaccggccgcccctgccccctcgacccccgccaccgtctcagcgggagaagcagcagtgcccgccaccgcctctgcttccgccgaagaagcagcagtacccgccaccgtctctgctcccgccgaagaagcagctgtacccgccaccgcttcccctcccgccgaagaagcagcagcaccatcacccgccacc

SEQ ID NO: 9240 - DNA, 414 bp, Zea mays
  Clone ID: LIB3150-034-Q1-N1-F6
tgaagccaaagatcttgaggggaagcagcatacaaacccctatgcaaaaataattttcaaaggcgaagagaagaaaacgagggtcatcaagaagaatagggatccacgatgggaggatggattcgagtttgtgtgtgaggagcctcctgtaaatgataaactacatgttgaagtcctaagtaaagccccgaagaaagggctgatatatggcaaggaaactttgggctacattgatgtcaaccttgcagacgtgatcagtaacaagagaattaatgagaagtaccatctcatagactcaaaaaatggtcagatccaaattgagttgcagtggagaacttcctagacagaaagaacacgaatacctgaatgtggtatacatatgaatattcttgtgctgagtttgcggatacctgt

SEQ ID NO: 9241 - DNA, 422 bp, Zea mays
  Clone ID: LIB3150-034-Q1-N1-F7
gtctgtctctctcggccccctctcgcggtccgacgactggtgggccgctgccggcgccgccgccttaacccaggtgttgaggctttcgttggtctcctcgccgtcgacgagcacccaccaggatgaattctaaacgtaggaggagtcatagcccagttgaatacaaggaaggccgtgacaaagattatgggacttctggaaagaaggataagtcaagagatctagatgacacatgtgatgctagaagaggtcatgaaaccgataggcactctgataagcattcctttggaacatcacgtgaatccaagaagcatgatgactatcggaggtaccatgataagtatggtgatgattatggtaggagccatccaagagcctctcggtcagaccgggaatcaagggctgatactttatatgatcgc

SEQ ID NO: 9242 - DNA, 387 bp, Zea mays
  Clone ID: LIB3150-034-Q1-N1-F8
cgccgactgagcgaggtcttcatctgggcttcaccagcgacgattatccactaggtaggggatcatccgatcatgtcgagcgcggcggtgaacgggctgtccggcgccggcggcggcatcatcgcgcagatcatcacctaccctctccaaaccgtgaacacccggcagcagacggagaggtcaacgaagaagaggaaggccaggagcggcgccagcgccaccccagcctccaccatgtaccagatgctccagtgactgcagctgattcaaaccgaaggatggagtgggttgtacagcggcctcaagccctctctcatcggcactgccgcgtcgcagggaatctattactacttctaccagatcctcaagaacaaggtggaagatata

SEQ ID NO: 9243 - DNA, 364 bp, Zea mays
  Clone ID: LIB3150-034-Q1-N1-F9
gctcccgctcccagctcgtgttccgctgcttgcagccgtcgccgcgaagcgctccagagaacttccgtcaacatggggaagacacgtggtatgggagccgggcgcaagctcaagacccaccgcaggaaccagcggtgggctgacaaggcatacaagaagagccatttgggcaatgagtggaagaaacccttcgctgggtcatcccatgccaagggcattgtcctggagaagattggtattgaggccaagcagcccaactccgctatccgtaagtgtgctcgtgttcagcttgttaagaatggcaagaagattgctgccttcgtgccaaatgacggttggttgaactacattgaggaaaatgatg

SEQ ID NO: 9244 - DNA, 367 bp, Zea mays
  Clone ID: LIB3150-034-Q1-N1-G1
gcccgcaacccgccgggcgacgagcggcggagcccgcagccaacatggaccggtaccatagggtggagcgggcgcggaaccagtcgaccatcgaagagaacgagatccgcatcaccgcgcagggcctcatccgcaactatgtctcatatgctaccttcctcctccaggaaaggagaattaaagagattgttttgaaggccatgggacaggcaatcagtaagtctgttgctgttgcagagattataagaaagggcccctgagttacaccaggataccaacatcagctctgtcagcatcactgatgtctgggaacccatagaagaaggacttgtccccatggagatgactcggcattgttctatgatat

SEQ ID NO: 9245 - DNA, 339 bp, Zea mays
  Clone ID: LIB3150-034-Q1-N1-G12
cctggccaccatccatcctagtttgctgcgtgccgctgcatctcatccccatggccacgatcaagatcgggatcaatgggttcggcaggatcggaaggctggcggccatggtggccctgcatagtgacgatgtcgagctcgtcgccgtgaacgaccccttcatcagcaccgactacatgacctacatgttcaagtacgacactgcgcacggacagtggaagcaccatgaagtcaatgtgaatgactccaaaacccttctctttggtgagaaagacgttgctgtgcttggctgcacgaaccctgatgagatcccgtggggttcagttggtgctgaatatg

SEQ ID NO: 9246 - DNA, 398 bp, Zea mays
  unsure at all n locations
  Clone ID: LIB3150-034-Q1-N1-G2
accgtgggttcgtccagccttccggccttgcgccccggtggtcatcacatctcccccaattcgccgctccctccgacctcgccgtactcctctcgctccgggttaatcgctgctgtcttctgcagttgaagtagccttttcatctgctcgccgcagttcgtccgttgcccatggcggatgaggaggtaactgatccaaaggcgttcctagaggaacgttcaaaggctaagtgtgtgtcgcagtggtatgaatatcagaaatgtgttaagaggattgagaatgacgagactgggcacaaacactgtaccggccagtactttgattactggaaatgtgttgacaagaatgttgcagaaaaactctttgagatngtaaaatgacaagaaaaagtttcccta

SEQ ID NO: 9247 - DNA, 256 bp, Zea mays
  Clone ID: LIB3150-034-Q1-N1-G3
caaaaatacgatccaactaagatcaagcatcttgacatttcctgctacacttaacacatcgttagtttcattcctctcctccccatcgttgtaaggtcatgctgtgaagggcgcgatggcgtggaatggatggtggtggtagcaaagatgctcagaagatgacatttcgttagttatttaattaagtcttccaaggcgtcaatcttcctgacatgtatctttattcgaaaaaataaactggattatttctggtttc

SEQ ID NO: 9248 - DNA, 385 bp, Zea mays
  unsure at all n locations
  Clone ID: LIB3150-034-Q1-N1-G4
aaagcctccgacccccttcctctctcggtccgccgccgctgcgcacgcagggaacaagcgacatgggcgtctacacctttgtgtgccgcaacaacggcggcgagtggaccgccaagcagcactccggcgagatcgaggcttccgccgctaccccatacgagctgcagcgccgcctcgtcgctgccgcctccgcggccgactctgcctacggcgtccagtcgtccttctccatggtcacccccagctccgccgtgttccaggtgatcgtcggtgctgtcggtggtggtgcaatgatggtgagcggaggtggcggcggcggtgctgctgcatctggtggtgctgctgccgaggctcccaaggaggagaagaaggangaggagaagga

SEQ ID NO: 9249 - DNA, 404 bp, Zea mays
  Clone ID: LIB3150-034-Q1-N1-G5
cttcctatatttggcctagggggcaatgggaagactaccttcacccagcacctatacaatcacacagagtttgaaaaacatttcactgttagggtctggatatgtgtatcgactaattttgatgtgcttaggctcaccaaagagatcctgagctgcctacccgcaactgaaaatgcaggagataaaatagcaaatgacacaaccaactttgacctgcttcagaaatccatcgcagagaggttgaaatccaaaaggtttctgattgtcttggatgacatatgggaatgcagcaataatgaggagtgggagaaactagtagctccattcaaaaagaatgataccactggcaacgtgattctggtcacaacccgattcagaaaattgcagatttggtgaaaaaagaa

SEQ ID NO: 9250 - DNA, 411 bp, Zea mays
  unsure at all n locations
  Clone ID: LIB3150-034-Q1-N1-G6
gtgtgcgcagcttagatcgagtccaagaggttccccatgagggacctatgtgcgatctcttatggtcagatccagacgaccgatgtggttggggcatctcccctcgcggtgctggctacactttcgggcaggacatatcagagcagtttaatcacacaaacaatctcaaactcgtagctcgggctcatcaattagttatggagggatataactgggctcatgagcaaaaggttgtcaccatattcagtgctccaaattactgctatcgatgcggcaatatggcatccattttggaagttgacgactgcaacagccacacattcatccagtttgaaccagcccctaggagaggtgagccagatgtgacgcgaagaacaccggattatttcctttgagctgtcngatgtaccg

SEQ ID NO: 9251 - DNA, 320 bp, Zea mays
  Clone ID: LIB3150-034-Q1-N1-G7
gtctgctcatctcacatcgagtccggtgcgttctccataagggacctatgctccatcttttatggtcagatccacacgaccgctgtggttgatgcatcttccctcgtcttgctggctacactttcctgcaccacatatcacaactgcttaaacacacacacaatctcatactggtagctccgtctcatcaattacatatctaagcataagactcagctcatcagcaaaatgttctcaccatattctatgctccaaaatactattctcgatcgccatatatggcatacattttagaagttgacaagtgcgacaatcacaca

SEQ ID NO: 9252 - DNA, 330 bp, Zea mays
  Clone ID: LIB3150-034-Q1-N1-G8
tcgaagggccacagcacatatagagagctggtgccagtggacgcgagggagcgcctccgtctcagatccaacccccaccgatgcgagctccggcgatgctccgttgggccgcggcggcgctcgcggcgctactcgccgtctcaccggccgccgagttttacctacccggcgtggcgcccatcgactttcataagacagatccacttttggtgaacgtgaataagctgacatgcacgaagacgcatcttccctactcatattactctcttcctttctgtaaaccaaacacgatagttgacagtgcagagaatcttgcagaagttttgcgtg

SEQ ID NO: 9253 - DNA, 327 bp, Zea mays
  Clone ID: LIB3150-034-Q1-N1-G9
aatacagttgccgtggaagggaggagagctgtttgtcacaatgttgagtccataatcaagtcattgacaaaatcagcaggcaggtatgaagctcggctgtggctctgtgccactgtctcgttggtccattcgctcagtgactgtggccagagggacctgtttcttgatctcttagagaggaagaattccaggcgtgatgtcgctgctcgcttgctgcgtatgattttcgataagaaacccaaaacggttgggtctattctagcaagaaaaggccatatactggaagatttcttccgaggaaatccaaacaggataatgcagtggttt

SEQ ID NO: 9254 - DNA, 372 bp, Zea mays
  Clone ID: LIB3150-034-Q1-N1-H1
gtgaccatcatcatcagtaactaattactttagattagaaccaaagggaagcgaagcaagaatcgagtcgagaagatggtgcagttcggcaagtggctgaggaggcagatcgagcggagcctcccggagtggcaggaccagttcctgcgctacaaggagctgaagcggtgcgtcaaggcccgctccggcggctgcccgccgttgcccgcggaggaggccgagttcgtggccgagatcgacgcggagaccgagaagatcaacgccttcttcctggaccaggaggaggagttcatcatccgccaccgggagctgcagaaccacatcgagcgcgcgctgggccgcggcaggcccaggccggcgccggcgctgcac

SEQ ID NO: 9255 - DNA, 336 bp, Zea mays
  Clone ID: LIB3150-034-Q1-N1-H10
ctcgggtcaaaccctaagcagggagttgatttatccgctgcagccatgagtaagttgcagtctgagtctgtcaaggatgccatctcccagattgttggggatgccaaggagaagaataggaagttcactgagactgtggaacttcagattggtctgaagaattatgatccacagaaggacaagcgtttcagtggctctgttaagttgccccatatccctcgtcccaagatgaaggtgtgcatgcttggtgatgcccatcatgttgaggaggccgagaagatgggacttgactacatggatgttgaggctctcaagaaaatgaacaagaacaagaag

SEQ ID NO: 9256 - DNA, 330 bp, Zea mays
  Clone ID: LIB3150-034-Q1-N1-H12
tcaggctgatggtcagatgcccggtgacaagaccattgggggtggtgatgatgctttcaacaccttcttcagtgagactggtgctgggaagcacgtccctcgtgctgtttttgttgaccttgaaccaactgtcatcgatgaggtgaggactggcacctaccgccagctcttccaccctgagcagcttatcagtggcaaggaggatgcagccaacaacttcgcccgtggtcactacaccattggcaaggagattgttgacctgtgccttgatcgcatcaagaagcttgccgacaactgcactggtctccagggcttcctcgtcttcaacgc

SEQ ID NO: 9257 - DNA, 325 bp, Zea mays
  Clone ID: LIB3150-034-Q1-N1-H2
tcggtcaccatcatcatcagtaactaattgctggggattacaaccaaagggatgcgaagcatgaatcgagtcgagaagatggtgcaggtcggcacgtggctgaggaggcaaatcgagcggagcctcccggagtggcaggaccagttcctgcgctacaaggagctgaagcggtgcgtcaaggcccgctccggcggctgcccgactttgcccgcggaggaggccgagttcgtggccgagatcgacgcggagaccgataagatcaacgccttttttctgtaccaggaggaggagttcatcattcgtcaccgggagctgcagaaccaca

SEQ ID NO: 9258 - DNA, 369 bp, Zea mays
  Clone ID: LIB3150-034-Q1-N1-H4
gggtacacggtcttgtggtaccagatgttcctttggaagagacagatgtcttgaggagtgaggctgccaaaaacaacctagagctggtgctattgacaacaccgactacaccaaatgaaagaatggagaaaattgcacaggcttcagaaggatttatttatcttgtaagcactgttggagttactggtacacgtgcaaatgtaagcggcaaggtgcaatctcttcttcaggatatcaagaaggtgacagaaaaacccgtggctgttggctttggtgtgtccgactccagagcatgtccggcagattgcaggatggggcgcagatggtgtgattatcggtagcgcagtgatgaagacgttggaggaagct

SEQ ID NO: 9259 - DNA, 413 bp, Zea mays
  Clone ID: LIB3150-034-Q1-N1-H5
cggacgcgtggggccgcatacgggacgtgtcgtctcttcctttggatccggcagccggtgctcctcctccggatccggtggtcaactccatcacccccagctccacctcccttagtccccctccatccgccctcacccaccgcttctatatcgccacctctctcgttgtacaagacactgaggatctggccatcatcatccgtcgcccctcactcgatttcccatctgccgctccctcctggtctctgagccgctgatcgggtctccgacgcacggaagtgaagccgttccgccgtgaagcagcgccaccccttgccatccgcccgaccgctgggaagcagggcccacgtcttcaagcttcctacaggaagagcctgcgcccctcccaaaggacaaagatattatgatggatg

SEQ ID NO: 9260 - DNA, 406 bp, Zea mays
  Clone ID: LIB3150-034-Q1-N1-H6
ctcaccggcgtcgccatcgtaatcgcgttggacagcggcaccagaacctctgcctccgcagggtgcttgctggtatcattacaatctggtagttttagtggttgggcttgacttcctactattcagaaacacagtaccgagaagtctttaggtggggtcaaagatggtgtcgctgaagttgcaaaagcgccttgccgcgagctacctcaagtgtgggaaaggcaaggtgtggcttgacccaaatgaagttagtgagatctccatggcaaactcccgccagaatatccggaagttggttaaggatgggtttatcatcaagaagcctcataagatccactctagatcccgtgcaagaagggcacatgacgccaagcaaaagggacgccactcaggatatggtaagcgt

SEQ ID NO: 9261 - DNA, 220 bp, Zea mays
  Clone ID: LIB3150-034-Q1-N1-H7
ctcaacggcttctccatagtcggggcggggttcagtgacgccagaacctctgtctccctaccgagcttgctgcacattattacaatagtgcgcctaccgacttcgaccttcaataccaactctgtataagaatgttcccgacaagactatgaggggccttaaagatggcgacactagataagaaaaagaaccttaaactagagctacctctccgtaccaa

SEQ ID NO: 9262 - DNA, 399 bp, Zea mays
  Clone ID: LIB3150-034-Q1-N1-H8
tcgcccaagtcaacaagcaataccgggtggggttgtgatccgaagcctttcttccaacgcaaaaagaaccccacccgacgtaccgtgagccggcgatggcgacggtggcgatggacatcttgaagcccacgccggcagcgtccggtgacgaggctacggcagcggcgaatgggatgatgcggagcgggggctaggggctgctgaatactacctgcagcacatgcatgacctgcagcttcaagatacggcataagacccataaccttaaccgactctaggcccaacacaacgacctcaactttccagttagaatgctcatggaagaattgtagttgcttcaagagcctgtctcatatgttggtgaggtggtgaacgctatggggaaataaaggttttggt

SEQ ID NO: 9263 - DNA, 289 bp, Zea mays
  Clone ID: LIB3150-034-Q1-N1-H9
gtgtttctcaagcaggtcaagtccgggcgggtccttatctctgggcctttcatgatcaatggtgttccgatccgccatgtgaaccatacctatgtcattgctacatcaaccaatgttgacatctctggtgttgatgtcgccaactttgacgacaagtacttcgcctgggtgaagaagcataaggtgaagaagaccgagggcgagctttctgagacagactaagaagcatccaactcactgcctgacttcaagaatgatgaccagaatgctgtggattctgctctgatca

SEQ ID NO: 9264 - DNA, 409 bp, Zea mays
  Clone ID: LIB3150-035-Q1-N1-A10
attttgcagttgtgttcaaattcggggctggtttgactatcgtaaccatatctgtattgtaagtacattgttagattgtggcaattatgaactgacccaaaaagataaccatgtggtgcttaaacattggtgaatttggatcaatggtgagcaggtctttgagaggcttggaccaagcttatatgattttctgcgggaaaacagttaccgctcattcccaattgccctagttcgggagattgccaaacaactgttggaatgtatagcatgtgtgtgcacagttcttcctattatcgctcctgcactataatgcatatatattagttttttttgcaatatatgtgcagcattgtagcctatcattaatccatattactcatgcttaaggaatatctaacatcatgggatg

SEQ ID NO: 9265 - DNA, 163 bp, Zea mays
  Clone ID: LIB3150-035-Q1-N1-A11
agacatcctacattgcgacaattatgaactgacccaaaaagataaccatgtggtgcttaaacattgctgaatttggatcaatggtgagcacgtctttgaaaagcttggaccaagcttatatgattttctgcgggaaaacaggtaccgctcattcccaattgcc

SEQ ID NO: 9266 - DNA, 406 bp, Zea mays
  unsure at all n locations
  Clone ID: LIB3150-035-Q1-N1-A12
ctcaagatgaacggtgactactacgcggtcctttttaaattcaagacggcacctgaaanaaaggacgctgctgagaacaccatggtggcatacaaggctgcccaggacattgctttggctgagcttgctccaactcaccctattaggcttggactggcactcaacttctcagtgttctactatgagattctcaactcacccgatcgcgcctgcagtcttgcaaagcaggcttttgacgaggccatctcggaactggacaccctgagcgaggagtcctacaaggacagcactttgatcatgcagctccttcgtgataacttgaccctatggacttctgacatctcggaggaccctgcggaagagatcagggaggcgcccaagcacgactcgagcgaagggcagtaaa

SEQ ID NO: 9267 - DNA, 240 bp, Zea mays
  unsure at all n locations
  Clone ID: LIB3150-035-Q1-N1-A2
tttttcaccggccaactgtcaagcactccttcggtgctttcccatctgcgccccccgatccctccggacccgcgagcgaggccgtcgccggcgcgcgcgagatttgagctgaggccatggagtcaccgttccgggccgacgtggtcaacgacaaggcggcgctggtcaccggcggaggatccggcatctgctttgagatcngccgccagctcgcgcgccacggcgcgcaagtcgccatca

SEQ ID NO: 9268 - DNA, 424 bp, Zea mays
  Clone ID: LIB3150-035-Q1-N1-A3
ttaaaatccaaccaacccttccggaaacctttcgttaaccgtcccaatcgcgggtcgtttctcctctccttcccactctcccacccgtcctccattgctcccttcctctctctcgcggagtcgctgcgatctagccaccgagcacgagcgtcctactcgccgcggaccttgctcatggccgcggggtcgatccgggtcaccatggaggtgggcgccgacggcgtcgcgctcatcaccatcgccaacccgcccgtcaacgcgctccaccccatcatcatcgcggggctcaaagacaagtacgcggaagccttgcgccgtgacgacgttaaagcaatcgtgctcactggtgctggaagcaagttctgtggaggatttgatatcaacgttttcacaaaggttcatcagactggggatgtatcactta

SEQ ID NO: 9269 - DNA, 335 bp, Zea mays
  unsure at all n locations
  Clone ID: LIB3150-035-Q1-N1-A6
tcgctcatcttcatctcccaggttttccccgcaatcacccccaggtcttgctctcgcgagttgcggtctcgcgcccccctccgccgaccgccgcctcctcacaaccgcggaagctgcttccctctccattggacgcggccagcttccatctctcggtcacctccctctacatcccacggccgctaccacctttcctctacctcacacggccgccggcctctccaaggtctgcacacgcattcagcgacgcatttgcctatatcagcactgtggtcataactctagtagagaaaggagaagatgcaggcatctanggcaaggcttttcaaggagta

SEQ ID NO: 9270 - DNA, 362 bp, Zea mays
  Clone ID: LIB3150-035-Q1-N1-A7
tcgcgacttcgacctcggcctcaacctgcgcgagtacgagatgtggctcggcgacgacagcatcgcctccgccgagctcacacagaccgccaagatcgagaagcaggggatcaccaggatgcaggtgcccttcagcttcaggcccaaggacttcggatccgctgtctgggacatgatcaggggaaggggcacgggatacaccatcaagggaaagatcgatgtcgacactcccttcggcaacatgaagctgcccataagcaaagaaggtggaaccacccgcctcaagaaggaggacgacgatgacgacgacgacaactgaagtgaggactgctggggcgctgctgttacctttcacgaaacgc

SEQ ID NO: 9271 - DNA, 415 bp, Zea mays
  Clone ID: LIB3150-035-Q1-N1-A8
ataaggcaacgtgatgcattccaaaggcgcaacatgagtactttgcctcattcttggcgcagcagcagaccgtgcttcaagcaactttccaacagcaggggataaacgtagtccttccacaatttcaacctccaccactgccaccaatatggggatcgggtacccaataccttctgcaagtcaaacggccgatgctggaactacatttgtaaatgcaatcttcggtccaccctctggaggcagcggccaaaactccaatcatctgagaggtggcttgtcacactcggatttaagggcaaactcgggcgcatctcaaatgtgtgctaggatcaagtctcacacatatgatggctcatggtacagaaatcaatgtcatatctttattaaataaatcgagtttttttacaaaataact

SEQ ID NO: 9272 - DNA, 394 bp, Zea mays
  unsure at all n locations
  Clone ID: LIB3150-035-Q1-N1-A9
ggagagtgaaaccccaaccctaattgggggttgggtgtatattggatagacgagttangtgggccaagcccattacaagagaaccctaacctaaccctagacaagattctaacatatatatgcactatggttgtgcaccatttcaaaaattttgagaatttctaggtatgtgtttcaagggatttttcatgattgcattgcaccagacagggcggttggcactttgcaccaaatatttggcctatttttcattccttcaatctaaacaagtcacacaactaatgaatggattgctaaaacagttaaacaagcttaggatacaatgaatcttacagtatcattgtcctgttagctactaatacaggcaacacggatacatgtatgatcttacctg

SEQ ID NO: 9273 - DNA, 417 bp, Zea mays
  Clone ID: LIB3150-035-Q1-N1-B11
tcggtttatttatgacaggcatcacctttgcatgcttgctttatttgtgcaaaaacacaatcttgccttcttgttggtggatcaaccggtggccatcgaggaaatggtatggacacagttgatgcacggcttggtgctttgagatcttcagcaagcattctgcaatctccaggaaggctgcccccaagaggacctaatatgaattatggcggaaggtttggaggcggccgtggtggtaggtgtgatgccttggtgggtaaatgtatcaaaattaaatctggaccttataaaggatatcgtggccgtgttaaagaagtgactggtgcacttgtacgtgtagagcttgattcattgatgaagattgtcacagttaaaagagacgatatcgctgacacacctactgttgcaacaccatta

SEQ ID NO: 9274 - DNA, 242 bp, Zea mays
  Clone ID: LIB3150-035-Q1-N1-B2
tcgggtgattcgggctttgcacttcgttcttgggttgaaacctgcaaagatttaaattagattcgacctatacttcctcaactccttgatgaattttttaagctgattaatgaggttgagaatgaggatcttgtgttcaccctaaaaaccattgttgacaaatttggtgaagagatggcaccttatgcattaagtttgtgccagaatttggctgctgctttctggagatgtatggctagttc

SEQ ID NO: 9275 - DNA, 402 bp, Zea mays
  Clone ID: LIB3150-035-Q1-N1-B4
aataacaaaaacctttctggggtaaagtgattaggcctgttgattttaataatgcaagtccacaattttttgatggggctcgttttgaatggggtgccaaggttggcataagcacagggcgtatacatgctcgcgggcctgtgggtgttgaaagtctcttaacaacacgctggatcatgcgaggaagtgggcaagtggtgaatggtgacaagaatgttgcatacacccataagaaccttcccttacaatgaagctgtttttgtgcttgatcaagattcgtgtctatccagtgatgtttgatagtttcatcaagcaagagcataaaatggtgaatcttttcgattgaggactgtgaatccatggatgttcagtcattgtttgtgtagacattgtggtgagctt

SEQ ID NO: 9276 - DNA, 406 bp, Zea mays
  unsure at all n locations
  Clone ID: LIB3150-035-Q1-N1-B5
cctttccttgggccggcggggccggaagaatattttaacttcggcttgaaaacttccccccttcgttggcttaagccatggtgaaatattcgacggagccgtccaaccccaccaagtccgctaaggccatgggccgtgacctacgtgttcacttcaagaacacacgtgagacagcttttgcccttaggaagttgtcactcaccaaggccaaaagttaccttgaggatgtgatcgcccacaagcaggccatcccgttccgcaagtattgtggtggtgttgggcgcactgctcangctaagtctcgccactcaaatggtcagggacgctggcctgtcaagtctgctaaattcattctagaccttctcaagaatgcagagagcaatgctgaggtgaaaggacttgatgt

SEQ ID NO: 9277 - DNA, 378 bp, Zea mays
  Clone ID: LIB3150-035-Q1-N1-B7
cgccgtctgacttctgcgcctacatgggggactctgtcccttgcaagttcaatctcacctccaaccatgggtaaagagaagtcccacatcaacattgtggctattgaccatgtcgactctggcaagtcaaccaccacaggacaccttatctacaagcttggaggcattgacaagcgtgtgatcgaaaggtacgagaacgatgctgctgaaatgaacaaacggtacttcaagtacgcgtgggtgctcgacaagctcaatgcttagcgtgagagaggcattaccattgatatcgatctgtggaagtgtgataccaccacagtactactgcacggacattgatgcccatggacaccgtgactttatcaaagacatgatcac

SEQ ID NO: 9278 - DNA, 410 bp, Zea mays
  Clone ID: LIB3150-035-Q1-N1-B9
gaggtacctaacgaaacgagaacgagggaaacccttcaattccatattttttcattatggaatttttaaaaaaaatccaaatatatcgaaccaatttgatcggtatagattttgatagcattggaaagatttgtttcaaaataacggtgataacattcaagggattaaaatttaaattcgatgacatcgaaggaaagctataaatttcgatgacatttaagggattgatataagtttggatgacagggaatggattttctatagattagccgttcggctggcgtcatgcccagcactgctgctgctgattttgtacagtgtatttgatctacgtattgcagtagcagcggcggctggcttaaagataggcaaagacatttgtatttcatctgggcctgatttgatacttg

SEQ ID NO: 9279 - DNA, 299 bp, Zea mays
  Clone ID: LIB3150-035-Q1-N1-C11
gcaccggagcagggggtaaggggaaggggggagcggccgggcgcaaggtcggcgggccaaggaagaagtcggtgtcgaggtccgtgaaggccggtctccagttccccgtcggccgcatcgggcgctacttgaagaagggccgctacgcgcagcgtgtcggcaccggcgcccccgtctacctcgccgctgtcctcgaatacctcgccgctgaggttctggagctcgccggtaatgctgccagggacaacaagaagactcgcattattccgcgccacgtgcttctggcgatccggaacgac

SEQ ID NO: 9280 - DNA, 299 bp, Zea mays
  Clone ID: LIB3150-035-Q1-N1-C12
ctcacgcttgcgcggtccctcacctggggggccgcacggcagtggagcgacgttgctacgaggggccatgtggatgcgcaatggtcctcatgtgctggcgagtatgttgttctctggtggtgctagtcgtcgatcggctgttgtcgtcctagccgttatagcctgcgtcatgtttgtgtaatccgaccgggctgtgttgggccattggtattgttctccccttttgtaatctccgttctgctttgtgtaatcctacggcccattttgagccattgatctaatgaaatcaggtggtgtca

SEQ ID NO: 9281 - DNA, 272 bp, Zea mays
  Clone ID: LIB3150-035-Q1-N1-C2
gatctattttttatattgcgaaagggggttctgaaagaagtgatatattcttataataaggatatattggaatacttattggattaacactctaaccccttcacaagaacccccggtctttggttggtttccaaatggtatggcaagaaacccctggtttaattgagcccaaaggtatttggaaaaatataaaacggccttggtccctttataaattgttaaggaccggaattggagaacccacaaggggcctttaaagttttggccgccaa

SEQ ID NO: 9282 - DNA, 309 bp, Zea mays
  Clone ID: LIB3150-035-Q1-N1-C3
aaatgccatcatcaaatcattcgccgagtctggcaccataaggtccttttactcggttttcgatgaaatgtgcaataagggcttgaagcccaacgccatcacatttaccactgcgctcgctggtttctacaaagaggagaagttcgatgacatcaagaaggtattagagctcatgaagaagaatggatgtggtgagtccctgccggtatacaatgtgagggtgcaaaagttgtgcaaactcggtcggagtggtgaagcgaaggcattagtggacgagatgatgaagaaaggcacaaagccaaattgggt

SEQ ID NO: 9283 - DNA, 399 bp, Zea mays
  Clone ID: LIB3150-035-Q1-N1-C6
gttaacccagctgatggggggaggcctttccgggctcttttggatgttggcctaatcaggactacaacagggaaccgtgtctttggtgccctcaagggagcattggatggaggcctggatattcctcacagcgagaagaggtttgctggattcaagaaggacgacaagcagttggatgctgatacccaccgcaggtacatctatggtggccatgttgctgactacatgaagaaccttgctgaagaggacccagaaaagtaccagagccacttcagtgcgtacattaagaagggagttgaggctgatgaaatagaagcgctgtacaagaaggtccatgctgccatccgtgccgatccttccattgttaagtcaaccaagcagccaccaaaggagcataag

SEQ ID NO: 9284 - DNA, 326 bp, Zea mays
  unsure at all n locations
  Clone ID: LIB3150-035-Q1-N1-D10
tcgcttcgtcccacttccccccatcgcgtgtcccgacctcacgccgaccccaaccaactagaggaaatggcggcgagcgaggccaaacttgagcaggtgtcccgggcgcgatgacaatcagacgacctgngttattgctcttgtagcgagcgagtggatcaatgggtaactggaggaggtccttgatagcgagtgggttattgctcttgtagcgagcgagtggaacctgaaacccccgcttgtccaccaccattgtgcgacgcctncaactgcgcccgagccatcagcgcggccaccttcaacagcgcccgagccatcaacgcagc

SEQ ID NO: 9285 - DNA, 411 bp, Zea mays
  unsure at all n locations
  Clone ID: LIB3150-035-Q1-N1-D11
cgacgaagaagaaggtgatgaggagggtgaggacgaagacgtcgaagctgaggatgacgagcttgacgcagacgcagaagacaaggagaacatcgaaagcaaggcaggatcttccctgccaaataagaggaaaaggaataacgaggatgatgccaatggatacaagtaaaacggtgaggggaaatagtattttcctgaacttcggaaacgttcctgtgcactgattattatttgtatgcttttcgagtattttttcccgcgcttgtaatagactagagcatagtgttttttaggcgattccatttctgaagtatcgtttggattctggaagttgtctgactctgaaaccatgagtaggatgtgtccccagcacgtatatacgctntgtttggtgtgacttcctgatgctac

SEQ ID NO: 9286 - DNA, 399 bp, Zea mays
  Clone ID: LIB3150-035-Q1-N1-D12
gccgcagacagacctcctgctgtcggggttctaccgctgggccggcgatgccaacacgttcaccggcgatgaatgcatcgagctggtctgctcgccgaacaaccccgacggcgccatccgcgaggccgtcgtgaggtccgccggcgccaaggcgatccatgacctggtgtactactggccacagtacacgcccatcaccggggccgccgcccacgacatcatgctcttcagcgtgtccaagctcaccggccatgccggcacgaggctcgggtgggcgctggtgaaggaccgcgaagtggccaggaatatggtctacttcgtcgaccgcagcaccaccggcgtatgcaaggagtcgcagatgcgcgccaccaagatcctcggggtcgtcttcgacgccta

SEQ ID NO: 9287 - DNA, 103 bp, Zea mays
  Clone ID: LIB3150-035-Q1-N1-D3
tcggcttaattttcttcgaaaccattgtcccgggcccaaccttcccggacttcaagggccaaaacttcaaccttcaaattggtaaagggccccccgggccacc

SEQ ID NO: 9288 - DNA, 378 bp, Zea mays
  Clone ID: LIB3150-035-Q1-N1-D4
aaagtcacccaacccttccggaaaagttcgaagccgtcggaccgtggggctccctttccgactgccgtccccaaggccaatacttttcaagtggcaatggcggaccaggctaaccaacccactgtccttcataagctcggtggccagttccacctgcgctcgatcatctctgaaggtgtacgggcccgtaacatatgcccatctgtctcatcttatgaaaggagatttgccacaaggaactacatgacccagagcctttggggcccttcaatgtctgttagcggtggcatcaatgtcccagtgatgcaaaccccgctctgtgctaatgctcctgctgagaaacgaggcaagaacttcatgattgatttcatgatgggc

SEQ ID NO: 9289 - DNA, 413 bp, Zea mays
  Clone ID: LIB3150-035-Q1-N1-D5
aaacctcgcaacaaccccgtgacaccgagacccatccgccctgcccctcctcgcgctccccaccaaccccgacgagcggcgatgaccggcacggtgtccaagctggcggcgccccggcctgcggcgccaccgctccggccggcgtccctccgcgccgccgcaatcgccttcgccccctccccgcgccgggtccgcgtctccgtcgccgggcgggccaggatcccctccgtcattgcgatggcttctgccaaggaaggaaatggtgcaccgaccaagaaaacctcgcttcacgatctctacgagctccagggcctctccccgtggtatgacaacctctgccgacctgtcaccgacttgctgccccttatcgccagcggtgttcgtggagtcaccagcaaccctacaattttcca

SEQ ID NO: 9290 - DNA, 424 bp, Zea mays
  unsure at all n locations
  Clone ID: LIB3150-035-Q1-N1-D6
tttaaatccaaccaacccttccggccgcttgccttttgcgcctccattggggcctctgtcccttgcaagttcaatctcacctccaaccatgggtaaagagaagtcccacatcaacattgtggttattggccatgtcgactctggcaagtcgaccaccacaggacaccttatctacaagcttggaggcattgacaagcgtgtgatcgagaggttcgagaaggaggctgctgaaatgaacaagcggtccttcaagtacgcgtgggtgctcgacaagctcaaggctgagcgtgagagaggtatcaccattgatatcgctctgtggaagtttgagaccaccaagtactactgcacggtcattgatgcccctggacaccgtgacttcatcaagaacatgatcactggtacctnccangctgactgtgct

SEQ ID NO: 9291 - DNA, 360 bp, Zea mays
  Clone ID: LIB3150-035-Q1-N1-E10
acccaatctcccctacaccagaaaaatgcccagttctttggtccgcgtcagagaggcggcggcgatgtctgggcgcggcaagggcggcaagggtctgggcaagggcggcgcgaagcgccaccggaaggtgctccgcgacaacatccagggcatcaccaagccggcgatccggaagctggctaggaggggtggcgtgaagcgcatctcggggctcatctacgaagagacccgcggcgtgctcaagatctttctcgagaacgtcatccgcgacgccgtcacctacaccgagcacgcgcgccgcaagaccgtgaccgccatggacgtcgtctacgcgctcaagcgccagggacgcaccctcta

SEQ ID NO: 9292 - DNA, 281 bp, Zea mays
  unsure at all n locations
  Clone ID: LIB3150-035-Q1-N1-E11
tcgcgcaaacaacaccgctagccatgtggcgccgcgccttccaccttctnattcgcaccgncgncgncgncgncgncccgacccggcgncttccactttcttacccgccgctacccatcggcccaagagtggcctccgcatcctcattctatgccacaacggtcgcggcgagggcaccgcggacggtaaggaccctgctgcggctcaacgacctgtgtgacaacccgggcgcgcggaagcagaaaacgcgcaaaggacgcgggatcggcttcggcaaaggg

SEQ ID NO: 9293 - DNA, 355 bp, Zea mays
  Clone ID: LIB3150-035-Q1-N1-E12
ctccgtggacgtcttggcgactgctggcgacgggacggaaacggtcgtatcaagggcgtgtcggcgcggcatggccggcgagatcggcgtgatgctcaacataccacagccgttcaccgtccggtgcaggaggctcacccaggcagtgcgcgtcagccaaggccaccttctgcgggtagtccggcctcacaccgccgacgccgacagggtgttctgcaacttcgttcgtcagcaccttggatctcccgtgtggaaagttgcgaggaaagaaacgccactattcggggagatcgcggatgagcttgaagtcggtgccgccaccgcagcgtcaatgtcgaagcggaagagcgagatg

SEQ ID NO: 9294 - DNA, 434 bp, Zea mays
  unsure at all n locations
  Clone ID: LIB3150-035-Q1-N1-E2
aaatttacccaagccttttgttcctaaccatcttttaccacaaattcgtgggccaaagcaaaccgctggccttctaactgccccgatggcccgaacgaaccaaacggcaaggaagtccactgccggcaaggcccctaggaagcagctggccacgaatgcggctcgcaagtctgccccggctaccggcggagtgaagaagccccaccgtttccgccccggcaccgtcgcgctccgggagatccgcangtaccagaagagcacggagctgctgatccgcaagctgccgttccagcgcctggtgcgtgagatcgcccaggatttcaagaccgaccttcgcttccagagctccgccgtcgccgcgctgcaagaggcgtccgaggcctaccttgtcgggctcttcgaggacaccaacctctgcgccattcacgccaagc

SEQ ID NO: 9295 - DNA, 437 bp, Zea mays
  Clone ID: LIB3150-035-Q1-N1-E6
tctttaaaattcaaccaacccgtccgcgaagccagccagggtgccttccagtggtttggcctgaaagaggaccagacaccccttatcctcatccaggatggtgactccaagaagttcttgaaggttcacgttgaggctgaccagatcgtctcttggttgaaggagtactttgacggcaaattgactccgttcaggaagtctgagcctattcctgaggtcaacaatgagcctgttaaggtggttgttgctgacaacgtccacgacttcgtcttcaaatctggcaaaaatgtccttattgaattctatgccccctggtgcggacactgcaagaagctggcgcccatcttggacgaggcagccaccactctccagagcgacgaggaagtcgtgattgctaagatggacgcgactgccaatgacgttcccagtgagtttga

SEQ ID NO: 9296 - DNA, 405 bp, Zea mays
  Clone ID: LIB3150-035-Q1-N1-E8
ggagaagtccctggccgagaggaaggagtccatcgagagccggaagctcatcttcacccgcgccaagcagtacgccgaggagtacgatgcccaggagaaggaactggtacagcttaagcgtgaggcccgtttgaagggtggtttctatgtcagccctgaggcaaagctgctatttgtggtccgcatccgtggtatcaatgccatgcaccctaagaccaggaagatattgcagcttctgcgtttgaggcagatcttcaatggagtgttcctgaaagtcaacaaagcaaccattaacatgcttcgcagggttgaaccttatgttgcatatgggtacccgaacttgaagagtgtcagggagttgatctacaagaggggctacggaaaactgaacaagcagaggatccc

SEQ ID NO: 9297 - DNA, 389 bp, Zea mays
  Clone ID: LIB3150-035-Q1-N1-E9
ctcacgcatagaatggtaaagagacggaaaaatttgctcaaaccctagctggcgaactcgatggcgaaccctcacgtgaccttcgacatgaccgtcggcggcgccatcgcggaccagatcgtcacggacctggacgccaacaacgtgcccaagaccggggcgaacttcaccgcgctgagcaccggcgacaagggcgtgagcgagttccagtagacggtctactacaaggactgcaccttccaccacgtcatgcgcgagtgcatgtactacggccgcgactacaccaccggcaacggaaccatctgcgagtacatgtaccgcgagaagatgctcgaccagaagtacatgcgcaagcacacggtctccatggtgctctccatggccaacac

SEQ ID NO: 9298 - DNA, 310 bp, Zea mays
  Clone ID: LIB3150-035-Q1-N1-F11
ggcggcgcgggcggacaaggagcaggcggaggaggagctgtgccaagccacaatgggtatctcgcgtgactcgatgcacaagcgccgggccaccggtggaaagcagaaggcctggaggaagaagcgaaagtatgagcttggtcgccagccagccaacaccaagttgtcaagcaataagacagtgaggagggtccgtgttcgtggaggtaatgtgaaatggagggctcttcgccttgatactggtaactactcatggggaagtgaagctgttacccgcaagaaccgtattctcgacgtggtctacaatgca

SEQ ID NO: 9299 - DNA, 410 bp, Zea mays
  unsure at all n locations
  Clone ID: LIB3150-035-Q1-N1-F12
gcagagaaattctagctgggggaccggtctgcaattccccctcgctcgccattgtccgtaacctcgaccaagacgcgagccgggaatggagtccgggagctcggtgcgtttcggccaccaggacgtgacggctgctggcggcgtgcacgcaggtaacgccggcgctgcttcttctcatcagcaggtgatcccgggcacgggcatgacgatgcccgccggcatggcctccctcctggtgggccgcctcgggatgcaggcgccgcctggcatggtgctgcccggaggagccctggcggcggcgtccgccgggtacggcggcatcatgtccagcgccctgcgcgccgcctggagcggngctcaacagcagctgccgccccacgcgggcggtggcatcggcgggcatagggcgc

SEQ ID NO: 9300 - DNA, 239 bp, Zea mays
  unsure at all n locations
  Clone ID: LIB3150-035-Q1-N1-F2
taaaaccccaaccgcactaccctttnttttcgcttttttttaaaaaaaatttttcctcctccttattatttttttcttttnnttgnngcaaaattnacnnannnggggnnnnnnaagngaaaacaaaaacaacaaaatccaaaaacctcttaacataatataaaaaaccaaaaaaaacccaaaacaacccttcaaatacacccccaatataaacaaccctaaaaaaaaccaacaaattt

SEQ ID NO: 9301 - DNA, 399 bp, Zea mays
  unsure at all n locations
  Clone ID: LIB3150-035-Q1-N1-F5
cccacgcgtccgcccacgcgtccgcgtgggcttcgtaggcggcgagcacccaccaggagaaggcatggcttcacgcatgacaccttccaagaggccttttcagagaagatcttcagactacgatggccggggcaagtggcagaagacgaagcacccttctccacataaatctcagttcaaaatcgagcctggtgttcccattttccgtattctctgcccggcttcaaaatctggtaatgtgattggcaaaggaggtgccattattgcaaagatacgtcaagaaaccaggatgagaatcanggttgatagggcagcccccggctgtgacgagagagtcatcttcataactgctgccaacaaggatgaagaagctggcagcgagcaaagcggagagaatga

SEQ ID NO: 9302 - DNA, 423 bp, Zea mays
  Clone ID: LIB3150-035-Q1-N1-F6
tcttttaaagtcaaccaacccttccggaccaaccaagccaaacccgttcccacgagaacaaggggaataaccaatggtttcggggggggcaaatccggtcttcggtcgctggcggtgcgcgccgccccgttgaggcgccgcatgtcctcctccgtccacgacgacgcctatgagacggccaagtgggagaagatcacctacgccgggatcgtgacctgcaccctcctggcggcgtacaacctgtccaagggccacccccacttcgatgagccgccggcgtacccctatcttcacatccgcaacaaggagttcccatggggccctgatggcttgtttgagacgaaggaccaccactgagccctgattagcacaccttcaggagctggtgcacgcttaaaagagttatatggttgtttcagtgat

SEQ ID NO: 9303 - DNA, 410 bp, Zea mays
  Clone ID: LIB3150-035-Q1-N1-F7
gagacgaaaccctccttcgaaaccctagcatagccactgccttcccgcacgctaggaaggggaagatatgggcgccgaggaggacgccgctgcacgccgcgagcgtctacgcgccctccgtgccgccaaggacctgctatccacccccgacggcgccccaaccccttccaccgacggagaacaccaaaatggcaaccatgagatggcagaagagccagaattaccaggtcctcaggatgcacctggtgaggctggtaaagaggatggtagccccactgaggaggccgaagaggttgaagatgatggtgagcttccagccatgaagttcacaaactaccttccccatgatgagcaacttcgaggaggcaagctggctccagtgtctcttcccaagtttgaagacccaatta

SEQ ID NO: 9304 - DNA, 399 bp, Zea mays
  unsure at all n locations
  Clone ID: LIB3150-035-Q1-N1-F8
caccgtctcccctcctgatccaatccagtggcgcgcctcctcctcgtggccgtggcaatgggcttgctcttggccttggcgacggcgcangcaccgggcgcgtccccgatgcccgcgcccatggcgcagcctccggcgacctcggcgcctcctcgtcccgcgccatccccgacccagaagaccgctccagtcccggcgcccaatgccacggtacccgcccccgcctcgccgccggcgccgagctctatcgggcagacgccgaccgaagcgccgtncttcccttcgnncgccagcgccgcgtncagcgtcgcctccgccttgtatgtggccgccgctatggcggctgtcgtgtttttcttctgagggtcgtagtcggcgccgatggatccgccgcctatg

SEQ ID NO: 9305 - DNA, 406 bp, Zea mays
  Clone ID: LIB3150-035-Q1-N1-F9
ctctccccacgcagaagtcgtccctgggcctcccatggccgccctagatctccatggttgagctcccccctgcaggatccccttccatggcgcctggtcttctccattagccgagctcgcccagtcgtttctctgctgatggctgatgcccctccagctactgctcgatgctgccctctcgatcccggagtctagcgctgtccccctggtttcagccctcaaaccccagtgtcgatctccctcgtcttgctgctggtttaccgtggaagaggaaagtccattcggcgcgctctaggtgtttggcaaaaagcttaaaccggaaatcgtcatcgcccttacacatatcgatttggtttatgacatgacccacccggcccatcccaagaggtcgtcaaggcctgtgcca

SEQ ID NO: 9306 - DNA, 309 bp, Zea mays
  Clone ID: LIB3150-035-Q1-N1-G10
gtccttctggaagtttccacactcccgtcccttgaacccactccaatggcgccctccctcctcgccgccgtctccgcctcacccttcctcctacccggcagcagccgcaggccgctgggcgctgcccccacccgccgggccggactgcgcgtggccgcgcttaagtacgaccctgccaaggtggcaccgcagaacgaccgggtgctcgtccgtcttcagcagatccctgagaaatctgctggtggtgtattgctaccgaaatctgctgttaaagtttgagagggtatctgatggggtgaggattctatc

SEQ ID NO: 9307 - DNA, 212 bp, Zea mays
  Clone ID: LIB3150-035-Q1-N1-G3
tcgcaaagcggcagtgcgtaaagaggatcggggaacaaaacaacatggaaatgggcatcggtctcggcgggtgccttgcttttgcaacttgccaccccttttgcatggaaaatcccttgccctgcgcggggcttgcaggcttgtacggcgcttgcgccggcctgacgacgatgatgggcgccggcgggcttgtacccctacgcgggagtacc

SEQ ID NO: 9308 - DNA, 386 bp, Zea mays
  unsure at all n locations
  Clone ID: LIB3150-035-Q1-N1-G4
tggattcttttaaagccaaccaacccttccggggaacccaaccggccaaaggggaccggggggacagacatggcggaccagcacaaggaggagtcggccgtgaaagtgctggacaagatctccgacaagctccacgggcgcgggggcggctcgtcttcgtcgtcggactcggacgacgagcgctcgtcggcgacggccgccgtgaaggccaagatctaccgcatcttcgggcgcgagaagcccgtgcactccgtcctcggcggcggcaagccggccgatctgtttctatggaggaacaagaagatctctggtggggtgctcgcaagcgcaactgccttctggctgctgtttgaagtcatggattaccacctnctcaccctgctatg

SEQ ID NO: 9309 - DNA, 170 bp, Zea mays
  Clone ID: LIB3150-035-Q1-N1-G5
tcgccgagctcctcgaaaccctaggagcgtgcttgaccggcggcggcgaggtgatggcgatggaccctgacgcggtagcgaaggccttcgtggagcattactaccgaacgttcgacaccaaccgcgcggcgctggttgggctgtaccaggagacctccatgctcaccttc

SEQ ID NO: 9310 - DNA, 331 bp, Zea mays
  Clone ID: LIB3150-035-Q1-N1-H1
tcgccccgtactctcttacgcgctggacctccttgaggccagcgacctcaaagacctcatcgtggtggttgaagggcaagaagcagcgcaacttgtcgacgcttgggtatccagtgcgtacctggatcggcttcgagtggaagtagttgtggtttctgaagaccttggaagtgctggtgcattacgagctatttcaaagcgactgatggcaaacgatattttggtagttagcggtgacctggtaacaaatgtgttgcctggggcttgtgctgctactcataaaagaaatggtgcttgctgtactgctttactatgttctgttcctgtcagt

SEQ ID NO: 9311 - DNA, 377 bp, Zea mays
  unsure at all n locations
  Clone ID: LIB3150-035-Q1-N1-H10
gccacatctgaggagtacgccaccgcgaccgctgacatgttgttcccgccgacaccattgcagaccccaatccagactcctctgccagggacagacacagcgatgtacaacatacccactggcccttccgattatgccccctcaccgatcagcgatgtcaggaatgggatggcaataaatggggcagacccaacagctggtcatccaagtccctacatgccaccaccttccccttggatgaatcagaggccgctgggtgttgatgtgaatgtcgcttatgtggaaagccgtgaagatcctgacaggggcgtgcagcctcagccactgactcangattttttgatgatgtcttctgggaaacgcaagaaggatgagta

SEQ ID NO: 9312 - DNA, 390 bp, Zea mays
  Clone ID: LIB3150-035-Q1-N1-H11
actgggatcatggaagaatggagagcgtcaattgccccgattcctaaagaaaagcttgaagagctgcagcatgctgtgcctgatgatgataggtcagaagatgaatccaacaatccaactctaccagataaagatgattcttcagacagtttggttgaggatgatgatcatatttctaagtttgagaaagaggtggaagagacattccaacgagctctgggtggcggcgttaatcgagataatttgatactagagattaatggcctaaggttagcctacagccttcaacatgcaaattgtgctggagctgtgttctattctgtcatgaagagtgcattactggctgcacaatctagtaatgatactcttttgaagtcaactgctgatgca

SEQ ID NO: 9313 - DNA, 241 bp, Zea mays
  Clone ID: LIB3150-035-Q1-N1-H12
aacgagaggacggcggcgatggcgaggaggctgctcccgtctctgaaccgggtgctggtcgagaagctggtgcagcccaagaagaccgccggcggcatcctcctcccggaaacatccaagcagctgaatgctgctaaagtggtggctgttggccctggtgagcgcgacaaggcaggcaatctgatcccagttgctctgaaggaaggtgacactgttctcctgccagagtatggtggaactg

SEQ ID NO: 9314 - DNA, 156 bp, Zea mays
  Clone ID: LIB3150-035-Q1-N1-H2
tttacttgggggaacttaattttgaagaaccaaaccttcttttttgttgattccaaaaccttatttgaaccccgccccccttattgccccttattttcttccttcaaccaaaagaagaaggcccgaggcattaaggaccgagtacaactattaaag

SEQ ID NO: 9315 - DNA, 201 bp, Zea mays
  Clone ID: LIB3150-035-Q1-N1-H3
tcgcgcactcctttccttaaaaccctatccgggggccgtcgccgcacccgatctgggtttctctgtcgatttttaattttcctcgcgagccccaacccttaaccttaaacttttacccgccggcggcggcaccaccaaaactgtcacttcgccaccaccgtgcccaaaaccccttccagagccatataatttatttttgat

SEQ ID NO: 9316 - DNA, 223 bp, Zea mays
  Clone ID: LIB3150-035-Q1-N1-H6
ttaagccgccgccgttgttaggtgaaattccttcaagaaaacgcctgttcctcgccgatcgatacaatggccgtcttttccgacctccacaccgccgacggcctcaagtccctcgaggctcacctcgccggcaaaacctatgtgtctggtgactccattactaaggatgacattaaggtcttcgccgcggtgccgtcgaagcctggcgctgagtttcctaatg

SEQ ID NO: 9317 - DNA, 352 bp, Zea mays
  Clone ID: LIB3150-035-Q1-N1-H7
tcggccttgcaccaagtttttcagtacgctgcggtgcccgtttggcgagggatgtcattttctgcactttgtccctggtggttacccggcagttgcaaaaatgctgaatctaagtagctctgctgtatctgcgccatcaagaactcatgtggatcatgccgctcttaccggtgcctctcatccagcttctacggtcaagacacgcatgtgcaccaagtacaacactacagaaggctgcaagttcggtgataagtgccatttcgctcatagcgaaagagagcttgcgaagccagcctacatgtctcaagaaggacctcctatgggtggtcgatatggacgagctgaacctatg

SEQ ID NO: 9318 - DNA, 389 bp, Zea mays
  unsure at all n locations
  Clone ID: LIB3150-035-Q1-N1-H9
cccacacagaaaaccctagccgccgccgccgaagcggcctcccaggtaagcaggatcgtccagcccgccgccgccatgaagcgcaatccccgcgtcacgagctcccgccggaagtgccgcaaggcgcactttacggccccgtcctccgtccgccgcgttctcatgtccgcggggctgtcgacggagctccgccacaagtacaacgtgcgctccatcccgatccgcaaggacgacgaggtgcangtcgtgcgcggcacctacaaaggccgtgaggggaaggtggtgcangtgtaccgccgccgctgggtcatccacgtcgagcggatcacccgcgagaaggtgaacggctccaccgtgaacgtgggcatccacccctccaaggtgatcgt

SEQ ID NO: 9319 - DNA, 376 bp, Zea mays
  Clone ID: LIB3150-036-Q1-N1-A1
gctgtgcgctctccacctcaccagatttcgcaacagaaccttcgttccctgccgtctcttgtcggtctggccggccgaggtgggtgatctgtagagcgaaacgccgagccttgagaggagggaggccgcaccggcgattgtagaagcagaaccggtggaggagtagaggagggcgccgaatcgatgcgcggctccgcggacgccgtcgtggttgctcgggacgtggtggcctcgtcgagcccgtccaaggccgcgtcggcgttggacatgacgagatacccgaggctcagcccatatggcctcccgctgcccaatggcagcggcagcggcgcgagcaagatgcctgcatcgcccgtgccgtcgcccccatatcgag

SEQ ID NO: 9320 - DNA, 385 bp, Zea mays
  Clone ID: LIB3150-036-Q1-N1-A10
ccgtcatcgatctcgtttcaaatccatccatcctcgtttcctccgtcccgcagcatctcaaccccatggccaagatcaagatcgggatcaatgggttcggcaggatcggaaggctggtggccagggtggccctgcagagtgacgatgtcgagctcgtcgccgtgaacgaccccttcatcagcaccgactacatgacctacatgttcaagtacgacactgtgcacggacagtggaagcaccatgaagtcaaggtgaaggactccaaaacccttctctttggtgagaaggaggttgctgtgtttggctgcaggaaccctgaggagatcccgtggggttcggttggtgctgaatatgttgttgagtctactggtgttttcactgacca

SEQ ID NO: 9321 - DNA, 322 bp, Zea mays
  Clone ID: LIB3150-036-Q1-N1-A11
gaagcataacttgcttgttactggtgggtttcatggggagataatatgcaagtttctggatcgtcaaggagtaagctactgttgcaagacaacaaatgatgacgacggtattactaattctctggagatatttgagaagcctagtggttctctgcacttccttgcgtcaaacaatgattgtggacttagagactttgacatggaaaaatttcgaatatgcaaccacttccattttgcttggcctgtgaatcatacatcgttgagcccagatggtaaacttgctgctattgtgggggacagtcctgatggacttctgattgac

SEQ ID NO: 9322 - DNA, 310 bp, Zea mays
  unsure at all n locations
  Clone ID: LIB3150-036-Q1-N1-A12
agaccattagctttatctactccagagcgcagaagaacccgatcgacaccatgagggtgttgctcgttgccctcgctctcctggctctcgctgcgagcgccacctccacgcatacaagcggcggctgcggctgccagccaccgccgccggttcatctaccgccgccggtgcatctgccacctncggttcacctgccacctccggtgcatctcccaccgccggtccacctgccgccgccggtccacctgccaccgncggtccatgtgccgccgccggttcatctgncgcncgcaccatgccactaccctac

SEQ ID NO: 9323 - DNA, 318 bp, Zea mays
  Clone ID: LIB3150-036-Q1-N1-A2
cgaaatccaagagcagcagcagcagcagaccaagatcgagggagggaggaagacagacagacagacagacagacagagagatggatcggatgagctcgtcggtgcagtcctgggtggaggaacacaagctctcgtccatcgtagccgtgtgggcgacggcggtgggcgcgtccgtggcgtacagccggcggagggcgccggcgcgggccacgagcctgcgcctcatccacgccaggatgcacgcccaggcgctcacgctcgccgtgctctgtggagccgcgctcgcgcaccgctattacggcagcatcgagaggaggc

SEQ ID NO: 9324 - DNA, 194 bp, Zea mays
  Clone ID: LIB3150-036-Q1-N1-A3
ataaattcatgagcactaaatgctgttgaccaagatcgagggaaggaggaagacagacgcgacagacagacagacagagagatggatcggatgagctcattagtgctgtgctgtgtggatgaacacaagctcttgaccatgggtacagtgtggtctagcgtagtggtcacgtccctcaatcacagcctactgag

SEQ ID NO: 9325 - DNA, 302 bp, Zea mays
  Clone ID: LIB3150-036-Q1-N1-A4
ccgcagggcaagagaagtttggtggcctcacggatggatactatatccatggccagtgtgcgatcatcatgtttgatgtaacctcaaggcttacttacaagaatgttcctacgtggcataaggatctgtgcagggtctgcgaaaacatgcgcattgtcctctgcagtaataaggttgatgtgaagaacaggcaggtcaaagccaagcaggttactttccacaggaagaagaatctgcagtactatgaaatttctgccaagagcatctacaactttgagaaacctttcctgtaccttgcaagg

SEQ ID NO: 9326 - DNA, 377 bp, Zea mays
  unsure at all n locations
  Clone ID: LIB3150-036-Q1-N1-A5
gttaatacagaaagggctagcatatgtggatcaccagactgcagaagaaatcaaggaatacagggaaaagaagatggatagtccatggaggggtgggccaattgaagagtctctgaaattattcgaagacatgaggcgtgggttgattgcagagggtgcatcaactctccgtatgaagcaggatatgcaaaacgagaacaaaaatatgtctgacttaatagcatataaaataaaactcaccccccatccacatgctggcgacaagtggtgtgtctatcctagctatgactacgctcattgcatggtggattctctagaaaacatcacacattcagtgtgcacacttgaggttgacatacgtnngccattatactact

SEQ ID NO: 9327 - DNA, 362 bp, Zea mays
  Clone ID: LIB3150-036-Q1-N1-A6
ctcttgtctacgggcagatgaatgagcccccgggtgctcgtgctcgtgttgggttgactggtttgactgttgctgaacatttccgtgatgctgaaggacaagatgtgcttctgtttattgacaacattttccgtttcacccaggcaaattctgaggtgtctgctcttcttggacgtatcccatctgctgtgggataccagccaacccttgccactgatcttggaggactgcaagagcgtattacgacaacaaagaagggttctattacgtctgtccaggctatatatgtgcctgctgatgacttgacagatcctgctcctgctactacctttgcccatcttgatgctacaactgtgttgtca

SEQ ID NO: 9328 - DNA, 332 bp, Zea mays
  Clone ID: LIB3150-036-Q1-N1-A7
tcctgaggctccgaatcgatctcccttccccaccaaaccggagcacttcggaggccggacccggcgagaagcgaccgaccgcagccagctcacgtctccctcttcatccaccatgctgagggtcgcgggcaggcgcctctcgtccgctctcgcctggcgccccgccgccgccgcctcaggctcccggggccctctcgccggtacactacccggccgcgacgacgacgacacacgcgactgcagggcgcgtttcgccatcgaatctcccttcttcgccgctgccagagggttttctgcagagactcttgctccaagaaaccaggatgtgggct

SEQ ID NO: 9329 - DNA, 280 bp, Zea mays
  Clone ID: LIB3150-036-Q1-N1-A8
gttgggttctcctcccccaccggttcgtgttcaggttctggttcgtgggcgagagggaagagatggcggcgtgggacgttgagtaccggtgcttcgttggcggcctcgcctgggccaccgacgaccactccctcaacaacgccttctgcacctacggcgaggtcctcgagtcgaagatcatcctggatcgggagacgcagaggtccctgcgtttctgattaagtgaccttctccacggatgacgcgatgcgcagcgccatcgacggcatgaacggtaagg

SEQ ID NO: 9330 - DNA, 326 bp, Zea mays
  unsure at all n locations
  Clone ID: LIB3150-036-Q1-N1-A9
cccgtcttccctagtgcctcgcttcgatatttcgattggattggattaccaagggacagagggnnnntatcccacacacacctctggccctcgcgaggccaagggaagggaagcactcagcactcagcagcagaaggaccgccgtaaatggcgctgccggtggcgaagctggggaccctagcgctgcggacgctgtccaagcccatcgccagccgcctcaagagccaggccgccgtccaccccaagttccgcaacttcatcatcgccatcgcccaggcaaaccaccagatcaccacanagatacagaggcgcatttatgggcatgc

SEQ ID NO: 9331 - DNA, 339 bp, Zea mays
  Clone ID: LIB3150-036-Q1-N1-B1
cgcagcgcggggcgacgagcacgctcctcctttcgcgcagggccagctccaccccgtaccgtggctttatatacacccctcgtggcaaccctaccgaatcatcactaccacgcgtctctcttactttcgcgcatctgtcaacgcctgaagctgacctaacctcccctactcagcgcagatcccacactactctggcagaaaatggctgacactgaagatatgcagcccctcgtctgcgacaacagaactggcatggtcaaggctggtttctgcggcgacgacgctccaagggccgtatctccagcatcgttggtcgcccgcgccacaccgatgctgatg

SEQ ID NO: 9332 - DNA, 372 bp, Zea mays
  Clone ID: LIB3150-036-Q1-N1-B10
gcctcctcgcgcacccggtcccgcttgcctctccccacctactcgccgtcgcggtgccgtacgccggtgctgtccagtctagggtttcggccctcgcccgccgatccgtcccccccgccggccatgtcgaagcaaggagggaaggccaagccgctgaaggcgcccaaggtcgacaagaaggagtacgacgagagtgatcttgcttatttgcagaagaaaaaagatgaggaaaaggcgctgaaggagctgaaggccaaggcacagaagggcgcaattggaggctcgggtctcaagaaaagtggaaagaaatgagcattgcccacccacccatctccaaaacacctaagagaacgataagacagctgcttatct

SEQ ID NO: 9333 - DNA, 300 bp, Zea mays
  Clone ID: LIB3150-036-Q1-N1-B11
gtgaagaacgacaccgacctcaccgccaccggcctcaaagagctggtgagccagtacaaggacgtctacgtggaggctaagggagagccattcccctcagaccccaagaggcagctggagttggcagtgctggccgtgttcgactcctgggagagcccgagggcaaagaagtacaggagcatcaaccagatcaccggcctcagaggcaccgccgtgaacgtgcagtgcatggtgttcggcaacatggggaacacctctggcaccggcgtgctcttcactaggaaccccaacaccggagag

SEQ ID NO: 9334 - DNA, 365 bp, Zea mays
  unsure at all n locations
  Clone ID: LIB3150-036-Q1-N1-B12
cgccactccctgacatcgagaccggctgcccgaccccggtccggcgatccctctgcacccctttctttgcgctgccagccccaatctctcgcatccctgtcaaccatggcggcgtcagcaggcggaggcgcggtgcgcgcgctgtcccagaaggagcaggacatacagatgatgctcgcggccgacgtccacctcggcaccaagaactgcgatttccagatggagcggtatgtctttaagcgtcgcaccgacggcatctacatcatcaacctgngcaagacatgggataagctccagctcgcggcgagggttattgttgccattgagaacccacaagacatcatcgtccagtcggcccgccccta

SEQ ID NO: 9335 - DNA, 370 bp, Zea mays
  Clone ID: LIB3150-036-Q1-N1-B2
ccgactcccagccgtcgtctgctgcggactccgcctccagtttggtctgtttcttgcaagttgctcttgcggtagttcccccaactgtcaccatgcagaacgaggagggtaagactgtggacctctatgttcccaggaagtgctcggccacaaacaggatcatcactgccaaggaccatgcctctgtccagatcaacattggccacttggatgcgaatggcctgtatgatggtcacttcacaacatttgctctctctgggtttgtccgtgctcagggcgatgcagacagctccttggacaggctgtggcagaagaagaaggctgatatcaagcagtagattttacatctagtttaccaagaattggacac

SEQ ID NO: 9336 - DNA, 369 bp, Zea mays
  Clone ID: LIB3150-036-Q1-N1-B3
ccatccgcacctctctccatctccctgctcctccgcctccttcttgatccagccaagccagggatcgccatgtcggactcggaggagcaccacttcgaatcgaaggccgacgccggagcgtccaagacctacccgcagcaggctggcaccgtccgtaagaacggcttcatcgtcatcaagaaccgcccctgcaaggttgtggaggtttctacctcaaagactggtaagcatggccatgccaaatgccactttgttgccatagacatattcaacgggaaaaagctcgaagatattgttccttcgtcacacaactgtgatattccgcatgtgaaccgtactgagtaccagctgattgatatatcagaggat

SEQ ID NO: 9337 - DNA, 377 bp, Zea mays
  Clone ID: LIB3150-036-Q1-N1-B4
cggacgcgtgggttcgtcctccagggtggcgactgcgccgagagtttcaaggagttccacgccaacaacatccgtgacaccttccgcgtccttctccagatgggcgtcgtgctcatgttcggtggccagatgccggtcgtcaaggtggggaggatggctggccagttcgccaagccaaggtctgagccgttcgaggagaaggacggagttaagctgccgagctacaggggcgacaacgtcaacggcgacgacttcaccgagaagagccgcgtgccggacccgcagaggatgatccgcgcctacgcacagtcggtggcgacactcaacctgctccgcgcgttcgccaccggagggtacgctgccatgcagcgcgtcac

SEQ ID NO: 9338 - DNA, 248 bp, Zea mays
  Clone ID: LIB3150-036-Q1-N1-B5
aaaaaaaaaaaaaaaaaaaaaagaaaaaaaaaaaaaaaaaaaaaaaaaaaaaaaaaaaaaataaaaaaaaaaaaagaaaaaaaaagaaacaaaaagaaaagaaaaaaaaaaaaaaaaaaaaaaaaataaaaaaaaaaagaaggactagagagagaaaaaaagaagggcaaaatcaacaaaaaagaaaacaggaatgctaggttggggggggccccgatgttaatcactggtgagtatgggggtgccaa

SEQ ID NO: 9339 - DNA, 385 bp, Zea mays
  Clone ID: LIB3150-036-Q1-N1-B6
cgcccctctccctctctctctctctcttcgccgtccgaagctccgcaccccaatctaatcgacacctcgccgagatgggccgcaagttcttcgtcggtggcaactggaaatgcaatggaaccacagatcaggtcgagaagattgtcaaaaccctgaatgaaggacaggttcccccttcagatgttgtggaggtcgttgtcagccctccttatgtcttccttcctgtggtcaagagccagctgcgccaagagttccatgttgcggctcagaactgctgggttaagaagggaggtgctttcaccggtgaagtcagtgctgagatgctcgtcaaccttggtgttccctgggtcattcttggacactctgaaaggagagctctgctggg

SEQ ID NO: 9340 - DNA, 382 bp, Zea mays
  Clone ID: LIB3150-036-Q1-N1-B7
ctcttcctctcggttaagtccagcccactccgccgccgccgaccgcgagaggagttctcttcgccgcctcaaggacgagatggacacatcaagccctgcagcacttgtcaatgcaaagattatgaacatgtttgttgggcaaagagtgcgcacagttgttcaagtccaacacaatgatggtggaatgcttgtcgggcagtcccctgatgggcatcaattgagtatcaaaagcgccatggatgtccctgtatcacactttatggaagtttatggaattgctgaaaacagccagaccatccgcgctgaagtttgcacagattttggtcctgactttgatccccagacttttaatcatttgtgcaacctgtcgagtaacaagttc

SEQ ID NO: 9341 - DNA, 392 bp, Zea mays
  Clone ID: LIB3150-036-Q1-N1-B9
ctccaacccgctcctcaccgacggcggcctctccaccgtcatcgccaagcccaacggcgcccagggcgacttcctctcctcctccctcggcaggtggcagaaccgcggctccaaccccgaccgatccctcatcctcgccttccgcaccatcgccaacatggctgacaggctaggtcttgtggctactattaaggaccgagcaaatgaaatcttcaagaaaattgaagatctcaagtctattaggggaagaaatcaagatgccatattagccgcatgtctatatattgcttgtagacaagaagatcgccctagaactgtgaaagaaatatgttcggttgctaatggggccacgaaaaaagaaattggcagagccaaagaatttatagtgaaac

SEQ ID NO: 9342 - DNA, 387 bp, Zea mays
  Clone ID: LIB3150-036-Q1-N1-C1
cacggcttcatcatcactccactagccagtcagctactggcctacagctagccgcctcctctcctctcatcccatcccatctcatctccgacaagcgaagcagagcactggcatgagcatggaccgcatggcgcggcgttccgtgtccttgctcctcgctctggctctcctggccgccgcggcgtcggcggactcgtggctgtacgagaagttcacgacggagggcaacgtgcgcgcggactacaacgcgcatgggcagcaggtgacgtctctgatcctgacgcagcagtccggcggcgccttcagctcgcggcagaagtacctgtacggggagttcagcatccagatgaggctgatcccgggcaactccgcgggcaccgtgacctc

SEQ ID NO: 9343 - DNA, 368 bp, Zea mays
  Clone ID: LIB3150-036-Q1-N1-C10
cccgccttccggttcaaccaaatccctctggcctaatccccaccagcgcaaagccgccctatcgtcctgtcgtgagaagcaatggcgggccgtggcaaggcgattggcgctggtgccgcgaagaaggcgacgtcaaggagctccaaggctgggctgcagtttcccgtcggcaggatcgctcggttcctcaaggccggcaagtacgccgagcgcgtgggcgcctgcgcccctgtctacctggccgctgtcctcgagtacctcgccgctgaggtcctggagcttgctgggaacgcagcgagggataacatgaagacccgcatagtgccgcgtgacatgcagctctgcgtgcgcaacgacgaggagctgac

SEQ ID NO: 9344 - DNA, 310 bp, Zea mays
  Clone ID: LIB3150-036-Q1-N1-C2
ggccccgggggtaggctgcccccgccgccgcgatcgtacggcggcgccggcggatctggcgacgccgcgcactccggtggcggcgacggccgccgcgggggcatcctcgggctcctcctcgccgggtgggccgcccgcgtcgctgcggacccgcagttccctttcaaggtgctcatggaggagctcgtcggcgtcaccgcttgcgtgcttggcgacatggcctcccgccctaacttcggcctcaacgagctggactttgtcttctccacgctcgtcgtcggatccatcctcaacttcgtcctcatgtacc

SEQ ID NO: 9345 - DNA, 359 bp, Zea mays
  Clone ID: LIB3150-036-Q1-N1-C3
cagcagtagaaaccgccgccactaggctaggagtggaagcctcgggcccgcggcagcagccatggcggcgttcctggcgcctccctgcacttccttctatcgctcgtccgcattccttaccccctgttcctcgaatcgccggagtacagcgctaagggcggcggccgttcgtgggtcggcggtgacgcgggcccagcggacggtctccgctaggtgggtcccatccaggttagcggtggcgaggccggcggccaggaaggcgtgcctagaggagcttgatacaaccaacatgctccttcgccagcgcatcgtcttcctgggttcgcccgtggatgatacaagtgctgatctcattatca

SEQ ID NO: 9346 - DNA, 337 bp, Zea mays
  Clone ID: LIB3150-036-Q1-N1-C4
gtacaccaccgccaccaagcccgggccgaataactctgccgggcaaccgccgcccttcgccggcaaagaacgcccaccagatccaccccggcctgctatggagtccgcggtgaacccgaaggcgtacccgctggctgatgcgcagctgacgatgggtatcctcgatatcatgcagcaggccgccaactacaagcagctcaagaagggagcgaacgaagcgacgaaaaccctgaatagggggatatcggagttcgttgtgatggcggcggacacggagcctgtcgagatcctgctacacctacccttgttagccgaggataagaacgtcccatatgta

SEQ ID NO: 9347 - DNA, 366 bp, Zea mays
  Clone ID: LIB3150-036-Q1-N1-C6
cggacgcgtgggcggacgcgtgggcggacgcgtgggcgaacagagagcccggggactacagcggctgggctggcgcggaagcggagtggaagatcctgtacagtctcggcaaggacggggacggcctcctccgcaaggacgtcgcgaggagcgtctacgacgggacactgttccaccggctcgcgcccagatggaaatctcccgacagcgacatggagagaagctgataagcgtggtccgggagaactgaaccgggtctggacatgctgtcaagcgacatgtactggcggtgtgaacgggtgtgaactcactttcgggtcagattattaacaagaagggtgtgaccgtgtgagtgtgaacagaatc

SEQ ID NO: 9348 - DNA, 384 bp, Zea mays
  Clone ID: LIB3150-036-Q1-N1-C7
cgcttccccgttccccaccccgaccgactgctccccctcccccgcaccagcctcaaggcatcgccggcgccgcaacatcgctgaggaagcccgcacccctgcccggatccgatggccaacagcaacctcccgcggcggatcatcaaggagactcagcggctgctcagcgagccagcaccggggatcagcgcgtcgccctcggaggagaacatgcgctacttcaacgttatggtccttgggccggcgcagtcgccctatgaaggtggagtttttaagcttgaactctttttacctgaggaatatccaatggctgccccaaaggttaggtttctgacaaagatctatcatcccaacatcgacaagcttggtaggatatgcctcgac

SEQ ID NO: 9349 - DNA, 359 bp, Zea mays
  unsure at all n locations
  Clone ID: LIB3150-036-Q1-N1-C8
cagaagcggcggcggcggagcaaacgcaggcgaaggcgagggtgtgagggaaggagcaccagccatggtgcacgtcaacttctaccgcaactatggtaagacgttcaagaaaccaaggcgtccttatgagaaggagcgtcttgatgctgaactgaagctggttggtgagtatgggctgaggtgcaagcgtgagctttggagggtccagtatgcactgagcaggatccgtaatgctgcaaggcacttgctcacccttgacgagaagaacccccgtcgtatctttgagggtgaggcacttcttcgccgcatgaaccgctatgggctgcttgctgagggtcagaacaagctngattatgttc

SEQ ID NO: 9350 - DNA, 366 bp, Zea mays
  Clone ID: LIB3150-036-Q1-N1-D10
gaaaaagttcaaaaaaaccaatctcactctctccctccaccgccactgccccacccacccctaccccaatcccctcttccccattcaccagatcgagcgccgcgtgcctagggtttgcgcccccgccggtagcgatgcccccgtcctccgtgtcggggggcagcggccccggaggcgtctccccggacgccatcatcgagtggctgcaggacgagatggggtaccccacggccccgcccgcaccggagcagctccgcaagatctgccggggcaacatgatccccgtctggtccttcctgctccgacgcgtccgctccgagcgcaccgttgccactgcgcgccgcaacatcctcgtccacggcgtcg

SEQ ID NO: 9351 - DNA, 391 bp, Zea mays
  Clone ID: LIB3150-036-Q1-N1-D12
cgacgagagcgaggccatgaaggggaagaagccggtcaaggagctcaagctcaccgtgccggcgcaggagaccccggtagacaagttcctgacggcaagtggcacgttcaaggatggtgagctgaggctcaatcagagcggcttgcggcttatctctgaggaaaacggggatgaagatgaatctacaaagctgaaggtggaagatgtgcagttatcaatggatgatcttgagatgattcaagtcattggcaaaggaagcggtggtgttgtccagctagtgaggcacaaatgggtgggcacattatttgccttaaagggtattcaaatgaacattcaggagtcagttcgtaaacagatagtacaggagctcaaaataaaccaagcaacacag

SEQ ID NO: 9352 - DNA, 252 bp, Zea mays
  Clone ID: LIB3150-036-Q1-N1-D2
gcattcagaaatagctaatcgagcatcgcaggcttagctcctgtactctgctgttctctgcgacgtcaaggaacttctctacggcggctgccatataaaggaggaagaagagaacagcatcgctagctagccggccagactccgtcgacaccggcgtcgtcaactagctagctaactgtcgatctccaattactgcgcccgccccacgcccgggcgtggtgaatcgtcagcaatataatggcatgaggcctc

SEQ ID NO: 9353 - DNA, 237 bp, Zea mays
  Clone ID: LIB3150-036-Q1-N1-D3
cgatttcccatttgaaattcttagatcgcacagtgccgaacgtcctcacacatctctgtcggatggtgcgcacgaagcaaacggcaaggaaccaaagcgcgtgctaggcaccggcggaagcaggatggacacgaatgtcggcgcgaaagtcatggacccggtacaccgtgggatgcgaagaagcacgaacaggtcttcgactctgcacatgctcgctatgcgagatgcgcatgtacc

SEQ ID NO: 9354 - DNA, 165 bp, Zea mays
  Clone ID: LIB3150-036-Q1-N1-D5
gggtcgcgtgggctgcacatgctgttcgagagagagagagagagagagagagatttagatgttgcggttctgacaccacaacaacaacgaggctgctccctctgcgtaagaccctgacgaggtgtttaatgatcttcatgtcgggccaacgagaactactgtctg

SEQ ID NO: 9355 - DNA, 371 bp, Zea mays
  Clone ID: LIB3150-036-Q1-N1-D6
ctcagtagcaaacaagaagcagcaagatagtgatcctccatgggaaacaccctcggctttggcgtaggtgtcggcctcggcctcggcctcgccgtcggcgccgctgctctgatccaggcttttggtccgaaaattgacgaggaagtggtggtttctcagtatcaatgcaacaccgaggacattgacgagttgtctgccgaggagctgcgcgatgcgatgagctatgtgatgcacaatccgatgctgatccaggtgccggtgttaggaacaacgaagacattctggcgattatctgaggaagccactaggatcagcagaaaactttcattgatactgcgcaaccaccactcatcctgcaagtacctcgaagc

SEQ ID NO: 9356 - DNA, 334 bp, Zea mays
  Clone ID: LIB3150-036-Q1-N1-D7
cttgtggaggggtaacactgctaatgttattcgctacttccctactcaggctttgaactttgcgtttaaggactacttcaagaggctgctcaacttcaagaaggacagggatggttactgtaagtggcttgctggcaacctggcctctggtggtgctgctggtgcttcctctttgctttttgtgtactccctggattatgcgaggacaaggttggccaatgatgccaacgctgccaagggaggacgcgatagacaattcaatggtctcgtggatgtctaccgcaagacactcaaatctgatggtattgcttggctttaccgtggatttaacata

SEQ ID NO: 9357 - DNA, 393 bp, Zea mays
  Clone ID: LIB3150-036-Q1-N1-D9
agcaccagcgcggcggcggcggcggcggcgaccatggctgtcgggaagaacaagaggatctccaagggacaagggtggcaagaaaaagaccgtcgaccctttctctaagaaggattggtatgacatcaaggcaccgtcggtgttcagtgtgcgcaacatcgggaagactctcgtatccaggacacagggtaccaggattgcttctgagggtctgaagcacagagtctttgaggtttgcctagctgatcttcagggtgacgaggatcaagcttacaggaaaatcaggctccgtgctgaagatgtgcagggcaggaatgtgctcacaaacttttggggtatgaattttaccactgataaattgagatccctagtgaagaagtggcagacattaat

SEQ ID NO: 9358 - DNA, 357 bp, Zea mays
  unsure at all n locations
  Clone ID: LIB3150-036-Q1-N1-E1
gctaaagatccttacccaagaattgcaactattggtcggagagcactgtcccttataggtgttgaacaagtagtcatgaaaaatactagatttaatagtggaggtgcacatcggggagagacatctgcttcaaactttggaatggcacgctcttcatcctggcttgatatgaattctggaaacaacttgataaaatttaggacccctcctgttagccctcctcagcatgattttcttccaggattacgccgagtgtgttctatggagtttggacaacatcctataaagtcacctgatggcttagctgttcccctttaagcntcgctgcagctaccagtaatgctgaactaatatact

SEQ ID NO: 9359 - DNA, 316 bp, Zea mays
  unsure at all n locations
  Clone ID: LIB3150-036-Q1-N1-E10
atgtgattgggaacataccatgtaggacgtcatatatggttctggctgatggggccaaagatgaacataggtagcttataggattcatgttttttgcttcgttgaggcgtcttgttgcgctgggattgtgccacatgtgttgtcttgcacgtgagagatgcttctactcacccgcgacatgcttatgtcagtggggcaataattaatctctactccttaaagcgtcactttcgttgtgcattctncttncttncgcattcctacgggccatgcagnccacacgacacataaccacttnctcttcagtcagtgacac

SEQ ID NO: 9360 - DNA, 390 bp, Zea mays
  Clone ID: LIB3150-036-Q1-N1-E11
gcagttagatgaagctgcaccaatgttggcagggttgagtgagcccattgttgttgccaaagttaatgctgataaatacaggaaacttggatcaaaatatggatgggttccctaccctcatgctttttatccacggtgttccaattgaatacactggttcgaggaaggctgatcagcttgtccgcaatctgaagaagtttgttgcgccagatgtttctatccttgagtcagactctgcgataaagaactttgttgagaatgctggtacaagctttcctatgttccttggttttggggtgaatgactcattgattgctgaatatggaaggaaatacaagaaaagagcatggtttgctgttgctaaagatttctctgaggacgtcatggtag

SEQ ID NO: 9361 - DNA, 389 bp, Zea mays
  Clone ID: LIB3150-036-Q1-N1-E12
ccgcgtgcgaaccaagcagaccacaacaagaagaagcgtagtcgtcgccggaaggaaaggcgcggagcaagatgtcgtggcaggcgtacgtcgacgagcacctgatgtgcgagatcgaaggacagcatctcagcgccgccgccatcgtcggtcacgacggcagcgtttgggcgcagtccgagagcttccccgagttaaagcctgaggaggttgctggtatcataaaggactttgatgaacctggtactcttgcaccaactggtcttttcgttggaggtacaaagtacatggtgatccaaggtgaacctggagttgtcatccgaggaaagaagggcactgggggcattactatcaagaaaaaccgcatgtccttgattattggtgtctac

SEQ ID NO: 9362 - DNA, 387 bp, Zea mays
  Clone ID: LIB3150-036-Q1-N1-E3
cgcggactcgcctcgtgcgcttccatttccactccgacccggccggcgacccgccccccggtccccggagcgaccgaggcctcgctcaccgacatgtgggccctcaacaacgccaaggccggcggaccctgcctcacgccacggcacccagcgccgccctcccttgcgtcgccgtcgacggcatcggccgggcggaggttctggaggcgcagctccgtgtgggcgcccctggtggcggtgcgcgcgtcggggggcacgaggaaggacggctccgtcggtggcgaggccagcggcgaggaagccgatagcaaggcgtcatctgccgggcatgatgatgcatctatcccaacaggggatacctctgctgggttgaaccaaccgcatgac

SEQ ID NO: 9363 - DNA, 395 bp, Zea mays
  unsure at all n locations
  Clone ID: LIB3150-036-Q1-N1-E4
gcgtcttcgtactcgcctacctccgcggctcaaacctttcccccttctcccaattcccgccgccgctccatcccgtaacgcgacaccatgagggagtgcatttcgatccacatcggccaggccggtatccaggtcggaaacgcgtgctgggagctgtactgccttgagcatggcattcaggctgacggtcagatgcccggtgacaagaccattgggggaggtgatgatgctttcaacaccttcttcagtgagactggtgctgggaagcacgtgccccgtgctgtttttgttgaccttgaacccactgtcatcgatgaggtgagaactggcacctaccgncagctcttncaccctgagcagctcatcagtgggaaggaggatgcagccaacaactt

SEQ ID NO: 9364 - DNA, 344 bp, Zea mays
  Clone ID: LIB3150-036-Q1-N1-E5
aaaacttttcccagcacttccttacaccatacaagtctactcttaaaaggggcaccgtcgaggagctcgaacagagaataactatattaaaatctgcactgcaagaagctgagacagagttagatagggttaggaaagggaagcagtcagtgtgattttttttccacaggtcaagtgtgtaaaaccagagagacgatcaattttttcgtgtcattacactcttgttgatttcactatcatgtttcctcatcgaggagtttagacttgtaatagctatcggcagagaagtgtttgattcaaaactcctcgatgaggaaacatgatagtgaaatgcaacaaaaata

SEQ ID NO: 9365 - DNA, 375 bp, Zea mays
  Clone ID: LIB3150-036-Q1-N1-E6
gccatctcgagatcattacacatgcatggttgacttgcttggtcgtgccggtcatctcaaagaagctgaggagctcataaaggacatgccaacggaacctgactctgtgctctgggcttctctgctaggtgcttgcaggctgcataagaatgttgagttgggggaacggacggctggaagattgtttgagcttgatcctgagaactctggaccctatgtccttctctcgaatatgtacgctgagatggggaaatgggcagatgtttttagagtcaggagatccatgaaggacaggggtgtcagtaagcaacccgggtgtagttggattgagataggaaagtaaatgaatgtgtttcttgcacgagataatcgaca

SEQ ID NO: 9366 - DNA, 356 bp, Zea mays
  Clone ID: LIB3150-036-Q1-N1-E7
gtttcgcgtccgcctcatcccgccgcaaggagaggtaagttcaggagacatcttctagaagctgaaatggctcctaaagctgctcctgccaagaagggtgatgccaagacccatgccttgaaggttgccaaggctgtgaagtctggggcagccaataagaagaccaagaatatccgcacgtctgtgacatttcaccgccccacgaccctgaagaaggctagggaccccaagtacccaccaatctgcactaccggaaggaacaagcttgatcagtaccatattctcaagtacccccttaccacagaatcagcgatgaataagattgaagataacaacactctggtcatcattgttga

SEQ ID NO: 9367 - DNA, 336 bp, Zea mays
  Clone ID: LIB3150-036-Q1-N1-E8
gcaaattgcaccaagaaatccatcgagaggccgtcgacaggggaattaatggcgtcgtcgtctagcagcagccaccgccgcctcatcctcgcagccgccgtcctgctctccgtgctcgcggctgccagcgccagcgccgggacctcctgcgtgccggggtgggccatcccgcacaacccgctcccgagctgccgctggtacgtgaccagccggacctgcggcatcgggccgcgcctcccgtggccggagctgaagaggagatgctgccgggagctggcggacatcccggcgtactgccggtgcacggcgctgagcatcctcatggacggcgcgatc

SEQ ID NO: 9368 - DNA, 394 bp, Zea mays
  Clone ID: LIB3150-036-Q1-N1-E9
caagaagcaagaaaactagaaaaggctcctcccgaccgcaacgcccctcatctccctcgaccccgacatccccgacccgatggcgcccaaggcggagaagaagccagcggagaagaagccggcggccgaggagaaggcggagaagacgaccgcagggaagaagcccaaggccgagaagcggctgcccgcgtccaagtcctccggcaaggagggcggcgagaagaaggggaagaagaaggccaagaagagcgtggagacctacaagatctacatcttcaaggtgctgaagcaggtgcaccccgacatcggcatatcctccaaggccatgtccatcatgaactccttcatcaacgacatctttgagaagctggccggcgaggccgccaagctggcg

SEQ ID NO: 9369 - DNA, 392 bp, Zea mays
  Clone ID: LIB3150-036-Q1-N1-F1
cttacatacattctaagctaagcaagtgggctgaaatttatggccccttcttcaaaccatcatcatatttggaacagcgagctaagagtggtgtaccattgagcgcaccaggagcttcgcagcaaggttcggcgaggtcacgcatgtgaggtgctgtccagcattgagcagaataatgcagaatacttgcgggatgagccattgacggctgcttcgctgatcaaaacacctccgtgaacacaaacatgaggcacagaagaaatgatgaaaaataaaagggattgtaacagttttggtgcctttgactgtaactggcagagtttctgaggacagagtggcatggattaattgcacctgatcactctgtatgtcgctgtcatgtgtgcaatgtt

SEQ ID NO: 9370 - DNA, 391 bp, Zea mays
  Clone ID: LIB3150-036-Q1-N1-F10
ctgggccggccaagcagccacccatccatggcgactagggtttggctcaccgccctcctgcttggtttcctcgtcgccgcctcccccttcaccggccgagttgctagagctgaatccgaggaagatgctgctgcagctgaggttgttgaaggggctgatctaggtattgtgggtgatgatacacaggtttccagtgatggacctttaagtcctgctcctggtgtagagacagtagttgtcttcccaaaaaatgctggcaaaattgtactagcaggtgaagaaactgaattactagttggtctgcaaaatgacggtgaatcaattttgaatgttgttgctgttcattcaactctccatcttccttttgaccacaatatgtatggccagaacc

SEQ ID NO: 9371 - DNA, 380 bp, Zea mays
  Clone ID: LIB3150-036-Q1-N1-F11
gccgtctgccttctgcgcctccatttcggcctctgtcccttgcaagttcagtctcgcctccaaccatgggtaaagagaagtcccacatcaacattgtggttattggccatgtcgactctggcaagtcgaccaccacaggacaccttatctacaagcttggaggcattgacaagcgtgtgatcgagaggtttgagaaggaggctgctgaaatgaacaagcggtccttcaagtacgcctgggtgctcgacaagctcaaggctgagcgtgagagaggtatcaccattgatattgctctgtggaagtttgagaccaccaagtactactgcacggtcattgatgcccctggacaccgtgacttcatcaggaacatgatcactggt

SEQ ID NO: 9372 - DNA, 150 bp, Zea mays
  Clone ID: LIB3150-036-Q1-N1-F12
tgcgtggtctggtctccatctcgatcagagagctccgtccgtcactttcccctcgttccattcatggagaatatgctccacctagccccgtcgtcccaagcccaagcattggccttggaccgctcctccgtcttctcgcgtgagcacgtg

SEQ ID NO: 9373 - DNA, 328 bp, Zea mays
  Clone ID: LIB3150-036-Q1-N1-F2
gttattcctcgttgcgtgccctcgccgcagacctctgccatggcggaccatctcaccgacgagcagatcgcggagttcaaggaggccttcagcctcttcgataaggatggcgacggctgcatcactaccaaggagcttggaacggtgatgctctcccttggccagaaccctaccgaggcagagctgcaggacatgatcaacgaggtcgatgcggatggcaatgggaccatcgacttcccggagttcctgaacctgatggcgaggaagatgaaggacacggactcagaggaggagctcaaggaggccttccgcgtcttcgacaaggacc

SEQ ID NO: 9374 - DNA, 217 bp, Zea mays
  Clone ID: LIB3150-036-Q1-N1-F3
tgcccatgccgctgtagtgtacttagtgagaaacagaaactgagatctgagggttgtacaagacgcattggagctgtgcatgctacaagcggttactttggaacagaaacttgcctcacacgatgctgacatacgtcaactcaatgatagggcgtatctacctagacaatctcaagaacccttcaccgagatgcatatttgacttgcgactgacctt

SEQ ID NO: 9375 - DNA, 371 bp, Zea mays
  Clone ID: LIB3150-036-Q1-N1-F4
agcgaggacgacagcaagatgaagaggcagatatcggacctgaaatccaaggagctgagcggccacgacatctttgcccctccggaggatccgaggccacgcaactcggagaacggctcgacctcgcagactccgggcaaaaatgcacacgtaagcaacttcaagttcggcgaggccgacgaggacagcgcggtgaagaccgcgaagaagatccccaccaagaagttcactgacctcgcgggcaatatcttcaagggcgacgacgaggcacccgggacggcggagaagcaccacctgagcacggcgaagctgaaggagatgaccggcagcgacatcttcgcggacggggaggccccctcccgggactacct

SEQ ID NO: 9376 - DNA, 367 bp, Zea mays
  Clone ID: LIB3150-036-Q1-N1-F5
tcgcgacgcaatgagcgcctcctcagccccggcccccgcagcgggagggcgattcttcacgggcttcacaagactgtgcaagggcctcgccgtcgtcctcttcctcgcccacattttggtccaccttttcccttcagccgccacatatctcacgctgataccagccaggacaatcccttttgcttggaacctgattaccgctggttatattgagcaaacaattccaggggtgattgtgagcatagttggtcttcttctatttgggaaggtgttggagcctttatggggagctaaggaactgctcaagtttatttttattggtaatctctcaatttcagcgtgtgtcttcgtaactatgattgtgcta

SEQ ID NO: 9377 - DNA, 345 bp, Zea mays
  Clone ID: LIB3150-036-Q1-N1-F6
cgaggacgtcttccgcgatttccgcgcgcgccgagccggcatcgtcaaggcgctcaccacggatgtggagaagttctatcagcagtgcgatccagagaaagagaacttgtgcctttatggtttgccaaatgagacttgggaggtcactcttccagctgaggaagtacctcctgagcttccagaaccagcactggggataaactttgcccgtgatggaatggtcgaaaaagactggttgtctctagttgcagttcatagtgatgcatggctcctgtctgttgcattctattttggagctcgttttggatttgacaaagatgccaggagaaggctcttcaccatgat

SEQ ID NO: 9378 - DNA, 341 bp, Zea mays
  Clone ID: LIB3150-036-Q1-N1-F7
tcgctccccttccaaaaccggatttgcgaaccacacctagcagccgaggttagcacgcgtcctgcgtccatggaggacgaggagcacgaggtgtacggccaggagattcccgttgacggcgaggacgtcgacatggctgccggcgacgatgccaccaaggaacttgacgatatgaagcgccggctcaaggaaatggaggaggaggccgccgcgctccgcgagatgcaggccaaggttgccaaggagatgcaaggtgtagatcccaatgcaaccacatctgaaaacaaagaggagatggattctcggtcagtattcattggaaatgttgactatgcgtgcac

SEQ ID NO: 9379 - DNA, 389 bp, Zea mays
  unsure at all n locations
  Clone ID: LIB3150-036-Q1-N1-F8
gccgcgtcgaaggcgaggtcctcagcagcgccggcggactccgctcgcacgccatactcagcctactccgtcttcccctgtctagcagacaccctcttcccctctccactcccaatcttatcgtcgcctccctcgacgtcgctgctgcctccacttcaccatggcgcttcacgccccggtcctcgttctgaaggactcgctgaagcgggagtctggcgcgaaggttcaccaagccaacatccatgcggccaaggctgtcgctgacatcatacgcactacattgggtcccagatccatgctgaaaatgcttctggatgctagtggaggtattgtggttactaatgatggtaatgccattttgagggaaatagacatngcacaccctgctg

SEQ ID NO: 9380 - DNA, 363 bp, Zea mays
  Clone ID: LIB3150-036-Q1-N1-G1
gagcgatccgatccgatccggaactgtgccggccagccatggcgactagggtttggctcaccaccctcctcctcgccttcctcctcgtcgccacccccttcaccgcccgagttgctagagctgattcggaggaagatgctgctgcagctgaagttgttgaaggggctgatctaggtattgtgggtgatgatacacaggtttccagtgacggacctttaagccctgctcctggtgtagagacagtagttgtattccccaaaaatgctggcaaaattgtactagcaggtgaagaaactgaattactagttggtctgcaaaatgagggtgaatcgactttgaatgggtgtgctgttcattcaactc

SEQ ID NO: 9381 - DNA, 264 bp, Zea mays
  Clone ID: LIB3150-036-Q1-N1-G10
tcggcactacctaagggagatgcgcatcgggcactttgtggtgaaggagccgatggtgatcgggcacgagtgcgcgggcgtggtcgaggaggtgggcgccggcgtgacacacctgtccgtgggcgaccgcgtggcgctggagccgggcgtcagctgctggcgctgtcgccactgcaagggcgggcggtacaacctgtgcgaggacatgaagttcttcgccaccccgccggtgcacgggtcgctggcgaaccacgtggtgcaccc

SEQ ID NO: 9382 - DNA, 381 bp, Zea mays
  Clone ID: LIB3150-036-Q1-N1-G12
acgagagcccataaattctgccccgccgcctcgtgtcaaccccgtcactcttgtgtcctcctaaaaccctaaccctccgccgcccctcggacccccaaccagcagctgccgcggccatccgccggcgagatggcgctgtacctgctgttcgagtcggcgtccggctacggtctattccacgcgtacggcatcgatgagatcgggcagagcgtggaggccgttcgctcctccgtgctggacctcgatcgcttcggcaaggccgtcaagctcaccgccttcaaccctttctcctctgccgtcgatgcactcaatcagtgcaacgctatatccgaagggatcatgaccgatgaactgaggagtttcctggagctgaacctgccg

SEQ ID NO: 9383 - DNA, 353 bp, Zea mays
  Clone ID: LIB3150-036-Q1-N1-G2
cttggttggaatgcttgcattgctttggtctgtggaaattgtgtcgtctggaaaggtgctccaacaactccactgatcactattgcaatgacaaaaatagtggctagtgtattggagaagaacaacttgccaggcgcaatttttacatctttttgtgggggcactgaaattggtcaagcaattgcccttgacattaggatacctttggtttcattcactggaagtacaagggctggtctaatggttcagcaacaagttagtgcaagatttggtaaatgccttcttgaacttagcggaaacaatgccatcattgttatggatgatgtagatatccagctagctgtgcgatctgt

SEQ ID NO: 9384 - DNA, 353 bp, Zea mays
  Clone ID: LIB3150-036-Q1-N1-G4
ggcgcacagcacacgaacacacaccgcgcccagctccgaggtgatcttccggcggccggcgagatgagccgtggcacaggcgcgggctatgaccgccacatcaccatcttctcccccgagggacgcctgtaccaagtcgagtacgcgttcaaggcggtgaagtcggcgggtgtcacgtcgatcggcgtccgcggcgcggactccgtctgcgttgttacgcagaagaaagtcccggataagttgctggatcagacgagcgtgacacacctgttcccgatcaccaagtacgtcggattgcttgccactggccttacagctgatgctaggtcattggtttcccaagcaagggatga

SEQ ID NO: 9385 - DNA, 286 bp, Zea mays
  Clone ID: LIB3150-036-Q1-N1-G5
gcgtcactctcgttccatttccccatctcccagatccaattcgcgagttctttctcctctgccgccatggcgctctctgtggagaagacctcgtctggacgggagtacaaggtcaaggatctctcgcaagcggacttcggtcgcctcgagattgagctggccgaggtcgaaatgcccggcctcatggcgtgccgcgccgagttctgaccgtccaagcccttctgcggcgctaggatctcggggtctcttcacatgaccatccagaccgccgtcctcatcgagaccc

SEQ ID NO: 9386 - DNA, 388 bp, Zea mays
  unsure at all n locations
  Clone ID: LIB3150-036-Q1-N1-G6
cgactccgccgccgctcccgctccgccccagcgcatcgcccgccgccacagcgtaccgcgacctcatcgatcaccttcagctttcaatcatggccgacgtcgatgtcgaaccggaggttgccgccggcgctcccaagaagaggacgttccgcaagtacagctaccgcggcgtcgacctagatgcgcttctcgacatgtccacggacgacctcgtccagctcttccccgcgcgcgccaggagaaggttccagaggggtctgaagaggaagcccatggcgctcatcaagaaactgcgcaaggcgaaaaaggatgctcctgctggtgagaagcccgagccagtcaagacacatctncgtaacatgatcatngtccctgagatgattggaag

SEQ ID NO: 9387 - DNA, 179 bp, Zea mays
  Clone ID: LIB3150-036-Q1-N1-G7
tcggtctgatcggccacccacggaggaggcgcataacgatttgcacccagccacaacgcctgtctgccgtgaataaacacgcaaacggcgcacctccggtggatagtccaaggcctggacgcactcacgcaagtttcagactatttcacttccaccctacatcaaattctcaagccatt

SEQ ID NO: 9388 - DNA, 388 bp, Zea mays
  Clone ID: LIB3150-036-Q1-N1-G9
ccgtcatcgatctcgtttcaaatccatccatcctcgtttcctccgtcccgcagcatctcaaccccatggccaagatcaagatcgggatcaatgggttcggcaggatcggaaggctggtggccagggtggccctgcagagtgacgatgtcgagctcgtcgccgtgaacgaccccttcatcagcaccgactacatgacctacatgttcaagtacgacactgtgcacggacagtggaagcaccatgaagtcaaggtgaaggactccaaaacccttctctttggtgagaaggaggttgctgtgtttggctgcaggaaccctgaggagatcccgtggggttcggttggtgctgaatatgttgttgagtctactggtgttttcactgaccagga

SEQ ID NO: 9389 - DNA, 217 bp, Zea mays
  Clone ID: LIB3150-036-Q1-N1-H10
gtcatatctagctatagtagctcccttgagaagcatttgagggaggagccatgtctgaggagaagcaccaccaccacctgtttcaccaccgcaagccagaggaggagggcgcctccggcgaggtcgactacgagaagaaggagaagcaccacaagcacatggagaagctcggcgagctcggcgccatcgccgccggcgcgtacgccctggtgagaac

SEQ ID NO: 9390 - DNA, 350 bp, Zea mays
  unsure at all n locations
  Clone ID: LIB3150-036-Q1-N1-H11
ctcgcggcgacgactgggcgagcgcctcctcccctccctcactccctccgtgagctcctctccggcggcgcgcgccgccgcccgtcgccacgtcttctccgctgacgtgggctcaccagatccaatgaaggctgccaacttgacgcaaggtgttcaagaaatttaaaccatgcactcttcatcgtaggttcaaggcaatatctgtgttaatcttggggaccttcagtagattgctgagagttctccttgatacaggggaataaagatccaaataaagttttgacattgatctgtagccagtactccaatggctacgaagctngtggntctcggtatcccctggggatgtg

SEQ ID NO: 9391 - DNA, 183 bp, Zea mays
  Clone ID: LIB3150-036-Q1-N1-H12
cgttgctcgcctcgggtcaaaccctaagcagggagttgatttatccgctgcagccatgagtaagttgcagtctgagtctgtcaaggatgccatctcccagattgttggggatgccaaggagaagaataagaagttcactgagactgtggaacttcagattggtctgaagaattatgatccaca

SEQ ID NO: 9392 - DNA, 376 bp, Zea mays
  Clone ID: LIB3150-036-Q1-N1-H2
caaaagcgaagcaaagcaatcggaattctctgcgatttctctagatctcgactaccccccactagttttggttcctcctttcgttcgagagagcgattctggtggcaatggcgaagagcgagggtccggcgatcgggatcgacctcggcaccacctactcgtgcgtcggcgtgtggcagcacgaccgggtggagattatcgccaacgaccaggggaaccgcaccacgccgtcctatgtcggcttcaccgacaccgagcggctcatcggcgacgctgccaagaaccaggtcgccatgaaccccaccaacaccgtcttcgatgccaagcggttgatcggcaagaggttctctgatccgtcagtgcagagtgacatgaa

SEQ ID NO: 9393 - DNA, 248 bp, Zea mays
  Clone ID: LIB3150-036-Q1-N1-H3
gattgcagtcgcggtcaggttgaataggaccaagaagcggctgcaagcgaggatgccatgcctgaacgtgtcgaccaacgtgaacctggagggtgtggacaccttcgtcatcctggagcaaatctccatgtccttcatcaacatgatctgcaagcccaaggactacgtgatggttgctatcatgggttcggctcctatggcatttggaggctccgaggagccaacatcttactgtgtagctgtttcca

SEQ ID NO: 9394 - DNA, 394 bp, Zea mays
  Clone ID: LIB3150-036-Q1-N1-H4
cccaaatatcccagccactgccgtcgtgcagtcaaagtgtcaaaccatgccggcagtagcgttcgcgtcggctactgccatattcgcctccgcctccgcgcgtccctgccgcagcgcggctccgggcatcctttcctccgactccgggcggccccgccgcggcgcgcgtggcgccgtccagtgtgaggtcgcctcctcctcggcaccgtcggcggctggaccccatgccgtccggtgggcccagaggaccgtggtcatcccgccacagcgccgcgggtgccacctcatcaccaacaagatcgtaaatgagatagggaatggacctgccgacttcaagtgtggcatggcgcatctgttcttgcagcacacaagtgcgtcgttgactattaatgag

SEQ ID NO: 9395 - DNA, 331 bp, Zea mays
  unsure at all n locations
  Clone ID: LIB3150-036-Q1-N1-H5
gcgatctgttcctcgggctggacaagtgtggttcccagattctgcaaccaagacagctcaggcattattagacttcaaccgtgaaggattgcctctgttcatcctggctaactggagaggcttttctgggggacagagagatctctttgaaggtattcttcaggctgggtcagcaattgttgagaaccttaggacatataatcagcctgcgtttgtctacattcctatggctggagagcttcgtggaggagcttgngttgtgatcgatagcaaaataaatccagaccgcattgagtgttatgctgagaggactgccaaaggtaatgtgctc

SEQ ID NO: 9396 - DNA, 377 bp, Zea mays
  Clone ID: LIB3150-036-Q1-N1-H7
gttaaagttagtccagcagtgttgcagtctgctggtttgaacttgaaacaggtatacacaaggtcattgattgctgcattctgcttccatgcataccaacaggtatcatacatgatcctcgccagggtatccccagtcacacattcagtgggcaattgcgtcaagcgtgtggtggtcattgtgacctctgttctgttcttcaagacccctgtttctcccatcaactctcttggtaccgggatcgctcttgctggagttttcctatactcgcaattgaagagacttaagcccaagcccaagactgcttgatcatatacatttgtaggtccattcaatagaactttggaagttatgctatgtcattggagtgatcagtg

SEQ ID NO: 9397 - DNA, 357 bp, Zea mays
  Clone ID: LIB3150-036-Q1-N1-H8
tgcctcgagtggcctgtcgtcttgcgtgtcggagcgccaagccctgcctgcgggtaaatgtcgcgtaagcgaggtggctgggcgcctgtgccggccaagaagaagacggataaagtgacgaaccctctattcgagaagaggccgaagcagttcggcatcggcggcgcgttgccgcccaagaaggacctgcaccggttcgtcaagtggcccaaggtcgtgcgtatccagcggcagcgccgcatcctcaagcagcgcctcaaggtaccaccggcgctcaaccagttcacccgcaccctcgacaagaacctcgctacgaacctttttaagatgcttctcaagtaccggcctgaagacaag

SEQ ID NO: 9398 - DNA, 298 bp, Zea mays
  Clone ID: LIB3150-036-Q1-N1-H9
ttgaactttgcgtttaaggactacttcaagaggctgttcaacttcaagaaggacagggatggttactggaagtggtttgctggcaacctggcctctggtggtgctgctggtgcttcctctttgttttttgtgtactccctggattatgcgaggacaaggttggccaatgatgccaaggctgccaagggaggaggcgatagacaattcaatggtcttgtggatgtctaccgcaagacactcaaatctgatggtattgctgggctttaccgtggatttaacatatcttgtgttggaaata

SEQ ID NO: 9399 - DNA, 418 bp, Zea mays
  Clone ID: LIB3150-037-Q1-N1-A10
acgaaatctgacccgggccacactccgcggcgccgccatggcgatccgctccaagggctgtatctcgctgctgctcgcgctgaccgtcgctctctccgcccgggcggaggaggagcccgccgccgcggcggagggcgaggccgtgctcaccctcgacgtcgacagcttcgacgaggacgtcgccaagcaccccttcatggtcgtcgagttctacgccccctggtgtgggcactgcaagaaacttgctccagagtatgagaatgcggccaaggcacttatcaagcatgacccaccgattgttctcgctaaggttgatgctaacgaggagaagaacaggccgcttgctaccaagtacgagatccaagggttcccaaccatcaagatcttcatggaccaggggaagaacattcatgaatac

SEQ ID NO: 9400 - DNA, 410 bp, Zea mays
  unsure at all n locations
  Clone ID: LIB3150-037-Q1-N1-A11
cctcgttcctgtcgcgcagccacgacctggacgtgcacatcttacccggcggcggcgcggtcagttgaaccatggcggactccaaggccacctctgcggtcaccctccgcacccgcaagttcatgaccaaccgcctcctggcccgcaagcaattcgtgcttgaggagatccaccccggccgcgccaacgtctccaaggcggagttgaaggagaggcttgccaaggcgtacgacgtgaaggaccccaacaccatctttgtcttcaagttccgcacccacttcggaggaggaaagtccactggtttcggtctcatctacgacaacctcgaggctgncaagaagttcgagccgaaataccgnctcatcaggaatggtcttgctactaaagttgagaagtcccgcaagcaaatg

SEQ ID NO: 9401 - DNA, 472 bp, Zea mays
  Clone ID: LIB3150-037-Q1-N1-A12
aactcattcctcccaacaccacctcgcctgcgagctccgtagcctccgtcgcgtcgagcatcgatcatgtcggcctactgcggaaagtacaaggatgagctcatcaagaatgctgcctacattggcacccctggcaagggtatccttgctgctgatgagtccactggcaccattggcaagcgcctttccagcatcaatgtcgagaacgttgaggagaaccgccgtgccctccgtgagctcctattctgctgccctggtgctctccagtacatcagcggtgtgatcctcttcgaggagaccctgtaccagaagaccaaggatggcaagccttttgttgatgtcctcaaagagggaggcgtcctccctggcatcaaggttgacaagggcaccattgaggttgttggcactgataaggagaccaccacccaaagccatgacgaccttggcaagcgctgcgccaagtactacgagg

SEQ ID NO: 9402 - DNA, 340 bp, Zea mays
  Clone ID: LIB3150-037-Q1-N1-A2
attccacggctctaaggccatgtcgccggcgtccctcgcagctcggctcctacgccgcgccgcttccacctcttcctctcctctctccgctcttgtccgccgcggtctctgttcctcggcgcccgttcccctcctccgccgtctccctgcggccacctcatcgacggcggggaccaccgcccgccgcttcctggcgtcgcagtccccggcgtcctcctccacgtcttcggcggacgataacctgaggcgcatcgtcgagtctgagatcgagtgcgttgtccagtcggaggagagcaacaccgacaagcacattgatctaccagaggacttcccttttgag

SEQ ID NO: 9403 - DNA, 447 bp, Zea mays
  Clone ID: LIB3150-037-Q1-N1-A5
gaaagacctgggacaagcttcagttggccgccagggtcatcgttgccattgagaatccgcaggacattatcgtgcagtctgctaggccctatggccagagggctgtcctcaagtttgcgcagtacactggtgcccatgccattgctggcaggcacactcctggtacattcaccaaccagttgcaaacctccttcagtgagccacgccttcttatcctgactgacccgaggactgatcatcagcccattaaggagtctgcgcttggaaacattcccaccatcgccttctgtgatactgattcccctatgcgctatgttgatatcggcattcccgccattaacaaggggaaacagagcattggttgtctgttctggctgctcgcccgaatggtcctccagatgcgcggtacaattcttcaggacacaagtgggacatcatggtagatct

SEQ ID NO: 9404 - DNA, 330 bp, Zea mays
  Clone ID: LIB3150-037-Q1-N1-A6
aaaattctaagtctgagagctaatgttaggttgaccactaagggaattgatgatatgtccttgaagtactttgttgaggctggagctattgcagtaaggcgtgtgcgcaaggaagatttgcgccatgttgccaaagccactggtgcaactatggtgagtacatttgcagacatggaaggtgaagaaacatttgattcatcattccttggacatgctgatgaagttgtggaagaaagaattgctgatgatgatgttattctggtgaaaggcacaaaaaacaccagcgcggtctctataatacttaaaagcgcaaatgacttcatgcttgat

SEQ ID NO: 9405 - DNA, 379 bp, Zea mays
  Clone ID: LIB3150-037-Q1-N1-A7
ccgtcatcgatctcgtttcaaatccatccatcctcgtttcctccgtcccgcagcatctcaaccccatggccaagatcaagatcgggatcaatgggttcggcaggatcggaaggctggtggccagggtggccctgcagagtgacgatgtcgagctcgtcgccgtgaacgaccccttcatcagcaccgactacatgacctacatgttcaagtacgacactgtgcacggacagtggaagcaccatgaagtcaaggtgaaggactccaaaacccttctctttggtgagaaggaggttgctgtgtttggctgcaagaaccctgaggagatcccgtggggttcgggtggggctgaatatgttggtgaatctactggtggtttcac

SEQ ID NO: 9406 - DNA, 224 bp, Zea mays
  Clone ID: LIB3150-037-Q1-N1-A9
gttaatttctgacgacgaagacgaggaagagaagaaagatgctgacgaaggaaaggttgatgattgttattgacaaggagagaaaggaaagaagaaaaagaagatcaaggaggtttctcatgagtggtcattggtcaacatgcacaaacccatatggatgaggaagccagaagacatcacaaaagaagaatatgctgccttctatatgagcttgacaaatgact

SEQ ID NO: 9407 - DNA, 380 bp, Zea mays
  Clone ID: LIB3150-037-Q1-N1-B1
gccggcggcaaggctggcaacctcggcgactccgtcaccatctctcgcgagaagaccaaggtcaccgtcacctctgacggacccttctccaagaggtacctgaagtacttgaccaagaagtacttgaagaagcacaacgtgcgggattggctacgcgtggttgctgccaacaaggaccgaaacgtctatgagctccgctacttcaacattgctgagaacgagggcgaggaagaagattagattgcactacgcttatattttagtattgaactcgttgcattttgatacctgtacccgtagtttcgcatatgtcccatgttatggtgtggtatggttaatttgaagaatccttatgtactgaatctctgcaaaaagctatg

SEQ ID NO: 9408 - DNA, 66 bp, Zea mays
  unsure at all n locations
  Clone ID: LIB3150-037-Q1-N1-B10
atttgctttatctactccagagcgcagaggagcccgatcgacaccatgagggtgttgctcntttcc

SEQ ID NO: 9409 - DNA, 272 bp, Zea mays
  Clone ID: LIB3150-037-Q1-N1-B12
ggatgcggggagaggtgttataaaactagggagcccccagccagcaccaggttgcggcaacggcaacaaccagcaagtggccaccgattcacgggttcaagcgtttagcgccacgccgtggttgtcccaagccaagtgtacatattagtttaatacactgttcagtgcttagttagacagttacatggaatgctcaatagaccttcagttacgatccacccattgtgatacgtgaagaactgtgaattgattatactgaagacgtcaaatct

SEQ ID NO: 9410 - DNA, 300 bp, Zea mays
  unsure at all n locations
  Clone ID: LIB3150-037-Q1-N1-B3
aagctgccggcatatggtaagagcgccgtcttatcgatgacatgggggcattcncacttaagagtgaaggagggtatgtctaggcttgcaagaattatgatggagatgtgcagagcgatttattagctcacagttcaggctaattgggtttgatgacttcagaactggcgtgccctgatggaaagacgatctaagctgaatctgcccatggtactggtacccttcattaccgtgttcaccagaaaggaggcgacaccagtacgaacagcattgcctgaatctatgcgtggacaatatgac

SEQ ID NO: 9411 - DNA, 289 bp, Zea mays
  unsure at all n locations
  Clone ID: LIB3150-037-Q1-N1-B4
cgttaactccgccgccgacgcagcagcagaggagacgccaaggagagcccgcaaggaggcgactatgagggccaagtggaagaagaagcgcatgaggaggctgaagaggaagcgccgaaagatgaggcagagatccaagtaggctgatggggattgaggatggtggtgtcngcatatctgtgctacgtttattctatgcgcgagctcatggagagatgtcacatcctatttcgtccacaccgtttgccatgggttcaatggctcgttttggaaacctgcacttcagtag

SEQ ID NO: 9412 - DNA, 302 bp, Zea mays
  Clone ID: LIB3150-037-Q1-N1-B5
ttgctagacctgacgttgtcagctacggtaagataatatcagcatgctgcagcacgggcgatactgataaagcattggagcttctccaagaaatgaacaagtatggcatcagacctacactgagaacgtaccatacactcgttagtgcattggctagtgcagggagagctcatgatatggaatgcctatatcagcaaatgttgcacatgaatgttgacccgagcagtaacatatatgagatcatggttgatgcctatgtgagatgggactacgatccaaaagtagcatctttcaaaaaagta

SEQ ID NO: 9413 - DNA, 385 bp, Zea mays
  Clone ID: LIB3150-037-Q1-N1-B6
tcgtcggcctacaaccgttttcgagagaagacacccaaaccttagtagcgagcaggccccaaggactcgagatgaagtcgagggcacggtccaccgccggcgactccaggctctcggtgaggaagaccaaggctgagaaggacccaaacaagcccaagaggcctccgagcgcgttcttcgtcttcatggaggagttcaggaaggactacaaggagaagcaccccaatgtgaagcaagtctccctgattggcaaggctggtggtgacaagtggaagtccctgtctgatgccgagaaagctccctacgtgtctaaggcagagaagctcaaggctgagtacaccaaaaagatcgacgcttacaacaacaagcagtctggagaccccac

SEQ ID NO: 9414 - DNA, 400 bp, Zea mays
  Clone ID: LIB3150-037-Q1-N1-B8
tgttaagccgctataggagcctagcgaaagtaaggatgtactgatctgcggccgctcccatgatcatgaccttccattcggactgaaagaagtcatactatctgacgtcagactgttgacgctacttgagtatggccttccatcgagggttatatttcttcagtcatatccggtgttttgcaagatatatcggccatggatgtgccctcttgccaaagcattgtatgtcttgatgtcattaatcactgttcttataagattttatgacctctacaagaacgtgcccatgctgaaggcaactgcctcaaaattgtttggccctttatttgattggatagaaacatgggaaatgatatcaaaacttaagtatcttggaactatggctttcctgcataatttt

SEQ ID NO: 9415 - DNA, 352 bp, Zea mays
  unsure at all n locations
  Clone ID: LIB3150-037-Q1-N1-C1
atcgttttgcaaaggataatgtaattggagagggtgggtatggtgttgtatatcgaggcanattatcaaatggcaccccagttgctgtcaagaaaatccttaacaatttaggacaggctgagagagaattcagagtggaagttgaggcaattggccatgttcgtcacaagaatttggtccgccttttgggttactgtgttgagggtactcaaaggatgcttgtgtatgagtatgtgaataatggaaatcttgaaagttggctccatggggaattgtcccagtacagttctctcacttggttggctcgcatgaaaatccttctgagaactgcataggcccttgcttacttaca

SEQ ID NO: 9416 - DNA, 136 bp, Zea mays
  Clone ID: LIB3150-037-Q1-N1-C12
aacactcagtccatcccaagactctcgaggcgatagtggacgcgtgtgagcctctgctaagctctgcgatcccagacctagtaacaagtcattttagtcctcatcaaacacctccgcgacaaggagcaactcctca

SEQ ID NO: 9417 - DNA, 433 bp, Zea mays
  Clone ID: LIB3150-037-Q1-N1-C2
ctctagccaacacacacataatactctgcgttggattccattccatctcaaaggatagaataatgggcggtctctccaccaagcttttcgaggtcctcctcctgctcgtttgttacaccgggacgcaaggcgggccggtgactatggtgtcggcgaggaagtgcgagtcgcagagcttccgcttcaagggaccttgctcgagggacgccaactgcgcaaacgtctgcctgaccgaaggtttcaccggcggcgtgtgcaagggcctacgccaccgctgcttctgcaccagggactgctagtactgcctcgcctcgtgtcctgcgtgtgcatatatagccgcagcggatcagtaaaacatgcatgcatgcgttaccaaaatattggcagtaccagcaagttaatgaaataaaatattaaataatatgtcatggaa

SEQ ID NO: 9418 - DNA, 345 bp, Zea mays
  unsure at all n locations
  Clone ID: LIB3150-037-Q1-N1-D1
catatttgaagctgccggcatatggtatgagcaccgccttatcgatgacatggtagcatacgcacttaagagtgaaggagggtatgtctgggcttgcaagaattatgatggagatgtgcagagcgatttcttagctcaaggttttggctcattgggtttgatgacttcggtactggtgtgccctgatggaaagacgatcgaagctgaagctgcccatggtactgttacccgtcattaccgtgttcaccagaaaggaggtgaaaccagtacgaacagtattgcctcaatctttgcgtggacaagaagactngcacacagggcaagcttgatgacaatgctagacta

SEQ ID NO: 9419 - DNA, 195 bp, Zea mays
  Clone ID: LIB3150-037-Q1-N1-D12
gtgtagagctgaccgcgagatgcatctgaagagactaacctacatcgggagacggactgctgattctacagatcatctgaatctcgaacaaagcttactgggctgtgactatcattatgtcagccactaattggggtctaaggtatggagctcaaggatggaccgacccatgagccagctctccttgcgcacaca

SEQ ID NO: 9420 - DNA, 233 bp, Zea mays
  Clone ID: LIB3150-037-Q1-N1-D2
attacttctaaccatcggccaaaccacaaagaaacatctttttcaagagtcagactcaaacaaccttccttatacattataaacagactactcactcctgactataatgacttaaaagatgacaaagcacataacaccaatctagaacaaatcattcttgtagacacatccaccggttttccaggagaccaagaccttcagacctaagacacccccaatgacaccaaccccac

SEQ ID NO: 9421 - DNA, 155 bp, Zea mays
  Clone ID: LIB3150-037-Q1-N1-E1
gttaatttttgaccaccaataccatgaagagaagagagatgctgtggacagaaaggttgacgatgttgatgacaacgaagagaaacaaaagaacaatacgaacaccatggcagtttgtcatgagcggacataggacagcaagcagaagcccatat

SEQ ID NO: 9422 - DNA, 389 bp, Zea mays
  Clone ID: LIB3150-037-Q1-N1-E2
gttctttcgcccacagccaaatttttcaggaagaaatcgcggcataagctgcactgcagccatggacgccagcggagccggtagcaaggcgaagaaaggggcggctgggcgcaaggctggcggccccaggaagaagtcagtgtcgcggtccgtcaaggccgggctgcagttccccgtcggccggatcgggcgctacctcaagaaggggcggtacgcgcagcgcgtgggcaccggcgcccccgtctatctcgccgccgtgcttgagtacctcgccgccgaggtgctggagctggccgggaacgcggcgaaagacaacaagaagacgcgcatcgtaccgcgacactcgctcctggcgattcgcaacgacgttgagctaggaagctgctgtc

SEQ ID NO: 9423 - DNA, 399 bp, Zea mays
  Clone ID: LIB3150-037-Q1-N1-F1
ctccacctctcctccggctagggtgttcacgcgtgccgcggcgaagcttctgccctccccggcgtcgggctctggtcgtcgtcggccgggaagatggctggcggcttcagggtacttcatctggtcaggccctttctggctttcttgccagaggtgcagagcgcggataggaagataccattcagagaaaaagttatctacactgttatttctctcttcatttttctggtgtgcagccagctcccactctatggcattcattcgacgactggagctgatcctttctactggatgcgtgttatcctcgcatcaaaccgtggcactgtgatggagttgggtattactccaattgtgacctctggtatggtaatgcaacttcttgtcggatcgaagatcatt

SEQ ID NO: 9424 - DNA, 415 bp, Zea mays
  Clone ID: LIB3150-037-Q1-N1-F12
cttgttctagatcgcgagtggccgccctggaggtttttttttttttttgggtggtttgaaaaccctcagctccaaagctccattacaaaacggcttggaaattggaattctacgcttcctagcttggaaatgccagaacatttcaagaaaattaaataaaaggagaggcgcgcggctggtggatctccactgctttttggctctttgcttccctggtactccctccgtttctttttatttgtcactggatagtgcaaaattacactgtccaacgacaaataaaaagaaaaggagggagtcctacctagtagaaaatgcgcatctgaacggcagccagcgccagcgagatacacctcattcaattcatcagcaggtgaaaaagaggcaaaaagaaaagaaaacaggcgaaacgcct

SEQ ID NO: 9425 - DNA, 111 bp, Zea mays
  unsure at all n locations
  Clone ID: LIB3150-037-Q1-N1-F2
aattatattatgagagggtctactctctagaaagaagttcctaacacctgtgcgggcttacattcangctctcgcagctcctctcttttatcatgtttctttctttcgatc

SEQ ID NO: 9426 - DNA, 196 bp, Zea mays
  unsure at all n locations
  Clone ID: LIB3150-037-Q1-N1-F7
ctccacaccaagccagtaactttttctatccaagtccctcccctcatanaanacaactccaacacttttacttcgagacttcttaatctctccacacacccacaaacccagcaaagcaataacaccaaccatagatacatatatatagacacggaaggatcattcatccatcaaaccattacccattgacaacctt

SEQ ID NO: 9427 - DNA, 463 bp, Zea mays
  unsure at all n locations
  Clone ID: LIB3150-037-Q1-N1-G1
ctccatctccgtctccgtctccacaccgtgccggagctgctgctgtccgtgtccctcgcctcgaagaagacaactccaacactgttgctgcgtgactgctgaatcgctccacacacgcgcgaacccagcaaggcaagaacacgaacgagagagagagagagagagacagggagggatcatccatccatcagaccatcacccatggacaaccttaaggagcagcggggccacgatgccgcgggcgccaacagcggcgtctggatgacggtgccggcgttcggggactgggacacgaagaacggcgcgctgccggactactccatggacttctccaagatccgcgagatgcgcaagcagaacaagaaggagctcttccgcgccagcctcggcggcgacgacgacctnttnngccacgcccacgcccacgcccagaagccggaggccaacagcgcccatcccaagc

SEQ ID NO: 9428 - DNA, 225 bp, Zea mays
  unsure at all n locations
  Clone ID: LIB3150-037-Q1-N1-G12
tttatctaggagccctctanacatttccatcactcgactcgatttcccaaaacatcatgtaatgctgtataccccaagaaatgttccatccgtcccaaactttatttcaggctggaatcaatgccctgcatcactctaccttgctgtcaccattattttatgatatgcaactgatgttttttacatagtcattgcacttgttccccattacgtttgctactactt

SEQ ID NO: 9429 - DNA, 437 bp, Zea mays
  Clone ID: LIB3150-037-Q1-N1-G2
gttagatggaggtcccatactgcattggtaaaggaaaggctcgccttggatcgatcgttcacaagaagactgcatcagtcttgtgtctgaccactgtcaagaacgaggacaagcttgagttcagcaagatcttggaggctattaaggcgaacttcaatgacaagtttgatgaagtcaggaagaagtggggaggtggcatcatgggctccaagtcgcaggccaagaccaaggccagggaaaagttgctggccaaggaggccgcccagcggatgacgtagattatccactgttgagtttgccccttgtagttgacgtggaagaaccgatgagcattgtgcactcgtattgtgtttttttgaatctactttcatatgtttctgtccatcagaccgtgtttagaaactttgaaagacagttctacagtgtttgtgcaatgt

SEQ ID NO: 9430 - DNA, 366 bp, Zea mays
  Clone ID: LIB3150-037-Q1-N1-G3
ctgcactcttcctctccccctctgcggaccttgctgctgccgcccgagcggcctcgcagcacatctactcctcactggtgccactctaccctgctcagcctccaccgctccctaccctcctcacggaccctgccttcgatgccgagcagatttggtcccagatcgagctgcttgcccgcccactcctccctcagctgggccgccagctccgtcgcatcgtgcagcaaccctcctcgcaacagcctcctttgaaaatgcctgctgtcgccgagggtgagcaagtggaggaggatggagaaagtagcgattcagaggaattgaagaatgcaaaggagttggaggggacagatgatgggaggagttgga

SEQ ID NO: 9431 - DNA, 218 bp, Zea mays
  Clone ID: LIB3150-037-Q1-N1-G5
tccattctattcaaccacccacgcgtttactcttccctcccttctaggaaggagtaatttctacgagcaagcgtgcacacatttactcctcctggtaccactttaccctgctcagcctccaccgctccctaccctactaacggaccctaccttctatcccaaacagatttggtcccatgatctagctgcttgcccactccactccttcctcagcttaa

SEQ ID NO: 9432 - DNA, 217 bp, Zea mays
  Clone ID: LIB3150-037-Q1-N1-G6
cccacacttcgtcggggaaggattattttcactcggagctgccacccccttgcttacttcttcactctcgtcactgaccactgtcaagatcgattacttgctttaattcaccaagatctttgacgctattaaggcgaacttcaatgactaatatacctaattcagtaacaaatggtgaagcagaatcatgttctccaattcccacaccaactccaac

SEQ ID NO: 9433 - DNA, 307 bp, Zea mays
  Clone ID: LIB3150-037-Q1-N1-H1
gaggctactgatgcgagggtgagcacggactgggagactgggagggaaagaggctttgactctgtgaactactccgacagtgatgctgccaaggaagctatctctgcaatgaatggccaggtaattgatggtcagcagatacatatcaacatggctaatgagagagctgctgagaacctgcgtgatgatggctatagcgagcagtattatagaggtagtaactacgaatgtaacggcggctacagaggcggtggctatggtggctgcaggcaaagatatgatgcgtgcagggggcaggatcctatta

SEQ ID NO: 9434 - DNA, 388 bp, Zea mays
  unsure at all n locations
  Clone ID: LIB3150-037-Q1-N1-H2
ccaaattcaaagtcacagcggcgaaactctcggcgatgtctggccgcggcaagggcgggaagggtctgggcaagggcggcgccaagcgccaccgcaaggtgctgcgtgacaacatccagggcatcaccaagccggcgatccgcaagttggcgaggaggggcggcgtcaagcgcatctccgggctcatctacgaggagacccgcggcgtgctcaagatcttcctcgagaacgtcatccgcgacgccgtcacctacaccgagcacgcccgccgcaagactgtgaccgccatggacgttgtctacgctctcaagcgccagggccgcaccctctacggtttcggcggttaggtcgcccctctcccggtggcgaattacgtngtggcggtggc

SEQ ID NO: 9435 - DNA, 443 bp, Zea mays
  unsure at all n locations
  Clone ID: LIB3150-037-Q1-N1-H3
tctctctctattcgttccccgcctcacccgcgagccagccgtctcgctagggtttcgccgccgccgccgccgccgccgccgctatgcctcgccgcagctcaagaaggtctgccccacgcccagctccccgtgctgctccagtgaggaacccgccacagccagcacgccaggctcctcctccagctcctgttcgagatggtggtggctccatgtttggaggaattgggtccaccattgctcaaggtatggcgtttggcacgggtagtgccatggcacacagggctgttgatgctgtattaggtccccggaccattcagcatgagactgttgcctcagaagctgctgctgctgcccctgcccctccagtgatgaatgctgacgctngcagcatccattctaaggctttncaagattgtctcaacaactatggcagcgagatcagc

SEQ ID NO: 9436 - DNA, 438 bp, Zea mays
  Clone ID: LIB3150-037-Q1-N1-H4
ctctctcgtctctccagcgacggcagcgggcgagggttacgcgaaggcgaagcggagtagtggaagcagaggcggcagccatggccgtgatggagaagctcaagatctttgtcgttaaggagcccgtagtcgcggcctcctgcctcatcgctggattcgttgtccggccaatcctggattcatggcagaccgcggaacaagttcctccacctcttctaaatgatgtggttgcaggtgtcaccggcaagaaaaagtagtgaacttgcattgttttctcatgccaatgttgccccacattttcttccccgtgttttttctggcgaccagattggaaggcttttcccaagagtcacggtcttgaactctagatggtatccgcggaataatcattgtacctgaatcatatactgcaatgtggcagtttgaaaatggtttccc

SEQ ID NO: 9437 - DNA, 224 bp, Zea mays
  Clone ID: LIB3150-037-Q1-N1-H8
aatctcgtttcaaatacgggcatccttttatgctgcgtgaggcaccccctcaaccccatggtcaacatcaagatcgggatcaatgggttcagcaggatcggaagactgcgcgccaaagcggcccttcacattgacgatgtttagctcgtcttcctgaaccaccccttcatcaacaccgactacatgacctacatgttcaaatccaacactgtacacggacagtg

SEQ ID NO: 9438 - DNA, 279 bp, Zea mays
  Clone ID: LIB3150-038-Q1-N1-A1
gttcctctcctcgccctttgtccagcagcagccgccgagggaccgaggaccgtccccggccgagacgaggacgctgctgctcctcctcctggtcgagacgaggatgctgctgctcctggcgctgttcggctctccagtctccatcgcaatcggctctccaagtctccatcgcgatctccacggttgggcgcctgggcggacacgcacgggaggccgcagctctttgcttgggacgaggagtagctcgaggagcagctcgaggggtgaggattcagtttt

SEQ ID NO: 9439 - DNA, 421 bp, Zea mays
  Clone ID: LIB3150-038-Q1-N1-A10
cgtacgcgtgggcgcgccgccacccgcgacaggtaatgaagaggagggcaggatgtcccaccgtaagttcgagcacccgaggcacggctccctcggcttccttcccaggaagcgctcctcccgtcacctcggcaaggtgaagtcattccctagggatgaccccaagaagccttgccatctcactgccttccttggctacaaggctggcatgactcacattgtccgtgaggttgacaagccaggatccaaactccataagaaggaaacttgtgaggctgctaccatcattgaaacccctcctcttgtcattgatgggcttcgggcatatgtgaagacttctcgtggcctccggacactcaactctgattgggctcaacatcttagtgaagaagtgaggagaaggttctacaagaactggcgc

SEQ ID NO: 9440 - DNA, 449 bp, Zea mays
  Clone ID: LIB3150-038-Q1-N1-A12
gcggcggcaccggcaggcggcggccctggggcattgtcccagcgggagcaggacatccatatgatgctcgccgccgatgtccacctcggcaccaagaactgcgacttccaggtggagcgctacgtgtacaagcgccgcactgatggtatctacattattaaccttggaaagacctgggacaagcttcagttggccgccagggtcatcgctgccattgagaatccgcaggacattatcgtgcagtctgctaggccctatggccagagggctgtcctcaagtttgcgcagtacactggtgcccatgccattgctggcaggcacactcctggtacattcaccaaccagttgcatacctgcttcagtgagccacgccttcttatcctgactgacccgaggactgatcatcagcccattaaggagtctgcgcttggaaacattcccaccatcgc

SEQ ID NO: 9441 - DNA, 446 bp, Zea mays
  unsure at all n locations
  Clone ID: LIB3150-038-Q1-N1-A2
agggactgcctccggagaccggagcaggccgcaagcgtccaggttcgagacgccagcacgctctcgcagtacagcagcattatcagggagcgtgccgtgggagtgggaggttgcctcaggtgcggagcagtcgccggcggcgaccatcggtgtctgagatgaaggagagaggcggctccagggcggcagtggacgagcgctacgcgcagtggaagtcgctcatccccgttctctacgactggtttgccaaccacaacctcgtttggccatccctctcctgccggtgggggccacagtttgagaaagctacctacaagaatcgtcaacgcctttacctatctgaacagaccgatgggaggggcctatactctggtatcgcnactgtgaagtgtgaaaccagggttgcgctgctgacatatctgcaggttacgaggaacacgatcacc

SEQ ID NO: 9442 - DNA, 317 bp, Zea mays
  unsure at all n locations
  Clone ID: LIB3150-038-Q1-N1-A3
agcaatccctagcagaagccttccatcctgactcgctcgatggcccgcacgaagcagacggcgaggaagtccaccggcggcaaggcgccgaggaagcagttggcgactaaggcggcccgcaagtctgcccctgcgaccggcggagttaagaagccccaccgcttccgccccggtaccgtcgcgctccgggagatccgcaagtaccagaagagcacggagctgctgatccgcaagctgccgttccagcgcctggtgcgggagatcgcgcaggacttcaagaccgacctacgcttncagagctccgctgtctccgcgct

SEQ ID NO: 9443 - DNA, 397 bp, Zea mays
  unsure at all n locations
  Clone ID: LIB3150-038-Q1-N1-A5
attagctttatctactccagagcgcagaagaacccgatcgacaccatgagggtgttgctcgttgccctcgctctcctggctctcgctgcgagcgccacctccacgcatacaagcggcggctgcggctgccagccaccgccgccggttcatctaccgccgccggtgcatctgccacctccggttcacctgccacctccggtgcatctaccaccgccggtccacctgccgacgccggtccacctgccaccgccggtccatgtgccgccgacggttcatctgccgtcgncaccatgccactaccctactcaaaccgcccggactcagcctcatcctcagccacactcatgctcgtgccaacagccgcatccaagcccgtgccagctgcagggaacctgcg

SEQ ID NO: 9444 - DNA, 392 bp, Zea mays
  Clone ID: LIB3150-038-Q1-N1-A6
ccttaaccctcgttcctctagccgtctggcgcagccacagcctccatttctcctccgacggcggtgcggctagctcaaccatggcggactccaaggccacctcggcggtcaccctccgcactcgcaagttcatgaccaaccgcctgctggcccgcaaacaatttgtgcttgaggttatccaccccggccgcgccaacgtctccaaggcggagttgaaggagaggcttgccaagatgtacgaggtgaaggaccccaacaccatcttcgtcttcaagttccgcacccacttcggtggaggcaagtccactggcttcggcctcatctacgataacctcgagtctgccaagaagttcgagcccaaataccgcctcatcaggaatggtcttgctact

SEQ ID NO: 9445 - DNA, 379 bp, Zea mays
  Clone ID: LIB3150-038-Q1-N1-A7
ctctccttcccggtctcctccgcccggggccttcgtaccctccatatccggctgcgacggcggcgagcccgacaccgagaatcggatccgccgacaaggcgagagggaagagatggggctcacgttcaccaaactgtgcagcccgctgttccccaagaaagacatgcggatcctgatggtgggactccacgccgtcggaaagaccaccatcctctacacgctgaagctccgagagatcgtaagcaccatacccaccatccgattcaatgttgaaactgcggagtacaagaacatcatgttcactctctgagatgacgcgggccaggacaagatcaggccactgtggaggcgtgactaccagaacacccactgtctcatc

SEQ ID NO: 9446 - DNA, 463 bp, Zea mays
  Clone ID: LIB3150-038-Q1-N1-A8
actagctcgagcgtgacctgttccaccggctagtccacgacctcgcccaggacccagtgcccatgcgatgggtgatcgcgttctggctctggctcgagtccgatggccaccatgacttcatccgccgcgtctccgcgctgccaggacccgttgtgctgcggttcgtcgaggaggccatcgagtgcctccgcggcctcgcctgccggggccacgggcctgcggccggcaccggcgacggcgacggcgacggccgcgagaggcggtgcctaccctgcacgaacgcgctcctgaccaagcccatagacgatgcgggctacttcgaagggcaacgcgagattttggatggcgtcaggtatcagtacaggaccgtatgcctcgccgtttgtgatgtcgacagcaacatcaccgcttgtgtgcccactaacactagcggcggcgtgcttggtgctccgccgatggtcgg

SEQ ID NO: 9447 - DNA, 101 bp, Zea mays
  Clone ID: LIB3150-038-Q1-N1-A9
caccccattcgaggggtgctgatagaccggttaagcgggatacatttttcttaccaagcagactgctagcgagtccacgggagggaaggctcccaggaagc

SEQ ID NO: 9448 - DNA, 343 bp, Zea mays
  Clone ID: LIB3150-038-Q1-N1-B1
cgccagccttacgcagtctcccgccgcgctggccaccagacgtcggccgagtcctggggtacgggccgcgctgtgtcccgtatcccccgcgtccccggcggcggcacccaccgcgccggccagggagcattcggcaacatgtgccgcggcggacgcatgttcgcgcccaccaagatctggcgcaagtggcaccgccgcgtcaacgtcaacctccgccgcgtcgccgtcgcctcggcgctcgccgccaccgccgtcccggccctcgtccaggcgcgcggccaccgcatcgagaccgttcccgagatgcccctggttatctccgactcggcagagtccatcgaga

SEQ ID NO: 9449 - DNA, 334 bp, Zea mays
  unsure at all n locations
  Clone ID: LIB3150-038-Q1-N1-B10
ccggaaatcctctctttccagccacgcctcactcttcactagccctgtggtcctctgaaatggcggcggcgacttcctcttccacctacctcgccatcggccgcaaaaccctaaaccccgccccctccgtagccacagccgccacctncgtctccttccccgccacgcagcatccatgcctcgtcgccgcctccgcggaccgccgccgcgccgtggctgcgaaggtctcgtcgccgtcggtcatcggcaccgccatgccgtcgctcgacttcgagacctccgtcttcaagaaggaaaaggtgtccctggccggccatgaggagtatattgtgag

SEQ ID NO: 9450 - DNA, 434 bp, Zea mays
  unsure at all n locations
  Clone ID: LIB3150-038-Q1-N1-B11
cttgggtgttgattacacaggagagggggtgattccaagcttggagaggcataatgtccgtcagctttatccaaagggtcccaatattgacttcaagaaggagcttaggaccctcaacagagagcttcaattgcatattttggagcttgcagatatattagttgagagaccatctcaatatgctcgtagggtagaagatattacgctcatattcaagaacttacatcatcttctcaattccttacgacctcatcaggcaagggccacattgattcacatgcttgagagccaaattcggcaccgcaaggaagcaattgaagatataaagcagtgagtctcctttctcatatgtagtagtgttgaaatcacatttcatgtattcaattntagtctgtgtctataactgagtctcctgccacaactccagtttccta

SEQ ID NO: 9451 - DNA, 457 bp, Zea mays
  unsure at all n locations
  Clone ID: LIB3150-038-Q1-N1-B12
tctggccgctgcccgaccccgacgccagctgcccagttcttcgccggcgacgagcactccaccagacgagaggggattccaagatgccgagggccaccagcgacgcgaagctcctgatccagtccctcggcaaggcgtacgctgccacaccaacaaatctcaagattattgacctctacgtgggttttgcggttgccactgcccttattcaggttgcttacatgggattggttgggtcgtttcccttcaactccttcctctcaggagtcctttcatgcataggaactgcagttcttgctgtttgcctccgcattcaagtgaacaaagacaacaaagaattcaaggaccttcccccagaaagggcctttgctgatttcgtcctatgcaatctggtgctccacctggtgatcatgaanttcctcggataagcaactgctgcaccatgttggttaaaggg

SEQ ID NO: 9452 - DNA, 456 bp, Zea mays
  Clone ID: LIB3150-038-Q1-N1-B2
atttgctgttgctttcaatggagcatcatgggtggatcctgattctgttgcactgatggttatgcaaacaatgcttggttcatggaacaagagtgctggtggaggaaagcacatgggttcagagcttgtgcagagggcagcaatcaatgacatcgctgagagtgtaatgggattcaatacgaattacaaggacactggtctttttggtgtctatgctgttgctaaggctgattgcttggatgatttggcttttgcaattatgcatgagatgagcaaattgtcataccgggttacggaagaagatgttatccgtgcacgtaatcagctgaagtcctctatccaactccaccttgatggttcaactgccgttgttgaggacattggccgtcagctgctgacctatggacgaagaattcctacccccgagctttttgcaagaatagatgctgttgatgc

SEQ ID NO: 9453 - DNA, 393 bp, Zea mays
  Clone ID: LIB3150-038-Q1-N1-B3
ggcacacacaccacaccacacctcctcgctggcactccgctcgtctgacatctcgtcccgtcctttcgtttcgaagcctcgcgagccccgacgatggccaccgccgcggtgtcggtcgacgagaagctcgacaagcttcgcgccgaggtcgccaagctcgaccagatcagcgagaacgagaagtccgggttcatcagcctcgtgtcacgctacctcagtggggaagcggagcagatcgagtggagcaagatccagacccctacggatgaggtggtggtgccctacgataccgtcgcgtcgcctcccgaagatctcgaggagacgaagaagctgctggataagctcgttgtgctcaagcttaacggagggctcgggacgaccatgggctgcact

SEQ ID NO: 9454 - DNA, 447 bp, Zea mays
  Clone ID: LIB3150-038-Q1-N1-B4
cttccagagccccccgccgccgctgcgccctgctctcggtcctgccgtccgtcgaggtaaaaggacagcatggtgagggtcagcgtgctcaatgatgctctcaagtccatgtacaatgctgaaaagatagggaaacgtcaggtcatgatcaggccgtcatccaaggtgatcatcaagttcctgacggtcatgcagcgccatggctacattggtgagttcgagtacgtggatgaccacagagctgggaagatcgtggtggagctgaatggaagactgaataaatgtggtgttattagcccacgttttgatgtaggtgttaaggagatcgaaggatggacggcgaggcttcttccatctcgccagtttggctacatcgtcctaacaacttctgctggaattatggaccatgaggaggcccgccgtaagaatgttggtggcaaggttcta

SEQ ID NO: 9455 - DNA, 351 bp, Zea mays
  unsure at all n locations
  Clone ID: LIB3150-038-Q1-N1-B5
cgctgctcggcgctctcctctcccgacgacagctacacctcacaaccgtgagctcgcgaaggaacgctgttcgcaattccggcgccggcaccatgagtaagctgcagagtgattctctgagggacgcgattgcctcaattaccaatgattcccgtgagaagcagcgcaaatttgttgaaaccattgagctacaaattggactgaagaactatgaccctcaaaaggacaagcgcttcagcggctctgttaagctggctcacatccctcgccctaagatgaaggtttgcatgcttggcgatgctcancatgttgaggaggcagagagaatgggtatagacaatatggatgtgg

SEQ ID NO: 9456 - DNA, 456 bp, Zea mays
  Clone ID: LIB3150-038-Q1-N1-B6
ttgtgccgccgcagcccgcagtcggttgggcgcagcagcacttcgcaccgccgccccatcccatcgccgccagtgtctgctcgatccgatggctcccacgaagaagtcgaagaagagcacagagagcatcaacaacaagctgcagctggtgatgaagagcggcaagtacaccctgggctacaagaccgtcctcaagacgctgcgcaactccaagggaaagctgatcatcatcgcaaacaactgccctccacttaggaagtctgagattgagtactacgccatgctggccaaagttagcgtgcaccatttccacggaaacaatgttgatcttggcactgcctgcggcaagtactacagggtgtgctgcctcagtatcatcgacccaggtgactcggacatcatcagtaccacccctggcacccagtgagccagccccggcacccattgcagctgctt

SEQ ID NO: 9457 - DNA, 365 bp, Zea mays
  Clone ID: LIB3150-038-Q1-N1-B7
ctacaactgcactggtctccacgggttgctcgtcttcaacgctgttggtggaggaacgggctctggccttggttccctcctcctagagcgcctgtctgttgactacggcaagaaatccaagcttgggttcactgtgtacccttccccccaagtttctacttccgtagttgagccatacaacagtgtactgtccacccactccctcctcgagcacactgatgtggctatactgctggacaatgaggccatctacgacatctgccgccgatcccttgacattgagcgcccaacctacaccaacctcaacaggcttgtgtgccaggacatctcatcccttactgcctccctgaggttcgatggtgctc

SEQ ID NO: 9458 - DNA, 480 bp, Zea mays
  unsure at all n locations
  Clone ID: LIB3150-038-Q1-N1-B8
cgtgtacgcgtggtgatacctcccaagagcgtgggacgtagatcatagtgtgcaggcgatcgcatttttacgaggctatttgggagcgatcgttggaacacactcaaatgattgctttgatcgcaaacttggcacctaacatgagcatgccttccaagttttgacttttatgaatccaaaaacacgctttcttcactgcaccccgatgcttgcctccgacgcaattggacaagtgcaagatgaaagatgcatttatctcagatggatgcttactgagagaatgcaacatcgagcattctgtgattggagtctgctcacgtgtcagctctggatgtgaactcaaggactgcgtgatgatgggagcggacacctatgaaactgaagaagaagcttcaaagctactgttagctgggaaggtcccacttggaatacgacggaacacanagataaggaactgtatcattgacatgaatgctagga

SEQ ID NO: 9459 - DNA, 372 bp, Zea mays
  Clone ID: LIB3150-038-Q1-N1-B9
tcgctggcttctcctccccctcttaccgggggctcttctggttagggggagcttagggttttgtggaggggcgatggcggcggctgatgtggagtaccgttgcttcgtcggcgggcttgcctgggccaccagcaacgagtcgttggagaatgccttcgccttctacggcgagatcctcgactccaaggtcatcaccgaccggtagacggggaggtctcgcggcttcggcttcgttaccttctcctccgagaactccatgctcgacgctatcgagaacatgaacggcaaggagctcgacggccgtaacatcaccgttaaccaggcccagtcccgtggcggtggcggtggcggctgaggctactgcggcagtcg

SEQ ID NO: 9460 - DNA, 379 bp, Zea mays
  Clone ID: LIB3150-038-Q1-N1-C1
gtgagaaaaggcgggggaggggggactggaggtgaaaggcggctgctttcgctgtctccccaccacccgcgcacagtggcagcgctgacggtggcaggcaaggaaagtggcgatcacaccaaactcacatacagatggagatggcagagaccttgcatgtattgcccgatgatgccaatggaagtgctgcagttcagactgagccttattgccatgaagacgccattgaggacatggaatctttcttggatgaagtaaacgacagggttcatgtttcaggaattgtgactggtgctatcatcaaagggatcctaagtgatgtgcgggcagaagctgctagccaaattgctctcaaagatgcagagatatcatcactgga

SEQ ID NO: 9461 - DNA, 450 bp, Zea mays
  Clone ID: LIB3150-038-Q1-N1-C12
ttgggtttagtcgcgccgccgccggcggcgaaacagcacatcgctctctcgatctcagccatggcggaggtggagcagccccaggacgcggtgaagctcttcaaccgctggaccttcgacgatgtccaggtgaacgatatctcgctgaacgactacctggctgtgactgcggcgaagcacgcgacattcctgccgcactccgcggggcgctactccaagaagcggttccgcaaggcgcagtgcgccatcgtcgagcgcctcaccaactcgctcatgatgcacgggcgcaacaacggcaagaaggtcatggccgtccgcatcatgaagcacaccctggagatcatccacctgctcactgacgccaatcccatccaggtggtcgtggacgccattatcaacagtggaccacgtgaggatgccacccgtattggttcagctggtgttgtgaga

SEQ ID NO: 9462 - DNA, 260 bp, Zea mays
  Clone ID: LIB3150-038-Q1-N1-C3
attcactctccttgcgcttcctcgacggggggcgtgcccaccccgtgttcaccgacccatcccctactgctcgcacatggatcccatccatggcggagacaccgtcgccgacggtcagctcggccggtttgacgagcacgaccacctggagcaggcatccgtacactccctcgccggcgggaagaaaggcatcctatacggaggacgaggggccttgaccccgacctgagggaaccagcatgtgccacgattgatcacac

SEQ ID NO: 9463 - DNA, 404 bp, Zea mays
  Clone ID: LIB3150-038-Q1-N1-C4
ccattctcagccgccgccaatcccttgcggtggtccgcaaccgctgagtgagaagaagagatggccggcaagggcgatggcccggctatcggcatcgatctcggcacgacgtactcttgcgtcggcgtgtggcagcacgaccgcgtcgagatcattgccaacgaccagggtaaccgcaccacgccctcgtacgtcgccttcaccgactccgagcgcctcatcggagatgcggccaagaaccaggtcgccatgaaccccatcaacaccgtctttgatgccaagcgtctcatcggcaggaggttcagtgatgcgtctgtccagagtgatatcaagctgtggcccttcagggcatttctgggcctggtgagaagccaacgattgttgttcagcaccagggtgaggag

SEQ ID NO: 9464 - DNA, 386 bp, Zea mays
  Clone ID: LIB3150-038-Q1-N1-C6
gttcaaatttatatccagtggaaagaacgcagctgtatgacagactgtcgctacttttgcatgacgcggagagaaggggaacggtaggcacttggtctgagccccgttaaatatcatggaaagtggccgttcttacacatcattgtgttccaggaacccctttcagctgcactttctgctgtcaacctactgatgcacttcactggctggctttcattacttcttctagtgaattaccaatagcctcttagaccccaggccaagagaacttactatgaatatactagctcgtggcatatctatgcaatcttatcaatgaacgcatggttctggagctctattttccatactcgagacattgacttgactgacaaattgaactattc

SEQ ID NO: 9465 - DNA, 250 bp, Zea mays
  Clone ID: LIB3150-038-Q1-N1-C7
atcagccacccaccctctgtttaggagatcaaggagaaactggcggggagcctattcttgatggcgccccgatggcaacctaatgaaagggtattccttcaacggcatggagaaggaggccatggattgctatgcagaggtgcttggagagggctccacggtgaggttccgcgctgcgagctacaacatggtgctagatgcactcgccaagaatggcaagttgacctattccctcctccggtaccgcaga

SEQ ID NO: 9466 - DNA, 428 bp, Zea mays
  Clone ID: LIB3150-038-Q1-N1-D1
cctacaagtactttgagatcatccttgtggacgttgcccacaaagccatcaaaaccgacccgaggatcaactggctatgcaaccctgtgcacaagcaccgtgagctccgtggcctcacctcagcaggcaagaagtaccgtggcctgcgtggcaagggccacacccaccacaagaacaggccctcaaggagagccacctggaagcgcaaccagaccctctccctccgccgctaccgctgagcagctcgtcgggtgcttggatactgccactgtccgatcattcccaatcaagacaacaagcgtgcctgtctctggttgcattttcaaagttttgctatttgtgttcttagcacttttaatgttagaagtcaattatggagcatatgtcatgaactatttgcaattcggttgtattatcagacaatgaat

SEQ ID NO: 9467 - DNA, 154 bp, Zea mays
  Clone ID: LIB3150-038-Q1-N1-D3
cttgcttgtcctctacgtataaccaagtgctgtgagggataagggtacttaaggacatgtggatgagcgaccgattcggatgatgtgttatgcacgacgcttaaactgcggggtcgcatgggacaccagaaaaaagtccgtggacaatgtctta

SEQ ID NO: 9468 - DNA, 370 bp, Zea mays
  Clone ID: LIB3150-038-Q1-N1-D4
cacaacagcgaaggagaaagcagaccaagctggccacccagggagaaagaggccaaaagggaggggagagtgtcgtcatggcttccattgtcgcttccaggagggccgttcctctagttcgcgctctggagaagctcatcgcagcgtcctccgctcccgggactggctccgccctcaggccggtggcagtcgccggcggcctccgcggctacaacaccggcgctccgctccgacgctacgagggggccgagtcggaagacgatagcgtccgcgagtacgatgggcggcacggcggccgggactacgctgtgcccagcctgttctcaagtaatattttccgtgatccgcttagtgcgccgcacaagcattg

SEQ ID NO: 9469 - DNA, 187 bp, Zea mays
  Clone ID: LIB3150-038-Q1-N1-D5
tgtttctcagcgccgacgtcatcgtgggggcgactgcagagtttgggcgcactcccagagcttcccctagttaaagcctgactaggacgctggcatcataactgactttgatgaacctggtactcttgcaccaactggtcttttcgttggaggcacaaaccacatcgtgatccaaggccaacctgga

SEQ ID NO: 9470 - DNA, 402 bp, Zea mays
  unsure at all n locations
  Clone ID: LIB3150-038-Q1-N1-D6
tcctccacaagatccaccgattcgaggatggggacttggtggccatgccggccggcncccattactggctgtacaacgacggcgacgcgccgcttgtggcggtctacttcttcgacgagaacaacaacatcaaccagctcgagccttacatgaggaaattcttgctggctgggggcttcagcaaggggcagccccacttcgtcgagaacatcttcaaagggatcgacgcccggttcctgagcgaagccctgggcgtcagcatgcacgtactctagaagctgcagagccggcgtgaccagccaggcgagatcgttcgcgtggagcccgagcacggctttcaccagctgaatccgacgccgtcaccattgttgatttcgttcccatcgttacaagtccagtacc

SEQ ID NO: 9471 - DNA, 399 bp, Zea mays
  Clone ID: LIB3150-038-Q1-N1-D8
tgtagctgcaagagcttatgatgctgcggcgcgcatgattcgtggcaagagcgccaaagttaactttcctgatgcaccagaagttggtcagaatcgccgttctcgctcagcttccgctaaagcatccaagtcacgttttggacacaagcctattgtcaaagtaactatgaacagccttgccaacacaaatgcattcttctttcaatctgttagctacccctccaatttatttgttcagcatggcaatataccatatgttccaacaatgaactctactgcgtctgttgaagatcctatcatgaatctgcactctgaccagtgaagtaactcctttgggtgttcaaattctgatgggagaatgattcccagacccaaaaattacttcatttgtccatttcc

SEQ ID NO: 9472 - DNA, 452 bp, Zea mays
  Clone ID: LIB3150-038-Q1-N1-E1
cgacgaaggagacagccctccggaagacgaaggacgaggcaggccgagctaccagaggaccttgtcaggcgggctgcagagccccagagccacccaagtgccccagagggcgatcctcgagaggatgaagtccaagggcgagttgtccaagtcgtaccagctcgggcacaggctgtccctcaaatggagcaccggggctggcccgaggatcgggtgcgtcaaggactacccgatggagctccggatgcaggcgctggagatggtggacctttcgcccagagggttgtcgtcgactccgtcgccgtcgaggagactgcctcctccgtgcttttcccccactaaagtcgcctcgccgacgtctccgctcgcgccagttcaggcgtccctgccgcagccaagctaggagaactcgagagtagcagcattatgcatggccacgcgcaaatagcaca

SEQ ID NO: 9473 - DNA, 455 bp, Zea mays
  Clone ID: LIB3150-038-Q1-N1-E12
gttcgcggcgccgccgacgccgaccgcgccactctcggatactaccgcgtccgcccccccgctgcttctcgtctccgcgcagccgtccgatggccaagcggctcgccggcgccgacaaagaggtgctcgtcgaggtggtgaggttcacgcagaagagcggcctgaggggctgtgacggcggctggaaggatttcctggcccggaacgacaggaagtttggcgcgtcggtcagcgaccccaggaagcgctccagggacgtgctgctcgccttcctgcagaccttccccaaggatttccagaagtacttcggcaaattagtgaagcgtcataatgaaagaagtgctgttcagcagtatgtggctgatttccccgacgaagtttctccccagcagaaacttgttcaactgacggcagagcacccagagtacagaaaacactactgcttcccatcgtac

SEQ ID NO: 9474 - DNA, 396 bp, Zea mays
  Clone ID: LIB3150-038-Q1-N1-E3
cgtaggcgagggtctcttttccaaaaagggggggtcacgacggatcgagcatctgggccgtcggggccgcggatcggacggctgccaccgcggcccggatgtttccctgccaccataaatgcgccgcggccgtcctcgctgcccaacccttcgctgcgccgccgcctccgacatcgtctcttcgtccccacgagcaaccgataatccgtcggcgctgagatgttggtttatcaagacctcctatctggcgacgagctcctgtcggattcattcacctacaaggagctcgagaacggcgtcctgtgggaggtcgagggaaagtgggtcacccaaggtcctgttgatgtagacattggtgccaatccatccgccgagggtggtgaggatgaaagcgtt

SEQ ID NO: 9475 - DNA, 220 bp, Zea mays
  Clone ID: LIB3150-038-Q1-N1-E5
atacaatcacccatcctccttttttacgacagccccaccactaccgcagaactacacaagtccacctccccaccaaccttgtcacactcgcttcagaatcccacacccaacccaaacccaccgagcgctaccaccaccaccatgaccatcaacgtcgaactctacaacttgtacaagctcgggcgcaatctctcccataaaaagaccaccacttctgtcc

SEQ ID NO: 9476 - DNA, 51 bp, Zea mays
  Clone ID: LIB3150-038-Q1-N1-E6
tttaattgcccacacggtctacctcttcctgccagtattaaagtgagagtg

SEQ ID NO: 9477 - DNA, 431 bp, Zea mays
  unsure at all n locations
  Clone ID: LIB3150-038-Q1-N1-E8
aagctggatcggtatattcaacccacccatccggctccttctccgcttctctccactatcctgcgangcaccactcgcatcgtgtgctcagtcagatccccgtcccgcatttcctaaggccagttggcattgaagacgatgactgcttctgcagctgctggtgtgcagatggtggctgcacgcccttgcatttcggcctcgccaggaattcttaccgcacgggtagcagtttctaggactgattgcatgctcagtaccactgctacattccccaaaatcagctgctcctggcctctaaggtttaagcgcaatgatgttgttgtaagagcaatatctgaagagtgtggcccgcaggggcttcccattgatctcaaaggtaaaagggcattcattgctggagttgctgatgataatggctatggatgggcaat

SEQ ID NO: 9478 - DNA, 408 bp, Zea mays
  Clone ID: LIB3150-038-Q1-N1-F1
gttttgctgctctccgaccccgagctccgaaggccgcagcatcaggcgcggcccccctcgcgtgtgaccgagatggcgctgccgaatcaggggaccgttgattaccccagcttcaagctcgtcatcgtcggcgatggtggaactggtaaaactacatttgtgaagaggcatctcactggagagtttgagaagaaatatgaaccaaccattggtgtggaagttcatccgttggatttcaccactaactgtggtaagatcaggttctactgctgggataccgcagggcaagagaagtttggtggcctcagggatggatactatatccatggccagtgtgcgatcatcatgtttgatgtaacctcaaggcttacttacaagaatgttcctacgtggcatagggacctgtgc

SEQ ID NO: 9479 - DNA, 431 bp, Zea mays
  Clone ID: LIB3150-038-Q1-N1-F2
gctccctctccgcttctctccactatcgtaggaggcaccactcgcatcgtgtgctcagtcagatccccgtcccgcatttcctaaggccagttggcattgaagacgatgactgcttctgcagctgctggtgtgcagatggtggctgcacgcccttgcatttcggcctcgccaggaattcttaccgcacgggtagcagtttctaggactgattgcatgctcagtaccactgctacattccccaaaatcagctgctcctggcctctaaggtttaagcgcaatgatgttgttgtaagagcaatatcggaagagtgtggcccgcaggggctttccattgatctcagaggtaaaagggcattcattgctggagttgctgatgataatggctatggatgggcaattgcgaaggcacttgctgcggctggtgctgaaat

SEQ ID NO: 9480 - DNA, 281 bp, Zea mays
  Clone ID: LIB3150-038-Q1-N1-F3
ggaaggaaaggaggtgttttaatatgagggggggcataatagtagggggggatggaacccgggttgggacttggactcttagatccccgaaggccatagccgattgtgtaaacaacgccatgattctgcatacgatcaaaggtttcaaaaaagtttgagtgacaaatgcggttctgtcaatgaactaccgtccataagcaatgacaaatacatcgaaggacttcgcagataagcttgcaatcacaagtgcatgctctcaaaagactgatcccttaagaact

SEQ ID NO: 9481 - DNA, 353 bp, Zea mays
  Clone ID: LIB3150-038-Q1-N1-F4
cctcccccatcctctcccttgtggttctggaggcactcctccccgtgctcactgctcatccgcgaacaggttgagcggggacgccgtggaggggcgagggggagccagattgagccatggcctcctcctgggttcttgccctggttcttgcgctgtcggcaggcgcaagcctggcgcgtggctccgagccgtggtggaacgagacgcaggtgtacgccaccaccgccaactccggtggcggcaacggcgtcttcgtcggcctcacgctcatccagtcggcggcggccaagggagcggtgtgcttggatggaagcttaccaggttaccaccttcacagagggtttggatcagga

SEQ ID NO: 9482 - DNA, 354 bp, Zea mays
  Clone ID: LIB3150-038-Q1-N1-F5
tttcatcgcccctatcaatttctcgtgtgcggactctttttaccaccaccagactcttgataacctgaatctattcatcaaggaacaccaagaacctcttcgctactatgctcgacacacatattccatatctcctggttgcgaacaatactcagaccccaatcttcctccaggagaatggtacggtcattctcacccctcacctgtgccaagacacctacttcagattgcttgccatcaacttctttggactcgccaaggctgctacaccaatggcaacaatatttagaggacaatacttgttcactggcagtgagaccacctcagtctggttggaggtttcttaaatgaaaa

SEQ ID NO: 9483 - DNA, 358 bp, Zea mays
  Clone ID: LIB3150-038-Q1-N1-F8
gaagggatgggtctatatatagacccacccactccgctttttacaggccgacaccagaccaacggcggccacttccacatggcgggcgggactcccgcctgaaccgacaagaagaaccgccacggcgacatccttgacaagtacatgtacctattctgccgcgtcgacatgctcatggacgagaagaccgtgcaatacctcatgaactccggcatggatccctgaacggagaacaacccgtacctgtgcttcttgtacactagctatcagaagcgcgcgactgacgtgtcgcacagcaacaccgtgctgctcgccagggcgcacagagacgacgtcctgttgcgcgcctgcggcacca

SEQ ID NO: 9484 - DNA, 436 bp, Zea mays
  Clone ID: LIB3150-038-Q1-N1-G1
gttaaaatgtcacagagtggcaaaattcgaaggattatttcacctaaacccctctgctctcaaacctagctcgctcccggcggaccgacgatgccgaaggcaggcggcggggcggcggacgaagaggagttccgcgccgaggtggaggagcgcctcatcaacgaggagtacaagatctggaagaagaacacacccttcctctacgacctcgtcatcacccacgcgctcgaatggccctcccttaccgtgcagtggctccccgaccgcaccgagccgccggggaaggaccactccgtccagaagatgatcctcggcacgcacacctctgacaacgagcccaactacctcatgctcgcgcaggtccagctgcccctcgatgacgccgaggccgacgcccgccactacgacgatgaccacgccgacatcggtgggtttg

SEQ ID NO: 9485 - DNA, 221 bp, Zea mays
  Clone ID: LIB3150-038-Q1-N1-G12
ctcagaggtgggttggcttctcctgcccgcaccggttcgtgttcaggttctggttcgtgggcgagagggaagagatggcggcgtcggacgttgagtaccgttgcttcgttggcggcctcgcctgggccaccgacgaccacttcctcaacaacgccttcagcacctacggcgaggtcctcgagtcgaagatcatcctggatcgggagacgcagaggtcccgc

SEQ ID NO: 9486 - DNA, 360 bp, Zea mays
  unsure at all n locations
  Clone ID: LIB3150-038-Q1-N1-G2
ctcgacggcgtccgcgacgagaccggcgccagcaactgcccctgggcggtctggacgcgcgcctggaccgccgaggagaaccgccacggcgacatcctcggcaagtacatgtacctatccggccgcgtcgacatgcgcatggtcgagaagaccgtccagtacctcatcggctccggcatggatcccggaacggagaacaacccgtacctgggcttcgtgtacacgagctttcaggagcgcgcgacggccgtctcgcacggcaacaccgcgcggctcgccagggcgcacggngacgacgtcctggcgcgcgcctgcggcaccatcgccgccgacgagaagcggcacgagacggcgtacggg

SEQ ID NO: 9487 - DNA, 466 bp, Zea mays
  Clone ID: LIB3150-038-Q1-N1-G3
ggcgcgccgaccggcttggacgcgccgaccgggtcgtgatcagctcggtcggatccgacggtcgctcgctgctgcagcgggcgcttgctgtgcgtcgcgtgggctcggccggagcccggagggaggcggagccttccccgggtctcgaagatggcggcgccgccggcgagggcccgggccgactacgactacctcatcaagctgctcctcatcggcgatagcggtgttgggaaaagttgtctccttttgcggttctcagatggctctttcaccactagctttatcaccaccattgggattgacttcaaaataagaacagttgagcttgatggtaagcgcgtaaagttacagatatgggatactgctggtcaagagcggtttcgaactattacaaccgcctactacaggggtgcaatgggaattttcttgtctatgatgttactgatgagtcatctttcaataatat

SEQ ID NO: 9488 - DNA, 365 bp, Zea mays
  unsure at all n locations
  Clone ID: LIB3150-038-Q1-N1-G4
cttgtgaccctccctcagccgcgtcgcgtgggagtgctacgatccaaagctctctctgctcgcaggtcgcagccatggcgaacaactacccgaccgtgagcgccgagtacagcgaggctgtggacaaggccaggcgcaagctccgagccctcatcgccgagaagagctgcgccccgctcatgctccgcctcgcgtggcactccgcggggacgttcgacgtgtcgtcgaggaccggcggtccattcggcacgatgaagcatcagtcggaattggctcacggcgctaacgcggngctggacatcgcggtgcggctgctcgagcccatcaaggaggagttcccaatcctctcttacgccgatttctac

SEQ ID NO: 9489 - DNA, 256 bp, Zea mays
  Clone ID: LIB3150-038-Q1-N1-G5
gttctagatcgcgagcgaccgccctttggtttttttttttttttttttttttttttttttttttgaaaaaggggcattattgaactctcaggccagggagttcacaacattaaagaaacaggtcctgttattgcacaacacatcccaacgcgagatggtttgatctattacaacaaaccaagctttttattggttccaccaccaatcacaaattccaggctacaatggaaaagagtaacccctgaggtacttggag

SEQ ID NO: 9490 - DNA, 280 bp, Zea mays
  Clone ID: LIB3150-038-Q1-N1-G6
gtccgttgttgtatcttgacactgatcagtgttgtttgctttgctttgccgtgctaatggcgcccgctccatgtggacgttcgtcgcaaagggcgttccacttacgcaagggcaagagcgagggcaacaagaacatgaacgagctgatgggccgaaagggcgcgaacctggcggagatggcgagcatcgggctgtacgcgcccccggggttcacggtctcgaccgaggcgtaccacccgaaccacgaggccggccgcgacctcccgccggtgctctgggc

SEQ ID NO: 9491 - DNA, 432 bp, Zea mays
  unsure at all n locations
  Clone ID: LIB3150-038-Q1-N1-G7
gttattatttcgaattaatttgtaaagagctccactttgattcgatttgatcgtttcttcaactagtggcatattggtgtgcttcctacgtgattcaactagcggcatattggctcgatatgaatatcgccatttacagtttttctagcgtttgctaacgaacgcttctaaaggtcaatcaataacagttcaatgctctatccaaatgaatgtttaccagtgtacgtctctaatgcttcaatattctaattcaccggctaaactaaaaaacagtactgctaatggacttggaggtaatcactggaattctaaaaaaataagcttcttagacatgccattatcctaataccaaattggatttacgatgaaagcaacaatgacanaacgtacttaagtaaatgcagaataaatcgcattttacaaggctatgca

SEQ ID NO: 9492 - DNA, 296 bp, Zea mays
  Clone ID: LIB3150-038-Q1-N1-G8
tccactcccccctcccgaggtgctgtccatattaagtcgggggcggcaataacaacgcgcttcaagaataaccgcatgaagcgctggcacgtgttctccggtcacggccgcattctcaagcacaagaagcaccctggaggtcgcggtaactccggttgcatgcaccaccaccgtatcctcttcgacaagtaccatcccggctactttcgcaaggttggcatgcgttacttccataagctccgcaacaagttctactgccccgcggtcaacatcgaacgcctcttgttcatggttcc

SEQ ID NO: 9493 - DNA, 462 bp, Zea mays
  Clone ID: LIB3150-038-Q1-N1-H1
gcgaaggcgagccttccacttccctcaggctgccgccgccaccgccgccgccgccgccatgtgcccagcagcggcgaccacgagctccgccaagccgtcgaagaagcggaaacagcccgtcatagcgccgccggagtcggactctgaggaggaatctgtctacgacactgcctccgacgatgacgaggaggaagaggagacgcacgagttagagagtgatgatgtagacgaggaggtggaggaggggagcgaggacggcgaggaaaatgaaattggtgacgatagcgaggtggaagaagaggaggtgaaggagaaaaaagaaaaggaggagacggtgaaggagaaaaaggaaaagaaggacatgaagcatgaggggaagaaggccgaaaagcatgaggaaaagaaggcgaagaatgacaagaaggaagaggaaaaaaagggaaggagggacagaaagaagag

SEQ ID NO: 9494 - DNA, 413 bp, Zea mays
  Clone ID: LIB3150-038-Q1-N1-H10
gttcccgtcaaatttgccattcctggctggggtccctcttcccggggcacgagcctacctcgccgacgccaggccgccaggccgccggagacatgaaccagcccgtgcagaagaacaccctctacgtcggtgggctggcggaagaggtggacgagaaaatcctgcacgccgcgttcgtgcccttcggtgaggtcaaggacgtcaagacgccgctcgaccagtccacgcagaagcaccgctccttcggtttcgtcaccttcctggagcgcgaggacgccgccgctgccatggacaacatggacggcgccgagctcttcggccgcgtgcttaccgtcaactacgccttccccgagcgcatcaagggaggggagcagggatgggctgcccagccaatctgggccgatgcggacact

SEQ ID NO: 9495 - DNA, 278 bp, Zea mays
  Clone ID: LIB3150-038-Q1-N1-H12
cgaccccacagcaagagccagccacggagggacggatgggatacctccaagtcggaacgcggcttccttcctccggcggtccggcccgaatcaacgcgtggcgtcggagctccgtggcgtcgtcgtcctctcccctctctttcccaacacctcgcgtgttgtctagcactctagctgcttctctcggttctcgcgactcccaaacggcaaaacgccaaaaccctagccgcggccattccggaattggccatggaggcgagggcgtcgccgcgtccgtc

SEQ ID NO: 9496 - DNA, 367 bp, Zea mays
  Clone ID: LIB3150-038-Q1-N1-H2
cctcacccgcctccactcccccctcccaggtgctgcccaggtaagtcggcggcggcgatgacaacgcgcttcaagaagaaccgcaagaagcgcggccacgtgtccgccgggcacggccgcatcggcaagcacaggaagcacccgggaggtcgcggtaacgccggtggcatgcaccaccaccgtatcctcttcgacaagtaccatccgggctacttcggcaaggttggcatgcgttacttccataagctccgcaacaagttctactgccccgcggtcaacatcgagcgcctctggtcgatggtgcccgccgacaaggcggcggaggccggcggcgacaaggccccgcagatcgacgtcacgcagttcg

SEQ ID NO: 9497 - DNA, 427 bp, Zea mays
  Clone ID: LIB3150-038-Q1-N1-H3
agcaggatggccaccgcgccaccggacgaccctcctcatcctcctccggcggaggcgggcgccgccacgccaagccgttcgagaccgtcggggttcgagcagctagacgagcgagtcaaggagctgacctcgtcgcaggcggagttgctggagaggatccagaagctgaaacatgaggtgcagaactggcgctccaatgtagagacgcaggtcaagacataccagaatgaactccaggatctcaagaaaggacttgactctgaagtggaacagctgaaatcggaaatgaaggcggttaggtctgcggtacaggaagagaaaggcaatctacctgcacaaaataccgactttagagacgaacaataaaaatgcaggacaagcttggcagacaccaggccaagcacagtattgaagagcaaacagcaac

SEQ ID NO: 9498 - DNA, 320 bp, Zea mays
  Clone ID: LIB3150-038-Q1-N1-H4
agcggagctccccgccgcttctctctccgccgtccgagaggcccgacccctgataccacgctgagggcggtggtattaggagattagcgatggcgaggtggcggccggcggcgctgctggtagtggctctggcggcggttctatcggcggcgtggcgggcggatgcgctatcggttacggtgaccgacaccgagtgcatccacgagttcgtgccctatgagggcgacaccgtgtccgggaacttcgtcgtcgtcgaccacgacatgttgtggagctccgaccacccaggaatcgacctcacggtaacgtcaccaggtggc

SEQ ID NO: 9499 - DNA, 418 bp, Zea mays
  unsure at all n locations
  Clone ID: LIB3150-038-Q1-N1-H5
taggcgtcttcgtactcgcctacctgcggggctcaaacctttcccccttctcccaattcccgccgccgctccatcccgtaacgcgacaccatgagggagtgcatttcgatccacatcggccaggccggtatccaggtcggaaacgcgtgctgggagctgnactgccttgagcatggcattcaggctgacggtcagatgcccggtgacaagaccattgggggaggtgatgatgctttcaacaccttcttcagtgagactggtgctgggaagcacgtgccccgtgctgtttttgttgaccttgaacccactgtcatcgatgaggtgagaactggcacctaccgccagctcttccaccctgagcagctcatcagtgggaaggaggatgcagccaacaactttgcccgtggtcactacacca

SEQ ID NO: 9500 - DNA, 378 bp, Zea mays
  Clone ID: LIB3150-038-Q1-N1-H6
cttccacagccgcaacctctatccgtcgggtggtatcgtctctcccacacccctctgccccaacccagaaaaaccctcgaaaagcggcggcggcgcgacatggcggaggtcgaggctccagctgctgcggttgcggcggcgacccctgaggtggcgacggtgaccgagggcggagccgctacggaggcgaagggtccgcataagctgcaccgccagtggaccttctggtacgacatccagtccaagcccaagcccggtgctgcgtggggcacctccctcaaaaaggcgtacaccttcgacaccggcgaggagttttggggcttgtatgatcatgttttccgtccaagcatgttgcctggaactgctgattttcaccta

SEQ ID NO: 9501 - DNA, 391 bp, Zea mays
  Clone ID: LIB3150-038-Q1-N1-H7
aagttaaacttaaagagataaagtgaacgctgaccactatgatcaatgatgaggctgcaatacctgaagtgattgagactgtcaaacagcaagttaaggatgctaaatttcctgatctagaggtcattcgcatgttgtgggatgtgctcatggaggctgttcagtggtctgggaagaaccagcaacagaattctaatgcagcacttcggcaggtgaaagcatgggctgagcttttgaatgctttttgcacgagtggcagactcgaactggaacttatatacaaagtacagacacagtgctatgaagatgctaagctgatgaagctgtttcctgaaatcataagaacactgtatgaccaacatgtcctagctgaagatactgtcctgctttg

SEQ ID NO: 9502 - DNA, 251 bp, Zea mays
  unsure at all n locations
  Clone ID: LIB3150-039-Q1-N1-A1
gttaggttaattcacagcttgtaagcaatgtttgtcttgatgcgatctcagctggaaagtactattattttgttcgtctgatgggacgaaaagcatctcatgttgcctttgaatgtgcacttcagtcacacccaaacatgctcatcttangcgaggaggtagcattgtcaaaactcacactgatggaaattataagcaagatatgtgatggagtacaagcaagggcagaattagggaaatatcatggtgtg

SEQ ID NO: 9503 - DNA, 351 bp, Zea mays
  Clone ID: LIB3150-039-Q1-N1-A10
ccatttatgaatttgtgaagagaagtgagggtttcaggcttgcagaggctgataagttaaatgtcatcaactggagaccatcctcagctgccgatgcctatgcgatgatagaagaatgtgggaaacgattttccagggatgaacgaggagaagcatgtgatgaagatgaacgagtccaggagtttcttgatatggtgaaggaggttttgccagcccctccgaaagcagaggtggagacagcagaggcggtggaggcagaggccgaggtagaggcaatgcaagagtgaatgtggtgtaagttaacatatttgagggccagattgcattagacactagtgctaaatgctgcaa

SEQ ID NO: 9504 - DNA, 306 bp, Zea mays
  Clone ID: LIB3150-039-Q1-N1-A12
tcgtgggttggcttctcctgccccaccgggtcggggtcatgttctggttcgtgggcgagaggtaagagatggcggcgtcggacgttgagtaccgttgcttcgttggcggcctcgcctgagccaccgacgaccactccctcaacaacgccattagcacctacggtgaggtcctcgagctgaagatcatcctggatcaggagacgcagaggtcccgcggcttgcgcttcgtcaccttctccacggaggacgcgatgcgcaccgccatctaagtcatgaacggtaaggagctcgagaggcgcaacatca

SEQ ID NO: 9505 - DNA, 411 bp, Zea mays
  unsure at all n locations
  Clone ID: LIB3150-039-Q1-N1-A3
cttgttctttcttcgacgcgcccccgggcatggcgaaccgcagtgttgccatgggcttggccctcgcgttcgtggccatgaccgcgctctgttgcgcgccgggcgccgcggagttgccccggctggagcactcggccaggagcgacggatcgctgaagctgctcgtcgtcggggactggtgacgcaaggggactcacaaccagtcccgggtcgccgaccagatgggaagggtcggagagaagctcgatatcgactctgttatatccacaggggacaacttctacaagaacgggctcaagggcgtgcgcgaccaggcatttgaagaatcgttcgtggatatctacacagctcanagcttacagaagccatggtactcagttctaggaaatcatgattacaggggcaatgcgc

SEQ ID NO: 9506 - DNA, 432 bp, Zea mays
  Clone ID: LIB3150-039-Q1-N1-A4
ggggttcgctatgctcatggatgcaaatcgtataaatgacctcttgaggatgtacaaccttttccagagggttaatgctgttgagctgctaaaacaagcacttagttcatatatccgggctacaggccagggcattattatggatgaagaaaaggacagagagttagttccatttcttcttgattttaaggcatccctcgacaaaatattggaagaaagttttgctaagaatgaggctttctccaataccatgaaagattcgtttgagcaccttatcaatctaagacagaaccgtcctgcggaattgattgcaaagtttcttgatgagaaacttcgagctggcaataaagggacatcagaagaagagctggagggcatacttgataaagttttggtcatgtttcggtttatacaaggtaaagatgtatttga

SEQ ID NO: 9507 - DNA, 325 bp, Zea mays
  Clone ID: LIB3150-039-Q1-N1-A5
agtcacataaacacattcgacgaggtcacgactcacgaggggactcccgagcgcacgcgcgaatcgccgcggacctcgccggaggcggcgacgagctcggatcccggcgatctagtcgccggaggcggtcccgatggctcggcggtcgtcttcctcgtcgtcggggacctggcggtacctgaacccggcgtactacctcaagcggcccaagcgcctggcgctcctcttcttcgtcttcgtcgcggccaccttcgccttctgggaccgccagtcgctcgtcagcgagtacgagtctgagatttcccgattagaagatgatataaat

SEQ ID NO: 9508 - DNA, 117 bp, Zea mays
  Clone ID: LIB3150-039-Q1-N1-A9
ttttcttggcgcggggaccacccaatgggaagcttgcggaaagacccaagaaaccgaaaaaattgttttttccaagcaaacttgttccaaggtcccacggagggaaggcttccaaga

SEQ ID NO: 9509 - DNA, 437 bp, Zea mays
  unsure at all n locations
  Clone ID: LIB3150-039-Q1-N1-B1
gcccccgccgctcaaactaccggtgccctaaggcccgatattcttcttcgcctgcctttcctcctcagcacccaaaccccgaccttcagggttccgccgccatgccgcagggagaccacatcgagcttcaccagaagcgccatggcaagcgcctggaccacgaggagcgcaagcgcaagcgcgaggcgcgcgaggtgcacaggcgctcgaaggacgcccgcaatttgattggtgctaagggcaagaggttcgccaagaaacgctatgctgagaaggcgcagatgaagaagaccctgaaaatgcacgatgaatcaaataagcgacagaaggttgatgatgatgtccaagagggtgctcttcctccgtatctactggatcgtgatcagacacagcgtgctaaggtactcagcaacacantcaagcaaaagaggaaggaa

SEQ ID NO: 9510 - DNA, 448 bp, Zea mays
  Clone ID: LIB3150-039-Q1-N1-B10
gtttacctctcaccgccggtccccgccctgggagcctccacgcgcagatggcccgcctccatccactaggaggatccccgatgagctaggagaagtgttgatttggatattcgtggagtgtgcaatggtggactttgttcgacggctcgcctctgccctgctcaagtgctgcgaccttgacatacccaatcggccaaagggcctcgaggaccccgaacgcctggctagagaaactgtttttaatgtgaatgaaattgacgctctgtatgagctgttcaagaagattagcagtgctgcggttgatgatggcttgattaacaaggaagaattccaattagccttgtttaagaccaacagaaaggatagcatgtttgctgaccgtgtatttgacttgtttgacacgaaacacaatggaattctcgagtttgaggaatttgatcgagccctt

SEQ ID NO: 9511 - DNA, 453 bp, Zea mays
  unsure at all n locations
  Clone ID: LIB3150-039-Q1-N1-B11
gttcttccctggttttggaagaaatctggagagttagttaccagtgttgggctgagtgctgagaatgagataatacacacccttgctttcttagctggttccatggtttggtcgcagattacagacttgccgttctctctctattcaacttttgttatagaggctcgacatggttttaacaagcaaactatatggctcttcattagggatatgatcaaaggaattttactatccatgatattggggccaccaatcgtggctgctatcatctacatagtacagattggaggaccttacctggctatatatctctggggttttatgtttgtattagctctactgatgatgacaatataccccattgtgatagctcctctgttcaacangttcactcctcttcctgaaagaagtctcacggaaaaaatagagaagctggcagctttcctcaagttt

SEQ ID NO: 9512 - DNA, 383 bp, Zea mays
  Clone ID: LIB3150-039-Q1-N1-B12
cgcccactcgctccagccgcttcaccgggccggcaccgtcaccgcgaggatgccgttcaagaggttcgtggagatcgggcgcgtggccctggtgaactacggggaggactatggccgtctcgttgtcatcgtcgatgtggtcgaccagaacagggcacttgtggatgcccctgatatggtcaggtgccaggtgaacttcaagcggctctcacttactgacatcaagattgacatcaaacgtgtccccaagaagacagccctgatcaaggcgatggaggaagctgatgtgaagaccaagtgggagaacagctcatggggcaagaagctgattgtccagaagaggagagcatcgctcaatgactttgataggttcaaagtcatgc

SEQ ID NO: 9513 - DNA, 289 bp, Zea mays
  unsure at all n locations
  Clone ID: LIB3150-039-Q1-N1-B2
gctttatctactccagagcgcagaagaacccgatcgacaccatgagggtgttgctcgttgccctcgctctcctggctctcgctgcgagcgccaccttcacgcatacaagcggcgggtgcagctgccagccaccgccgtcggttcatctaccgccgccggagcatctgccacctccggttcacctgccacctacggtgcatctcccaccgtcggtccacctgccgccgtcggtccacctgacaccgacggtccatgtgccgacgacggttcatttgccgccgncaccatg

SEQ ID NO: 9514 - DNA, 265 bp, Zea mays
  Clone ID: LIB3150-039-Q1-N1-B3
ggcggctggcgtaatggatctgctgaagcgggaactggagaagaagcggaaggcggcgacggccgacttcgggggcaagagcttcgtgcggcggtcggagctggagcagaagcagctccagaagcgccgcgacgagcaccgccagctcctcgccaaggccggcacgtcggcgccctccgcgaattccgccgcagctgctaccggttccgaccccagcaacctcgacgccgcagctcatacggcggcggcgaaccctaaccctagc

SEQ ID NO: 9515 - DNA, 281 bp, Zea mays
  Clone ID: LIB3150-039-Q1-N1-B4
gctaaaagcatactatgaacaagtcacaagcagggaaaaggttgcactaggatttgggctcatatcaaaggctctgcagaatctgtcaatgcaacttaggaaatgttgcaaccacccctatctatttgtagagcactacaacatgtaccagcgggaggaaattgttagagcatcacggaagtttgaattgcttgatcgtctacttccaaaactgcagagagctggtcacagggttctgctattctctcagatgacgaaactgcttgatgttttaaaaatat

SEQ ID NO: 9516 - DNA, 263 bp, Zea mays
  Clone ID: LIB3150-039-Q1-N1-B5
cttttccctcgctcgctcgcggctcgtgcgtcgcccgcctgcctgccagtgcgcgccctctccctccctcatggcggactgcttcccgcccgagtcggacgacttccaccgccgctggctgccgcgggagatcctcgccgacattggcatcgccgaccccgaggccgtcggcgccgagaccccgcccgaggccgccgccgccgccgccgtggaggagctcgcggcgcagctcgccggcatcctcggcggcggcgccaaggcgt

SEQ ID NO: 9517 - DNA, 230 bp, Zea mays
  Clone ID: LIB3150-039-Q1-N1-B6
ctaggcataagcattgcaaccacagacagcgcgcgcttcaaggccttttttttttgagataacaaggacgagaggaggagatggctgtcacgatcacatgggttaaggccaggcatatcttgtacaggcggaggaaccccaccgtgtaggaggacttgtgccttaacgactgcagctactcgaggagggcgcgacccagcatcgcatccactggaatatatgaagccttg

SEQ ID NO: 9518 - DNA, 301 bp, Zea mays
  Clone ID: LIB3150-039-Q1-N1-B7
atcccctcgcctaccccagctctacccgcgacgaagcatcaccaggaaggatgacgggctcaatggatctcccggccaagggcgggttcagcttcgacctgtgccgccgcaacagtatgctggagaagaacgggctcaaactcccgggattcaggaagaccggaacaaccatcgtcggcctcgtctttcaggatggggttgttcttggggcagacacaagagcaactgaggggcctatagttgctgataagaattgtgagaagatccactttatggcgccaaacatttattgttgtggagc

SEQ ID NO: 9519 - DNA, 449 bp, Zea mays
  Clone ID: LIB3150-039-Q1-N1-B8
tcttcctccacggtcagctcctcgtgtgagctcgtcgcgtggttagcagggaaacccataggtggaaagaagctaacccggtgaagactctgaaggaatctgagccacctgcactccgatctgccatctgaaggacgcggaggaagccccgaatcggcgaatttcgtccttccggcacgcccgccctgacacgattccctgcccgccggaaacatgctcgtgcatgctgtttgctgtgccttgggcgcgacgcggtggtcgctggtcggtggaatcccacttcactatcactagccgccactggcaagtgcgatgcgacggaaccaaagattggattctccttcggcgttgccgcgaatgatggccgatgctttgattgaaccaccgaacgtggggggcattggctggttttttaccaagtgggacattgacaccggctgaccggggtg

SEQ ID NO: 9520 - DNA, 319 bp, Zea mays
  Clone ID: LIB3150-039-Q1-N1-B9
cgccctccccgccatcggcctcgagtcggtggacgcctcctggctgcgcttgcgcgccacctacgttgcgccggggatacagttcctcaccgacgcctgcgtcgtgctcttcctcatccagagcgccgaccgactcatccagtgcctcggctgcttctacattcacatcaagcgcatcaagcccaagcccaagtcgcttgcattgcctgatgcggaggacccggatgccgggtactaccccatggtacttgtgcagataccaatgtgcaacgagaaagaggtgtatcaacaatcaattgcggccgagtgcaccttgact

SEQ ID NO: 9521 - DNA, 260 bp, Zea mays
  unsure at all n locations
  Clone ID: LIB3150-039-Q1-N1-C1
gccgcctctcctgctcctaccgcagctctccgtcaggtttagtgttcgcaatggcggccttcaacaagcttggtggccttctaaggcacagtgctctggtgagcggtatcactggtggctcttctcctgcagtgttcaatgctgcacggctcatgtctaccaagctatttattggtggtcttgactgnggtgttgatgacgtgaaactaagagaagcatttagcagctttggagaggttactgaagcgagggtgatcaca

SEQ ID NO: 9522 - DNA, 451 bp, Zea mays
  Clone ID: LIB3150-039-Q1-N1-C11
atcatgaaacaaagtacactaaagatggtgcgggggcacctgggggacagtctgggacatctcaatggctcaagtttgacaacagctatttcaaggctatcgaagaaaggcgagatgaagacctcctaattctgcctactgatgctgtgctgtttgaggattcctcattcaagatctatgctacaaaatatgccaaggatcaggacgcatttttcgaggactacgccgaggctcatgccaaattgagcaatcttggggcaaagtttgacccgccaaagggtatctcactcgagtagttgtggatggaggtgactgaacaggaaggggtcatgtttctttgcgtgaccattttcgaaggttggcaaggaaaagttattggggttgaatgatagctccacaaattgtattcaccgattaaaggaatttttttcttaacgtgccctgttttttt

SEQ ID NO: 9523 - DNA, 282 bp, Zea mays
  Clone ID: LIB3150-039-Q1-N1-C12
ttactctcacggagagagatatacggggccgtgtcattaagaatggagggtgtgataacattactgaacactcatgctacatggttcgataaggatacgaaccaatagccactgcacctaagaccgcctcagagttatgatgatcaggcgaatacaggccacacagactttaactctcagaggctaacttgacaacctcaatatcatgacttatcaagaacttacgggcactacaccctgacctgcactatgaagtaacgatccttcgagcgcctaccccat

SEQ ID NO: 9524 - DNA, 306 bp, Zea mays
  Clone ID: LIB3150-039-Q1-N1-C2
gcgatttcgatctcgcagccacctttttttttttgttctgttgtgtatctagtagttggaggagatatgcagtttgcacttgcattggacacgaactcaggtcctcaccagataagatcttgtgagggtgatgggattgacaggttggaaaaattaagtattgggggcagaaagcaggagaaagctttgagaaataggtgctttggtggtagagttgctgcaactacacaatgtattcttacctcagatgcttgtcctgaaactcttattctcaaacacagtcctctaggaaaaaatatgctgatg

SEQ ID NO: 9525 - DNA, 289 bp, Zea mays
  Clone ID: LIB3150-039-Q1-N1-C3
gccacgcgtacgttcgcttcccctccccggtcgcctgctctcttgtaccttctccgtctgcttcagcccccagaaatcgaagccaccaccaccatagagctccgagcccctagccctccttcccgactgttcgctgcgtggatctacaggcaggatgctcactcccgcgcgcgcgggcgccgatcggtgagcggctgtgaagaaaaggtgcctgatgagatagcgggcggccaaagaagcgaagtttctcgcactccacctgctgaatataccaactcggcatgctgga

SEQ ID NO: 9526 - DNA, 353 bp, Zea mays
  Clone ID: LIB3150-039-Q1-N1-C4
attccagacagaaattggttccataagttgagagataaaggtccttcaggagaaatctatggacatgggattaaagctgaaaaatcgctgcagaatctaaattgtcaaaatttgtcgaggatataatagtacctccaagaatgattgacataattgttgatggagaggtcaatgatgaatacatgaaaacacttgagactctaagcaaaaaaatcaaattcatcgatgctgaccccatggttaaatcatccaaggctctaaaagatgttcaacctgaggttgagagactacgacagaaagccgtctcaaaattttcgagtttgtcatccaaaagttctatgccttgagaaaac

SEQ ID NO: 9527 - DNA, 362 bp, Zea mays
  unsure at all n locations
  Clone ID: LIB3150-039-Q1-N1-C5
ctcgcattgttaccgaggacttcttgccgcttccaagcaaagggaaatctgggaaggatggctggtatcctccaggccatggtgatgtgttcccctctttgaataacagtggaaaactcgacatcttattggctcagggcaaggagtatgtcttcgttgctaactcagacaacttgggtgctatagtcgacatcaagatcctgaaccatctgatcaataaccagaatgaatactgcatggaggttactccaaaaacattggctgatgttaaaggcggtactctcatctcttacgaaggaagagttcagctnttggagattgcccaagtacctgatgagcatgtgaatgagtttaaatcaatc

SEQ ID NO: 9528 - DNA, 227 bp, Zea mays
  Clone ID: LIB3150-039-Q1-N1-C6
aataaatggcaggtcactgtattttggcggggctgaggaagtctgtagatcagaatatgccattactgcattttcctttcccctttctagctagcatggcaataacaatgacgtgtatcaaacagcggcgcggtttaaggaacttcatatactcccggcccttgtgtctgagtctttgcctgtaataagaacgtgtatatgcgtgaaacctatcaattttgttattt

SEQ ID NO: 9529 - DNA, 299 bp, Zea mays
  Clone ID: LIB3150-039-Q1-N1-C7
gacatgtcgggccgcggcaagggaggcaggggcctgggtaagggcggcgcgaaacgccaccgcaaggtgctccgcgacaacatccagggcatcacgaagccggccatccggaggctggcgcgcaggggcggcgtgaagcgcatctccgggctcatctacgaggagacccgcggcgtgctcaagatctttctcgagaacgtcatccgcgacgccgtcacctacacggagcacgcccggcgcaagaccgtcacagccatggacgtcgtctacgcgctcaagcgccagggccgcacccttta

SEQ ID NO: 9530 - DNA, 378 bp, Zea mays
  Clone ID: LIB3150-039-Q1-N1-C8
cttcttcttatcctgactgacccgaggagggatcatcagcccattaaggagtctgcgcttggaaacattcccaccatcgccttctgtgatactgattcccctatgcgctatgttgatatcggcattcccgccaataacaaggggaaacagagcattggttgtctgttctggctgctcgcccgaatggtcctccagatgcgcggtacaattcttccaggacacaagtgggacatcatggtagatcttttcttctacagagacccagaagaagcgaaacaacttgaggaagaaaaagctcttggtgcacctgactattgcgcgggtgcaaaatacacttgaccaggcgcttacaactggggcggggaaaggggtgcttgc

SEQ ID NO: 9531 - DNA, 457 bp, Zea mays
  Clone ID: LIB3150-039-Q1-N1-C9
gtatgatccaccactccaccagtccggtgctgggctggacctcgattgggttcttcttacctaggaacatccggggatgtcgactcctgcgaggaagaggctgatgagggatttcaagcggttgatgcaggaccctccggccggcataagtggcgccccgcaggataacaacataatgctgtggaatgctgtcatatttggacctgatgataccccgtgggatggaggtacgtttaagctgactctccagtttaatgaagaatatccaaacaaaccaccaactgtgcgatttgtttctaggatgttccatcctaacatttatgctgatggaagcatatgcttagatatcctgcagaatcagtggagtccgatatatgatgtagctgcgatactcacgtcaatccagtcattggtgtgcgatccaaacccgaattcgcccgctaactctgaagccgcc

SEQ ID NO: 9532 - DNA, 339 bp, Zea mays
  Clone ID: LIB3150-039-Q1-N1-D1
ctccttcagagctcgtcgccaccggccaccggcaccctcgatcacgccgtccgtcgaggtaaggtcagcatggtgagggtcagtgtgctcaacgatgcgctcaagtccatgtacaacgctgagaagattggcaagaggcaggtcatgatcaggccgtcatccaaggtcatcatcaagttcctgacggtcatgcagcgccatggctacattggagagttcgagtacgttgatgaccaccgatcgggcaagattgtggtcgaactcaacgggaggctgaacaagtgcggcgtcatcagccctcgctttgatattggcgtgaaagacatcgagggatggact

SEQ ID NO: 9533 - DNA, 434 bp, Zea mays
  Clone ID: LIB3150-039-Q1-N1-D10
atcaaggccttcagaccgggacggctcgctggcctgtcccccgcgccggcgcggatggccggagccaccacgccggcatcaggcgccctcgtcaggctctgcctcccttcgctcctcctctttctgtaccggtgctgcagatgtgaagctgttgagatggagagaacccttgcgatgatcaagcccgatggtttgtcaggtaagtacacagaagcaatcaaggaggtcatcttggattctggatttcatatcgtcaaagagaccgaggtccagcttgatgctgagagggcatctctcttctatgcggagcattcccagagaagcttctttgacagcctagtcaagtacataacaagtggtccagttcttgctatggttctggaaagacctgacgccgttgcgcaatggcgcactttgattggaccaactgatgc

SEQ ID NO: 9534 - DNA, 449 bp, Zea mays
  Clone ID: LIB3150-039-Q1-N1-D11
ctgctagcatccgcagttcccccgcgcccgagacgcaaccccgcgccaggagtaagtttgttcttttatcgatattatcgatatggcgagggaggagaatgtctacatggccaagctggctgagcaggccgaaaggtatgaagagatggttgagtatatggagaaggtggctaagactgtagatgtggaagagctcactgttgaggagcgtaacctcttgtcggtcgcatacaagaatgtgattggggctcgccgtgcttcatggcgcattgtctcttctattgaacagaaggaggagtcccgtaagaacgaagagcatgtgaaccttatcaaggaataccgtgcgaagatcgaagctgaactgagcaatatctgtgatgggatcctgaagcttcttgactaccacctagtgtcttcttttactgctgctgaatcataaggtttctacc

SEQ ID NO: 9535 - DNA, 171 bp, Zea mays
  Clone ID: LIB3150-039-Q1-N1-D12
ctctatcatacgcagataccccaacccctaggggtaaccacgcgcgaggagtgtgcttacttttttatccatattatctatatggctagagaagaaaatgtctacatcgccaatctagctgagcacgccgaaaggtctgaataaatggtcgaatacatgcaaaaaagactt

SEQ ID NO: 9536 - DNA, 299 bp, Zea mays
  Clone ID: LIB3150-039-Q1-N1-D2
gcgaagatcgcgatcagagcaggagcaggcagcgcgcaccgaaatcttccaatccacaagactcgctacttcgcagttggcagactcgcccgcagcgagccgctagcaaccaagcagaaatgtcgctggtgaggcgcggcagcgtgttcgacccattctccgtggacctcttcgaccccttcgacagcgtgttccgctccatcgtgccgtcgtcgtcgtcggcggcggcggcctccgagaccgccgccttcgccagcgcccgcatcgactggaaggagacgcccgaggcgcacgtgttc

SEQ ID NO: 9537 - DNA, 250 bp, Zea mays
  Clone ID: LIB3150-039-Q1-N1-D3
gttgcattttccttgagagcgagtgcctgtagcgctcacaaccaaagaccgatggagcccactggctacatgaaacccggggcaatcaaccccgtggaggaggtgcccgccgaccagaagactacctgcggaaggaagcccacggcggagaaccagtttccgcgtggctagtccaccggtaaggcaggcggttagggtacacgtggccagcaaaatggcaagaagagcgtggatacgtacaagatctaca

SEQ ID NO: 9538 - DNA, 285 bp, Zea mays
  Clone ID: LIB3150-039-Q1-N1-D4
cccagtaactcgcatcttcctccgtgatccaagttctagcagcgcagcgctcggtttcgacaatatgtcggggcgcggcaagggcggcaagggtctgggcaagggcggcgccaagcgccaccgcaaggtcctgcgcgacaatatccagggcatcaccaagccggcgatccggaggctggctaggaggggcggcgtcaagcgcatctccgggctcatctacgaggagacccgcggtgtgctcaagatctttctggagaacgtcattcgtgacgccgtcaccctaca

SEQ ID NO: 9539 - DNA, 335 bp, Zea mays
  Clone ID: LIB3150-039-Q1-N1-D5
caccgatccatttcagccgccgccgcgcgtagcaagcaggagcagcaaggatgccggctggccacgggctgcgctcgcggacgcgcgacctgttcgcgcgccccttccgcaagaagggctacatcccgctcaccacctacctccgcacctacaagatcggcgactacgtcgacgtcaaggtgaacggcgccgtccacaaggggatgccgcacaagttctaccacggccgcaccggtcgcgtctggaacgtcaccaagcgcgccatcggcgtcgagataaacaagcaggtgaatggtcgcatcatcaggaagcgtattcatgtccgcgtggagcat

SEQ ID NO: 9540 - DNA, 167 bp, Zea mays
  Clone ID: LIB3150-039-Q1-N1-D6
tagtgcccacatgtaagactccgccgggcggggtatgaacaatctggcacgatactcactagccacggtgtgcgatctcggacgcgctagctgttttccccctcgttgcacaacaatagctacatccccttcaccacctacctcagtacatacactatctgctacta

SEQ ID NO: 9541 - DNA, 223 bp, Zea mays
  Clone ID: LIB3150-039-Q1-N1-D7
ttagtatgctgcagctcacttgaagggtggggccaataaggatgacatctctgctcctaacaaggatgcccccatgtttgtcgtcgatgtcaacgagaaggagtccaagtttgacattaacattgtctccaatgctagctgcacaaccaactgccttgctcctcttgctaacgccatcaatgacaagtaccgtatcgttgatggtcttgaagaccactgtcca

SEQ ID NO: 9542 - DNA, 280 bp, Zea mays
  Clone ID: LIB3150-039-Q1-N1-D8
ctcagtttggttggaggtttctgaagtgagaaggagatgatgtggtgtgtgtaatcaaaaacacagccaccttggctgggtcactgttcacgctgcattgctcccagattcacattgacttgcccaccctgtctgatgaggataaggatgtcattagaaaatggggtactcccaataagattgacttcctttctctgtcctacacaagacatgcagaggatgtgcgccaggcacgggaattcctgtcaaatattgggcgatctaagccagactctgtttt

SEQ ID NO: 9543 - DNA, 377 bp, Zea mays
  Clone ID: LIB3150-039-Q1-N1-E1
cgaggacgaccttgatgacgaccgcttcctcgagcagtacaggaagatgaggcttgccgagctgagggaggccgcaaaagccgcgcgatttggtagtatagttcccatcactggctcggacttcgtgcgggaggtgtctcaggcaccatcagatgtttgggttgtggtcttcctctacaaggatgggatacctgaatgtggattgcttcagaattgtttggaggaattggctacaagatacccagcgacaaagtttgttaaaattatctccacggactgcatccccaactacccagataggaaatgtcctacaatactggtgtataacaacagtgctgtcaaagggacttatgttggtttgcaaaaagttggtggaa

SEQ ID NO: 9544 - DNA, 452 bp, Zea mays
  Clone ID: LIB3150-039-Q1-N1-E11
ctcgattgaaatccatccatcctcggggggtgggttccttatgatctaagcctcgtggccaatatcaagatcgggatcaatgggttcggcaggatcggaaggctggtggccagggtggccctgcagagtgacgatgtcgagctcgtcgtcgtgaacgaccccttcatcaggaccgactacatgacctacatgttgaagtacgacactgtgcacggacagtggaagcaccatgaagtcaaggtgaaggactccaaaacccttctatttggtgagaaggaggttgctgtgtttggctgcaggaaccctgaggagatcccgaggggttcggtaggtgctgaatatgttgttgaggctactggtgttttcactggaccagagaaggctgcagcttacttgaagggtggtgccaagaaggttggtattttttgttctagcaaggaatcccccatgtt

SEQ ID NO: 9545 - DNA, 402 bp, Zea mays
  unsure at all n locations
  Clone ID: LIB3150-039-Q1-N1-E12
cacacactcgcgaactccatttcgatcggatgggaaatcaacccatcctcgtttcctccgtctagcagcctctcaccctcatggccaagatcaagatcgggatcaatgggttcggcaggatcggaaggctggtggccagggtggccctgcagagcgacgacgtcgagctcgtcgccgtgaacgaccccttcatcagcaccgattacatgacctacatgttcaagtatgacactgtgcacggacagtggaagcaccatgaggtcaaggtgaaggactccaagacccttctctttggtgagaaggaggttgctgtgtttggctgcacgaaccctgaggagatcccatggcgttccgttggcgctgaatatgttgctgagtctactggngttttcactgaccaag

SEQ ID NO: 9546 - DNA, 250 bp, Zea mays
  unsure at all n locations
  Clone ID: LIB3150-039-Q1-N1-E2
ctcatttgctccaaagctctttaggcggcgattgcaagactctaatgttcgtgcagataagtccaagctctatggattcaggagaaactctcagttcactcaattttgccagtagagtccggactgtagaacatggccctgctcgtaagcaagtggatccagctgaaagtttgaagttcaaacagatgactgaaaaacttcggcacgaggaaaaaggaaatgcacagctgaaccanagcttgcagctgat

SEQ ID NO: 9547 - DNA, 309 bp, Zea mays
  Clone ID: LIB3150-039-Q1-N1-E3
ctcgcctcgggtcaaaccctaagcagggagttgatttatccgctgcagccatgagtaagttgcagtctgagtctgtcaaggatgccatctcccagattgttggggatgccaaggagaagaatacgaagttcactgagactgtggaacttcagattggtctgaagaattatgatccacagaaggacatgcgtttcagtggctctgttaagttgccccatatccctcgtcccaagatgaacgtgtgcatgcttggtgatgcccaccatgttgaggaggccgagaagatggcacttgactacatggatgttg

SEQ ID NO: 9548 - DNA, 204 bp, Zea mays
  Clone ID: LIB3150-039-Q1-N1-E4
ttctgttcctccccactcactcctgcgcggggtcgccgcgcggttccttctccctgatcctcctttggcttcgcggttcatggcgatgtggagggccgccgctaggcagctgggcgaccgggcgctcggctcaagggccgcgcacacgtctacaggcagcaaaaagatagtcggggtgttctacaaggccgggagtatgccgac

SEQ ID NO: 9549 - DNA, 314 bp, Zea mays
  Clone ID: LIB3150-039-Q1-N1-E5
cccacctctagcccgacaggtgaagccggcgccgctgcagtgtccatagccaccgcaggagactgagatggggggttttgtcaagacccacaagagcaatgcgtacttcaagcgtttccaggtgaagttcaagagaaggcgcgctggcaagacagactacagggccaggataaggctgattaaccaagacaaaaacaagtacaatacacccaaatacagatttgttgtgcgatttaccaacaaggacatcacagcacaaatcatctctgctagtatagcaggtgatatggttcttgcttctgcttactcgcatg

SEQ ID NO: 9550 - DNA, 136 bp, Zea mays
  Clone ID: LIB3150-039-Q1-N1-E6
ttgtgaagttcatccccatttatctggctgagggcatcctacagcatgaccccttcgaggatatcgaccagagaggagtaggcgagctggttaagcttgctacagagaggggccgcaaagctaggcctaacttgaa

SEQ ID NO: 9551 - DNA, 313 bp, Zea mays
  Clone ID: LIB3150-039-Q1-N1-E7
actggctcttggagaagaaagaaccaggagggagctgattccttttcttagtgaaaacaacgatgatgaagacgaggtgcttcttgcaatggctgaggaattgggtgtgttcattccgtatgttggtggtgtagaacatgctcatgttttgctcccacctttggagacattgtgtacagtggaggaaacttgtgttcgtgataaagcagttgaatctctgtgccgtattggtgcacaaatgaaggaaactgacattgtcgactggttcattccagtagtaaagaagctttgcaacttggagaagtggtttaca

SEQ ID NO: 9552 - DNA, 126 bp, Zea mays
  Clone ID: LIB3150-039-Q1-N1-E8
cgacgttgttaaatagtggccacccattggcgcgttctcttcgctatccgtgggttgcccaaccttcaaaagcccttccaaaccccccgtttccaaacctttttaaaagttcccggcggcttcttc

SEQ ID NO: 9553 - DNA, 387 bp, Zea mays
  Clone ID: LIB3150-039-Q1-N1-E9
gtcactagctttgaccgccgcctccctgccggtgcgatactgctgctcgggacgccactcccccgcaggagcggcggcggcggcggcgaggtcgtaccccacatcggcgagcggcggcggcaccgccggaggcaaacgcaagatgttcgggcgcgcgccgaagaagagcgacaacaccaagtactacgagatcctcggggtgcccaaggcggcgtaccaggacgatctcaagaaggcctaccgcaaggctgctatcaagaaccaccccgacaagggcggtgacccctagaagttcaaggagctcgcacaagcctatgaggctttgagtgatccagagaaacgcgagatttatgatcagtatggtgaagatgcccttaaggaacgaat

SEQ ID NO: 9554 - DNA, 310 bp, Zea mays
  unsure at all n locations
  Clone ID: LIB3150-039-Q1-N1-F1
ccgttgccgtgtggaacccactgagcatgatcagctccgaggggaaagcggaggacgccatggtcgcgcgccttgagaagcacaccggaccggtgtgtggactggagttcagcgagctcacgccgaatcggctcgcttctggggctgagcagggggagctttgcatctgggatctcaagaatcccgttgagccaatcgtgtacccgccactcaagagtgttgngtcccatgcccaagctgaaatctcttgtttatcctggaatcccaagtttcaacatatagttgcctcaacttcgagtaatgggatgac

SEQ ID NO: 9555 - DNA, 456 bp, Zea mays
  Clone ID: LIB3150-039-Q1-N1-F10
ttcaaatctcgcacacctcgaagccttggaggcccgaaaccctagctggtcggcctccccgccgcttccacccatggctccaggactgcagcgcttcactgacattgccgacgacggcacgccccagctcgacgccgcgttcggcgaggagctggtccgtgtggaccgcaccgtggctgtcgcccttggcccccgctcgccggagtccccggggactctgttcgtcaccaccaggagggtgatttggctcagcgaagcggagaagggcaagggctacgcggtggacttcctcgccatctcgcttcacgctgtgtcgcgcgacctcgaggcgtacccctcgccctgtatctacactcaaattgaggcagccgttggtacaaaagaggaagctggggaatcaaatcctgaagcaaatgaactagagctatctagagtatctgaaatgaggctcatact

SEQ ID NO: 9556 - DNA, 431 bp, Zea mays
  Clone ID: LIB3150-039-Q1-N1-F11
cgccgctccgcctcagcgcatcgcccgcggcgagctcatcgatcaccttgggctgtcaatcatggcggacgtcgatgtcgaaccggaggttgccgccggagctcccaagaagaggacgttccgcaagtacagctaccgcggcgtcgacctagatgcgcttctcgacatgtccacggacgaccttgtccagcttttccccgcgcgcgccaggagaaggttccagaggggtctgaagaggaagcccatggcgctcatcaagaagctgcgcaaggcgaaaaaggatgctcctgctggtgagaagcccgagccagtcaagacacatctccgtaacatgatcattgtccctgagatgattggaagcattgttggggtctacaacggcaagaccttcaaccaggttgagatcaagcctgagatgatcggccactacc

SEQ ID NO: 9557 - DNA, 419 bp, Zea mays
  Clone ID: LIB3150-039-Q1-N1-F12
cttacttccgcgccgacacccctacagggaaggaagaggaggagggcaggatgtcgcaccctaagttcgagcacccgaggcacggctccctcggcttccttcccaggaagcgctcctcccgtcaccgcggcaaggtgaagtcattccctagggatgaccccaagaagccttgccatctcactgccttccttggctacaaggctggcatgactcacattgtccgtgaggttgagaagccaggatccaaactccataagaaggaaacttgtgaggctgttaccatcattgaaacccctcctcttgtcattgttgggctcgtggcatatgtgaagactcctcagggcctccgcacactcaactctgtttgggcccaacatcttagcgaagaagtgaggagaaggttctacaagaactggtgc

SEQ ID NO: 9558 - DNA, 130 bp, Zea mays
  Clone ID: LIB3150-039-Q1-N1-F2
cgactgggtaggctgccgccgccgccctacgggaggtccagaggaccaaggcattcgtattcaacagtctcttccccgggccacacccttttgggtggaacctggaatgtagaaggaagatttggtgatt

SEQ ID NO: 9559 - DNA, 137 bp, Zea mays
  Clone ID: LIB3150-039-Q1-N1-F3
cttgtgtttaggctgcaatcctcggcctagggtgggtccctaggaccaaggcgcgcgtattacccactctcttcctggtgcgagaccagtttggttgcttcttgtagtgttaagcgaagatttgatgattatcagac

SEQ ID NO: 9560 - DNA, 369 bp, Zea mays
  Clone ID: LIB3150-039-Q1-N1-F4
ctggatttgaaaacactagaatgaagctcctgagacatgtttcttttgttgattatgttcttgccctcaccgctgagaacttactcgcaaggcggcttcaaacacttgtcttcaaggctggcatggccaagtccattcaccatgctcgtgtcttgatcaagcagcgtcacatcagggttggcaggcaaattgtcaacgtcccatcattcatggtgagggtggagtctgagaagcacattgacttttcactgtcaagcccattcggtggaggccccgcaggaagggtgaagagaaagaatcagattaaagcacgcggtggcggggatgctgctgatgaagatgaagagtgaggatggacaccttgtgtta

SEQ ID NO: 9561 - DNA, 173 bp, Zea mays
  Clone ID: LIB3150-039-Q1-N1-F5
tctattagattggcgatccaattgaggcacgcgactatgagtggacggaaaggggttcctctgtagatcaactggtgaattgcatcaatagtttcagagaggctgcatctaccaatgaccagacagttgaccatattgacatatctgagaaacagaaggtcatcaattaatgc

SEQ ID NO: 9562 - DNA, 377 bp, Zea mays
  Clone ID: LIB3150-039-Q1-N1-F8
attcattccgtggaagagtttgcgagtggccagttgtgaaaggcgtcaaatttgttggcgatggctatactcactgtgaaggtatgctacacaaggcataaggagattcatcttttggcattttcttttattatgtgttaacagagcttctgaattataacgtttgtgttttaagcttccgggtctggtcggtgtgaaattaacaacggagggtgctggaaagataccaagaatggtcggacatactctgcctgtactgtaagtgttagttgaggtttcgctgtccttaaaactgtcattttatcagtaggatcctgtccagttctttttgttttattaagaaatgctatagaaatctgatgttttggttctgggcc

SEQ ID NO: 9563 - DNA, 458 bp, Zea mays
  Clone ID: LIB3150-039-Q1-N1-F9
cttacttccgcgccgacacccctacagggacggaataagaggagggcaggatgtctcaccctaagttcaagcacccgaggcacggctccctcggcttccttcccaggaagcgctcctcccgtcaccgcggaaaggtgaagtcattccctaaggatgaccccaagaagccttgccatctcactgccttccttggctacaaggctggcatgactcacattgtccgtgaggttgagaagaccaggatccaaactccataagaaggaaacttgtgaggctgataccatcattgaaacccctactcttgtcattgctgggctcgtggcatatgtgaagactcctcgtggcctccgcacactcaactctgtttgggcccaacatcttaccgaacaagtgaggagaatgttctacaagaactggtgcaagagcatgaagaaggctttcacaaagtatgctctcaa

SEQ ID NO: 9564 - DNA, 430 bp, Zea mays
  Clone ID: LIB3150-039-Q1-N1-G1
cataagagagggacaaacttgttgaggtcaccgaagagttgagcgagttgacacaaaaagtaagcgagagtattgaattggagaggaaggtgcaggaccttgagcagaagctgcagctagcttattccaagtctgacgaacaggcagtggatactgtggagtcgagatcccgtgaattcagcctggattcatcaacgacttcaggcaagcagcaagacaaaactcaggctgtctcaccaaacccaaccctgcaaggagtgcaagaaccttccggcatcatggccttcaagttcatcctgggagttgccctgctgtctgtcctaatcggcgtgtttcttgggaagcggtactagcgctcaggtcgtgctgaaagggctcagccagcggcaagtttgaaaggattggtggccttgatggtaatggttcgacg

SEQ ID NO: 9565 - DNA, 432 bp, Zea mays
  unsure at all n locations
  Clone ID: LIB3150-039-Q1-N1-G12
gttgagctgaaggagagtgttaaaagtggccggggcgttttggatggcgagtatgatgaccttccagaacagtcattctacatggttggaggaatagaggaggtcatcgccaaggcagagaagattgccaaggaatctgcatcataaggggtctacaggcaacgcaaaatttaacttttggaggtcaacgtgatgtgctttttatcctgtgttatcaagaacttacgtgcaggagaccctgccctgcagaaggatgtttctctcctccgtccccccaccccacaccccaaaataaggattcgcagtgacattttaatttggtttactgccctttgaggaagaattacctttttgatgaggtgaaactataaccttgntaattctcaaaaaaangcactattcctggaaggggacaagtgcatatagtcacat

SEQ ID NO: 9566 - DNA, 400 bp, Zea mays
  Clone ID: LIB3150-039-Q1-N1-G2
gcggaagaagagagagaagacgtctctctcctgtcggcgtccccgttccccaacctctcgtctgctgcctgcctgcctgcctgcctgcaaaaaggagtttgtcatggcgtctaagcgcatcctcaaggagctgaaggacctgcagaaagacccccccacatcatgcagtgcaggtcctgctggtgaggacatgtttcattggcaagcaacaattatgggaccacctgacagtccctatgctggtggtgttttcttagtgaacattcatttcccgccagattaccccttcaaacctccaaaggtttctttcaagacaaaggtcttccatcctaatatcaacagcaatggaagtatatgccttgacattctcaaagagcagtggagccctgctttgacaatt

SEQ ID NO: 9567 - DNA, 115 bp, Zea mays
  Clone ID: LIB3150-039-Q1-N1-G3
ctggggggttcagatcggatcggaagcttgcataagtttccatcgggcttcgccgctcgccgggatggctatccgcaagggggcttgctacgccgacgcggcacttctcgcgctc

SEQ ID NO: 9568 - DNA, 364 bp, Zea mays
  Clone ID: LIB3150-039-Q1-N1-G4
gtggaaggctggaatgccccacaggatagtgatgtgcagccgagtcaatttgctaaagctgttacaaaggaagttacctatttgcaccgtatcctttctcaaacactgcttgaggttgaggtgcaaacaatattcaggcaagtggttcaaatatttcattcacatattacagaagcatttacaaaattggaagtcagtactcctcaggcaaaggatagattatgccgagatgttcagcatattcttgcatgcatccggaagttgccagctgacaacttcagttcagaaactattccaaattatggtcttcttgacgaattcttggctgagaactttgggacgaaagttggtgaatgattgactg

SEQ ID NO: 9569 - DNA, 301 bp, Zea mays
  Clone ID: LIB3150-039-Q1-N1-G5
ggtaaagcctctcaatggcagtggccgtagcatgccaagatcgaatgagggaatgcggctcatattttcggcagttgtaggtgtcatgctgggttacctgtttgggatctccttccctacagtcaacataaccaagcttcacttcccttcgagtatcatctcttatatcgaagataggaactctggcatcacaacccagacattgttgaaccatgcttgggcatctgcaaacaatcataaaaagaatagttctgaatctaacactgatgaaattcccgagatttatgttcctacaaaccca

SEQ ID NO: 9570 - DNA, 311 bp, Zea mays
  Clone ID: LIB3150-039-Q1-N1-G6
ttttaccgtgcgcgaccctggtgctggcgggaatgctcatctcaaggtgctggaaggggctggggaaaggttgcagcttgtcaaggctgatttgttggactacagcagtgttgcatcagcaattgccggctgtgagggtgtcttccatgtagctagccctgtcccttccggtcggtcctccaaccctgaggtggaggtcataggtcctgctgtaacaggtacaatcaatgtgataaaggcttgctatgatgcaaaagctgcgcgagttgaggtggtctcttcatgtgcagctgcatatgctaatcctaatt

SEQ ID NO: 9571 - DNA, 79 bp, Zea mays
  Clone ID: LIB3150-039-Q1-N1-G7
gtcgtaaatataaatcaaaaccatctacgcttgcactgaaaactgatcttcaccaacttataaacaaagactcatgacc

SEQ ID NO: 9572 - DNA, 353 bp, Zea mays
  unsure at all n locations
  Clone ID: LIB3150-039-Q1-N1-H10
acgaactccacactaccctctgcccagcgtcgcgcacgcatgaaaccctagtgaccccgtccagatctcggcgtccggatcactgcgcggcgccgccatggcgccccccgcgctggactctctcccggcgccgctccggtcgctgcggctcaagacgaagcagcaggagctcctgctccgcgtctcggcgctggcgctcatctacgtgctcgccttcgccgtccgcctcttctccgtcctccgctacgagtccatgatccacgagttcgacccttacttcaactaccgcaccacgctcttcctcaccgagaacggcttcagcgagttctggaactggntcgacttcgagagct

SEQ ID NO: 9573 - DNA, 316 bp, Zea mays
  Clone ID: LIB3150-039-Q1-N1-H11
ggaaagggttcgtactcatggcgccgccgcagccaaagtcgggcctcttcgttggcatcaacaagggtcatgtcgtcaccaagcgcgagctgcctccccgcccgtgccaccgcaaggggaaatcaacgaagagggtgtctatggtcaggggcctgatcagagaggttgctgggtttgctccttatgagaagcgtatcactgagcttctgaaggttggcaaggacaagcgtgccctgaagcttgctaagagaaagcttggaactcacaagagggcaaagaagaacagagaggagatggcgggcgtcctcatgaagat

SEQ ID NO: 9574 - DNA, 441 bp, Zea mays
  Clone ID: LIB3150-039-Q1-N1-H12
cgaagccgcactgtgagagagggacgcggccggttgtcccggcttttagacgcaacttccatcgctgcgaagctatccattcgtgttcgtcatggccgccagcgtcaccgtggaaaacctcaaccccaaggtcttaaaatgtgagtatgcagtccgtggggagattgtcatccatgctcagcgcctgcagcaacaactacaaacacaaccagggtctcttccttttgatgagatcctctattgcaatattgggaatccccaatctcttggtcagcaacctgtgacattcttcagggaggttcttgctctttgtgatcatccgtgcctctgggaaaaagaggaaaccaaatcattgttcagtgctgatgcaatttctcgagcaaagcagattcttgcaactattcctgggaaggcaacaggtgcatatagtcacagtcaggg

SEQ ID NO: 9575 - DNA, 308 bp, Zea mays
  Clone ID: LIB3150-039-Q1-N1-H2
gggttggcttctcctccccctccggttcgggttcgggttcgtgaggttctccggggttcggtttcgtgggtgagcggatcgagatggcggcgtcggatgttgagtaccgctgcttcgtcggcggcctcgcctgggccacggacgaccactccctccacaacgccttcagcacctacggcgaggtcctcgagtccaagatcatcctcgatcgggagacgcagaggtcccgcggcttcggcttcgtcaccttcttcacggaggaggcgatgcggaacgccatcgagggcatgaacggcaaggagctggac

SEQ ID NO: 9576 - DNA, 191 bp, Zea mays
  Clone ID: LIB3150-039-Q1-N1-H5
cgagccttttcgctcgccgctaccaccacgtggttgtctcgcctgcgcctgagcctcagcacgcgcgcgggatctcgcgctcgctcgcgcaccgaggagcgcgcacccacccgcagggttcggggcggggtgatccggtggtgatggcgagccggatcaaggaggacgagaggcacgagaagatcatccgc

SEQ ID NO: 9577 - DNA, 345 bp, Zea mays
  Clone ID: LIB3150-039-Q1-N1-H6
caaattcgcaaactaaccccaaacgccagtccaccccatcccctcctcatccactccgggcggccatggcctgctccttctccgccgccatcaccgtctcttccgcccctaccccggccgccagacccctcgctgctgccacgcagtccgtctgcatcgctcgctccgcggtcgccaccactgccaggccgctccgcctcgccgcctcaaggtccgcgcgggctaccagactcgttgcccgcgccagcgtagtcgatgacttgccgctggtcgggaacaaggcgccagacttcgaagccgaggctgtgttcgaccagcagttcatcaacgtgaagctctctgatt

SEQ ID NO: 9578 - DNA, 344 bp, Zea mays
  Clone ID: LIB3150-039-Q1-N1-H7
aggcaacatgtcatgcacctgatccagttggttgctacaaggagatatatcgtgtgttgaagcctggccagtgctttgccgtgtacgagtggtgcattacggatcactatgatcctaacaatgcaacccacaaaaggatcaaggatgaaattgagcttggcaatggcctgccagatatcagaagcactcggcaatgtctccaggcagtaaaagacgccgggtttgaggttgtttgggataaggatcttgctgaagattctcccttgccttggtacttgcctttggatccaagccgattttccttgagtagcttccgtttgacctctgtgggacgcatgattacc

SEQ ID NO: 9579 - DNA, 207 bp, Zea mays
  Clone ID: LIB3150-039-Q1-N1-H8
attatgcgcaacacgatgcagatcgatgggccgcagtagctttctgacacagccccgagagagtagggatagggccatagggggtcacaaaccataaaccaagaagctgcgggacgttcgaatcaaacatctctaccctctccttccagcgaaatggcaagagcggcggatcctcctctgcaccggatgcccggtctggccttgctg

SEQ ID NO: 9580 - DNA, 441 bp, Zea mays
  Clone ID: LIB3150-040-Q1-N1-A1
gggagagggcccgggccttcgccggcgaggcggcgaagcggtcgcaggaactctccgcggaggcggccaagcgctcgtcggcgctggtctcggagacggcgaagaagtccaaggagatcttctccgaaaccgcctccaagtcgcgggagatcgccgctgaggccaccaagcaggccgacctcctcgccggccagatcaagcacctcgcctccgacctccctgtgccttcgatcccgcccatccccgcgatcccgcctatccccgccgctgcctcgtcggtgcccgacgcggccgagcttgagtgctacggcatcaccgacgacctccgcgagttcgtcaagggcatgaccataaacaccttccgcgacttcccactgcaagatgagcctgaggtgtctgatgtgccaactgtgtcgaatgtgcgtcaggatcttgacgagt

SEQ ID NO: 9581 - DNA, 360 bp, Zea mays
  Clone ID: LIB3150-040-Q1-N1-A10
ctgacgcgtgggcggacgcatgggcggaggcgtggtcggcggcgaagaagcctgcacaggatgagcccgcgacagagaaggcggagaaagctccggcggggaagaagcccaaggccgtgaagcgcctcccggcggacaagtccgccggttaggagggcggcgagggcaagaaggggaaaaagaaagcgaagaagtccgtggagacctacaagatctacatcttcaaggtgctgaagcaggtgcaccccgacatcggcatctcgtgcaaggccatgtccatcatgaactccttcatcaacgacatcttcgagaagctcgcggccgagtccgccaagctggcgcgctataacatgaagccca

SEQ ID NO: 9582 - DNA, 434 bp, Zea mays
  Clone ID: LIB3150-040-Q1-N1-A2
ctcggcttctcgcaggcgcggcgaccgggttcaaccccaactcttcttcttcttcctcgcaaacttcgaacgggacgagaaggaagcggacgcgagaggagactaaccgacctcggatccatcgacgcgtgaagatgtcttcgcccgccgagtactacaaatcacttccacctataagcaaggcatatgggacattgtgtttctttaccaccgtgctagttcagctccagattttgcacccattatttctttacttagattaccccttggtgttcaagaagtttgagatatggaggctattgacaagtttctttttcctggcaccattttccatgaaatttggtattcgccttctgatgatagcaaggtatggtgtcatgttggaaaagggtgcatttgataagcggactgcagatttcttatggatgatgata

SEQ ID NO: 9583 - DNA, 413 bp, Zea mays
  unsure at all n locations
  Clone ID: LIB3150-040-Q1-N1-A3
cttcgttaggcggcacggccgcgggcaagaagaaggggtcggtcgccttcacgatcgactgcaccaagcccgtggaggacaagatcatggagatcgcctcgctcgagaagttcctgcaggagcgcatcaaggtcgccggcggcaaggccggcaacctcggcgactccgtcaccatctcccgcgagaagaccaaggtcaccgtcacctgcgacgggccattctccaagaggtatctgaagtacttgaccaagaagtacttgaagaagcacaaggtgcgagattggctccgtgtgattgcagccaacaaggaccacagcgtctatgagctgcggtacttcaacattgctgagaacgaaggcgaggaagaagattagactgcattgcacttatatctcagttntgaactcattgaa

SEQ ID NO: 9584 - DNA, 325 bp, Zea mays
  unsure at all n locations
  Clone ID: LIB3150-040-Q1-N1-A4
gaaggatccgccgcccaccatgtcgccgccgcagccaccacacccggtgccccgagagacggtggccagcgctgtcgcttccctgacaacgtggatgaagaagcgcgctgcggaggcgcgcccgaacctcctcgccgacgagcgcgacgacatcgtggtcctccagctctcgctacgccgcatccccgcctcgcgcagcaccaagccgcgcctcctcccgatgccacatcccgttgttgggcacgacggcgcctccgtctgcgtcatctcggacgaccgcaccaagtcgcggtccccttccgcctccgacctccacgcgtncatg

SEQ ID NO: 9585 - DNA, 225 bp, Zea mays
  Clone ID: LIB3150-040-Q1-N1-A5
gttagccaaaggccttccttgcgcttccagggcaaagaagatctgaggccgcggcggagcgtgacgacgacgaagtcggtcaggatgagccgcgaggataccctgaaagtgcagaccctcgagctcaaggtgaacatccactgcgacggctgccttaagaaagtcaagaaggtgcttcacaagatcgatggggtgtaccagagcacggttaatgcggcggagggc

SEQ ID NO: 9586 - DNA, 452 bp, Zea mays
  Clone ID: LIB3150-040-Q1-N1-A6
tttatcgcgagcgccgccctttttgttgggtttttttttttacgatgatattgtaggataagataatggtccacaacacatcctaaccgattacaaagttcaccttgagaaaattgcaaaccaaacaataattccaactcaaacgataacaactaattgtccctcactgctcctcttcgatcacacccttgtcgctcacatagataccatccaaaaacttcctgatatccttcttcttgacatggcatttctggttgatgagggcggcggagcgagagactaactcgacgtcgttgccatcgagaataagctcgtccttgaccttctcggagcggaggatggtcacgccgtcaagcatgtccacctttctgacctttttctcgccgaggaagttccttatctcgatggcggtgttggagttggtgatggacgcgttgatggggaaatgggcg

SEQ ID NO: 9587 - DNA, 421 bp, Zea mays
  Clone ID: LIB3150-040-Q1-N1-A7
ggttgcttcccccattatggtatcgagaggggtgactacctgatgatcaagggctgctgtgtgggtccaaagaagagggtggagaccctccgccagtccctcctgaagcagacttcccggctggcgctggaggagatcaagctcaagttcatcgacacatcgtccaaatttgggcacggtcgcttccagactaccgatgagaagcagaggttctttggcaagctcaaagcgtaaggtgctgcggagcaacgaattcccatttctcaaaatcatcaaactgtgatacttttgtttgtaaccttgctgtaccaagttttgtagccatggtccggtcgtctatggattgttccatgcttcagaactgcactgtctatgttttgtgctattttggatgtttaatggcccaatcattgcatataga

SEQ ID NO: 9588 - DNA, 440 bp, Zea mays
  unsure at all n locations
  Clone ID: LIB3150-040-Q1-N1-A8
acttcaattgtaccaattgcttctgagcgggtaccacagtacctgtgttctgctgagtggcagaagcaccatgctgcgctcattacacttgcacagattgcggaaggatgtgcaaaggttatgcttaaaaatttggaacaagtcgtttcgatgatattgaatggatttcaacatccccacccacgtgtgagatgggctgctatcaatgccatcggtcagctctctacggatttgggcccagatcttcaagttcattaccaccagcaggtgctgcctgcattggccaatgctatggatgatttccagaatccacgagttcaagcacatgctgcttcagcgattttgaattttagtgagaattgtacaccggaaattttgacgccttacctggatggaatngtgaacaaattacttggtcttcttcagaatggaaagcaaat

SEQ ID NO: 9589 - DNA, 323 bp, Zea mays
  Clone ID: LIB3150-040-Q1-N1-A9
tgtgtttttgattttagccgccgccggtagtcatctcacatccctcgagaagacgcctgctcctcgccgatcgatacgatggccgtcttctccgacctccacaccgccgacggcctcaagtccctcgaggctcacctcgccggcaaaacctatgtgtctggtgactccattactaaagatgacattaaagtcttcgccgcggtgccgtcgaagcctggcgctgagtttcctaatgccgcccgctggtacgagaccgtctctgcggctgtagcctcaagattccctggtaaggctgttggtgtaaatctgcctgcgggatcagc

SEQ ID NO: 9590 - DNA, 327 bp, Zea mays
  unsure at all n locations
  Clone ID: LIB3150-040-Q1-N1-B1
gttaccatctcatcccaactccgcctcgaccggatctcgtcggactcggatccgcccgaccaccccgcgccgncgcagatcaaagaagatggcagctgtcgacacattcctcttcacctcggagtctgtgaacgagggacaccctgacaagctctgtgaccaggtctcagatgccgttctggacgctggcctggctgaggaccctgacagcaaggttgcttgtgagacctgcaccaagaccaacatggtcatggccttgggggagaccaccaccaaggccatggtggactacaagaggatggtcagggagacctgccgcaccattgg

SEQ ID NO: 9591 - DNA, 460 bp, Zea mays
  Clone ID: LIB3150-040-Q1-N1-B10
cttacgcgtgggcggacgcgtgggcgaagacgctgccaccctacctgcagacggctccgcaacaagaaaacacccgagttccttccattcccacccaaaaatctagccaaaaaagcccaaccaaaatgctgcctgcccgccccctcctcgtggccgccgccgtcttcctcctcctcctccccgttcacgtcgccatcgtcgccgcacaagggtttcgcggcttctcttacctcctaaactgtggcgcggcgtcccccaccaccgacagccgcggcctccgctgggatcccgatggcgactatgtctctgccggtacccccggcgtggtctcgctctcgggcctcatcaaccccacgcttgccacccttcgcaccttcccgctccgctacggagccaagttctgctacgagctccccgtggatcggaaccgccgctaccttatccgccccacattcttcta

SEQ ID NO: 9592 - DNA, 451 bp, Zea mays
  Clone ID: LIB3150-040-Q1-N1-B12
gcttcggatcggaagttacggcacgggagtggtgatcatgttcaacatccaccaaaaaccctctcttgattttcccagaggaacttgtgttaacaaccagtatacggtcatgttcaagaagggtgcctttgagcttgggtgtgctgtctgtccaatagctatcaaatacaataaaatatttgttgatgccttttggaacagtaagaagcaatcttttacgatgcacttggtccggttgatgacatcatgggctgttgtgtgtgatgtttggtacttggagcctcaatatctgagggagggagagactgcaattgcgtttgctgagagagtaagggacatgatagcagctagagctggtcttaagaaggtcccgtgggatggctatctgaaacacaaccgccctagtcccaaacacaccgaagagaagcaacgcatattcgccgaatctgtc

SEQ ID NO: 9593 - DNA, 396 bp, Zea mays
  unsure at all n locations
  Clone ID: LIB3150-040-Q1-N1-B2
agctgcttctgcttgctctggggggaaggagagagagagagagcgagagagagatctagtcgagaggctagtaggtggtcctcgaacgaagatgttggcggtgttcagcgggcaggtggtggaggtgccggcggagctggtggcggcgggcagccggacgccgtcgcccaagacgaatgcgtcgcatctggtggggcgcttcctggccgcgtccgagccggccgtgtccgtgcagctcggcgaccacggncacctcgtctactcccacaccaaccaggcgctgctccgccccaggtcgttcgcggccaaggacgaagtgttctgcctgttcgagggggtgctggacaacctgggtcgtctgaaccagcagcacgggcttgtaagcaagggcgccaa

SEQ ID NO: 9594 - DNA, 411 bp, Zea mays
  Clone ID: LIB3150-040-Q1-N1-B3
ttctgatccttgttcgcttccggcttcgctggttctctgcgtccgcccctgccgggccttgtcttctcccccaaatcaatccctcgcccacggacccaaccaaatcctcctccacctcctccatctccagccccgtccctacccagctcgtgtaacctcccgatgtccgggggcggaggcggcgcaagcgcgggctcgtcgtccggcggcggcggcggaggtggagggggcggcagggagggcgactgggactgcggcagctgcggcaaccggaactacgccttccgctcgctctgcaaccgttgcaagcagccgcgcctcctcgtcgaccctaacaccccgcgcgactccaagtggctaccccgtgccggggactggatctgcaccggttgcagtaacaataattatgca

SEQ ID NO: 9595 - DNA, 448 bp, Zea mays
  Clone ID: LIB3150-040-Q1-N1-B4
cacaacccgagccccccaaacccgaaggaggaggagctcccctgaccttgctccgcctccgatcaaggaaaaggaagatgagctactacggccagcagccccccgtcggcgtcccgccgcagcaaggctacccggggaaggacggctacccgccagcggggtacccgccggccggctaccccccgccggcgcaaggctacccgccgcaaggctacccgcagcagggttacccacagcagggctacccgccgcagtacgcgcagccgcctccacagcagcagcagagcagcgggccttccttcatggaaggatgcttggctgccctctgctgctgctgcctcctggacgcctgcttctgacggaaccatccgtgccgggtccaacacggctgcaagtgaagcaaccagcttacggaagagctggaactgggccgtgctattctagcttt

SEQ ID NO: 9596 - DNA, 416 bp, Zea mays
  Clone ID: LIB3150-040-Q1-N1-B5
ctttaagtaagcctcagttccgccggcgggcgaggggttcgatctgggttagcctctcacgatgccgccagcccccaagtccggcgacgccctcttcgccagcgtggatcgcgtcaatgcggagctgttcacgctcacgtacggcgccatagtgcggcagctgctcacggatctggaggaggtcgaggaggtcaacaagcagctcgatcaaatgggttacaacattggaacacgattggtcgatgagttcttagcaaagtcaaatgtatcaaggtgtgttgacttcaaagagactgccgatgttattgcgaagcttggcttcaaaatgttcttgggtgtgactgcaactgtgaccaattgggatgttgagggtacaagttgcagcattgtcctcgaagacaaccctcttgttgatt

SEQ ID NO: 9597 - DNA, 456 bp, Zea mays
  Clone ID: LIB3150-040-Q1-N1-B6
agttgcagagcgtagagaggatcggggggcagaacagcatgaagatggtcatcgttctcgtcgtgtgcctggctctgtcagctgccagcgcctctgcaatgcagatgccctgcccctgcgcggggctgcagggcttgtacggcgctggcgccggcctgacgacgatgatgggcgccggcgggctgtacccctacgcggagtacctgaggcagccgcagtgcagcccgctggcggcggcgccctactacgccgggtgtgggcagacgagcgccatgtaccagccgctccggcaacagtgctgccagcagcagatgaggatgatggacgtgcagtccgtcgcgcagcagctgcagatgatgatgcagcttgagcgtgccgctgccgccagcagcagcctgtacgagccagctctgatgcatcagcagcagcagctgctggcagcccatggtctcaacc

SEQ ID NO: 9598 - DNA, 446 bp, Zea mays
  Clone ID: LIB3150-040-Q1-N1-B7
tctttcttcccgccttaagaattcaagcggtggcaatatcattcaggtgtgccaattgccattatctcttcgaagagttgctttaaccccgagtgaagttctgccggcttattgccaacggtctatttttacattagcaatgagtatgctggcctttgctggaaaagtttgtcacgtcgctgaactgtcggacttgctaaggagtttttcatcttccaaaattgacccttacctaagaataggtgaagacttgcaactctatgtaaggctgcaatccgatctaggcagctattgttctgaaagagatcaagagattgccaaatccatgctttctgactgcaggacaaaagtagggattaacgatcatcgagtgcttgatgttattgcctctgcactttctaatttcattgagatgggcaaagatgtaattgtgaacgagctgactg

SEQ ID NO: 9599 - DNA, 448 bp, Zea mays
  Clone ID: LIB3150-040-Q1-N1-B8
ggtctatctttgagaaaccttaccttacgcttctgctatttgagcatatttggtgttacctcaagcgatcttgtgtatgatcttctgtcgattctgagcaagcgcttgacagagctagatgtctctacagtgttgaccatcctacagtgctgtggaatgaagctgcggggagatgatccatgtgctatgaaagattttgtccttagtattcagaactctgtgaatgatcttaaattgcactctggtgttggagcagacgggaagactgatatacgtagcagaagaatggaatttatgcttgaaaccatatgtgacattaagaacaataagaaaaggcctaaagaggatccttcacaccatactcgaataaaaaagaggcttcaaaagcttaaagcagaagatgtcctcttgcgtgggttaacatggagcaagcttttggaccctgata

SEQ ID NO: 9600 - DNA, 364 bp, Zea mays
  Clone ID: LIB3150-040-Q1-N1-B9
tctttcaagcaagtcggccaggaagggataaagacctaataccgagccgtgcgggggctccggacggtaacaggacatgaccccaaaatttcagatccttcctacccgcccacccgtgcccatcgacacatcattattgcctgtcgcaccccacctacgacctcttctgctgcagggtgatctgatacgccacatgctgcgcgatagaactgtgggtattccactacagctccctcatctagaaccccaagttctacttctacgacaaaatgctcggctacatcaatggctacatacgcacctttaatctcgcttgcattgaccacagaggcacaccataacatccggctaggacctgcacgct

SEQ ID NO: 9601 - DNA, 90 bp, Zea mays
  Clone ID: LIB3150-040-Q1-N1-C2
cgccaccatcagttaagttccgctacgggtcgaccagctagcggcaatggtggccttccagttccatcagtgcctagccgtagggctcgc

SEQ ID NO: 9602 - DNA, 337 bp, Zea mays
  Clone ID: LIB3150-040-Q1-N1-C3
gtgctggcttctcctccccctcttaccagagagctcttcaggttagggttacttagggttttgtggaggggcgatggcggcggctgatgtggagtaccgttgcttcgtcggcgggcttgcctgggccaccagcaacgagtcgctggagaatgccttcgcctcctacggcgagatcctcgactccaaggtcatcaccgaccgggagacggggaggtctcgcggcttcagcttcgttaccttctcctccgagaactccatgctcgacgctatcgagaacatgaacggcaaggagctcgacagccgtaacatcaccgttaaccaggcccagtcccgtggc

SEQ ID NO: 9603 - DNA, 394 bp, Zea mays
  Clone ID: LIB3150-040-Q1-N1-C4
cctactcgtccgtttgaggtcaaagccagaggtggtgacacccatgttggtggtgaggactttgacaacaggatggtcaaccacttcgtccaggagttcaagaggaagaacaagaaggatatcactggcaaccccagggctctccggaggctgaagaccgcttgtgagagggcgaagaggactctgtcttccactgcccagaccacgattgagattgactcgctgtatgagggcatcgacttctactccaccatcacccgtgccaggtttgaggagctcaacatggacctgttcaagaagtgcatggagcctgttgagaagtgcctgagggatgccaagatggacaagagcaccgtccatgacgttgtacttgttggtggctccactaggatcc

SEQ ID NO: 9604 - DNA, 419 bp, Zea mays
  unsure at all n locations
  Clone ID: LIB3150-040-Q1-N1-C5
cttcacctcgctcctcgcanaaaggaaagaaaaaggagcaagaacggtggtatcctctcatggcacaactcatgagaagttgcatcacagaatttatagccgctcctctcttggttcttttgatcatggcttcaacgtccccgtcctttcaagtgcatgtgaagggcgacgatggccgtcaacatggatcgccggcgcttcggcagcgactggcggcggcgacgtgcttcgagaccactgccggcttctgttgggtgaagcaatgccagagtttctgcgcatcaaaaggcttcaacgccgagagtgctttctgctataaacggcctggttctggccgtcttcatctctggcagtgctgctgccaaccataagagtacgtagtgcaaatgtatgcatcgatccatatatggttgacatgc

SEQ ID NO: 9605 - DNA, 385 bp, Zea mays
  Clone ID: LIB3150-040-Q1-N1-C6
tgttttccccgctcgcttcacttctctgagggcgcaccgatcagaagagatggcggtgcctctgctgacgaagaagatcgtgaagaagcgggtcaagcagttcaagaggccccacctcgaccgctacaagtgccttaagccaagctggcgcaggccaaagggtattgactcccgtgtcaggaggaagttcaagggatgcaccttgatgcccaacattggttatggttctgacaagtcgaccaggcactacctccccaacaagttcaagatgtttgtggtccacaacgtttctgagctggagttgctcatgatgcacaacaggacctactgcgcttgaattgctcacaaccgtgccactaagaagcgcatggagatcgtggagcgt

SEQ ID NO: 9606 - DNA, 144 bp, Zea mays
  unsure at all n locations
  Clone ID: LIB3150-040-Q1-N1-C7
gttcatgctctcctgctcccccctcagacganaccttctacatcacaggcggggctccccccccccgcagtttctacctccgcgtgtgcttcgcatgtctgccgccccctattctgcgccgcctgttgcatctccttttttttc

SEQ ID NO: 9607 - DNA, 454 bp, Zea mays
  Clone ID: LIB3150-040-Q1-N1-D1
cagcgtcagatccaagggcgccatccttgcataaggtggttgagtctgaggacattgctgagaatactgggcttgggtttcctcacacgtctcattgccttgcgtctggcgacataatgatttcttgccttggggacaaggaggggaatgcagctggcaatggcttcctgctgttggattcagagtttaatgtcaaaggacgttgggaaaagccaggtcacagtcccttgtttggatatgacttctggtaccagcctcgccacaaaacgatgatcagttcgtcatggggagcccctgcagcgtttatgacaggtttcgatcttcaacatgtccaggatggcctgtatggaaggcacctgcatgtgtacgactggcctggcggtgagctcaagcagacacttgatctatgtgacactggactccttcccctgaggtgaggtttttacatgatcca

SEQ ID NO: 9608 - DNA, 445 bp, Zea mays
  unsure at all n locations
  Clone ID: LIB3150-040-Q1-N1-D2
cataccctagcgagcgagagagcccggagccgagagaccagccagccatggcgctgcgtgccctgtacaacgagatccggagcatgaaggtccgcgacgtgccggcttacctgaagccgcgcttgacctgtgacaacgtcaagaagagcgccgaccaggccgtcgaccgctacatcgagaagtacatcgacacgagctcgccggaccctctctaccacgtctgcatcggagggatgatcttctcctacttcgtcaatctgccctgagagcgcgcccacctcgcccaccttgaggagatggagaggaccggtgggaagcactagatccgctgccccgtccctcgccggcagcgcgggaggacgggtgactntcatggtgtccattcaagctgatggcttctgttttcttctgctgctgagctactggagtcatgttactttggtcg

SEQ ID NO: 9609 - DNA, 431 bp, Zea mays
  Clone ID: LIB3150-040-Q1-N1-D3
ccctcctcctaggctctgcgtactccgagtccgctgcatcgcccgttgattcggcgcctccgttcagcagcccgcttccgccgccgccgccgccgccgccacacctggcgccgtgctccgcgcccgaatactgcggagggctcggcttctcgagcccctcatcttcttctgcggagccctgcgagctcagccgctcgccatgggacctcatcgccgagctctccgtctccgacccacaggtggaggatgacatcgtagacaagtacttcgtccatgtcgcaacgcgttcgagctggctcttctcagccaccgttccagccgcctccgccaagaagaagagtagtagcacgagtggggatagcaagcacaagcagcagctgcgccgagacgctgtgaataagtctgcaacgagtaaagagaaggttggcgag

SEQ ID NO: 9610 - DNA, 398 bp, Zea mays
  Clone ID: LIB3150-040-Q1-N1-D5
attaggtctcgctgccccgattcggcaagaagcctcactgagagagagggacgcggcccgttgtccccggcttgtacgcaatccttccgtcgctgcgaagttgatccctcgtgttcgccatggcccccagcgtcgccgtggaaaacctcaaccccaaagtcttgaaatgtgagtatgcagtccgtggcgagattgtcatccatgctcagcgcttgcagcaacaactacaaacacaaccagggtctcttccttttgatgagatcctgttctgcaacattgggaatcctcaatcccttggtcagcaacctgggacgttcttcaaggaggttcttgctctttgtgatcatccatgcctcttggaaaaagaggaaaccaaatcattgatcagtgcttatgct

SEQ ID NO: 9611 - DNA, 377 bp, Zea mays
  unsure at all n locations
  Clone ID: LIB3150-040-Q1-N1-D8
cttcgctccaaaggcgccctcactgctagacgccatgtacacgtgggccggcctanccttttttctcttgcctctaggagctgcccacacccgacgggctggacttttctttgccgcgcttaagtacgaccctgccaaggtgactttttataactaccgggttctcgnccgcctggagcaaaaccctgagaaacctgccggcggcgagctgctaccaaaatctgctgttaagaacgagagatatctcacgggtgagattctatcgatcgaggctgaagtgagcgaaactgaagctggcaagaacgctctcttctcaaacatcaacgctcatgacgcggagcacaggacccccgacgagaaaaactgctactgcccag

SEQ ID NO: 9612 - DNA, 105 bp, Zea mays
  Clone ID: LIB3150-040-Q1-N1-D9
cttctcaagctcaagacccacccatgaaccacctgtagctacaaggcatacaaaatttccatttggcaataagaaaaaaaacccttctctggtcatcccatgcca

SEQ ID NO: 9613 - DNA, 441 bp, Zea mays
  Clone ID: LIB3150-040-Q1-N1-E1
ggtaagggtaagagaagaaaaaggaaggagagtagacgtacacgacagagagacgaagacagtgtggaggggaggcagggtagcccccgcggcgccgctccgctcgaaatccccaaaaaggcaagatcaaatcatatcagatctctccacccccagcccatccatggcgatcgtgtacgccctggtcgcgcggggcacggtggtgctggccgagttcgccgacgtctcgggcaacgccggcgccgaggcccgtcagatcctcaagaagctgccgaccgacgccgagtccaggctgtgcttcgcgcaggaccggtacatcttccacgtcctccgatccgacgccgacggcatcaccttgctctgtatggccaacgacaccttcggaagaaggatcccctttctctacctggaggacatccaaatgaggttcatgaataacta

SEQ ID NO: 9614 - DNA, 460 bp, Zea mays
  Clone ID: LIB3150-040-Q1-N1-E11
gtctccacgcggaagcagcgcctaggacgagtcctacccaatggcgccgacgtcgaagctgtcgatgggcatcaagcgcgcgtcgcggtcgcacgcgtaccaccgccgtgggctctgggccatcaaggccaagaacggcggcgtcttccccaaagtcgagaagcccgccgccgccgcggaacccaagttctaccccgccgacgacgtcaagcctcgcgttcccagcacccgcaagcctaatcccaccaagctcaagtcgagcatcacgcctgggacggtgctgatcctcctcgcggggcgcttcatggggaagagagtggtgttcctcaagcagctcaactccggcctgctcctcgtctctggtccattcaagatcaatggagtaccgatccgtcgtgtcaaccagacctatgtcattgctacatcaaccaaagttgacatctctggtgttgatgtagcg

SEQ ID NO: 9615 - DNA, 424 bp, Zea mays
  unsure at all n locations
  Clone ID: LIB3150-040-Q1-N1-E12
gttgtctctccaccaagcttttcgaggagctgcttctgctcgcgtaggacaccgggactcaaggcgggccggtgactatggtgtcagcgaggaagtgcgagtcgcagagcttccgcttcaagggaccttgctcgaaggacgccaactgcgcaaacgtatggctgaccgaaggtttcaccggccgcgtgtgcaaaggcctacgccaccgctgattatgcaccatggactgctagtactgtctcgcctcgtgtcctgcgtgtgcatatatagccgcagcggatcagtaaaacatgcatgcatgcgttaccaaatatgtggcagtgccagcaagtctatgaattcaaatattgaataatatggcatggaacaaagcctgttctgaacgctgnctacaaatagattgaagcgttgttgcaagtttctg

SEQ ID NO: 9616 - DNA, 327 bp, Zea mays
  unsure at all n locations
  Clone ID: LIB3150-040-Q1-N1-E2
cagccgcctccgccgcgcgtaccaagcaggaggagacaggatgccggctggccacggcctgctctcgcggactcgcgacctcttcgcgcgccccttccgcaagatgggctacattccgctcaccacctacctccgcacctacaagatcggcgattacgtcgatgtcaaagtgaacggcgccgtccacaaggggatgccgcacaagttctaccacggccgcaccggtcgcgtctggaacgtcaccaagcgcgccatcggcgtcgaggtcaacaagcacgtcaatgagcgcatcatcaggaagcgtattcatgtncgtgtggagcatgt

SEQ ID NO: 9617 - DNA, 385 bp, Zea mays
  Clone ID: LIB3150-040-Q1-N1-E3
gcctgtatcccagcaaatagtgccagccatgaggaccaccgtgagcgctgaccctgaggcggcgctcgccggcgtgaaagagccgagggcgccaaggtcgctgcttgcgcgcgcgcgcgccaacctggcgttccagtcggtgtgggcggagctgaacggcgccatgggcgacctgtgcacctacatccccatcgtgctgtcgctggcgctggagcgccacctggacctgggcaccaccctcgagttcaccggcatctacaacgccgtcacggagctcatctacggggtgccgatgcccgtgcagccgatgaaggcgatcgccgacacggagctgtccgactcgtcagtcggagtcccccagatcatggccagcaatatcctgacc

SEQ ID NO: 9618 - DNA, 380 bp, Zea mays
  unsure at all n locations
  Clone ID: LIB3150-040-Q1-N1-E4
gttaggatagcgttaaattaggtgatcgggatgtgaaagancaggaatggatagaagctacaaaggagccaggccttaccttcatggntgcaaaannagaaggttttcttgggctaagctttcaagaaatatctgnagggaatgcaacacctgtgtggtataacatggtaaaacaaggtctcatcagtgaccctgttttctctttctggtttaaccgacatgctggtgaaggagaaggtggtgaaattgtgtttggtggaatggattctagtcactacaagggtgatcacacctatgtcccagtcactcaaaagggatactggcagtttaacatgggtgatgtcctggttgatggaaagttcactgggttttgtgctggt

SEQ ID NO: 9619 - DNA, 359 bp, Zea mays
  Clone ID: LIB3150-040-Q1-N1-F1
ctctactcggacggcggcgatggcgcggaggaggatcctggagtacgagtcccagcgcctcctgcgggagcacctcacgcgcctggctggcatcaaccttcagatgctttccgcgcaggtgacacagtctacggatttcactgagctcgcacaccacgagccgagggtgtcatctatgaaactgggagggaaacctgacatgctctttgggaaacgtgggacgagcgggcttgtggccctgaacctagatcttgcccaagttcgccaatttgtcaaggagcggttgggagttgaggtctaaatgggtggctgcacaactgcaattactaccttcatagctgagccatttgtgccacatg

SEQ ID NO: 9620 - DNA, 378 bp, Zea mays
  unsure at all n locations
  Clone ID: LIB3150-040-Q1-N1-F10
tgtttcatcccatcccactaccaccagatggagtcttccacacgattggagccggctcttccaacccatgggcagtgatggcgacgaagaagagcgtgggcaccctctgcgaggcggatctgaaagggaagaaggtgttcgtgcgcgccgacctcaacgtcccgctcgacgatgcccataagatcaccgacgacacccgcattcgcgcctccgtncccaccatcaagttcctcctcgagaaaggcgccaaggtcatcctcgccagccacctgagtcgtccaaaaggtgtcaccccaaagtacaacttgaagcctcttgttccacgcttgtctgagctccttggagttgaagtcgcgatggccaatgattgcattggtg

SEQ ID NO: 9621 - DNA, 468 bp, Zea mays
  Clone ID: LIB3150-040-Q1-N1-F11
gtttccacccccttcaggtaaggaagaagaggagggcaagatgtcggaccgcaagttcgagcacccgaggcacggctccctcggcttccttcccaggaagcgctcctcccgccaccgcggcaaggtgaagtcattccccagggatgaccccaagaagccttgccatctcactgccttccttggctacaaagctggcatgactcacattgtccgtgaggttgagaagccaggatccaaactccataagaaggaaacttgtgaggctgttaccatcattgaaacccctcctcttgtcattgttgggctcgtggcatatgtgaagactcctcgtggcctccgcacactcaactctgtttgggcccaacatcttagcgaagaagtgaggagaaggttctacaagaactggtgcaagagcaagaaaaggctttcacaaagtatgctctcaaatatgaaaatgatgctgcaaag

SEQ ID NO: 9622 - DNA, 464 bp, Zea mays
  unsure at all n locations
  Clone ID: LIB3150-040-Q1-N1-F12
attacattctttcgaagttgaagaggtgagttgagttagatcacaggcaagcagctgtttggaatatcctaagtttagttcttcttcggggtggtcagatacagagtgctatctcagttctatcttctctcacggctgttgctccagactacttggactcccttgcaaatcttggcgttgcatacattcaaagtggggatctagagctgtctgcaaagtgctttcaagaacttcttctaaaagatcaaaaccaccccgctgctctggtgaactatgcagntcttcttctgtgtagatatggatctttgtctgcaggggcagggggcaatgtcagcacaggtccttacgtgcatcagaaagaagccttagttgttgcaaaagagtgcttgcttgcagcagtgaaggctgatcctagagctgcatcagtttgggttaatcttgcaaatgcatattacatggatggg

SEQ ID NO: 9623 - DNA, 397 bp, Zea mays
  unsure at all n locations
  Clone ID: LIB3150-040-Q1-N1-F2
gtcgtcgccgccgccgtgaggactccggggaatggcgtcccgcgtcgagtcgggcctcctcctctcgtcgtgccggcgccacactaggcctcctaaggagttatgcacatgtcagaagctacaacagtcaactttcagctttggtttctgctacatctgaatgctcaaatctgccgagaagatgctattacttacctaatccctctccataccaagtttggagtatgtcatttgcttcagacaacggagacaagtttgaggctgttgtgcccttcatgggtgaatctgtaactgatggaactcttgctaacttcttaaagaaacctggagacagagtcgaggctgatgaacctatagcgcagattgaaactgataaggtcactatnnatgtcgcaag

SEQ ID NO: 9624 - DNA, 420 bp, Zea mays
  Clone ID: LIB3150-040-Q1-N1-F3
gtttaccttctccagtcctctctgctgggctgtcggcagattccggtccagcgcccaccgtcgcccaccgtcgcctttcaaaaagctagagggttcctcgagagggagaagcgtacccggcagctccgctccgtcagtccgtccgcccccaagaatgtcagacgaggccaggcgcgggcccgcgggcgccgcgcatgtggtgcttcgggcctcctccgaggaccgcaagccggtgggctcggggtctccgccgccggcagcgaccgcgactgcggttgcgcacaagatccagctcaagagtgccgacatgaaggaggagatgcggcaggaggccttcgaaattgctcgcatcgcattcgagaagcacagtatggagaaggacatcgcggagtacataaagaaggagttcgacaagaacca

SEQ ID NO: 9625 - DNA, 425 bp, Zea mays
  Clone ID: LIB3150-040-Q1-N1-F4
atttttctatcccgttcaacatatcctggaggtcccacaaattaaggaagaatatacctcacctccaacttgaactagactctttcataatcaccttatgaccatactgcactccaaatagtcacaaacttccacattagatgcgttgttaatccattgatcatcatacactattcacaaataatgcaacaactaatctacgtgaggctgcccattgtcactcctaatcacactaaacctattaatgacatcacaaactacatcgttattaactacctcacatccagctacactaagaaccacaagctcttccatctttatctcactaacttctctgacaaaaatcattgttaatatgtctttgcaccacattgaaatcctattttaccacaggccaattttgacatgttctacattcaccccac

SEQ ID NO: 9626 - DNA, 172 bp, Zea mays
  Clone ID: LIB3150-040-Q1-N1-F5
cgtaactggatcctttagtcacccaccgtctttttatctcaccatggcggaggggagagtcccaaacgcgaggaagctcttcaaccctgaccttctccatgtccaatgaactatatctcgctaaacgactacctggtgtgactgcggaaatctctaacattcctgcccactc

SEQ ID NO: 9627 - DNA, 421 bp, Zea mays
  Clone ID: LIB3150-040-Q1-N1-F6
cctacccctgctcccggacagctcgcgaggtacgccggcgccgtgggtgctgtgaagcagacggtcgcggctgaaggcccgaggggcctgtataaggggatgggggcacctctggccaccgtcgcggccttcaacgctgtcttgttcagtgtcagggggcagatggaggcgcttctcaggtcagagcctggtgtgccgctgacagtgaagcagcagattgttgcgggcgccggtgctggaatcgcagtctccttcttggcgtgtccaacagaactgatcaagtgcaggttgcaagcccaaagttccttatccgaggcagccgccgcttctggtgtggctctttccaaaggtccgatcgacgtggcgaagcatgtcgtccgggacgccggcgccaaaggtctcttcaagggcctggtcccga

SEQ ID NO: 9628 - DNA, 350 bp, Zea mays
  unsure at all n locations
  Clone ID: LIB3150-040-Q1-N1-F8
actctcagtcgctcaaaaccctagagggtagcgcctgctcgcctgcggcgccggagcgagctccccatcttcatccgtcaaccatggcgacccagatcagcaagaagaagaagttcgtcagcgacagagttttctacgccgagctcaacgagatgctgacncnggagctggcggaagacggntactctggcgtggaggtgcgcgtnacgccgatgcgcacggagatcatgattcgtgccacgcgcacgcanaacgtgctcggccagaagggccgtaggatcagggagctcacctccggcgnccagaagaggttcaacttccctganaatggcgtcgagctttaccccgag

SEQ ID NO: 9629 - DNA, 389 bp, Zea mays
  Clone ID: LIB3150-040-Q1-N1-G1
cattcataggctgcctgcctgcctgctgatctcgcacctcaaacccacacacagcagcataggttgagatagatggccagtctgtggaagaccaaggttctgcctggcctcaacaagatcttcgacaaggatggcaagaaggctgcagctgcaggcttcttcaagtccttcaacaaggaggagattggcaaggagattgaggagaagaaggcagaactggagcccaaggttgcggaggcttatgaagcatctcctcctgaggtcaaggctctgttcaaggataagaagccagtcaagatcagcaagaagaactcgactgcagttaccaagttcctcgatgagctggctaagattgacttccctggagccaaagtggtgagcgaggcggt

SEQ ID NO: 9630 - DNA, 435 bp, Zea mays
  Clone ID: LIB3150-040-Q1-N1-G2
gaagtcgtcctcttcttcccgtcgcttggccgtgccgcacctgcgaggagaggagacttcgccgcgaagctcaccatgatctcgccggagaggagctcgtcacagagccagcggtcggcggcggcgggggcgccgttcctgtcgatctccgtcacggatcccgtaaagatgggtaccggcgtgcagtcctacatctcctaccgcgtcatcaccaagaccaacctccctgaatttgagggaccagagaaaattgctattcagcgctatagtgattttgaatggttgcatgatcggcttgctgagaggtacaaaggcatttttataccccctcttccggagaagaatgctgtagagacattccggtttagcaaggagttcattgaattgcggcgtcaagctctggatttattcgttaacaggatagcttcacaccct

SEQ ID NO: 9631 - DNA, 409 bp, Zea mays
  unsure at all n locations
  Clone ID: LIB3150-040-Q1-N1-G3
agtttattgtgaacaaatctgatttgggggaggaagatatcccggctttggctgatatagttggtgatgacgacaaggctaaagaaattgttgaagcagcaaaggcttcaatgggccaggatctgtcaccagttgatttgatcaatgtccagcaatttgcccaaagggttatgaatctctctgagtatcgcaaaaacctttatgaatatctcgtgactaagatgaatgatattgcgcccaacctgacatcattgattggtgaagtagttggagctcgcctaatctctcatgctggcagtctttcaaaccttgccaagtgtgcagcttccacccttcaaatacttggtgctgagaaggccctattcagagcactgaaaactcgaaggaatactncaaagtatgggcttat

SEQ ID NO: 9632 - DNA, 264 bp, Zea mays
  unsure at all n locations
  Clone ID: LIB3150-040-Q1-N1-G4
gtttctcttcggcgagaagccggtcacggggtttggcatcaggaaccccgaggagatcccgtggggtgaggctggtgctgagtatgtcgtggagtccaccggtgtcttcactgacaaggacaaggctgctgcacatctgaagggtggtgccaagaaggttgttatctctgccccaagcaaagatgcacccatgtttgntgttggngtctatgaggacaagtccacctccgatgtttacattggttncaatgctagctgcaccac

SEQ ID NO: 9633 - DNA, 234 bp, Zea mays
  unsure at all n locations
  Clone ID: LIB3150-040-Q1-N1-G6
tggtaatatgagatgacactcaagatagcattgcatagcatctgcgggctcacagttcatcctaacaccaccacctctgtcgtgcttcaagttgtgggtgatgatggttctcttatgccatgtgcaattaatgcttcttgtgctgctcttgcatttgctggaatccctatgaaacatctcgctgncgcaattanctcttcngtgatggccaatggtgtaggtttcttagactct

SEQ ID NO: 9634 - DNA, 244 bp, Zea mays
  Clone ID: LIB3150-040-Q1-N1-G9
cttacaactcagcagactacaacttgaagagtgaatctaacagcaggcagtctgtcaacttatgcgaaggcaaaatctaaggcaaagaaggacgcagaaagcaaagctaaccaggagaaagccacagaagaagcttctggttctacctcaagcaaaacagctaaagctcaagagaaagatgctgatgcaatgcaagttgacaatgccagtgagaagaaagctcctgaaccagaagcgacttatc

SEQ ID NO: 9635 - DNA, 394 bp, Zea mays
  unsure at all n locations
  Clone ID: LIB3150-040-Q1-N1-H1
cccacgcgtccgcgaagaggctatgcgggccttcttcccgctctccttcggaaaggcggctccgcggcccagctctgctacctcctccgcccactccaacacccttcgcaagcctcaaaaccctagtaaccccaagccttccgcctctaccgccgcggacgacgatggggccgctatgattggtcctcctcgcccgccgccggcgcccgcgggggaggaagacgatgaggacggcggcggtatcatgatcgggccgnctcggccaccgccgccctccgctcgcggcgagggggacgacggcgacggcatgattgggccgcctagaccgccgccagcggatgatgaagacgtcgatgatgacgaggacgacgacgaggaggagatggaggatgat

SEQ ID NO: 9636 - DNA, 459 bp, Zea mays
  Clone ID: LIB3150-040-Q1-N1-H2
ctctcccctcccaaagctcgccccgctggcagctagggtttcctcttcccatccacagccgccggggcgccgccgacgaggacagcgccgccacgatgttggagttgcgtctggtgcaggggagcctcctcaagaaggtcttggaggcgatccgcgagctggtcacggacgccaacttcgactgctccgggaccgggttctcgctgcaggccatggactcgagccacgtcgcgctcgtcgcgctgctccttcgcgccgagggcttcgagcactaccgctgcgaccgcaacctctccatgggcatgaacctcaacaacatggccaagatgctccgctgcgctggcaacgaggacatcatcaccatcaaagctgacgacagctccgacaccgtcactttcatgttcgaagtcgccaaacaagataagatcgcggatttggagatgaaactgatggacattg

SEQ ID NO: 9637 - DNA, 433 bp, Zea mays
  Clone ID: LIB3150-040-Q1-N1-H3
ctccttcatttcggcctctgtcccttggggggtcaatctcacctccaacgatgggtaaagagaagtcccacatcaacattgtggttattggccatgtcgactctggcaagtcgaccaccacaggacaccttatctacaagcttggaggcattgacaagcgtgtgatcgagaggttcgagaaggaagctgctgaaatgaacaagcggtccttcaagtacgcgtgggtgctcgacaagctcaaagctgagcgtgagagaggtatcaccattgatatcgctctgtggaagtttgagaccaccaagtactactgcacggtcattgatgcccctggacaccgagacttcatcaagaacatgatcactggtaccgtccaggctgactgtgctgaccttatcattgactccaccactcgtgagtttgaggctggtatctc

SEQ ID NO: 9638 - DNA, 433 bp, Zea mays
  Clone ID: LIB3150-040-Q1-N1-H4
cagctttgaccgccgcctcccttccccggcggtactgctcctcctcacgccactcccccgcaggagcggcggcggcggcggcgaggtcgtaccccacatcggcgagcggcggcggcaccgccggaggcaaaggcaagatgttcgggcgcgcgccgaagaagagcgacaacaccaagtactacgagatcctcggggtgcccaagtcggcgtcccaggacgatctcaagaaggcctaccgcaaggctgctatcaagaaccaccccgacaagggcggtgaccccgagaagttcaaggagctcgcacaagcctatgaggttttgagtgatccagagaaacgtgagatttatgatcagtatggtgaagatgcccttaagaaggaatgggcggtggaggatcccatgttgatccatttgacatcttctcataaattttt

SEQ ID NO: 9639 - DNA, 329 bp, Zea mays
  Clone ID: LIB3150-040-Q1-N1-H5
gcttgactcaaggcatgacaagctggtggagtgtatgagaaagggggagagaactgtagatgtcgaagatctcactccaccagcacatcccctcttgtcccccggatacaagaccgaaacaggtgctcaacatcgcttgatcggccatcgagaactacatggtacacatccacgactgccgccataaccaagaccatgtgaaccttatcgacgaccaccatgcctagatcaaggacatactcttcaatacccgagataacgtcctggaactgattgactcccacctactgccttactataccactgctctatccatggagctctacctc

SEQ ID NO: 9640 - DNA, 365 bp, Zea mays
  unsure at all n locations
  Clone ID: LIB3150-040-Q1-N1-H6
attcgttccaactcctgagcacttgctgctcgtcccagacaagccagtcgaagccgagatacgaccatggactccaccggcaccggagcagggggtaaggggaagaagggagcggccgggcgcaaggtcggcgggccaaggaagaagtcggtgtcgaagtccgtgaaggccggtctccagttccccgtcggccgcatcgggcgctacttgaagaaaggccgctacgcgcaacgtgttggnaccggtgcccccgtctacctcgccgctgtnctcgaatacctcgccgctgaagttctggagctcgccggtaatgctgccagcgacaacaagaagactcgcattatttcgagccacgtgcttttggc

SEQ ID NO: 9641 - DNA, 186 bp, Zea mays
  Clone ID: LIB3150-040-Q1-N1-H7
tgttctagcccacgcaacacactcgaggaggccttctaatgcaaaggcgaggctctccataaacagctgggccaccatatacttactgccaatgatcaaaccaccctactattcctggcaacccacggactttcttccttactcctcatccaagatgatatacctcgaagttcgagagctgctcac

SEQ ID NO: 9642 - DNA, 424 bp, Zea mays
  Clone ID: LIB3150-040-Q1-N1-H9
tgttcgagcccgcgtgacgcactcgaggcgggctgataaagcggagagagttccgctcgctggaaggctgggcggcgcggtcactgctgccgctgctcaagcccgtggaggagtgctggcagccggcggacttcctcccggactcctcgtccgagatgttcgagcacgaagtccgcgagctgcgcgcccgcgccacggggctccccgacgagtacttcgtcgtgctcgtgggcgacatggtcacggaagatgcgctgcccacgtaccagaccatgatcaacacgctcgacggcgtccgcgacgagaccggcgccagcaactgcccctgggcggtctggacgcgcgcctggaccgccgaggagaaccgccacggcgacatcctcggcaagtacatgtacctatccggccgcgtcgacatgcgcat

SEQ ID NO: 9643 - DNA, 432 bp, Zea mays
  Clone ID: LIB3150-041-Q1-N1-A1
ggcgcctccacttcgcgttctcgcctcatctgctcccgctcaggatccggcggcgaaggtaaggcaagatgtacaccgcgaggaagaagatccagaaggataagggccttgagccctccgagttcgaggactccgtcgcccaggctttcttcgacctggagaacggtaaccaggagctcaagagcgacctcaaggacctttacatcaacggtgctatccaacttgattgtggccggaagcaggaaggctgttgtgatccacgtcccataccgcttgcgcaaggccttcaggaagatccatgtcaggatcgtcagggagctggagaagaaattcagcggcaaggatgtggtaattgttgccacaaggaggatcgtgaggccgcccaagaagggttcagctgttcagcgccctcgcaccaggactctgactgct

SEQ ID NO: 9644 - DNA, 211 bp, Zea mays
  Clone ID: LIB3150-041-Q1-N1-A10
acacttggggcaaataagagaaatgcagacttttttgaaagagttccagcaagagataagcaagtcagagatcttttcaatgagagggtaataagccagattgagaaagatgtggggtggtaaatcagaatggatgagaagttcctgtttgtcagtggaaaggatagattaatattatccaaaggtgtttctgctgtgcataaaattattc

SEQ ID NO: 9645 - DNA, 181 bp, Zea mays
  Clone ID: LIB3150-041-Q1-N1-A12
tccgcccgaagccgccagtcggactacgagcggcggcggcgcctcggctcccctgatctccctcaccggaatggacggccaggctccgccgcttctcgacgccgtcgtgctcgagccccttgcagttggcgacgagctccatccacggcgtcctgtcgaggtggaggacgctccgggcgcc

SEQ ID NO: 9646 - DNA, 429 bp, Zea mays
  unsure at all n locations
  Clone ID: LIB3150-041-Q1-N1-A3
gcgacgccgaggcacctcatctccggcgaagggaaatggcgaccgttccaggggatctgatctggcagattgtgaggaagaacaactccttcctggtgaagcagtttggcaacggcaatgccaaggtgcagttcaccaaggagcccaacaacctctacaatttacactcctacaagtactctggcttagcaaacaagaaaactgtaacgatccagccagctgcttgaaaaggactcngctgtggtcctctctactaccaagaccaagaagcagaacacacccgcgaagctcagccacaagtctgtgatgcgcaaggagttccgcaagatggccaaggctgtgaaaaaccaggttggcgacaactattacaggcctgatctgaccaagtcggcccttggtaggctgagctctgtgtaccgcagcctccag

SEQ ID NO: 9647 - DNA, 424 bp, Zea mays
  Clone ID: LIB3150-041-Q1-N1-A5
tcgtcgcatcccatcccactaccgcccggctcgtcgtccgccgattcgatccggttcttccaacccaggggcagtgatggcgacgaagaggagcgtgggcaccctcggcgaggcggatctgaaggggaagaaggtgttcgtgcgcgccgacctcaacgtcccgctcgacgatgcccagaagatcaccgacgacacccgtatccgcgccttcgtccccaccatcaaggttcttccttgagaagggcgccaaggtcatcctcgccagccacctgggtcgtccaaaaggtgtcaccccaaagtacagcttgaagcctcttgttccacgcttgtctgagctccttggagttgaagtcgtgatggccaatgattgcattggtgaagaagttgagatagtggctgccgctttgccagacggtggagttct

SEQ ID NO: 9648 - DNA, 417 bp, Zea mays
  Clone ID: LIB3150-041-Q1-N1-A6
gtttctgtctgctaccagcaccacagcgtagcaccccaccgcgtctagggttttctgctccaatggccgccgcgggggcagacggggagcgcaggatcggggtggccatcgactactcggagagcgccaagaaggcgctggactgggccatcgacaacctgctccaccacggggacaccctcgtcgtcgtccacgtcctgcaccacggcgcggaggagaccaagcacacgctttggggccaagtccggatccccgctgatcccactctccgagttccgggagcccgaggtgatgcagggctacggcgtgcgccccgacgccgaggtgctcgacgcgatcgacacggcagcgcgccagaagcagctgaaggtggtggcgaagctctactggggcgacgccagggagaagctctgcgac

SEQ ID NO: 9649 - DNA, 422 bp, Zea mays
  Clone ID: LIB3150-041-Q1-N1-A7
tccatcgctatcgaccgggtcctcgagcgcgggagatggcggatcaggagaccccagttgcagttgaggcccctaccccggtccttggggagccgatggacctgatgactgctctgcagcttgtcatgaagaagtcgggtgctcatgatggccttgttaagggtcttcgtgaggctgccaaagccattgagaagcatgctgctcagctttgcgtgcttgcggaggactggtgacaggcctgattatgtcaagctggtgaaggctttttgctctgagcacaacgttcacctggttactgtgcctagcgctaaaactcttggcgaatggtctgggctttgcaagattgattctgagggcaaggcgaggaaggttgtgggttgctcctgtgttgtcgtcaaggactatggcgaagaatctgaggg

SEQ ID NO: 9650 - DNA, 419 bp, Zea mays
  Clone ID: LIB3150-041-Q1-N1-A8
ttgacgcgtgggcggacgcgtgggctgggcggagaaaagtagatccgggttagggttttagacggcgatgggtgcggcgggcgacgagaaggctgatatggctgcttacggtgcagccgcgggtgccggtgccgccgagggcgagggcgcggtggactccaaggaccttcagcagcagagcaaggcgctcgacaagctcactgatcatgtcgaggaccggcagctacattcaatccggtgtccaatccgccatggcagaacttgctttatccaaggaggctgactggaacgcgatgaggctgatggagaaagaattggctgctgtgaagatcaaccctgccgatgtcgaaattatcgctactgagcttgagctggacaagaatatcgcggagagaacgctccgtgagcacaagggtgat

SEQ ID NO: 9651 - DNA, 284 bp, Zea mays
  Clone ID: LIB3150-041-Q1-N1-A9
attcttttgatgctttcatcgggagttcaccgatatagattcattgtagatggagaaagaagatttatacccgaccttccatgcgaaactgacaatatgggtcagattgtgaacctagtagatgtccatgacttcgttcctgacagcgtggaaagtgtatctgagctgatggcccctccctccccggactccagctacggtttccatgttcccggcgagaaggagttcttcaaagagccctcttaagttggccggccaagttttattttggcgtgctgaattcc

SEQ ID NO: 9652 - DNA, 429 bp, Zea mays
  Clone ID: LIB3150-041-Q1-N1-B1
ggtcttcagaccattagctttatctactccagagcgcagaagaacccgatcgacaccatgagggtgttgctcgttgccctcgctctcctggctctcgctgcgagcgccacctccacgcatacaagcggcggctgcggctgccagccaccgccgccggttcatctaccgccgccggtgcatctgccacctccggttcacctgccacctccggtgcatctgccaccggcggtgcaacttgccgccgccggtccacctgccaccgccggtccatgtgccgccgccggttcatctgccgccgccaccatgccactaccctactcaaccgccccggcctcagcctcatccccagccacacccatgcccgtgccaacagccgcatccaagcccgtgccagctgcagggaacctgcggcgttggcagcaccccgat

SEQ ID NO: 9653 - DNA, 391 bp, Zea mays
  unsure at all n locations
  Clone ID: LIB3150-041-Q1-N1-B12
ctcgcagcagccagaggccagatccagccgccaaccccccaaacaaaaccctaggccaccattctgaccaccaggcacaagcagagcagaagcagacatggccaccattccgaccaccgattctggcctcgtcctcagttcctccgctctcctccggaggactaggagggccgcctcatccgtcaccgccaggctgccagccgtcgcccgccgtcgcccgcagcttctcgtgcgtgccntccgncaaggagatcgcctttgaccagggctccagagccgcccttcaggccggcgtcgagaagctcgccgccgcggtcggcgtcacccttcgacccagaggaggaatgtgtctggatgagttggaaccccaagtgtaatgatgagtaccatg

SEQ ID NO: 9654 - DNA, 145 bp, Zea mays
  Clone ID: LIB3150-041-Q1-N1-B2
attttgatgggaacaatgatattgtcatagatggatgtgtccctactttaaacagggctgctgcaatgattaacttctttgaaaacactgctgtatgtgacgaccttggtgaggacatcaaccctgatgattatacgatgaaaca

SEQ ID NO: 9655 - DNA, 419 bp, Zea mays
  Clone ID: LIB3150-041-Q1-N1-B3
tccaatcgcttgggatgttctttacaactttgagcacagatggagaaagcagggtggtaaggacctccttgtgcgtctcagggatctttctgacattatcatccccccttctcctgtgatgttcctggaggacagagagacatggaatgttcagctcttcagatccatcgatggtggtgctgcttttggcttccccgagactcccgaggaagctgcaagagctgggcttgtgagttggaaaggatcaaatcatcgaccggagtatccaggatgcatacgtaaacgccatacggagggcgaagaacttcatctacattgagaatcagtacttccttggaagttcatacgcctggaagcccgaaggcatcaagccggaagaaatcggtgctcttcacttgatttcgaaggagctctcgctg

SEQ ID NO: 9656 - DNA, 418 bp, Zea mays
  Clone ID: LIB3150-041-Q1-N1-B4
cgcaaattgcaccaagaaatccatcgagaggccgtcgacaggggaattaatggcgtcgtcgtctagcagcagccaccgccgcctcatcctcgcagccgccgtcctgctctccgtgctcgcggctgccagcgccagcgccgggacctcctgcgtgccggggtgggccatcccgcacaacccgctcccgagctgccgctggtacgtgaccagccggacctgcggcatcgggccgcgccttccgtggccggagctgaagaggagatgctgccgggagctggcggacatcccggcgtactgccggtgcacggcgctgagcatcctcatggacggcgcgatcccgccgggcccggacgcgcagctggagggccgcctagaggacctgccgggctgcccgcgggaggtgcagaggggattcgcc

SEQ ID NO: 9657 - DNA, 423 bp, Zea mays
  Clone ID: LIB3150-041-Q1-N1-B5
tgtcttactactgaggttaagtccgttgggatgcaccatgaggctctccaggaggcccttcccggtgacaatgttggcttcaacgtgaagaatgttgctgtgaaggatctgaagcgtgggtatgtggcctccaactccaaggatgaccctgccaaggaggctgctagcttcacctcccaggtcatcatcatgaaccaccctggccagattggcaatggctatgccccaatttttgaactgccacacctaacacattgctgtcaagtttgctgagctcgttaccaagattgataggcgatccggcaaggagctggagaaggagcccaaatttctcaagaacggtgatgctggtatggtgaagatggttcccactaagcccatggtggtggagaccttttctcagcatcctcctcttggtcgatt

SEQ ID NO: 9658 - DNA, 224 bp, Zea mays
  Clone ID: LIB3150-041-Q1-N1-B6
ttaccgacgacgcacgcagagatccggggtactgcaaattttgaaaactgaactgtaagatggcatcagcagagctttcccgtgaggaaaatgtgtacatggcgaagctcgccgagcaggcggagaggtacgaggagatggttgagttcatggagaaggtagccaagactgttgactcggaggagctcactgtggaggagcgaaacctcctgtctgttgcatac

SEQ ID NO: 9659 - DNA, 423 bp, Zea mays
  Clone ID: LIB3150-041-Q1-N1-B8
ctctgcgcgtggccgtaatggggtgggcgcgcggcgcgtcggctgccgaggcgctggccttgccgagggcccggatgcaggtgctctcccctaccaacctcgccgctgacttctcccgcgcgctgccgcccggggcacccatccccatgctccgccgtgaggtgctccactccttcctccgccgtcgaggccgagctcgtccagggcctcatcaccttcgccgtgaggtgcttcaactcttccgtcttcaagctctcgccccaggggtgcgctagtgccaggtgcggcgagccagcagatcaaggaaaccgcccgtggccgccccaggcgttacatctgcactggctgctgctggtgacaagcaagaacaaccaaagtaaagaagtctacataattgccaagaatcatcttcatccatgggga

SEQ ID NO: 9660 - DNA, 428 bp, Zea mays
  Clone ID: LIB3150-041-Q1-N1-C1
gtcgccctcaaattcgttccgtccagggaaggaagaaatcgagcagccaaggagaggagaagatggctcgtacgaagcagaccgcccgcaagtccaccggaggcaaggccccgcgcaagcagctcgccaccaaggcggcgaggaagtcggcgccgacgaccggcggcgtgaagaagccccacaggtacaggcccggcaccgtggcgctgcgcgagatccgcaaggtccaagagaagcacggagctgctcatccggaagttgcccttccagcgcctggtccgtgagatcgctcaggacttcaagacggatctgcggttccagagccacgccgtcctggccctccaggaagccgccgaggcctacctcgtcggtctgttcgaggacaccaacctctgcgccatccacgccaagcgcgtcaccatcatgcc

SEQ ID NO: 9661 - DNA, 385 bp, Zea mays
  Clone ID: LIB3150-041-Q1-N1-C10
gcaggaggcggacaaggtaagcagcaatcgcaggaaccctagcgccgccgcacccgcaggaatgggtatcgacctcgtcgccggtgggaggaataagaagaccaagcgcactgcgcccaagtctgacgatgtctacctcaagctcctcgtcaagctctaccgtttcttggtcaggaggaccaagagcaatttcaacgctgtcattctcaagaggcttttcatgagtaaaaccaacccgacaaccaatctccatgcgccgccttgtcaagtttatggaaggaaaggagaagaacattgctgtcattgttggcacagtcacagatgacaaaaggatccaggaggttccagcaatgaaggttactgccctgaggttcacggagacagc

SEQ ID NO: 9662 - DNA, 440 bp, Zea mays
  unsure at all n locations
  Clone ID: LIB3150-041-Q1-N1-C11
gctcaagtgccacagaagacattcacatgctaccatccagagtcaagagggcttgatttctcaggattgatgaatgaaatcaagaatgctccagacggttcattctttttgcttcatgcatgtgctcataatcccaccggtgtagatcctacggaggaacaatggagagaaatatcccatcagttcaaggtgaaaaaacattttccattctttgacatggcataccaagggtttgccagtggtgatccagagagagatgccaaggcaatccgaattttccttgaagatggacaccaaattggatgtgctcagtcatacgcaaagaacatgggactttatggacaaagagcangatgcctgagtattctgtgtgaggatgagatgcaagcagntgctgtcaagagccaactgcaacagatcgcaagaccaatgtacagcaa

SEQ ID NO: 9663 - DNA, 421 bp, Zea mays
  Clone ID: LIB3150-041-Q1-N1-C12
ctccagccgaaaccgaggctgacgctgcgcgagccaaccggcggtgatgcaggcggcagtcggccaccgcggcgccaaccttggctccccgtcactctcgcgcttccggtatggcttccgcctccacggccggtcccgcctcttctctgagggcgtggcggcggcgccactccgcgtcggctctctgccccagccacggacccatggcagcggcggtttcgcgcaccttggggccaatggttggggaggcgccgaggctgccgcacgccctcaggagaatgcttatcgatcatcagaaaatggcatgtcccaaccttctgaaagctgctgtactttcaaccatgacattgctttctgtacctcttgaggcgtcagcggagatgtgccagccacctagttctttcgccaatatgccaatttt

SEQ ID NO: 9664 - DNA, 426 bp, Zea mays
  Clone ID: LIB3150-041-Q1-N1-C3
gcggcgcgctgcgcgcccccgaacatccttcccgggaacccccccacccaaaggcgaggcagggggagagccgtgcctggtgtggtggctcctgaccaaaacggagtccctcgccgccgccgcttcccgaaatccgccaaatccggagccaatgccgccgtcccctcccaccccggcggcacccaaaactatcgccgacttcttcgcgcgccccgccaagcgcctgcgcgcttgccccggccgcctccctctcctccaactcctctccctcctcgctgtcgccggagcagcgccgtcgcgccgacaccaacctggcgctcgcccgcgcgcggcgcaacctccgcctcgccgagtccaaagcgcaagcatcggggggcgcaccgaagctggaggagctcctggtggaggagacgtgggcggaggcgc

SEQ ID NO: 9665 - DNA, 420 bp, Zea mays
  unsure at all n locations
  Clone ID: LIB3150-041-Q1-N1-C4
ctgggaacaagttccgcatgtcactggggctaccggtggcggccacggtgaactgcgcggacaacacgggcgccaagaacctctacatcatctccgtcaagggcatcaagggccgcctcaaccgcctcccgtccgcctgtgtcggcgacatggtcatggccaccgtaaagaagggaaagcccgacctcaggaagaaagtgatgcccgccgtcatcgtccgccagcgcaagcccgggccgtcncaaggacggtgtctacatgtacttcgaagataatgctggagtgattgtgaatcccaagggtgagatgaaaggttctgcaatcactggacctatcggcaaggagtgtgctgacctttggcctangatcgccagtgcagcaaatgccatcgtttgagagcttgttggaatgtgtttagac

SEQ ID NO: 9666 - DNA, 419 bp, Zea mays
  Clone ID: LIB3150-041-Q1-N1-C5
ccgtggaagccggcgggccgccggctggtttgtccctgtcgtcgtgctcttccgtaccgccattccctagcactgtccacgggcgaggtaaagaaaccatctttccaccttctcccaccccctccggacccataggtgccaccggcatttgtcttgcgattgcttggcccagatctgcgtgcattcggcatttctcgtgcgtagatctcgcgtgtacggtgtacctcgtttcccttcgccggttggatcagtgacggcttggtcgagatggacgatgtggttgatgacatcatctgtggaacggatgcggcggttgccgtcgaggatggggccagtgggacgcccgcaatgcctagcttagggtgccagggtgaggaagagcataggaagggcaatgaggacaactcaggtgagagcga

SEQ ID NO: 9667 - DNA, 405 bp, Zea mays
  unsure at all n locations
  Clone ID: LIB3150-041-Q1-N1-C6
cacgccttcccaccacatgcaggcgctggcgcggccatacgccggctcgcgcgcctggcgtgcggcgagtggtggaccgccagatgaccgcgcgccgccgcacaaaagcggccagacaaatgcataagagacagggcggtgaacccccaccgcacacgtgctgcgccggccccggcggcgctcgctgagtgcctgagtcgcttcgcttgccagccgcatgcagcatgtcngattggggaggaattggaatgtgctcgtgtggggggtgagggcctgggccgggccgggtagcacaagcgatcaaaggactggaaagctaggcggccggaggggcggtgccggccctgccgggtgcgcagtcaacgtggaaagcccgcgccgggctcctcagatatcagtagtggg

SEQ ID NO: 9668 - DNA, 421 bp, Zea mays
  Clone ID: LIB3150-041-Q1-N1-C7
ttaccattagctttatctactccagatgtcacattaacccgatcgacaccatgagggtgttgctcgttgccctcgctctcctggctctcgctgcgagcgccacctccacgcatacaagcggcggctgcggctgccagccaccgccgccggttcatctaccgccgccggtgcatctgccacctacggttcacctgccacctccggtgcatctaccaccgtcggtccaacctgcggccgccggtccacttgccaccgtcggtccatgtgccgccgccggttcatctgccgccgccaccatgccactaccctactcaaccgccccggcctaagcctcatccccagccacacccatgcccgtgccaacagccgcatccaagcccgtgccagctgcagggaacctgcagcgttcgcagcaccctta

SEQ ID NO: 9669 - DNA, 425 bp, Zea mays
  Clone ID: LIB3150-041-Q1-N1-C8
tcgttgcccgccgcctcacatacatcggttgctgtcccctcacgcctgaggcacatggcctccatcgccggatcttccgccctcttttttttttttctctcgtcaaggcaatcaacacaaacacactagcttgatcaccggtgaggaagggcaacacattactccgtctgcaaccaaagcctatgagatctgagtactgcgctgccaagaaggatacaacacacacagtttgttagattggggaaaaaccagattgctcttcctgaccatactaaagtctgcggtgaatcgaaattcactgaactcgatgcaaattcactggacacgggtgagattgtgatgagtctcgctgagcacttctatattagcgttgaggagtccagcgcacatactatcgacacagttgaagacgccgcggacctcat

SEQ ID NO: 9670 - DNA, 441 bp, Zea mays
  Clone ID: LIB3150-041-Q1-N1-C9
tccgacccgttgctgaccccgctccccggtgatctgatgtcggcggcggcacgcgcgccaccgccgccgcgcgcactctacgcgccgtcgagaagagtccctttcggtgccgtgatcctatccgcgccgcgacccggggctagggttcgcgcggcgcggcctcgcgaggggaatgttcataaccattgcctgttgacatcgtctagtctgaattcaagttctttgctatgcccttcatgcaattgggcttcaattggctttggccgacacaagaattgcttaccagcctgaagttgacaagcatgctggagttctggcctatgaactggttcaagggaatcttgttcagtggaattcatttatggccaaatcaatacctgatccaccaacagctgttcttcttcatggcatccttgggagcaggaaaaacttgggatcttt

SEQ ID NO: 9671 - DNA, 426 bp, Zea mays
  Clone ID: LIB3150-041-Q1-N1-D1
gcggaagccatcgaggttgacccgaccagcaggcgagtgcccgattacaatcagccatcgccaccacctccctccacggctcccccttccgccacgaacacgccgctgtctcgaccccttctcctcctccttcagcaagatggcggagattgagataaaaacagcacctgctgacttccgcttccctacaacaaaccaaacaaggcattgttttactcgctatggcgaggaacaccaggtgtttgaatgccaaaggggatgatgctggtgtttgcgaaaaatttgccaagtactacaggtccctttgccctggagaatgggttgagaaatggaacgagcagagggagaacgggacgtttccaggacctctctgaatgtaccgcccgagacctccagttggaccagtcaacaagttggccaggcagt

SEQ ID NO: 9672 - DNA, 421 bp, Zea mays
  Clone ID: LIB3150-041-Q1-N1-D10
cttccacaagcacctgctatagttgtgtggtgcaaacaccaaaatgttgcctgccaaagtgtcatttgttttcctgatagtgtactgcgcagtaacattttcgctaggtcagatagctgttggcgaggcatgcacagtggatcagagggacaagatcacaacggactgcagagagttcatcaagctgaaaggccccgtcacagccccgtcgtacaccgacgactgctgcgtcgccataagaaccgggccaaatctcgacatggagtgcatcattcgcctgctctccaataaacagaagaagaagtacgacgtggacaagatccggcggctcggcagcgtcctctgcaatccacatccggtgatgacgtaaaatggggtgtggcagtagtttctgatggagtgcatcgcgtcaacaatatgg

SEQ ID NO: 9673 - DNA, 436 bp, Zea mays
  unsure at all n locations
  Clone ID: LIB3150-041-Q1-N1-D12
ttattttggagataaaggttatttggcatttgaacatataacatgggctccgtaccagaccaagctgatagacaccgggcttctgacccctgttgagatcgactgggtgaacacgtaccactcagactgccggaagatcttggagcctcatctgaacgagcaggagaagcaatggctgatgaaagctactgagcccgtagctgcaagaggctgagccttttcgtcaacgttgcatgccaccgaacgccaggctcatcttctgcgtggcatacatataagattggctgcccccgctggttaaataataatagcggcgaaggaacaggatagcttgttctcaacgctgatcttcgccgctaaagtggagtgtttggcaggatgctattttctttcccattanggtacgttcggttttacggaacggtaggtttttata

SEQ ID NO: 9674 - DNA, 425 bp, Zea mays
  unsure at all n locations
  Clone ID: LIB3150-041-Q1-N1-D2
ctcatgtgtgcctatagaaaataccagagacggaatctccggatactctatgacgccctcggtaccctggctgatgctgntggagcagaattaaatcacgcaaaatatctagacatatttatgccgcctttaatcacaaagtggcagcaactttccaattatgacaaagatctatttccactccttgaatgctttacatctatcgcacaggcattgggaccaggatttgctcaatttggcggaaccagtgtttcaaaggtgcattaatcttatccattcgcaacagttgtcaaagattgatcctactgcagctggtgcggtgtatgatagagaattcattgtttgttctttggacctactatcangacttgcagaaggtcttggcgctggtattgaaagtcttgttgcacagagcaatttgagag

SEQ ID NO: 9675 - DNA, 425 bp, Zea mays
  Clone ID: LIB3150-041-Q1-N1-D3
gcgtataaattatcatttatatacattacaaggagtgaggatatgatcggtcttgctctttctgatttccttgctcttgatgaacaaggtcgctgttgatagagttaataatagtgacattttcttgtcttccctgtcagtattagaaggaaaaagaatggcaccacagaatgtcttttggggctagtataaggaaaaagaatggcaccacataatttgtcattttcttgaactgcttccaagcttgcttcaggaaccaagaagactactcggactggcaccttacttgcgattttgttaaaatatatactcctacactgggtttctccgtctctattatgaaaactattgggtaatatgaccatattgtatttcataatttgggccaaactcacaactctggttattaagattcagatggagcc

SEQ ID NO: 9676 - DNA, 426 bp, Zea mays
  Clone ID: LIB3150-041-Q1-N1-D4
actcccatccagccgccaccaggtgcagagggtttcgtcatctcttctccggcgaagaacccccagtcgcccaccagatcacttgttaaactttgttgaggggtgatggcggtttctttcgcaaacctcaacaccgaggcagggcttaaaaagcttgatgagtaccttctcactcgcagctacatcactggctaccaagcttccaaggatgacttggctgtctacactctcgtttcgtctggtccctcgtccaagtatatcaacgtagcaaggtggtttaatcacattgatgcgctcgtgaggctgagcggaattactgcagagggccaaggtgtgaaggttgaatcctcagcagttccttcagccccaactccagatgttgctgaagcacaggccccagctgctgatgaggaggacgatgatgat

SEQ ID NO: 9677 - DNA, 423 bp, Zea mays
  Clone ID: LIB3150-041-Q1-N1-D6
tctagccaacacacacataatactctcgattccattccattccatctcaaaggatagaataatgggcgggctctccaccaagcttttcgtggtcctcctcctgctcggttggtacaccgggacgcaaggcgggccggtgactatggtgtcggcgaggaagtgcgagtcgcagagcttccgcttcaagggaccttgctcgagggacgccaactgcgcaaacgtctgcctgaccgaagggtttcaccggcggcgtgtgcaagggcctacgccaccgctgcttctgcaccagggactgctagtactgcctcgcctcgtgtcctgcgtgtgcatatatagccgcagcggatcagtaaaacatgcatgcatgcgttaccaaatatttggcagtaccagcaagttaatgaattaaaatattaaataata

SEQ ID NO: 9678 - DNA, 420 bp, Zea mays
  Clone ID: LIB3150-041-Q1-N1-D7
aaaattgttgatgtggaagaggaacctgctaaaagaaggataattggtcctgcaatgccatctcgtgaattactggctgcagcagctgaaatgacagaggctcttaggtgccgggatgctgaactggaagccaatgatgatttgctcataggccctccaccgcctgccgtagttgctgaagctgcatctgcaaatgaagctgagcgatttgaagaggttactagaatattggtgggttgacacaaattcaccttatgaggttctgggggtaaattggaagatgtcaactgataacatgaagaaaaggtattggaagttgtctcttttagtgcacccggacaaatgtccacatccttccgcacaagaggcgttcgtgaaattaaataatgccttcaaagacttacaagaccctgataagag

SEQ ID NO: 9679 - DNA, 424 bp, Zea mays
  Clone ID: LIB3150-041-Q1-N1-D8
ttccccgtcctcccactcccccctcgcggccatttcaaatcgctctctcgacccaactgtactcgccgtcgtctattcatcatccatccccatccccccatcgactcccagatctctatccccctctccctgtcctcactctctcgagcgcgttgtggcggatgtcctcgtcggcgcgtttcgatctccgggcctcgtcgcagcagttgcagccgccaccgtcgcacgccaacattagccagcgacgggggcgcgttcgcaaacgcggagaacctggagcactgcgcccggtacctgaaccagacgctcgtcactttcggattcccggcatctctcgacctcttcgccaccgatccggtctcgattgcaagaacttgtaactgcatctatgcgctgctgcagcagcgacaaagggacattgagt

SEQ ID NO: 9680 - DNA, 415 bp, Zea mays
  unsure at all n locations
  Clone ID: LIB3150-041-Q1-N1-D9
gtcggccgttaaccacttccacatccaggggtccagtccagagacacccgagcgacgaagggatccatccatcgtcacaagcatctcgtccatggtgcagcgggccgtcatcgtcaggcatgagcgtgactcggccgccgtgccgccgggcgatcaggccaccacggagacgacggcggcgagggaggtgaagaggaggcggcggctggccgactcgatggccgcgaaccaagcgccggatccttgcggtgcaacgaggccaaggccgaccaccacaacctgcagggccgccggttcaagcgcggctaccgcgcccccggctgcggcgccgtcgactccgcccgcttctaccttgcctgccttgtttgcaccccgccgcgcgcggncgttgttgtcagcggtctcgattatattg

SEQ ID NO: 9681 - DNA, 442 bp, Zea mays
  Clone ID: LIB3150-041-Q1-N1-E10
agcaacttcaatgctgtcattctcaagaggctcttgatgagcaaaaccaatcgcccaccaatctccatgcgccgccttgtcaagttcatggaaggaaaggagaagaacattgctgtgattgttggcacagtcacagatgacaagaggatccaagaggttccagcaatgaaggttactgccctgaggttcaccgagacggcaagggccaggattgtcaatgctggtggggagtgccttacattttgaccagcttgctctccgtgctccacttggcgagaacacagtcctcttgaggggccccaagaatgcccgtgaggcggtgaggcacttcggcaaggctcctggagtgccgcacagccacaccaagccatatgtgcgctccaagggaaggaagttcgagaaggctcgtggcaggaggaacagccgtgggttcaaggtttaa

SEQ ID NO: 9682 - DNA, 419 bp, Zea mays
  Clone ID: LIB3150-041-Q1-N1-E2
attggttcttctgttgaaaaaacattttgacagtctaatttgtgggccttatctagcttattgaaataaatatctttgaaaagtatggcaattcaaatgacatcaatcttgttggtgctcaatactgtttgtactggttagtggtagttgtaattgaactgctttgatgaaacaagaatctctaaatacctttgcacccacacttatcacattatgaccctggaatccagagtatcttaaaaattaattcttaatggtcaagtggaattgctagttctgtttcccccttagccatggaaatatctcattaatatttgatgtacaaatacataggttcatctgactaacaaaatctttttttagatataactaccgcagccgttgctaaacaagctttggagggacactgcatatatgat

SEQ ID NO: 9683 - DNA, 176 bp, Zea mays
  Clone ID: LIB3150-041-Q1-N1-E3
ttcagtcggcggcggcggccagcccaggctgggcagccatggcgcggtgggagtggctcccctggcggcgcggtgtgagcggctccacaggcggagtgggcgcgaccggccccgaccccccggaactggtcgctggcgcggctactgcgtcctcccggccccatactcaacccacg

SEQ ID NO: 9684 - DNA, 427 bp, Zea mays
  unsure at all n locations
  Clone ID: LIB3150-041-Q1-N1-E4
gattagcctcgccgacgacgaanagggaagagctggtggctggcgaggggctcgcggggatggggatctcgaggctcctggcgctccttctggcgctgctgatcgccgtcgccggcgcgaccgccgaggagcccgtagtggcggcggactcgggggccggcgcggtggaggccgcggcggcgctcanggcggaggaggctgcggaggccgcggcgctcanggccgagctggagcagcttccggccgaagatctccgccttagagtcagacatagcagtgcgatctctggaactgaagaataaggacgatgtcatcgtgaacctagagaaagccattgcggagaagtcaaaggctattacctctatgcagggcgagattgcttctctccaggcaaaaggatctttagctgccgaggagcaggctaaca

SEQ ID NO: 9685 - DNA, 419 bp, Zea mays
  Clone ID: LIB3150-041-Q1-N1-E5
ttcgatggcgcgtctcgaccgcgtgaagaacatgacaggcctggtggagatgtacggcaagaacgcgcgcctgagggagctggcgaacctcgtgatcgtcgccggtgaccacggcaaggagtccaaggacagggaggagcaggcggagttcaagaagatgtacagcctcatcgacgagtacaagttgaagggccatatccggtggatctcggcgcagatgaaccgtgttcgcaaccgggaagctgtaccgctacatttgtgataccaagggcgcattcgtgcagcctgcgttctacgaagcgttcggcctgactgtgatcgagtccatgacgtgcggtctgccaacgatcgcgacctgccatggtggccctgctgagatcatcgtggacggggtatctggcctgcacattgacccttac

SEQ ID NO: 9686 - DNA, 314 bp, Zea mays
  unsure at all n locations
  Clone ID: LIB3150-041-Q1-N1-E7
gccgccgcctggatctggcctagccgagcctcggctgctctgaatcccgattcggttcggctcccttgctctgccgtcgcttccgaggcgtgctcggatctcgtcggagtagagggcctcgcggctcgcttcgggggcgagatggatcatgtggtcgggggcaagttcaagctcggcaagaagatcgggagtggatcgttcggggagctcttcctcgccgtgaatgtgcanaaccggggaggaggtcgccgtcaagctggaaaatgtcaagacaaagcacccgcagcttcattacgagtccaagctatacatgc

SEQ ID NO: 9687 - DNA, 416 bp, Zea mays
  Clone ID: LIB3150-041-Q1-N1-E8
tgtagaagtgcaaggaagcacgcagccggggttgttaatggacgcacgggacagcgcgtcaggctctacgttcggggcaccattcttggatacaagaggttcaagtcgaaccagtacgagaccacgtctctcgttcagatcgagggggttaacaccaacgaggacgtggcgtggtacgctggcaagcgcatggcgtacatctacaaggctgagaccaatagcagcgaaacccgctacaggggcatgtggggcatggtcacccgcccgcacggcaactcgggcgtcgtccgctccaagttcaagtccaacctcccgcctgagtccatggagcgcaaggtcagagagttcatgtaccctagcagcatctaagggttactgtgaagtaaaggtcgacttcaaatggccatgcttatttg

SEQ ID NO: 9688 - DNA, 419 bp, Zea mays
  unsure at all n locations
  Clone ID: LIB3150-041-Q1-N1-E9
acgaaatctgacccgggccacactccggtgctccgccatggcgatccgctccaaggcctggatctcgctgctgctcgcgctgaccgtcgctctctccgcccgggcggaggaggagcccgccgccgcggcggagggcgaggccgtgctcaccctcgacgtcgacagcttcgacgaggccgtcgccaagcaccccttcatggtcgtcgagttctacgccccctggtgtgggcacttgcagaaacctggctccagagtatgagaatgcggccaaggcacttagcaagcatgacccaccgattgttctcgctaaggttgatgctaacgaggagaagaacaggccgcttgctaccaagtacgagatccaagggttcccaaccatcaagatcttcanggaccaggggaagaacattcangaatac

SEQ ID NO: 9689 - DNA, 428 bp, Zea mays
  Clone ID: LIB3150-041-Q1-N1-F1
gtttttcctattcagcgtgcaaaaatgaaggagttggctgcagaacgtgcaaaaaagttgaaagcttaagaagaagaacggataaagaaccaaaaagcaaaaacccttgcaaagtttgaagaattgaacaagccattattaagtctttagaagaaattaaatggtattaaagtaaaaacctattaatcaaattgatagcaacatgctggacttgatgttactgctcaactttgaaccttcaactgaaccacatgatgttattgcgcctgataggcttactgatcttctgcctcctaatgatcccaatcatactatggttcatatacaggcccagtctacagcacaatcacatgcatcagatggtggcaaagaccctgatgctcatgcaacctcatctttggtcaagaacactcacagcaacatggagc

SEQ ID NO: 9690 - DNA, 219 bp, Zea mays
  Clone ID: LIB3150-041-Q1-N1-F11
cagccgccgagcgcctctcgccctacaggaggcaccgtacagaacccaaccaaaaagcgccggcggcaaacagaacccaacccaaagcgccggcggcaagcgaagagaaagcgccggcactaatccgacgatggacgcgtcggccggcggcggcggcaactccctgccgaccactggcgcggacgggtcgaagcgccgcgtctgctacttctacgacgc

SEQ ID NO: 9691 - DNA, 428 bp, Zea mays
  Clone ID: LIB3150-041-Q1-N1-F2
gcggaaggagtcggagggaaccgaaaactcagggtctcgaatttcctaggagcggaggcgatggctgggaagggaggaaaaggattgctcgccgcgaagacgacggcggccaagtcggcggagaaggacaaggggaagaaggcccccatctcacggtcctcccgcgcgggcctccagtttcctgttggacgaatccaccgtcagctgaagcaaaggactcaggcaaatggccggggtggttgccactgcagccgtctactctgccgccatcctggagtacttgactgccgaggttttggagctggccgggaacgctagcaaggatctgaaggtgaagcgtatcacccctcgccacctacagttggccattcgcggagacgaggagctggacaccctcatcaagggcaccatcgcaggtggaggcgtca

SEQ ID NO: 9692 - DNA, 424 bp, Zea mays
  Clone ID: LIB3150-041-Q1-N1-F3
accgacccaggcaggcaccactccgctgaacgcaccgggcggcacccaaatcccaaaccctagcacacgcaccatggcggcgcagcagaagatccggtggggggagctggaggaggacgatggcggggacctcgatttcctcctcccgccccgcgtcgtggtcggacccgacgagaacggcctcaagaaggtcatcgagtaccgcttcgacgacgacggcaacaaagtccgggtcaacgaccaccacccgcgtccgcaaactcgctcgggcgcgcctctcccgcagcgccatcgagcgccgccagtggcctaagtttggggacgccctcaaggaggacgcgggctccaggctcaccatggtctccaccgaggagatcctcctcgagcgcccccgcgccccagggagcaaagctgaggagtcagc

SEQ ID NO: 9693 - DNA, 426 bp, Zea mays
  Clone ID: LIB3150-041-Q1-N1-F4
tcaaccgaagcgagagctgagcaaggcagaggcggcgtgaccggcgatggagcggctgcagcggatctttggcgcctccggcatggggcagccgccgacggactcgccgctgctcgattcctccgagcaggtctacatctcctccctagcgcttctcaagatgctcaagcacgggagggctggggtgcccatggaggtcatgggcctcatgctcggcgagttcgtcgacgactacaccggcaggggccgtcgacgtcttcgccatgccgcagagcgggactggtgtcagcgtcgaggccgtcgaccacgtcttccagacaaacatgcttgacatgcttaagcagaccggcaggccagaaatggttgtaggttggtatcactcacatcctggcttcggatgctggctatcaggcgtcgatatcaata

SEQ ID NO: 9694 - DNA, 426 bp, Zea mays
  Clone ID: LIB3150-041-Q1-N1-F6
tcaaccgaagcgagagctgaacacggcagaggcggaatgaccgacgatggagcggctgcagcggatctttggcgcctccatcatggggcagccgcagacggactcgccgctgctcgattactgcgagcaggtctacatctcctatctagcgcttctcaagatgctcaagcacggtagggctgggatgcccatggaggtcatgggccttatgctctgcgagttcgtggacgactacagccacatgggtcgtctactttttcgccatgctcgagaacttgactggcgtcagcttggaggtcgtcgaccacgttttccagactaacatggttgacatgcttaagcataccggcatgccagaaatggttgtaggttagtatgactcacatactgtcttcagatgctggctatcaggcgtagatatcaata

SEQ ID NO: 9695 - DNA, 413 bp, Zea mays
  Clone ID: LIB3150-041-Q1-N1-F7
gtgcaccattgaggttgttggcaccgggagggagaccaccacccagggccacgatgacctcggcaagcgctgcgctaagtactacgaggccggtgcccgctttgccaagtggcgtgctgttctcaagattggccccaacgagccgtcacagcttgccattgacctgaatgctcagggtctggctcgctacgccatcatctgccaggagaacggtctggtgccaattgttgaaccttaaaatccttgttgatggccctcatgacattgatcgctgcgcttacgtcactgagacagtccttgctgcctgctacaaggctctcaacgagcaccatgtcctcctggagggtaccctcctgaagcccaacatggtgactcctggctccgactctaagaaggtgacacctgaggtgatc

SEQ ID NO: 9696 - DNA, 426 bp, Zea mays
  Clone ID: LIB3150-041-Q1-N1-F8
ccaaccgaagcgagagctgagcaaggcggaggcggcgtgaccggcgatggagcggctgcagcggatctttggcgcctccggcatggggcagccgccgacggactcgccgctgctcgattcctccgagcaggtctacatctcctccctagcgcttctcaagatgctcaagcacgggagggctggggtgcccatggaggtcatgggcctcatgctcggcgagttcgtcgacgactacaccggcaagggccgccgacgtcttcgccatgccgcagagcgggactggtgtcagcgtcgaggccgtcgaccacgtcttccagacaaacatgcttgacatgcttaagcagaccggcaggccagaaatggttgtaggttggtatcactcacatcctggcttcggatgctggctatcaggcgtcgatatcaata

SEQ ID NO: 9697 - DNA, 402 bp, Zea mays
  unsure at all n locations
  Clone ID: LIB3150-041-Q1-N1-G1
gctgaggctgatcgcatcatggtaaaaattgaggaatgcaagaaaacactcctctctcttggatatattgagttcacttttgaggacttcttttcgatattcattgaactgctggaaagggttctgcaaggacatgaaactcctatagggcctgaagagcttctagaaagaaccagaaatccacaagtttctgattaatgtgtcatgttctttaaggttgtcacttctgggtgaaattcaaaggaggtctgacttctttgaaccgttcatatctggcttgacaaattcaaccgtggttcagttctgcaaggcttcttgggaacctatgggtgaggaaagtgaccatgtgcacataattgccctatcagatgcactangcgtaccaatccgtgttatgtacct

SEQ ID NO: 9698 - DNA, 428 bp, Zea mays
  Clone ID: LIB3150-041-Q1-N1-G2
tcaaccgaagcgagagctgagcaagggggaggcggcgtgaccggcgatggagcggctgcagcggatctttggcgcctccggcatggggcagccgccgacggactcgccgctgctcgattcctccgagcaggtctacatctcctccctagcgcttctcaagatgctcaagcacgggagggctggggtgcccatggaggtcatgggcctcatgctcggcgagttcgtcgacgactacaacgtcaggggtcggcgacgttttctccatgccgcagagcgagactggtgtcagcgtctaggccgtcgaccacgtcttacatacaaacatgcttgacatgcttaagcagaccggcaggccagaaatggctgtaggttggtatcactcacatcctgacttcggatgctggctatcaggcgtcgatatcaatact

SEQ ID NO: 9699 - DNA, 201 bp, Zea mays
  Clone ID: LIB3150-041-Q1-N1-G3
tttcttacacgggcttgctcttcctggcagggggtcatagggagcgacgcattcagtgagacacaaaggatgatgctgaatgcagcacaatgtaacaataccagtgacaccatccatgatgtggagggcatcctatgaatacggctcgcttcctagatcacccttaataccatgccctatttcctgcgatacgtgcaccat

SEQ ID NO: 9700 - DNA, 423 bp, Zea mays
  Clone ID: LIB3150-041-Q1-N1-G4
gcgacacacagtaggcgaggcgaaggagaggcaaggcggcgcggcgggcaagatgtttgacgatcaagacctgggcttctttgccaatttcctgggcatcttcatctttgtcttggttattgcgtaccacttcgtgatggcagacccgaagtacgaaggaaactgatgtcctctagtgcaaagatcctattatctgcaggccgaaatagggctatactgttagctaatgctagtgagatcggttgacaattttgagtgcatatcatggaagctggacatgcagttcctggcattttggttttgcccatgttttaatctgctgaattagtaaatcctggagaattcaaaagcgttttcaagtactgcagttggtggttgtttctggtcctagtgtatgcatgccagaatcttatgaataatatt

SEQ ID NO: 9701 - DNA, 421 bp, Zea mays
  Clone ID: LIB3150-041-Q1-N1-G5
cgatcctgcatctctgcacctgctcgcctccccagggaggcagggacaatcgacttcgccgggcgccggctagccccaccggcgacgacaggcacagtggaccacggaggagaaagtactctgctttgaatgggaagtgccatgaacaaagacaaagttcatgacaaggagactcacggaacaagtagtgatataactgagaaaacacctgtggaaacggtgaagggtcccaatcttgcttgagcgagcaaaggaagagatcgaggcccttgccggagctgttcatactaagatggagcaccattccagtccccacgcgaagaaggatgaatcacataaggaaggcaaggaggggagcctgcacaaaataaaagcccacacggatgaaactcacggaacaagtgctgacataaatgagaac

SEQ ID NO: 9702 - DNA, 226 bp, Zea mays
  Clone ID: LIB3150-041-Q1-N1-G6
gcggggccggcgacgccgccggctacgcgaaagagcctaacaggcttccccgctatcactccaaggggcgcgaccatgggggccacaaagaagacgaacaaatccacggacaacatcaataacaagctgcagctcgctatgaagagtggcacgcacactctcagctacaagaccgtcctcatgactctcaggaactctaagtcgaggccgtgatcatcgctacaac

SEQ ID NO: 9703 - DNA, 422 bp, Zea mays
  Clone ID: LIB3150-041-Q1-N1-G7
attatgcaaagaaaaacactgtatgtgcgtctgcactgacacaatctgaaatgcgagatatcatacttggcgctgaaattgctccaccatcactagtacaggcaacagatagctgacattgataaatagtcaagagagactactcactttactgctaggaccacatcgacgaccaatgtgcacggagatgaactcattatcacaaccacaagtccatatgagcaacaagcattcgcatctgaggactgattggcgtgtcagagccatctctgccacaaacttgtatctacgtgtaaatcacatttatgtcaattctgatgatataaaggaaactggctacacttacattatgccaaagaacatattgaagaaattcatatgcatagcagatctgcgtacacaaatcgctggattcttatatg

SEQ ID NO: 9704 - DNA, 228 bp, Zea mays
  Clone ID: LIB3150-041-Q1-N1-G8
cggacgcgtgggcggacgcgtgggctgtaactcggtctttatgatttcctttttttttttttttttgacaaaaccgcagcatctttgtcaagcaacagtgcccaaaagaaaaggaaaggataaagaccgacacacagcaatggcatacgcacactcctacagaaaagcgaggtctacactgcgaccaacccataaacatatggccgaaactcggaagaactactttgt

SEQ ID NO: 9705 - DNA, 426 bp, Zea mays
  Clone ID: LIB3150-041-Q1-N1-H1
tcggctacttcggcgtcgcgcgcctcatgcgcgaccgcgccgacggccagctcgtcgccgtcaagtacatcgaccgaggcgagaagattgacgagatcgtgcagcgggagatcatcaaccaccgctcgctgcgccaccccaacatcatccgcttcaaggaggtcatcctcaccccgacgcacctggccatcgtcatggagtacgcctacggcggcgagctcttcgagcgcatcttgcaccgccggcagattcagcgaggacgaggcgcgtttctttttccagcaactcatatcaggggtcagctactgccattccatgcaagtatgccatcgtgacttgaagctagagaacaccctgttggacggcagcaccgcgcctcgcgtcaagatatgtgatttcggctactcaaagtcatcagttctacac

SEQ ID NO: 9706 - DNA, 441 bp, Zea mays
  unsure at all n locations
  Clone ID: LIB3150-041-Q1-N1-H10
cccacgcgtccggcagaagaaggatctgtatgtcaagagtgtccagcgtactgttatctggatgggaaagaagcaagagtcggttgaggatgttccgtgtggtaacactgttgctatggttggtctggatcagttcatcacgaagaatgctacactcactaatgagaaggagactgacgcttgcccaatcagagcaatgaagttctccgtctctcctgttgtgcgtgttgctgttcagtgcaaggttgcctctgaccttcccaagctagtcgaaggtttgaagcgtctagcaaagtccgatcctatggttctctgtacaatggaagaatctggtgagcatatcattgctggagctggtgagcttcatcttgagatttgcctgaaggatctgcangaggacttcatgggtggtgctgaaattattgtttccccacccgtcgt

SEQ ID NO: 9707 - DNA, 219 bp, Zea mays
  Clone ID: LIB3150-041-Q1-N1-H12
gtcagcattatgtgtgctcgtggctatgggcgatctgtgtctttacctccaactctgaaactggactatggcatgaaaggaggccatgaagagaacggagagggatcatcaccaactgaaaaccgtcatgtcaagtgcgctcctgatgtgtaccatccccctgtgacatccgtaaatcattcattgaccaaaagctatcaacgccaggcaaaacaccgc

SEQ ID NO: 9708 - DNA, 417 bp, Zea mays
  Clone ID: LIB3150-041-Q1-N1-H3
gcggtcgtcctccaacgccgacgccgtgctgtccgtcctaaccggcccggcgctcggcctctccaatgctgagatcgcgctgctcgtggccaaagacccgcgcgtcctcagctgcagcgtcgacaacaccctgcgggcccgcttggcccgcttccgcagtcatggcttctccgccgcgcagatcagcgaattcgtccgcgtggcccactgcttctttcgcaaattcaacatcgacctccagcttcgggtcctggatgcccttcctcggctcgcccgacaggttgctccgcctcgtcaagcgtaactactacctcctcaggtccgacctcgacaaggtggtgaagcccaacatccagctgctccaggagtgcggtctatctatccaggagattgggagcctgtgcgtggctaacccga

SEQ ID NO: 9709 - DNA, 417 bp, Zea mays
  Clone ID: LIB3150-041-Q1-N1-H4
gtcagtagaagcagccgccgttgctgctggcgggtccacagaatggggggtttcgtgaagactcataagaccaatgcgtatttcaaacgtttgcaagtgaaattaaagagaaggcggtctggcacgacagactacagggccacgataaggctgattaaccaagacaaaaacaagtgcaacacacccaaatacagatttgttgtgcgatttaccaacaaggacatcactgcccaaatcatatcttgctgtaataccggctgatatagctctctgcttctgcctactcgcatgagttgccacgatatggtcttgaagctggtctgaccaactatgcagctgcctactgcactggccttctgttggctcgccgtgtgctcaagatccgtggtttggatcaggagtacgagggcaatgttg

SEQ ID NO: 9710 - DNA, 417 bp, Zea mays
  Clone ID: LIB3150-041-Q1-N1-H5
ctgacgcgtgggcggacgcgtgggagggtacccagcgttcgggctggtgaacaaggtcaccggctaagccatcaagcactcgctgggacagatccacccggtacgccttgtgccctacaacccggagtacgttgacaagttggtgctgtggacggagagccgccacatcgggcacggcttccgctgcgtgcgcatggagaacaacatctacctcaacatggacggcatctcacgacgacaaggaccactgcgaggaccaggacgtgtacaccgtggagctctgatagtgggccaagggcgacaaccatcgatggaagatcctgccctggtgatcagagacgatctaaatgaatccaaggaaccttacctagctgctgccgacgcctaatacgttgtactccgctctagctgagatct

SEQ ID NO: 9711 - DNA, 430 bp, Zea mays
  Clone ID: LIB3150-041-Q1-N1-H6
taccaatcgccgccgcccgagccgcggagctctccactcctctcttacccttcctctcccaacccacgcagcctcactagggtttagcggcggcggcgagatggtgcagcgcctcacgtaccggaagcgtcacagctacgctacgaagtccaaccagacccgagtcgtcaagaccccaggcgggaagcttgtgtaccagtacaccaagaagagggcgagcgggcccaagtgccccggcaaccggaaaaaaaatccaggggatccctcacttgaggcctgctgagtacaaaaggtccaggttgcctaggagccgcaggactgtgaaccgtccttatggtggagtactctctggaattgctgttagggagagaatcattcgtgccttcttggtcgaggagcagaagattgtcaagaaggtcctgaaaatacc

SEQ ID NO: 9712 - DNA, 400 bp, Zea mays
  Clone ID: LIB3150-041-Q1-N1-H8
gaacacagatctgctgtacggtcacattgtttctgaccattcacaacagttcaggcttcttgatgtccctcagcgatcaaatggtcaatctgctcgtcaaacagaagggacaaatggtctgtccctttatgatagccacaacattgaggatgccaatggctctcacaacttcatctgccgattatgtgggctcaaatatgatcatgggccatatctccccagacactatttcttgtatacaaggcgatatggtccttgcttctgctactcgcatgagttgccacgatatggtcttgaagtggtctgaccaactatgcagctgcctactgcactggccttctgttggctcgccgtgtgctcaagatccgtggtttggatcaggagtacgagggcaatgttg

SEQ ID NO: 9713 - DNA, 372 bp, Zea mays
  Clone ID: LIB3150-041-Q1-N1-H9
gtacaccaccgccaccaagcccgggccgaataactgtgccgggcaaccgccgcccttcgccggcaaagaacgcccaccagatccaccccggcctgctatggagtccgcggtgaacccgaaggcgtacccgctggctgatgcgcagctgacgatgggtatcctcgatatcatccagcaggccgccaactacaagcagctcaagaagggagcgaacgaagcgacgaaaaccctggataggggggatatcggaagttcgttgtgatggcggcggacacggagcctctcgagatcctgctccacctccccttgttagccgaggataagaacgtcccatatgtatttgttccatcgaaacaagctcttggccgtgct

SEQ ID NO: 9714 - DNA, 226 bp, Zea mays
  Clone ID: LIB3150-042-Q1-N1-A1
ggtatggctggcactttccagagctcaccaaaatagttacagataatatacagtatgccaaagttgtgaaaatgatgggcaacaaagttaatgcagtcaaccttgacttctttgagatattgtcagatgaagagctagaaacacagctaaaggaggcagcagtaatatccatgggaacagaagttagtgaccttgacttatcgaatatcagagagctatgtgatca

SEQ ID NO: 9715 - DNA, 213 bp, Zea mays
  unsure at all n locations
  Clone ID: LIB3150-042-Q1-N1-A10
tccggggggcccgatccccgaaaaatatttttccacgcgctcctcttctctgtgtttccactccacagaagagttcgaataacccgccccccctatttttctattcaagcccttcttgttcaatggaggaagtacgcctccgtggtgtgatactatgtcccgccgccgccgncggcccctccatatatttctcaaagtgcatctaggtcgagc

SEQ ID NO: 9716 - DNA, 240 bp, Zea mays
  Clone ID: LIB3150-042-Q1-N1-A11
cgcgtacgtgggactatattgaaggctcatcacacggcacttctatatcatgggaagaatatagaccctgtgagatcgcaacaggagaaggagaggctggaaaagaggcagcacgaagagaaagcaaggatcgacgcccatgtgaaggctgctgaatcacctgcacaacaaaatgttgaggaagacatgaggatgaacagaacgcacgacaaggatgcacgccgcctggctctacgcatg

SEQ ID NO: 9717 - DNA, 428 bp, Zea mays
  Clone ID: LIB3150-042-Q1-N1-A12
atatcaccaccaccacaccagcaatcgcaagactcctttgagccggaggcatatcgggtgaaatggaacaaatcaccaccaccacaccaacaatcgcaagactcctttgagcaggaggcatatcgggtgaaatggaacaaatcaccaccaccacaacaacaaacgcaagactccttcgagcaggaggcatatcgggtgaaatggaacaaatcaccaccaccacaccagcaatcgcaagactccttcgagccggaggcatatcgggtgaaatggaacaaatcaccaccaccacaccagcaatcgcaagactcctttgagccggaggcatattgggtgggatggaagaaacatgcgcaaggagcaacggacgttgctgatgagacaacgccagcacgtggtcatggtctgcatgtcgcgaccgggatgct

SEQ ID NO: 9718 - DNA, 414 bp, Zea mays
  unsure at all n locations
  Clone ID: LIB3150-042-Q1-N1-A2
cgcctatctcgccaagcaccgccgcatcaccgaaggttcgcaaagatggcggtgccgctgctgacgcagaagatcgtgaagaagagggtcaagcagttcaagaggccccatcttgaccgctacaagtgccttaagccaagctggcgcaggcccaagggtatcgactcccgcgtcaggcgtaagttcaagggatgcaccttgatgcccaacattggatatggctccgacaagaagaccaagcactaccttcccaacaagttcaaaaagtttgttgttcacaatgtctccgagctggagctgctgctgatgcacaacaggacttactgcgctgagattgcccacaacgtgtccacccgcaagcgcaaggagattgtcgagcgtgctgcgcanatggacatcgtggtcaccaacaag

SEQ ID NO: 9719 - DNA, 411 bp, Zea mays
  Clone ID: LIB3150-042-Q1-N1-A3
gtgtgtctcctcctcctccgccgccgccggcgccgcttccctcgtctccgcccgccgaagccatgccgtcgcacaagaccttccggatcaagaagaagctggccaagaagatgcgccagaaccgccccatcccctactggatccgcatgcgcaccgacaacaccatcaggtacaacgccaagcgcaggcactggcgtcgcaccaaactcggattctgagcgggggaaagaaatgctggctaaagacgcctagagggtatagggctctgcaagctaggaagctcttgtttaattttttttgcttgtgttatttggcattgtagtaccatgttttgtctgatggttaaagaaccgcctttatgctatggtgaatttatttaaccttgcagcgccttaatcaagtgatctctag

SEQ ID NO: 9720 - DNA, 406 bp, Zea mays
  Clone ID: LIB3150-042-Q1-N1-A5
gtaagaagctgaaaaagaacaatgttgctcttgacattgttgactttggtgaatccgatgatgaaaaacctgagaaactggaagcattgattgctgctgttaacagcagtgatagcagtcacattgttcatatccctcctggtgaaaatgccctctctgatgtcctcctaagcactcctatatttactggtgaagaaggtggaagcggttttgctgcttctgcagcagcttgcgcagctactggagcatctggatttgaatttggtgtggacccaaacgtagatccagaattggcacttgctctgcggttgtctatggaagaagagcgggcaaggcaagaggctattgcaaaaaaggctgctgaagatacttctaatacagaacattacaatgtcccaagctcaaa

SEQ ID NO: 9721 - DNA, 359 bp, Zea mays
  Clone ID: LIB3150-042-Q1-N1-A7
ggcagacaaagcacagaaggacctgagtgtgatcgccaccgaggttagtcaggagggacaggaatatctggtgatggcagctcggaactccccagactcgatcaaggatattacaacaacgttcagggctcttggaagattgaattggccatcagagtatgaggattatcatgtgggcattccgtttggtacctttcttacagtagggggtttactcaacttcatgatgactggaaagtacctctgctctgcgttttggtattgatcttggccttgcactgttgactctgggtatctcaagtttgagatcacatagagaaggcgaccgtcggactcgtcttctggtgaaagggcaagct

SEQ ID NO: 9722 - DNA, 435 bp, Zea mays
  unsure at all n locations
  Clone ID: LIB3150-042-Q1-N1-A8
gtccaaaaccctactgctcccgctccgctcctgcttggtcgagatcacttcgccgccgccgctttcgagatctccgggtggagcaagcgagcaaaggcagcagccatgtcgctccgcgtgctgaaccctaacgccgaggtgctcaacaagtcggcagcgctgcacatgaacatcaacgccgccaagggcctccaggacgtgctcaagaccaacctcggccccaagggcaccatcaagatgcttgtgggtggagctggtgacctgaagctgacgaaggatgggaacaccctcttgaaggaaatgcaaattcagaacccaactgcaatcatgattgcgaggacggctgtggcacaggatgacacaagtggtgatggcacaacctccactgtgctatttatcggngagctaatgaagcagtctgagcggtgcatcgat

SEQ ID NO: 9723 - DNA, 309 bp, Zea mays
  unsure at all n locations
  Clone ID: LIB3150-042-Q1-N1-A9
cccacgcgtccgaaatcagtggtcttatgtttgaacttgaaaatgtccaagtttggaacttgcccagtagtcatctgattagtggtgttatttttctttgaacttgggaattgtctagtttgggacatacgcggtatgcctggttaagaacatgggaaatgtcaggttagaacaggtcctgctggcccagttttggtcgtcgtcgaatgttgctaatgttggaactgattattgtgacccgtanggccgtaagggagaatctttgttatctggtagtgcctagtgcaaatcacctttttctcagttgtt

SEQ ID NO: 9724 - DNA, 435 bp, Zea mays
  unsure at all n locations
  Clone ID: LIB3150-042-Q1-N1-B1
gcggcagtttgcgctgcagcgcgcgcagcgccagcacgccgccccggcatcccatcacgatcgatttgggtatgatgatatcgaacctgaggatgatttgcactcagacttnccatgcccttactgttatgaagatcatgatgttgcttctctctgcgcccatttggaggacgagcaccctttcgagtctaaaattgtgtcttgcccagtttgctcagctagggattcgaaggactnggtggatcatataacccttcagcatggctacctnnattaattgcaganacatcaaagagtacgcagagttactggtaatggcaaccacaatctctcctatgcagggagagatcttcaactgcaagagacctacttaaaggtgcttcttggaaatagcagtcgaagcagcagtaccaatgtcataagtacagtcaccga

SEQ ID NO: 9725 - DNA, 425 bp, Zea mays
  Clone ID: LIB3150-042-Q1-N1-B10
accaagatgcggagctttttactgtgagcaacagttccctgtcagaatttgctgttttgggctttgaattgggttactccatggagaacccaaactcattggtcttatgggaagctcagtttggtgatttttcaaatggagctcaagtgatatttgatcagttcctgagtagtggggagtcaaaatggctccgccagactggccttgtcgtttgccttcctcatggatatgatggtcaggggcctgaacattctagtgcaagattggaacgctttcttcagatgagtgatgacaacccttatgttatacccgagatggatccaacactgcggaagcaaatccagcagtgcaattggcaggtcgttaatgtaacaactcctgcaaattatttccatgttctgcgtcgccagatacaccgggacttc

SEQ ID NO: 9726 - DNA, 333 bp, Zea mays
  Clone ID: LIB3150-042-Q1-N1-B11
gttgaccccaccaacagcaagcggggaggtcccgatcccctctagtctccgcggcgaagatgtcggggcgcggcaagggcgggaagggcctgggcaagggcggagcgaagcgccaccggaaggtgctccgcgacaacatccaggggatcacgaagccggcagatccggctgctggcgcgcatgggcggcgtgaagcgcatctccgggctcatctacgatgagacccgcagcgtactcaagatctttctggagaacgtgatccgagacgccagcacctacaccgagcacgcgcgccgcaagaccgtcacagacatggacgtcatctacgcactc

SEQ ID NO: 9727 - DNA, 423 bp, Zea mays
  Clone ID: LIB3150-042-Q1-N1-B12
cgcggcagccgcaaacgccttcgccgtcgcgtcccgctcctccgcccgcccgacgcgacccctggacctggagagagaggtcggcatggctgccgcggtggtcgacgacgctgggatggacgccgtccagaagcgcctcatgttcgaagacgaatgcattttggtggacgagcaggacaatgttgttggccatgagtcaaagtacaactgccatttgatggaaaagattgattctgagaatctgctacatagggcatttagtgtgttccttttcaactcaaaatatgagctgctacttcagcaaaaggttcgcgccaaaggtaacctttcctttagttgggaccaatacctgctgcagtcaccctctgtaccgtgagtctgagcttatccaggagaactaccttggtgtgagaaatgcagcac

SEQ ID NO: 9728 - DNA, 434 bp, Zea mays
  Clone ID: LIB3150-042-Q1-N1-B2
cttctacaccgacgtcaagctcttcggcgaccagacccagtctgacgccgtcctcgacgacgtcttctgcatgctcggatgcaccaggtcctcgctccacgtcgtcgcctccgagaagggcgtcgtcgtcggacgccttgtcttcgccgacgacggggaccggatcgactgcacgcgcatgggcgtcggcggcaaggccattccgcccaacgtcgacagggtctcgggcatcgagagcgacgcgctcttcatcctcctggtggagaaggacgctgcattcatgcgactcgccgaggacaggttctacaaccgcttcccctgcatcattctgacggccaaggggcagccagatgtcgccacccggctgttcctgcggaggctcaaggttgagctgaagctgccagtgctcgccgctggggattctgatccatacg

SEQ ID NO: 9729 - DNA, 439 bp, Zea mays
  Clone ID: LIB3150-042-Q1-N1-B3
ctcttgccatcgctagtctcaaaccacagccctagagaagaagaagagagagagaaagggagatggtggggctgcagtacgatctcgtcgggaacccattgggcgcggtgcgcgccaccttcgagaggacggccgccgccgctgcagcgcagtctggaggagctgaccctgtggcggcgttccgtggcaaagactggggcgccggtgacctctttcgctccttccttttcgagcaagacggtcttggcaaggttccggtgttggattcgtcaaatcttggattgatcaaaccgaacaccctggtccggtatcggggaatggttcaggatatgcttgggaatgagtactacattggtgctttcaaggatgggtcaacttggaggacaaacaagtacactgacttctcaccgtactcaatgccgcatacttgtgattcaca

SEQ ID NO: 9730 - DNA, 425 bp, Zea mays
  Clone ID: LIB3150-042-Q1-N1-B6
gttggcttctcctccccctccggttcgggttcgggttcgtgaggttctccggggttcggtttcgtgggtgagcggatcgagatggcggcgtccgatgttgagtaccgctgcttcgtcggcggcctcgcctgggccacggacgaccactccctccacaacgccttcagcacctacggcgaggtcctcgagtccaagatcatcctcgatcgggagacgcagaggtcccgcggcttcggcttcgtcaccttctccacggaggaggcgatgcggaacgccatcgagggcatgaacggcaaggagctggacggccgcaacatcaccgtcaacgaggcccagtcccgccgcggtcgtggaggcggcggcgctggagggtacagtggtggccgtggaggcggcggctaccgcggtggcggacgccgagatgg

SEQ ID NO: 9731 - DNA, 423 bp, Zea mays
  Clone ID: LIB3150-042-Q1-N1-B7
tttgagtgtgccatcgaccactctattggtggtgttcgctcacgcctaaactctggatgcgagctcaagaatatcatgatgatgggtgcggatttgtatgagaccgaagacgagatcttaaggctactggcagagggcaaggagcccattggcgtatgggagaacacgaagataagcaactgcatcatagacatgaatgccagggttggaaggaacgtctgcataacatacaaagagggcgttcaagaagccgaccggccggacgaaggatactacatccggtctgggatcgtggtagtcctgaagaacgcaaccatcaaggactgcaccgtcatatagagactaactttggccttacgcatggcgtgcaaggttacaggatagtcatcgtcttgagagttgagacttacttagaggcgcgcg

SEQ ID NO: 9732 - DNA, 156 bp, Zea mays
  unsure at all n locations
  Clone ID: LIB3150-042-Q1-N1-B8
attttgagcattcagaagcacaccngggggggggctctatcatggggctggcagcaatggctaccaagatattatcccttcttgcgcttcttgcgctgtttgcgggcccgacaaatgcgtccattattccacaatgctcacttgctcctagttcca

SEQ ID NO: 9733 - DNA, 436 bp, Zea mays
  Clone ID: LIB3150-042-Q1-N1-B9
gaggaatgctgtctacgacctccagtggccctcaaacaacaacaattatctgatcgctgaatttgtcgatccagaagaggcaatggctaaccaaactctagtacctccccatgttcctgctacttcgagaggtttattgcccactccagcacggtttgccaagctgcctcccacctctgaccctggaccagcaagggagagccttcctcctcctccactgagcctggaacctgccccgacactggatgagctcttcaagaagacacagacgtacccaaggatttactacaggccactgtcagaagaggaggtatctgctaaacgtgcagctcacgacaaaggtagaaggggatagtgggctttagtttgtcgctcaagctggtattttggaagtatcttgtacttgtcacagctgttttcagatgcaaccatactt

SEQ ID NO: 9734 - DNA, 318 bp, Zea mays
  Clone ID: LIB3150-042-Q1-N1-C11
gcccccatatttattgttgatgacaatgatgacaaatacacctcccattttaacattgtttccaatgctatctgcaccacatactaccttgctccactcgctaaagtcattcatgacaactttgtcattattgagggcttgaaaacaactgttcatgccatcactcacaccctaaaaactgttaatttacccttcaccaaagactgtatacatggcaaggctgacatctttaacataattcccagcaacacctgtgcttccaaagctctcaaaaaacatcttcctgaattgaataacaacctcacttgcatgtccttt

SEQ ID NO: 9735 - DNA, 380 bp, Zea mays
  unsure at all n locations
  Clone ID: LIB3150-042-Q1-N1-C2
tcgattttgagcattcagaaacacaccaagcgaagcgcactagcaacaacctaacaacaatggctaccaagatattatccctccttgcgcttctttgcgctttttgcgagcgcaacaaatgcgttcattattccacaatgctcacttgctcctagttccattattccacaggtcctgccaccagttacttaaatggcctcgaacacccatctgtgcaagcctataggctacaacaagcgaattgcggnaagcgtcttaccacaaccatttgccaaattgcaacaacaatccttggcacatctaacaatacagaccatcgcaacgcaacagcaacaacagttcctaccagcactgagccacctagccatggtgaaccctgt

SEQ ID NO: 9736 - DNA, 395 bp, Zea mays
  Clone ID: LIB3150-042-Q1-N1-C5
tcggtaagacgagaaggccccgaggcgagcgggggatcaaagaagaagatgaaggtccgtgcggcggtgaagcgcctgtgccggttctgcaaggtggtgaagcgccggggaatcgtcttcgtccaatgcacggccaatgccaagcacaagcagcgccagggcttctccaccatcgccgaagcagccgccgtctcgtgcgttcacctgcctccgccgccgcccgctagcggttccgacttcgccgcagcgttcgcagaggcttcgaaggtggcgaggcaagagatgtctatgaagttcaattggcggctgggtttagctgccctgttcaagaatggagaaaaataatgtatcaggcctactaccatacgctaacatttttaagcagatgttgaata

SEQ ID NO: 9737 - DNA, 422 bp, Zea mays
  Clone ID: LIB3150-042-Q1-N1-C6
tcggtgaagccgccgccgctgcagtgtgcatagccaccgcaggagactgagatggggggttttgtcaagacccacaagagcaatgcgtacttcaagcgtttccagctgaagttcaagagaatgcgcgctggcaagacagactacagggccaggataaggctgattaaccaagacaaaaacaagtacaatacacccaaatacagatttgttgcgcgatttaccaacacggacatcacatcacaaatcatctctgctagtatagcaggtgatatggttcttgcttctgcttactcgcatgagttgccacgatatggtcttgaagttggtctgaccaactatgcagctgcctactgcactggccttctgttggctcgccgtgtgctcaagacccgtggtttagataacgaatatgagggcaatgt

SEQ ID NO: 9738 - DNA, 390 bp, Zea mays
  unsure at all n locations
  Clone ID: LIB3150-042-Q1-N1-C7
gcgtttctgcacctccattctgggctctgtgcgttgccagttcaatctcacctccaaccatgggtaaagagaagtcccacatcaacattgtggttattggccacgttgactctggcaagtcgaccaccacaggacacctgatctacaagcttggaggcattgacaagcgtgtgatcgagaggtttgagaaagaggctgctgaaatgaacaatgcggccttcaaatacgcatgggtgctcgacaagctcaatgctgancgtgagagaggtatcaccattgatatcgctctgtggaagtttgagaccaccaagtactactgcacggtcattgatgcccctggacaccgtgacttcatcaagaacatgatcactggtacctcccaggctgact

SEQ ID NO: 9739 - DNA, 186 bp, Zea mays
  Clone ID: LIB3150-042-Q1-N1-C9
cacccccaaacccccgattgcatgactttatttaacaagcaggccggctcccacacttgttcctattgccaatgaacaaaagcacacgctcgttactaacaccgcatgacatactagatataccctaaattccactactgctattactaaaatcattcatgcaaaccatcctgttattctgcacat

SEQ ID NO: 9740 - DNA, 423 bp, Zea mays
  Clone ID: LIB3150-042-Q1-N1-D1
accttccactccctccctccgtcgccatggcgcgcaagaagatccgggagtacgactccaagcgcctcctcagggagcacctcaagcgcctcgcgggcatcgacctcaccatcctctccgcccagatcacgcaatcaacggacttcgcggagcttgtgagccagcagccatggctgtcaaccatgaagctagtggtgaagcccgatatgctgttcgggaaagcgtgggaagagcggcctcgtggctctcaacttggatttcgatcaagtcaaggagtttgtcaaggagcggctgggggttgaggttgagatgggtggctgcaaggctccaatcacgaccttcatcgtcgagccatttgtcccacatgatcaagagtactacctttcgattgtctcagagaggttgggcagcaccatcagcttc

SEQ ID NO: 9741 - DNA, 323 bp, Zea mays
  Clone ID: LIB3150-042-Q1-N1-D11
ggcggactactacgcgaatattgcatcaccgaagggacacagtgccaaggcgaagcaactcgcaccgcaccttattcacaggttctttctgagctcccctgcactcaggacgcgcgccatgtgagccatgttagatctcgtgaatatggaggacctcgcgatcagaatacacgctattcgcggctttacactccttggcacagagactgaatctgtgtcaaaaatttcatatgtactgtgtcaactccttacaagctacgaaaatgttcaacgtgatgctgttcataaagcgctcatgtcccttatacggaaagatgctcaaa

SEQ ID NO: 9742 - DNA, 440 bp, Zea mays
  Clone ID: LIB3150-042-Q1-N1-D4
tcgttacatgcctactcctgtgctgcccaaggcgtggcacggcaacggcataccgatcaccacaaccagatacaaggaggaccagaaggtacgctggcacgcgacgacgttctaggagaggctgatgaaggttcagtctgacgagacgcctctgcatgaaaggatgatcagcgggaagcttatccacctcgaggaaaacgccgagtagagaatagagagagaggggccgtttgcgccccttgttatgcaagctggaatctgccccgcagtcctgtgccgtctaaagaatggtggtcatcagcccaccatatgaactccacttttcagccgcatgatcactgtagatagagcatctttcgctgagttatgctctgcactctgcagagctgactgctgcgtggaatattacatgcatatgtgatgacgggtcaataaaagga

SEQ ID NO: 9743 - DNA, 431 bp, Zea mays
  Clone ID: LIB3150-042-Q1-N1-D5
gtcgaggcgcggcgactgggtctacgagaacaacggcgggacctgcgtggccatcgccggcgccgattactgtgtcgtcgcggcggacacccgcctctctgtcggatacagcatcctcacgcgcgaccactctaagatctgcgacctggctgacaaatgtgtactagcatcttctggctttcagggtgatattaaagctctgcacaagaacctagctgccagagaatttgctatcccaacaccagcataacaaaaggatgagctgccctgccatggcacagctcctctccaataccctgtactacaagcgcttcttcccatattacgccttcaatgtgctcggtgggcttgacagcgaggggaaaggggtgttttcacctatgatgcagtaggttcctatgagagaactggttatagtgctcagggaacgg

SEQ ID NO: 9744 - DNA, 359 bp, Zea mays
  Clone ID: LIB3150-042-Q1-N1-D6
tcggttctggcctggccactggctttcggagggctatcctgcgatctgacgcgaggatgggaccctctataagatgggaggagcgacgaatccgatcgcttgctgtgtggtacagcctccgcaccatcctccgcgtgaagaagttcgacaaggattacaggagccacctagaagatactctgtctcagtgtaaggacaagtacctcgactacaacgtacttaagaagctgatgatgaacctggggcgacgcaagacctcgatgagctgtcctgtcactactcatgacctcgtcgacgccgacgcactagaggccgtgggctccagactacgcccacggcaacctcaaccggctcgactg

SEQ ID NO: 9745 - DNA, 197 bp, Zea mays
  Clone ID: LIB3150-042-Q1-N1-D7
tagacaactaattcactcgtttttttgagcgccccgccaattactgaggggaacctgtaggtagaggtgggtggtgatatcttgagcattattaaaggttggatgacaactggtcataccatcactctgacacagaatactattcactgacacttacacaaagaatacaaagcgtacgcatatagcgtcaagaacat

SEQ ID NO: 9746 - DNA, 453 bp, Zea mays
  unsure at all n locations
  Clone ID: LIB3150-042-Q1-N1-D9
catggacttccncgcaccttactttcccacccttttttggagccgctgtacgagctcgggnagcncctttccttcggcagtgacaggcccaancatgcggcggactaccaagcgattattgcatcggtgaagggacagactgccaaggcgaagcagctcgcagcgcagcttatccccacgttctttctgagcttccctgcactcggtacgcgcgccatgtcagccatgttcgatctcgtcgatatggaagagctcgcgatcagaatacaagctattcgtggctttccacttcttggcaaagatactgaatgtgtgtcaaaaattgcagatgttttgggtcagctccttacaagcgaagaaaatagtgagcgtgatgctgttcataaagcgctcatgtcccttatacggcaagatgttaaaaattcattacaacctttatttaaacatgtggag

SEQ ID NO: 9747 - DNA, 394 bp, Zea mays
  Clone ID: LIB3150-042-Q1-N1-E11
tgcgttaggttctccccaaacaccttccagcccaccattgtctccggatcctgggaccgcaccgtcaaggtctggaaccttaccaactgcaagctgcgctgcactctggatgggcacggtggctatgttaacgccgtcgctgtgagccccgacgggtcgctgtgcgcctccggcgggaaggacggtgttactctgctgtgggatttggctgaggggaagaggctgtactcgctggacgcgggctccatcatccactctctctgcttctcacccaaccgctactggctctgcgctgcgacgcaggactctgtcaagatctgggacctcgagtcgaagcacgttgtgcaggacctcaagcccgacatccaggtcttcaagaaccagatcctgtact

SEQ ID NO: 9748 - DNA, 431 bp, Zea mays
  Clone ID: LIB3150-042-Q1-N1-E12
gaaattcagctgcagcttgagaagatgaagaaatatgcttctgttatccgtgtcattgctcatacccagattaggaagatgaagggtttgaaacagaagaaggctcacctgatggagattcaggtcaatggtggtaccattgctgacaaggtggactacggctacaaattttttgagaaagaggtccctgttgatgctgtcttccagaaggatgagatgattgacatcattggtgtgaccaaaggtaaaggttatgagggcgtggtcactcgttggggtgtcacccgccttccccgcaaaacccacaggggtctccgcaaggttgcttgtatcggtgcatggcatcctgctagggtctcctatacagttgcccgtgctggtcagaacgggtaccaccaccgcaccgagatgaacaagaaagtttacaagat

SEQ ID NO: 9749 - DNA, 435 bp, Zea mays
  unsure at all n locations
  Clone ID: LIB3150-042-Q1-N1-E2
tgtgttttcctactcgcctatctacgtgacgcgaaccgttccccgtgggccgattcttatctcattgctcaccaccggcgccggtaccccctttcgacaacaccatgagggagtgcatctcgatccacatcggccaggccggtatccaggtcggaaacgcgtgctgggagctgtactgcctcgagcatggcattcaggctgatggtcagatgcccggtgacaagaccatngtgggaggtgatgatgctttaacaccttcttagtgagactggcgctgggaagcacgtcccccgtgctgtttttgttgaccttgagcccactgtcatcgatgaggtgaggactggcacctatcgtcagctcttccatcctgagcagctcatcagtggcaaggaggatgcagccaacaacttcgctcgtggtcactacaccattggg

SEQ ID NO: 9750 - DNA, 383 bp, Zea mays
  unsure at all n locations
  Clone ID: LIB3150-042-Q1-N1-E3
tttcttcaaaacggcagggcgtacagagggtggactaacagaacagcgtgaggatggtcatcgttgtcatggtgtgcctggatctaccagctgccatcccctctgcaatagcataagccctgcccctacgcggggctgcatggcttgaacagaactaacgccggcctgacgactatgataggcgccgtgcggctgaacccctacgctgattacctgatgcacacgcactgcatcctgctgccagagttgccctactactccggctgtgcacagacaagcgccgtgtaccanccgctccggcatcagtgctcccagcaccacatgaggatgatggacaggcagaacggcacgcagcacttgctgatcatgatacatgttgaaca

SEQ ID NO: 9751 - DNA, 234 bp, Zea mays
  unsure at all n locations
  Clone ID: LIB3150-042-Q1-N1-E4
agcaaggatccannananacaattcatccacccgtttatttccaccccagagagcaaaacaaggcgagctacaccaagagggggtgggtcgtaaccctcactttcctggatctccctgagaacgccaccttcacgcatacaagccgcgggagcggctgacaaccaccgccgtcggttcatttaccgacaacgatgcatatgccacctacagtttacctgccacctcccgagcat

SEQ ID NO: 9752 - DNA, 160 bp, Zea mays
  Clone ID: LIB3150-042-Q1-N1-E8
tcgtttgaacatgcgggtcgtttcaggccaggacccatcccgcgtgcgggctctcattggacggtcacagcagtctgcgccggcggaacctgtcctccacagtctgcacaccgtctaccagatgcacctaactgccataggtagactctcacacccccgt

SEQ ID NO: 9753 - DNA, 439 bp, Zea mays
  Clone ID: LIB3150-042-Q1-N1-F1
gatcatcaaagcggcagtgcgtagagaggatcgtcgaacagaacagcatgaagatggtcatcgttctcgtcgtgtgcctggctctgtcagctgccagcgcctctgcaatgcagatgccctgcccctgcgcggggctgcagggcttgtacggcgctggcgccggcctgacgacgatgatgggcgccggcgggctgtacccctacgcggagtacctgaggcagccgcagtgcaacccgctggcggcggcgccctactacgccgggtgtgggcagacgagcgccatgtaccagccgctccggcaacagtgctgccagcagcagatgaggatgatggacgtgcagtccgtcgcgcagcagctgcagatgatgatgcagcttgagcgtgccgctgccgccagcagcagcctgtacgagccagctctgatgcagcagcagcagca

SEQ ID NO: 9754 - DNA, 427 bp, Zea mays
  Clone ID: LIB3150-042-Q1-N1-F11
cccacgcgtccgcccacgcgtccgggagtcttgacctgcttcattgccatcaccgctctcgccttccgtccctgcgcatccgccgtgcccatggacggcggctggtcgaacggcggcgccacctggtacggccccgccaagggcgctggatccgacggtggtgcgtgtgggtaccagggtgccgtcgaccaacctccgttctcgtcaatgatcaccgccggcagccaatccatcttccaggacggcaagggctgcggcacctgctaccaggtgaagtgcaccggacacgagtcgtgctccggcagcccggtgacagtggtcatcaccgacctgtgccccgacgctacgtgccaggtggagcccgtccacttcgacctgagcgggacggcgttcggtgccatggcgaagcccggccaggccgacaagc

SEQ ID NO: 9755 - DNA, 430 bp, Zea mays
  Clone ID: LIB3150-042-Q1-N1-F12
gcaattgcatgatctctatttgaaacttagtcaagaccaactggaaggtggagttggcccatctcatggtgccaatttcacatccattccttccagcaagggaggtaactcaaatcaacttcatcctacaagaaaccataggccaaccaggtctctccagtacaattctgagtctttgcacaataatgagagctctggaagttctgaagcctggaagcgtcgacggagagcagaccctgataatcagtttgacacccagcctttgtatcaacctccaattatgacaaatggaaataggttgcaggaatctagtagttctgcaggaattcttggttggggtccagttgaaatgagacggtatggtaatgaaaggccaaagcgtggtgttcatcctagtcattttcctactgggcatggacctttgttgtag

SEQ ID NO: 9756 - DNA, 163 bp, Zea mays
  Clone ID: LIB3150-042-Q1-N1-F2
tcttctctcccgcggcctctaaatatgccccggcgttctgtgatatccacactggtctctctctataccaaacccgagacgcgcagtttctagatcttttctccggggtaaaaacgctgctgtggggagcccgcccttgaaaacgagcgagccgagccccgcg

SEQ ID NO: 9757 - DNA, 434 bp, Zea mays
  Clone ID: LIB3150-042-Q1-N1-F3
gtaagcacagcctcaaatccattttcagctcttctcgggaatcaggggtctagccaacctggtcaaggtcaacctgcaacaaatgctccaactactggttcagaatcgacaactggaaccccagctgcaaatactaatccacttacaaatccctggagcaccaatgctgggagtgcacaaggcgcaacacggactcctagcggcaatgcaagaactggtggtgttgggggcactgctgccaccggtggactgggaggattgggttcaccagaattgagtagcttgcttggtggtcttgctggcagtgcaagaactggttctgatggtggtctaggacgttcgggttcaccagatttgaggagtatgcttggcggctacctgatgtcgctccgttcagacagatgttgcaaaaccctgcaatgatacagatgatg

SEQ ID NO: 9758 - DNA, 375 bp, Zea mays
  Clone ID: LIB3150-042-Q1-N1-F4
tgccggtgattgcgcctctctcgcccgggtcgcctgagggattggaaagatggcatccccgctgctgacccaaaaaatcccgaagaatcggttcaagcagttcaagaggccacacctcccccggtccaagtgcctaaagccaagctggcgtaggcccaagggtatcgactcccgggacaggcggaagttcaagggatgcaccttgatgcccaacattggatacggctgtgacaaagaagacaaggagctaccttcccaacaagttcacgaagtttgtcgttaacaacctctctgaactggaactgatgttgatgcacatcaggacatactgagccgagattgcccacaacctgttcacccggaagcgcacggaga

SEQ ID NO: 9759 - DNA, 121 bp, Zea mays
  Clone ID: LIB3150-042-Q1-N1-F5
ttccgactcttgcacagatcgagaagggggcccaacacgaaactgggggactggacagcgaactctgacgcacactacacaagaacgtggctggagcaccgcaagacacaatacctacccc

SEQ ID NO: 9760 - DNA, 356 bp, Zea mays
  Clone ID: LIB3150-042-Q1-N1-F7
acgatgccgcggcgtaagcagctagcattctatacagcccacccacgcctcattttgtccaacgtcgacgaactgcaggggggagttagaaccaaagcgcgcgcagcacacgacgcaagaactctgtacctttacgggggcattggacatggcagccaatataaaggacgtgccggctttggatctgatgcactaatcgctcccatggatgaatgacggctgcaaaccggacaagcacctcatcctcatcggcccacctggcattgaaagggtctaaactccctgtataaggaggaatattgcctgtgccattgatccactgcaaagatgttgatggctgctgaagcaggcaagac

SEQ ID NO: 9761 - DNA, 147 bp, Zea mays
  Clone ID: LIB3150-042-Q1-N1-F8
aactagcgtaccaggtataactgttgagactgtattaaagcttgtcgttagtatagctatagctgccatatgctctcatgctgatggcgactagcaatacgcacaacatacgagcgctaagcatatggagaaatacctgaggtgcct

SEQ ID NO: 9762 - DNA, 335 bp, Zea mays
  unsure at all n locations
  Clone ID: LIB3150-042-Q1-N1-F9
cttacgcgtgggcgcaagccgtccgccttgcccttcacgaaggcttggtcctcctccttgtatctccactccccccttcacagatccgttcctccagctagggttagcgttcctctgcagcgatggcgatcaagcggaccaaggcggagaagaagatcgcgtacgacaagaagctgtgcagcctgctcgatgagtacaccaaggtgctcatcgccctcgccgacaacgtcggttccaagcagctccaggacatccgccggggcctcaggggcgactcggtggtgctcatggggaagaacacgctcatcangcgctgcatcaaggtgtacgccgag

SEQ ID NO: 9763 - DNA, 409 bp, Zea mays
  Clone ID: LIB3150-042-Q1-N1-G1
ccattttgtcgtcgtcgttccagctgcagtccagagttggaacccaagcgcacgcagcaccgtcgtcgaactcttccctttacggcggcattggagatggcggcgaatctagaggacgtgccgtctctggatctgatgcacgaattgctccgtcggatgaagtgcagctccaagcccgacaagcacctcatcctcatcggcccacctggctctggaaagggtactcagtctccccttattaaggatgaatattgcctgtgccatttagccactggtgatatgttgagggctgctgtggcagccaagacaactctaggtatcaaagctaaagaagctatggataagggagagcttgtttcagataacttggttgtggggattattgatgaagctatgaagaaaccgtcat

SEQ ID NO: 9764 - DNA, 406 bp, Zea mays
  Clone ID: LIB3150-042-Q1-N1-G10
ttcggtccggatcctacatcccgatcgctcgcctccagatgtacagcagctcgaatcgtctcatacctcggcgaaaatgagatagatcttgcacatacagggagggcaatgcggtaaccagatcgacgccaacctttgggagggagtgtgtgaacaacactgcctagacactacatgtcagtccactgacagttctgacctttagtgacagcgcgtcaatgaccactacagtgaagcatattgtggacggtttgtgactagatctctactaatggacctaggacctgcgacaatatacagtgctgcgactgaaccctataggcagatctttcgcactaacaacgtctggtataggaaatctcttgctggtaacaactgggacaccggggattatactgagggctct

SEQ ID NO: 9765 - DNA, 400 bp, Zea mays
  Clone ID: LIB3150-042-Q1-N1-G11
tttcacccgcctcccacatccccatggggggcctccagatggccagccggtcgaatctactcattcctcggctaaaatgagatagatttagcacatacagggagggcaagacggtaaccagatcgatgccaacctctgggaggcagtctgtgaagaacactgactagacactacatgtcagcccacagacgcttctgacctttagttacagcgcgtcaatgactactacaatgaggcatattgtggaccggtctgagactagctctctacaaatggacctaggacctgagacaatatacagtgttcgcactgaaccctataggcagatctttcgcactaacaactctgtgtataggaactctcgtgctggtaacaactgggacaacgggcattatactga

SEQ ID NO: 9766 - DNA, 416 bp, Zea mays
  Clone ID: LIB3150-042-Q1-N1-G7
gctcggtcttcgcccgtcggctcgctctaggcaccggctccgacactgcctggcgatttcccccgtgcgacacccggcgatctgagcgcgtgactcagctgcccgccgccgggctccttctccgcgccagctatcgtcccctccccgagggtcgacggccgtgccctgctcgagagctctgccgccgtcgaaaccacgggctcgtggtaacttgttgtcgtcggagggatccccgatggccgcggaggcagatcagaaagtcgtggtgcacgtgcggtccacgggcgatgcgccgatcctgaaagcatccaaatcaggatttcaggacgagataaggttctgaaggccatagagtttcttcgtcgacaactgcatcaggatacactggtagcaacataattgttgattctgagaat

SEQ ID NO: 9767 - DNA, 442 bp, Zea mays
  unsure at all n locations
  Clone ID: LIB3150-042-Q1-N1-G8
tcggttcggtcttcgcccgtcggctcgctgtgggcaccggctccgacactgcctggcgatttcccccgtgcgacacccggcgatctgagcgcgtgactcagctgcccgccgccgggctccttctccgcgccagctatcgtcccctccccgagggtcgactgccgtgccctgctcgagagctctgccgccgtcgaaaccacaggctcgtggtaacttgctgtcgtccgagggatcccccatggccgcggaggcagatcagacagtcgtggtgcacgtgcggtccacgggcgatgcgccgatcctgaagcaatccaaattcaagatttcaggacgagatangcttctgacggtcatagagtttcttcgtcgacaactgcatcaagatacactggtagcaacataattgttgattctgagaatttaatctgcgacattggaattt

SEQ ID NO: 9768 - DNA, 436 bp, Zea mays
  unsure at all n locations
  Clone ID: LIB3150-042-Q1-N1-H1
ggcggcggcaccggcaggcggcggccctcgggcattgtcccagcgggagcaggacatccagatgatgctcgccgccgatgtccacctcggcaccaagaactgcgacttccaggtggagcgctacgtgtacaagcgccgcactgatggtatctacattattaaccttggaaagacctgngacaagcttcagttggccgccagggtcatcgttgccattgagaatccgcaggacattatcgtgcagtctgctaggccctatggccagagggctgtcctcaagtttgcgcagtacactggtgcccatgccattgctggcaggcacactcctggtacattcaccaaccagttgcaaacctccttcagtgagccacgccttcttatcctgactgacccgaggactgatcatcagcccattaaggagtctgcgcttggaaac

SEQ ID NO: 9769 - DNA, 381 bp, Zea mays
  Clone ID: LIB3150-042-Q1-N1-H12
tcgttttgctcgcactcgcggacaccgagagagaagcccatgaggccccagcactagctccgacccgacgccgcatcacacatggcgctggccgatcgcctagtctcgcgctcccgtcagctatatccggttcaagccactctggggaatggaggtgtcactcaagttcgatcctttgccaaggatgcaggtccagatgaccgtcctcctgtcagaggggatgatctactgaagggcatattctttgaggtaaataagatgtacgagacagctcttgctgttcttaaaaaggaaaagatcactattgatccaaatgacccagcggcagtttctcgttatgcccaagtcatgaagactgtaaggtaaaaggcggctcttcta

SEQ ID NO: 9770 - DNA, 202 bp, Zea mays
  Clone ID: LIB3150-042-Q1-N1-H4
gttgttttactgtgaccattctgccgacgccatgttcgccgcatgagcggtcgttgcgaacgagctgcaatgcgatgtctgcatatggagagggagctaatggacgtcgccgcccaagacaatgaccatcgaccgaggatggaattgcttgtcgggggcatggcaatctgggattctgctagaaccatattgggcctaaatc

SEQ ID NO: 9771 - DNA, 433 bp, Zea mays
  Clone ID: LIB3150-042-Q1-N1-H5
gtgatctgttcctcgggctggacaagtgtggttcccagattctgcaaccaagacagctcaggcattattagacttcaaccgtgaaggattgcctctgttcatcctggctaactggagaggcttttctgggggacagagagatctctttgaaggtattcttcaggctgggtcagcaattgttgagaaccttaggacatataatcagcctgcgtttgtctacattcctatggctggagagcttcgtggaggagcttgggttgtgatcgatagcaaaataaatccagaccgcattgagtgttatgctgagaggactgccaaaggtaatgtgctcgaacctcaagggttaattgaaattaagttcaggtcagaagaacttcaagactgtatgggcaggcttgacccagagttgataaatctgaaagcaaaacttcaa

SEQ ID NO: 9772 - DNA, 439 bp, Zea mays
  Clone ID: LIB3150-042-Q1-N1-H6
tctctaccgtccgagaccccaagcaccagcgcggcggcgggggcgggggcggcggcgaccatggctgtcggaaagaacaagaggatctccaagggaaagaagggtggcaagaaaaagaccgtcgaccctttctctaagaaggattggtatgacatcaaggcaccgtcggtgttcagtgtgcgcaacatcgggaagactctcgtatccaggacacagggtaccaggaattgctctgagggtctgaagcacagagtctttgaggtttgcctagctgatcttcagggcgacgaggatcaagcttacaggaaaatcaggctccgtgctgaagatgtgcagggcaggaatgtgctcacaaacttttggggcatgaattttaccactgataaactcagatccctagtgaagaagtggcagacattaatcgaagcccatgttgatg

SEQ ID NO: 9773 - DNA, 128 bp, Zea mays
  Clone ID: LIB3150-042-Q1-N1-H7
tcgtttatacgtagccagaacacaaatagtggtgtttatataatgtggggggctctcacaagaatgaataaaggacggaaaatgaggatatccattggaaaaaatgctgctgataaaaagacacacga

SEQ ID NO: 9774 - DNA, 394 bp, Zea mays
  Clone ID: LIB3150-042-Q1-N1-H8
tcgtttataccgtcccagaccccaagcaccggcgctgctgcaggggcgggggcggaggccaccatggctgtcggacagaacaagaggatctgcaagggaaagaaggctggcaagaaaaagaccgtcgaccctttctctaagaaggattggtatgacatcaaggcaccgctggtgttcaatgtgcgcaacatcgggaagactctagtatgcaggacacagggtaccacgattgctcttgagggtctgaagcacagactctttgagttagcctagctgatcttcacggcgacgaggatcaagcttacaggaaaagtacgctccgtgctgaagatgtgcaaggcaagaatgtgctcacaaactattggggcatgaatgttaccactgaataactcag

SEQ ID NO: 9775 - DNA, 298 bp, Zea mays
  unsure at all n locations
  Clone ID: LIB3150-042-Q1-N1-H9
acacacacacacacacatactacnggnnttcattgccaaccgngngnacnagcaaccagcngagctcttacaaaagcgggcagccatcataacnnnangaaaancaccaccacttcttcaaccaccacaagaaagacgaggagcagcccgccggcgagtacggttactcctaaaccgaggtggtcaccgccaccggcgaaggcgagtacgagaagtacaagaaggaggagaaagagcacaagcacaagcaacacctcggcgaggccggcgccatctccgtcggcgccttcgcactcta

SEQ ID NO: 9776 - DNA, 334 bp, Zea mays
  Clone ID: LIB3150-043-Q1-N1-A10
ttcgaagcaaagtgagggcggcgagatggacggctgcggggaggacgggaagcaccaaccgcacctggtactggcgcacaagctgttcctcctgtcgcactccgacgtcgacgacctcgccaaggtcgacctacgcgctgacgtgttcgcggcagtcaaatccgatgacatggcagctctgtacgagtcgttggcggcggacggtgtactggagacagacgcggcgctgattgcctttaaaggtccccagaatcgactaggagatccggaagctcgacgagaagattgctgatgcagaggagaacttgtgtgagagtgaagtgcgtgaggccca

SEQ ID NO: 9777 - DNA, 358 bp, Zea mays
  unsure at all n locations
  Clone ID: LIB3150-043-Q1-N1-A11
ctcccagtcgcagagtcgcagtccgtaccgtagctcctcctgccaccagaacccaccatgggcctctgcttcagcaagaagaagccaccggccaagccgggaaaggtcgccgccgcggtctccgacgacaaggccaagaagagtccggcgcagcagcccaagagagcggcggcggcggcggcgaacaaggctgcggtgtccgccaaggacgccgcggtgcccggngaggagaagaggangcggttcggatcgcaggggccggcggccgagaagcagctgccggtagtgctggtgccgtcggcgccggtgcgcacgtccagctgcaccaaggaggaggtggacgcgatcctcatccagt

SEQ ID NO: 9778 - DNA, 422 bp, Zea mays
  Clone ID: LIB3150-043-Q1-N1-A2
gtataatgtaaatggtaatctgtctcatgctgtagttacaaatgactcagactcagatgaagttaatgggatagtcaatggctgcaacggtgtgggaaaagaaatagatgaagttagcgctgctattggacaggactggaccaggaaaagcatggataagtgcactattgcgtacacaaagaaggaactaaggattagtattgagcgtggagtgaaacccaaaatcagatggttatcaagaggcccgctaggtgaagcagctgtctcaaatggctttcttgtcacaaagatacagatgaagaagtgtaaactcactggagaaataacagtgtttgaggaattctcaatcaccataccgccaaaatctgctttgctatttccgtgccagcgggcaatcagcattgatgcttcaggttgtcagg

SEQ ID NO: 9779 - DNA, 425 bp, Zea mays
  unsure at all n locations
  Clone ID: LIB3150-043-Q1-N1-A3
ctactgcatctccctcgctctcgtcgcctcgttcgcttcgcctcctccccgccccgccccgagccgagcagagcgcagccctagccggagctgggatggcggacgcgaagcagcagcagcagcagcagccacagcaggcggcagcggcagccaccggcgtgtggaagacggtcaagcccttcgttaacggcggggcctctgggatgctcgcgacctgcgtcatccagcctatcgacatggtcaaggtgaggatccagttgggtgagggctctgctggtcaggtcacaaggaacatgcttgcaaatgagggtgtccgttctttctacaagggtttgtccgccggattgctgaggcaagcgacgtacacgactgctcgtcttggatcctttagggttctaactaacanagcagttgaaaagaatgaa

SEQ ID NO: 9780 - DNA, 421 bp, Zea mays
  unsure at all n locations
  Clone ID: LIB3150-043-Q1-N1-A4
gccgacaacgccggcgctgagtacctccgaggtctgggcctggccggccgcaccgacccggacagcttccgggcctgcgtaccgctcgccacgcacgcggacatggagccctacattgcgcgcatcgccgacgagggcgacacctnccacgtcctcaccgccacgcccgtcacctccatctccctcagctccggcacgacgcaagggaagcgcaagtacctgctgttcaatgacgacctcttcaagtgcgctatgcagacaggccagactagcttcgctttcaggaacagggctttccccgtggaagacggaaagtcgctgcagttcatttacgccagccggcaattcaagaccaagggcgggctcacggcgacgacggcgaccaccaacgtgtaccgtcacagggacttcaaggcccaca

SEQ ID NO: 9781 - DNA, 414 bp, Zea mays
  Clone ID: LIB3150-043-Q1-N1-A5
ggaaaaacaagacaagagcatcatagctgagcagaaccccaagagctctgacaaggagggtggtgctggcagcaagaagggggatacaaagacttgccgagtgcccatctggtttgagacctgggagagagctgacacatatgccgctcttgctgttgttgcagctgccgcagcggtgcttgtctccttcagaatctacaagaacctcaactgaagaacatgggagatcctggaagaggtgaccaaaacaagtataggtgaaacagcgtactgtgataaaagtctgggatgagaataaatttacctgtgcataatgctaggcttaggctatggctagcaaatcgttgtgcaaaatattgttgtgcattgtttacaaagtgatgtttgaaatagaagataacggcgatgaacaag

SEQ ID NO: 9782 - DNA, 419 bp, Zea mays
  unsure at all n locations
  Clone ID: LIB3150-043-Q1-N1-A6
tgaaactggccaccgtgaatccccagctggacttcaacaacctgcctaacctccttcctaaagatatgcaccagtcctgcggcccgctgcagaactcgcatttcccgctggagacctcaggcgcgccgctgccatacctcaaccaggggaaccctctaataggctgcggcctacccaacggcatggacaacagccagagctccatgcacccgctcgacccggcgttttgccggccgatgagctcgcagcagcaccctntcctcaacggtgtcagcgacgcagcgtcccaggtcgggactttctggcaagatgaccttcagagcgtagtccacatggatatggggcagcagagccagcaggagatggctcccacctcctccaacagctacaacgacggttcgttgcatacagtgcacatg

SEQ ID NO: 9783 - DNA, 418 bp, Zea mays
  Clone ID: LIB3150-043-Q1-N1-A7
tcaaagtaagctgcttgaaacaattgacgctagtgaattgccagaattccttggtggcacttgtacctgtcctgaatacggaggttgccttaaggctgaaaagggaccgtggaaggacccaaacatacttaagatagtccaaagtggtggggttcattgtgctcgtcaaattgtaactatttccaatggtgaggaaaaatttattacttacgccaaaccgaagcgccacgcaatgagagggagtgacacatcaactgctgagtctggttcagaagctgatgatgctgtgtcccccaaagctctcagaagttacatatcacatcctaagttgaccccagttcgtgaagaggtcaaaatggtcagggctactagcttttctactcgtgtccctgaatatgatgtacctgttgttgacaag

SEQ ID NO: 9784 - DNA, 409 bp, Zea mays
  unsure at all n locations
  Clone ID: LIB3150-043-Q1-N1-A8
cggatcctcgctttcaggagcaagccgccggagcccgagaacgtttcttttgcggacacgacttcctccaacctgcaggccaagccggccaaacagcggcgccacattccccagtctgccgagaggaccctagacgcaccagagctagttgacgactactacctcaacttgcttgactggggaagcaacaacgtgctatccattgctttgggagacacggtgtacctgtgggatgcatcgagcggatccacatccgagcttgtgaccgtcngcgaggacagtggtcctgttacaagcgttagctgggctcctgatggtcggcacatggccgtcgggctcaactcgtctgacgtccagctctgggacaccagctccaaccgactgttgagaacactcagaggtgcgcatg

SEQ ID NO: 9785 - DNA, 440 bp, Zea mays
  unsure at all n locations
  Clone ID: LIB3150-043-Q1-N1-B11
cttccccacagcatagctgctgcagtatatgtgactcccgtccatggaaagaaacaggccctaagaaaaccaaagtatgtctgcttgcttcgctgagaggattggggcagatgaactccaagccttgggtatggtaaatcaggcgcccaggctgcttggatgttgtgctcaggctgcacgctgcaggctctttggtcagtcaggctgccacccccaatgaggcttggggcacagcttgccttgccgcttgatcaggccagtgccgccctggccgtttgggctggtgctgcctatgccactcgggttgccactgtcaatctgatccactgtgcatgcttcccttcgacctcaactggatatgaatgacctattgactatagtttanggacggaggggcacgggagagggaacaacagagaggatagaaggcgtttgagctt

SEQ ID NO: 9786 - DNA, 130 bp, Zea mays
  Clone ID: LIB3150-043-Q1-N1-B12
gtctgcgagactacagtctaggaaccggggcccgagactgcgcctgctgcggcaaccagaaacacagcgagcgcggcggacgcacgaccgaggggcgctgaaccgggacaaataaggacaccagcccctg

SEQ ID NO: 9787 - DNA, 405 bp, Zea mays
  unsure at all n locations
  Clone ID: LIB3150-043-Q1-N1-B2
gtcaaaccctaagcagggagttgatttatccgctgcagccatgagtaagttgcagtctgagtctgtcaaggatgccatctcccagattgttggggatgccaaggagaagaataggaagttcactgagactgtggaacttcagattggtctgaagaattatgatccacagaaggacaagcgtttcagtggctctgttaagttgccccatatccctcgtcccaagatgaaggtgtgcatgcttggtgatgcccagcatgttgaggaggccgagaagatgggacttgactacatggatgttgaggctctcaaganaatgaacangaacaagaagcttgttaagaggcttgccaagaagtaccatgctttcttggcatcagaggccatcatcaagcagattccccgtct

SEQ ID NO: 9788 - DNA, 406 bp, Zea mays
  Clone ID: LIB3150-043-Q1-N1-B3
aattcagaagacaggcccagcgcacgaaacaggcactcgccggcgtacacgcggcatacctaaatccccgccgccgccgcgttttgtggggccgcaattcttcccgtcccaccgtccggtcgccgtgagcgcgtgatcctttcacaaccatgatggtcccgctcgatccctcggacaagcccacctcgcaacgttgcattgcggacggcgacaccgtcgtggtgtacgagcgccacgatgcgatgcgcgccgtcgcggttcgcgccggcggtgtgctccagaaccggttcggtgtctttcgccacgacgactggatcggccgccccttcgggtccaaggtattcggaacaggttgcggcggcggcggaggcaagggcggaggcaaggcaggcagtgggttcgtgca

SEQ ID NO: 9789 - DNA, 199 bp, Zea mays
  Clone ID: LIB3150-043-Q1-N1-B4
ggcttagacccggcagcacctgcggatggccgagcgcatcaggagccacaggacatactactcttgatctcactcatgctggcagtggagcgcgcacaggacacccccaagctcttcaactggtggagctaagctgatgatcccgcgagagatatcttgctgaacgactacatgcttgctaacgcaacgaatcacacaa

SEQ ID NO: 9790 - DNA, 407 bp, Zea mays
  unsure at all n locations
  Clone ID: LIB3150-043-Q1-N1-B5
cagggttcaagccacctgtgacaaactcgaagcccattcatgaccagaaatttactggaaaagtggtagaggttgtaagtggggattgcattattgtggctgatgattctgctccatatggcagtccttcagctgaacgtcgggttaatctgtcaagcattagggcccctaagttgggcaatgctcgtacagatgtgaagcctgaccattttgctcgtgaagctaaggagttcttgcgcatgaggttgattggcaagcaagtggctgttgaaatggaatactctcgaaggatcagcaccgtggatggacagagtgtngctccaacagcaaacattgctgatacaagagtattagattatggttcagtttttctgggttcaccatcacagactgatggagatgacata

SEQ ID NO: 9791 - DNA, 415 bp, Zea mays
  unsure at all n locations
  Clone ID: LIB3150-043-Q1-N1-B6
ctttcggaggaattatgctgatcctaacgaagtcgctgccgtcattttgggtggtggtaccgggactcagcttttccctctcacaagcacaagggccacccctgctgttcctattggaggatgttacaggcttattgatatccccatgagcaactgtttcaacagtggcataaacaagatatttgttatgactcagttcaactcagcttctcttaaccgtcacattcatcgtacctatcttggtggggggatcaacttcactgatggatctgttgaggtgctggctgcaacacaaatgcctgnggaagctgctggttggtccagggcacagcagacgcccgtagaaaatttatctgggtacttgaggattattacaagcataaagctatagaacacattgtgattttgtcaggag

SEQ ID NO: 9792 - DNA, 420 bp, Zea mays
  Clone ID: LIB3150-043-Q1-N1-B8
ccgccctaccccgggcacggcccagtgcgtcgggcggaagaagaccgccgtcgcggtcgcgtacacgaagccggggcgcggcctgatcaaggtgaacggcgtcccgattgagctgatccgaccggagatgctccgcctcaaggccttcgagcccatcctgctggcggggcggtcccggttcaaggacatcgacatgcggatccgcgtccgcggcggcgggaagacgtcgcagatctacgccatccgccaggccgtcgccaaggggctcgtcgcctactaccagaagtacgtcgacgaggccgccaagaaggagatcaaggacatctttacccgctacgatcgcaccctcctcgtcgctgacccccggcgctgcgagccgaagaagttcggcggacgtggtgcccgcgccaggttccagaa

SEQ ID NO: 9793 - DNA, 325 bp, Zea mays
  Clone ID: LIB3150-043-Q1-N1-B9
gttgacgccttgggagcgggtccggagctcgacgcggccggaagatacgagaagatcgggactagtcatgcgcatgcttcaacagcgaacacgcacatgaagtgggcggtacctgggacgggcgacatggctctcatgtaagccgcgagcaggaattgttcaaaaaggaccgcaagcatgtaggcaacttgaattaacagataaactgaagggaacacgcatactaaggccggacgcattgaagactgccaacaaatccgaattgccgtcaaacaacatgacgtagatttcatggataatgacgacactaaggacgaacaagatg

SEQ ID NO: 9794 - DNA, 319 bp, Zea mays
  Clone ID: LIB3150-043-Q1-N1-C10
ctaatctgcccttgccgccggcactgcgcgatccaggtgtgcagactgctcccttctcctctccgctccgaatggcccgcacgaagcagacggcgcgcaagtcgaccggcggcaaggcgccgcggaagcagctggccaccaatgcggcgcgcaagtcggccccggccacgggcggcgtgaagaagccgcaccgctttcgccccggcaccgtcgcgctccgcgagatccgcatgtaccagaagaacacggagctgcttatccgcaagctcccctcccagcgcctcgtccgcgagatcgcgcaggacttcaagacggacct

SEQ ID NO: 9795 - DNA, 89 bp, Zea mays
  unsure at all n locations
  Clone ID: LIB3150-043-Q1-N1-C11
gggcgcgcgctgccgacgcccggcgacgagcaccccaagaaccaccgcangaagcncngggccaccaacgaaggccgcgccaagagcaa

SEQ ID NO: 9796 - DNA, 420 bp, Zea mays
  Clone ID: LIB3150-043-Q1-N1-C12
ctcagctcccatatcctttcccctacctgtccagcatctaccgtctccgtcgtctcgtctccgctcctcacctcgccagccatgggcaagatcaagatcggaatcaacggtttccgaaggatcggcaggctcgtggccagggtcgccctgcagagcgaggatgtcgagctcgtcgccgtcaacgaccccttcatcaccacggattacatgacctacatgttcaagtacgacaccgtgcccgggccaatggaggcacagcgacatcaccctcaaggactccaagacgcttctcttcggcgagaagccggtcaccgtctttggcatcaggaaccccgaggagatcccgtggggtgaggctggtgctgagtatgtcgtggagtccaccggtgtcttcactgacaaggacaaggctgctgcaca

SEQ ID NO: 9797 - DNA, 422 bp, Zea mays
  Clone ID: LIB3150-043-Q1-N1-C3
ccgctgttaggttctaccaggagaccttcggcgtccctccggccacgcgagctcgccgaaatggtcgcccacaggttccatcagtaccaggtggtgggtcgcgcgctgccgaccccaaccgatgagcaccccaagatctaccgcatgaagctctgggccaccaacgaggttcgcgccaagtccaagttctggtacttcctgagaaagctcaagaaggtgaagaagagcaatggccagatgcttgccatcaacgagatctttgagcgcaacccgaccaccatcaagaactatggcatctggctgcgctaccagagcaggactggttaccacaacatgtacaaggagtaccgcgacaccaccctgaacggcgcagtggagcagatgtacaacgagatggcctcccgccaccgcgtgaggtcccc

SEQ ID NO: 9798 - DNA, 190 bp, Zea mays
  Clone ID: LIB3150-043-Q1-N1-C4
gtagactgtcacatgagctcctagccgagcgattgcatatagcacaacgaaggctattactgactcattgaacactattctcaatgggactgacagacacttctctgaacagaatactactattatgaattcagttcctgcaaaattggaccgtgaaagaaatgcactatttaataacgaactgacaagg

SEQ ID NO: 9799 - DNA, 414 bp, Zea mays
  unsure at all n locations
  Clone ID: LIB3150-043-Q1-N1-C5
caattctgaaatctgaaaacaaagcttgtccgctgccgaccgagcactccgttccatggcgtcgccttcctcgtgggactagcaagcctcgcctcgctggagaccatcaagaagcaagtggcaatcatgtatttgtggccgaaggcgctagaagtacctataatggacccctcaaaagcatcaaaaaagcctgttggaattctacttgtgaaggtcgtaagagcccaaaatttgcgaaagaaggatctgctgggtaaatcagacccatatgtgaaacttaaaatgtcagatgataaacttccatccaagaagactactgtaaagcgcagcaatctcaatccagagtgggatgaagaatttaagtttgttgtgactgatccaganagccagtctcttgaagttaatgtcttcgac

SEQ ID NO: 9800 - DNA, 414 bp, Zea mays
  unsure at all n locations
  Clone ID: LIB3150-043-Q1-N1-C6
taatcgcgcacgccccagttctgtccgggccgacatcctcgcccatcgagccgcgcacgccccatgtcgcgcttccccaccacgcccgccgcacacgccgcaaaccgtcgatggaaggtgagcggggcgtggccgcccctggcatggcgctatcaaaataggccctccgcgcacgcctcgctccatcaatggaaggctccatcaatggaagttttacagattgtcttgtcctactgcctactatctgccttgaggaagtaccaaggggtttccgttctgtcttcagtggtgcaaacaaaattggtgatggtggttttggttctgtcttcagtgacgcanataacgactttgtgctactatgctgaggtgcgagggttcaagattagtccatgtagttttagggagcagtgggaa

SEQ ID NO: 9801 - DNA, 412 bp, Zea mays
  Clone ID: LIB3150-043-Q1-N1-C7
attcctcccaacaccacctcgcctgcgatctccgtagcctccgtcgcgtcgagcatcgatcatgtcggcctactgcggaaagtacaaggatgagctcatcaagaatgctgcctacattggcacccctggcaagggtatccttgctgctgatgagtccactggcaccattggcaagcgcctttccagcatcaatgtcgagaacgttgaggagaaccgccgtgccctccgtgagctcctattctgctgccctggtgctctccagtacatcagcggtgtgatcctcttcgaggagaccctgtaccagaagaccaaggatggcaagccttttgttgatgtcctcaaggagggaggcgtcctccctggcatcaaggttgacaagggcaccattgagggttgtggcactgataaggag

SEQ ID NO: 9802 - DNA, 254 bp, Zea mays
  Clone ID: LIB3150-043-Q1-N1-C8
tttcttttgtatctctacttgaataagggggttcatggtgattttacgggagacaatctcttgttttccagctcttcttgtgggaaaagtcggaatgccttcgttaagcatattattgacgatgaacaggatatgctgacaagacacttctggactcatggttatactgtcatatagatgctgtcgctgttcaagctaccagtgagtgagtatatgatacatcggcagatggcgctacactatatagtatggtc

SEQ ID NO: 9803 - DNA, 421 bp, Zea mays
  Clone ID: LIB3150-043-Q1-N1-C9
gtggaagagccggaaccctggcccagcgccgcagaggcgcagagacaggcgtcttcgtactcgcctatctccgcgactcaaagcttcttccatttcctaccgccgccgctgcagctccaccccattccgtcgacaccatgagggagtgcatctcgatccacatcggccaagccggtatccaggtcggaaacgcgtgctgggagctttactgcctctagcatggcattcaagctgatgggcagaatgcccggggacaagaccattgggggtggtgatgatgctttcaacaccttcttcagtgagactggtgctgggaagcacgtccctcgtgctgtttttgttgaccttgaaccaactgtcatcgatgaggtgaggactggcacctaccgccagctcttccaccctgagcagcttatcagtg

SEQ ID NO: 9804 - DNA, 420 bp, Zea mays
  unsure at all n locations
  Clone ID: LIB3150-043-Q1-N1-D1
gcgacctttcccgtccctcgcagcaccgatgctgccgtccacctgttaataaatcgcctgagtttagtcgaaacacaatcgttaaaatgcagtaaagtaattcacgacccccgggcgcccccgtctccgctcctttattaatatcgccgcggcctcgcacctccatctgttctatatcgccccattgctcgctcgccaagagttcttcttgttaggcaaggcaaaagcagaagcaaaaaaagaaaggtcttgttgccgatggngagctcanggttctcgtggacgcttccggaccaccccaagctccccaaggggaaaccggtggctgtcgtcgtgctggacggatggngcgaggccaaccccgaccagtacaactgcatccatgtcgctcagactcctgtcatggactcgctaaagaat

SEQ ID NO: 9805 - DNA, 435 bp, Zea mays
  Clone ID: LIB3150-043-Q1-N1-D10
tacgaggtcatggtcccgttccaagcgctgcaagcgtatggggtgtccgtggacgccgtctgccctagcaagaaggccggcgacatctgccgcaccgccgtccatcagctgaccggtcaccagacatactctgagacaaaaggccataatttcacactgaatgcttcatttgatgagattactgctagtgaatatgatggattggtaattcctggagggcgtgcaccaaaataacttggcgatggatgaaaaggtgcttgacctagtcagaatgttctctggtgctaagaagcctattgcatcagtttgtcatggacagttgattttagcggcagcaagagtagtcgagaaccgtacctgcacagcatttccggctgttaaaccagttttggttgctgctggtgccaagtgggaagagcctgacacaatggcaaa

SEQ ID NO: 9806 - DNA, 413 bp, Zea mays
  Clone ID: LIB3150-043-Q1-N1-D2
gtgaggagtctgtcatgaagagaacaacactggtggctaacacatcaaacatgcctgtcgctgctcgtgaagcttccatttacacaggaattacaattgctgagtatttccgtgatatgggctacaacgtcagtatgatggctgactccacctcccggtgggctgaggcattgcgtgagatctcagggcgtttggctgaaatgcctgctgatagtggttacccagcttacttggctgcacgtttggcatccttttatgaacgtgctcgtaaggtaaaatgtctgggaagtccagacaggaatggcagtgtcacaattgttggagccgtctctcctcctggtggtgatttttcagaccctgttacctccgcaaccctcagtattgttcaggtcttctggggttagataaaaagc

SEQ ID NO: 9807 - DNA, 414 bp, Zea mays
  Clone ID: LIB3150-043-Q1-N1-D3
gtgcacaccatatgctctgtgtggcctgtttgggtacgtggagttcgtctccgacatggttcgatcaccgaaacgacgccgaactcgctgtttgatcagcgtaggctggggttttagggttacaagggctaatatttgtttgagagtcacaagacacgacctatctccttccaattgtggtttgtggagatttgtggatggttgcgggtatttttttttcctttacgctcttgtaattttgtcctgagactggtgtacatgtgtctacatgatgtgtaattgtacatgaagaccatggtccgtccagaagcgtatgccgtcgtctttttgttcattcatgtaggaggggcatgctcatctgtgctttcagagtttcccatatatgttgattaatataacaattgatgtcattct

SEQ ID NO: 9808 - DNA, 417 bp, Zea mays
  Clone ID: LIB3150-043-Q1-N1-D5
gtttgattttgtaggttactggagtgtgtagccatcggaccacgtttttcaaacttgatctcacaaactcttctggtcctcctcaagagggttcctcctaagggaaaaaacttgcttgtcgttggaacaacaagcgaggttggcttcctagaatctgttggaatgtgtgacgtgttctctgtgacctaccatgttcccaaactgaaaaaggaggatgccaaaaaggtattgcatcatcttgatgtgttcgatgacggagatcttgacgcagcagcagaagcactggacgatatgccaatcaagaagttgtacacacttgttgagatggctgctcaggggccaaccggaggaagtgctgaagcgatttatgccggagaggagaagatagatatcaaccatttctttagcatcttgagt

SEQ ID NO: 9809 - DNA, 406 bp, Zea mays
  Clone ID: LIB3150-043-Q1-N1-D6
ctcaccagcttgccaaatctctaacccgaggtgcagcggcggagatggcccccaagcgctcggctccacctccgccgcctccgcccccggctgcctcctccgaggagaccgcctctggttcgggctccgaggaggaggaggaggaggaggaggaggaggatgatttggagaccgcccactcaccgcctcccgtcgctcccaagagcgttgctccgctgccgcagaaggtccaggaacccgaaacgtccgacgaggatgagtatgacgatgaagatgacgagccgcagaaggtccaggaacccgaagcgtccgatgaggatgaagactactaataggaggatatcgaagaggacgagaaggccaaccacgtggtcccttcttccgccaccaagaacccgcctccgcc

SEQ ID NO: 9810 - DNA, 228 bp, Zea mays
  Clone ID: LIB3150-043-Q1-N1-D8
gtgatgtgcactacctaagggagatgcggatctcgcacttagtggtgaaggagcctatggtgatcggacactagtgcgcgggcttggtcgaggaggtgggcgccggcgtgactcatctgttcgatggcgaccgcttggcgctggagccgggcgtcagctgctggcgctgccgccactgtcagggcgggcggtacaacctgtgcgaggacatgatattcttctccaccc

SEQ ID NO: 9811 - DNA, 375 bp, Zea mays
  Clone ID: LIB3150-043-Q1-N1-D9
acagacagcgcgcgcttcaaggcctttgttttttgagataacaaggaggagaggaggagatggcggtcacgatcacgtgggtgaaggcgaggcagatcttcgacagccgcggcaaccccaccgtcgaggtggacgtgggccttatcgacggcagctacgcgaggggggccgtacccagcggcgcatccactggaatatatgaggccttggagttgagggatggaggatctgatttattttgcaagggggttcttaaggctgtcagcaatgtaaataacattattggaccagcaattgttggaaaggaccccactgagcaggttgagattgacaacttcatggtccaacagcttgatggaacctccaatgagtggg

SEQ ID NO: 9812 - DNA, 414 bp, Zea mays
  unsure at all n locations
  Clone ID: LIB3150-043-Q1-N1-E1
ctctactaccaccacacctgcgcctccacagtccacactcaccgctgcgttcttccgctcgccccctcacaacgaaacctagagagtcccgcgcgtgacatggcggacggcgcgagctcggcgtctggtctggtggagaagctcgcggagctctcaacgggcggcgccgggcagaatcctccgccggcgggtgaagtcggagaggagttgcagctctcgaagaacgcgaagaagagagaggagaagaggaagaagctggaagaggagcggaggctcaaggaggaagagaagaagaacaaggcggcggctgctgctgctagtggaaagcctcanaaggcatctgctgctgacgatgatggcatggatcccactcaatactacgagaataggctcaagactcttgattcactcaag

SEQ ID NO: 9813 - DNA, 392 bp, Zea mays
  unsure at all n locations
  Clone ID: LIB3150-043-Q1-N1-E11
ccgagatccgcgtcacagaggagagagagatcgccatggtggcggcgctgggacccggccggttctacggcagcggcctgccgaggccacgcttcttcccgggcgaccgcgtggacccgccggcgtccgtcaccgacccgctcctcgactgggcgcgcgaggcgcactggtccatgggcggcttcggcgtgaagcgcctccgcctgcagggccgcattgagggcttcattgaacaggttcggccgccgcacgcgccgtgacgccagggccaagaccaaggcccgctctgctggccacgtgcccgcctcgctgtccccgctcggctccnaggaccaagcggaagaggtggcggcgccggagcgggcgctcgtcgacgacgacgtggactcgga

SEQ ID NO: 9814 - DNA, 332 bp, Zea mays
  Clone ID: LIB3150-043-Q1-N1-E12
ttcgatgcggatcgccttcggttcctggggccggctcctcgagaggaggcactgctcattctcttaattgctacaggtgggaagaatgtgttgtaacaacatcctaggcagatcatagattttgctgcaaacgttcttcgacgggcatacatctgttgtccactttgcttcacagatcctctggtgattttttgcggggcgcacctctaccggagtagaacacgtttttttttaacgtttcttaattttactaaaaggggcttgcccttctttttatgacagttgcctaaactgatttttttggaacaggtaatctttctggtctttcccac

SEQ ID NO: 9815 - DNA, 413 bp, Zea mays
  Clone ID: LIB3150-043-Q1-N1-E4
ctgactccttcgaggtactcccatcgctatcgaccgggtcctcgagcgcgggagatggcggatcaggagaccccagttgcagttgaggcccctaccccggtccttggggagccgatggacctgatgactgctctgcagcttgtcatgaagaagtcgggtgctcatgatggccttgttaagggtcttcgtgaggctgccaaagccattgagaagcatgctgctcagctttgcgtgcttgcggaggactgtgaccagcctgattatgtcaagctggtgaaggctctttgctctgagcacaacgttcacctggttactgtgcctagcgctaaaactcttggcgaatggtctgggctttgcaagattgattctgagggcaaggcgaggaaggttgtgggttgctcctgtgttgtcgt

SEQ ID NO: 9816 - DNA, 363 bp, Zea mays
  Clone ID: LIB3150-043-Q1-N1-E5
ataccattagctttatatactccagagcggagaaaaacccgatcgacgccatgagggtgttgctcgttgacctagatctactggctctcgctgcgagcgccacctccacacatacaagcggcggatgcagctgacaaccaccgacgtcggttcatgtaccgtcgacggtgcatttgccacctacgggtcacctgccacctccagagcatcttccaccgcccttccacctgccgacgtcagtgcacctaacgccgtcggtccatgtgccgtcaccggttcatttgacgacgccaccatgacactaccctactcaaccgtcccggcctcagtctcatccatagacacacccatgcccgtgccaac

SEQ ID NO: 9817 - DNA, 407 bp, Zea mays
  Clone ID: LIB3150-043-Q1-N1-E6
tattctcacttgcttccaaatgacgacgaggcgtttgagcattttgattctttcatttcaagaagaattgatgaggctaataaaattggcaaaatcaaccttgctgctactgggaaggaccttatggatgacgagaaacaagaaattactattgatatgtataccgcattggagatggaaaacgatatagttggggagcgagcccctgagatggaaaagaaccagaaacttgggctacttcttggttttctctctgtgcatgactggtatcatgcacaactactatttgagcgtcttgggcacctaaatcctgttgagcacattgaaatctgtgatggattatttagaatgattgaaaagacaatgtcttccgcatatcatatagtttgtcacctgtattattacct

SEQ ID NO: 9818 - DNA, 266 bp, Zea mays
  Clone ID: LIB3150-043-Q1-N1-E7
ttttgggccgcgatgactcctgcggttggggtggtgaatcctcgcgcgcccggtcctggcgcagaggtggtggaggacgaggaggaggcggcggtcgcgtggcgtgagctgcgcggcaaggccgtggatgtcgcggctgcggacgatgaaagggctgtcctggcccgatcgcatcaaggccgccctcctagtaaggagggaggcgcttcggctggcggaggagctggaccagttgacactgatggtggatctccatcaagctcatt

SEQ ID NO: 9819 - DNA, 406 bp, Zea mays
  unsure at all n locations
  Clone ID: LIB3150-043-Q1-N1-E8
gctttacccgcaagcctattcgccgcacggggtcaggtgaccgggaggatgaggccgttgagccaaaccgacttctcgccgtcgcagttcaccttctcccagaatgccgccgccgactccaccacgccttccaagatgcgcggcgcgtccagcaccatgccgctcaccgtgaagcaggtcgtcgacgcgcagcagtctggcacgggcgacaagggcgctccgttcatcgtcaatggcgtcgagatggctaacattcgacttgtggngatggtcaatgccaaagtggagcggacgaccgatgtgaccttcacgctcgacgatggcaccggccgcctcgatttcatcagatgggtgaatgatgctttagattctattgaaactgctgctattcacaatggtatgtaca

SEQ ID NO: 9820 - DNA, 430 bp, Zea mays
  Clone ID: LIB3150-043-Q1-N1-E9
tgcagcacaggggatgccatggggatgaacatggtctccaaaggtgtacagaacgtgctggactacctccaggctgacttccctgatatggatgtcatcagcatatcaggtaacttctgttctgacaagaagtcagctgctgtgaactggatcgatggccgtgggaagtcggtggtttgcgaggcggtaatcaaggaagaagttgtgaaaaaggttctcaagacaaacgtacaaggctctcgaaaaattgaacgtgatcaagaaccttgccggttcagctgttgctggagctcttgggggtttcaatgcccatgcaagtaacattgtggcagccatcttcattgctactggtcaggaccctgcacagaacgtggagagttcccagtgcatcaccatgttggaagctataaatgatggcaaagatcttcac

SEQ ID NO: 9821 - DNA, 384 bp, Zea mays
  Clone ID: LIB3150-043-Q1-N1-F1
gtacacggtctccctcttcctgtcagtagtggagtgagagtgaggcagcgagtgggagacaaggggaaatggggaagggagcgcaagggagcgatgcggcggcggcgggcggcgaggtggaggagaacatggcggcgtggctggttgccaagaacaccctcaagatcatgcccttcaagctcccgcccgtcggcccttatgatgtccgcgtgcgcatgaaggcagtggggatttgcggcagcgatgtgcactacctaagggagatgcgcatcgcgcacttcgtggtgaaggagccgatggtgatccggcacgagtgcgcgggcgtgttttaggaggtgggcgccggcgtgactcacctgttcgtgggcgaccgcttggcgctgg

SEQ ID NO: 9822 - DNA, 434 bp, Zea mays
  Clone ID: LIB3150-043-Q1-N1-F10
gccagtgcgccgcccaccccggtcgcggtcatcgcagacaattggggcgggtgctttgacgacggcgagcagtaccgcactaggccatccgtcgtcgtcgacaactggggcggattcttctatggcgaggacgtcgctccgtcagacaaccccacgagattcgtcctccccgttgcctccaccgacgagcccagcatcgacaccgcgccggcccgcgccaactctggagcccgggattactccgtgtttgtgaccgccgaatcctccggctacgaggaaccctccggctacgacgagatggatgctcgactcgacctgcgcttcgccaggctgcagcagctgcaagctgaggaggtggacgagccgtaccgtgacgcggtgagcccactgcctcctctacccgtcgtctacgagccgtaccgcgaggcaagcca

SEQ ID NO: 9823 - DNA, 409 bp, Zea mays
  unsure at all n locations
  Clone ID: LIB3150-043-Q1-N1-F12
cgccgccaggagagccggctcggtcggttcgtcgaagatcccggatctgctctgtcacgaggtctttcggcgggtgttgtctcgcgaggtgtagcgagccaagttcaggagagtttcgagaagctgaaatggctcctaaagctgctcctgccaagaagggtgatgccaagacccaggccttgaaggttgccaaggctgtgaagtctgggtcagtaaaaaagaccaagaagatccgcacgtncgtgacatttcaccgncccaagaccctgaagaagctagggaccccaagtacccaagaatcagcactaccggaaggaacaagcttgatcagtaccaaattctcaagtatcccctcaccacagaatcggcgatgaagaggatngaagataacaacactctggtcttcatt

SEQ ID NO: 9824 - DNA, 406 bp, Zea mays
  Clone ID: LIB3150-043-Q1-N1-F2
ccccaccaacagcaagcgaaaatctcccgatcccctctagtctccgcggcgaagatgtcggggcgcggcaagggcgggaagggcctgggcaagggcggagcgaagcgccaccggaaggtgctccgcgacaacatccaggggatcacgaagccggcgatccggcggctggcgcgcaggggcggcgtgaagcgcatctccgggctcatctacgaggagacccgcggcgtcctcaagatcttcctggagaacgtgatccgcgacgccgtcacctacaccgagcacgcgcgccgcaagaccgtcacagccatggacgtcgtctacgcactcaagcgccagggccgcaccctctacggcttcggcggctaggctaggccggtcgcgcctcgttgtcgtcgctgcggttcta

SEQ ID NO: 9825 - DNA, 420 bp, Zea mays
  unsure at all n locations
  Clone ID: LIB3150-043-Q1-N1-F3
gtcacttccccggcccctcccgctcctgctcgccggaggccgggccggcggcgatggggcacggcgctagctgcggccgaccaagcgaggaggtagacttcttcggcgcggcgcagtccggggacatggcccgcctcgccgccgctcttcgctcccgccccaccttgctcagccgcaccacgctcttcgaccgcctctccgcgctccacatcgccgccgcacacggccacctncaggtggtctccctggcattggatctttgcgtgcaccccgacgtcgttaaccgccacaagcagacggcgttgatgctctcggcgatgcacgggaagaccgactgcgtccgccggctgctcgacgccggcgccaatatcgtgatgttcgattcctcgcacgggcggacgtgcctgcactacgcggcgt

SEQ ID NO: 9826 - DNA, 370 bp, Zea mays
  unsure at all n locations
  Clone ID: LIB3150-043-Q1-N1-F4
cgcttatttggtatgattaatgaattgcaaactgtttttgaagttgtctccggtgcgagacaacaacaatctaaagagaggtccagtatggacaatggtggtagagccaagcctgtaaagatagaaaataatggaaaagtcacagacgaagcatacgaagatgacagtgatcacggtgaaaccctatgtggaacctgtggtgggatatacaacgcggatgagttttggatcgggtgtgacatgtgcgagcgatggtaccatggcaagtgtgtcaagataaactcctgcanggcagagagcataaagcattacaaatgcccgagctgcagcttcaagagggcgaggcagtagcaaaacccatgaacgcagg

SEQ ID NO: 9827 - DNA, 408 bp, Zea mays
  unsure at all n locations
  Clone ID: LIB3150-043-Q1-N1-F6
cgcgtctctttcctattcgcgccgccggcgctgccgctgctgcaagcgccagctcgccgtcgtccgaatagtacactctaacgccgccatggggcgtatgcacagccgcgggaagggtatctcgtcgtcggcgctgccgtacaagaggacgcctcctacctggctcaagaccgccgcctccgacgtggaggagatgatcacaaaggcagcgaagaagggacagatgccgtcgcagatcggcgtcctgctccgtgaccagcacggtantccccttgtcaagagtgtcaccggcagcaaaatcctccgcatcctcaaggcccatgggctggcacccgaaatcccgaggacctgtacttcctcatcaagaggcggtggcgataggaagcaccttgagaggaacaggaagac

SEQ ID NO: 9828 - DNA, 332 bp, Zea mays
  unsure at all n locations
  Clone ID: LIB3150-043-Q1-N1-F7
cgtttgctgccattattaaccgagccgagccgagagaggtcaagcaacggacccccattcgcatccgcctccttttccttggagccgaagaagagggaaaggaagggaggacagccgccgccgccgccatcaccaccgtcaggatgcattccacgaacctcctgctcgaggagcccatccggatggcctccatcctcgagccctccaagcccagctacttcccggcgatgaccaagatcgtcggcactctcggccccaagtcgcgctccgtcgacacgatctccgcctgcctcaaggccggcatgtnccgtcgcccggttcgatttctcgtg

SEQ ID NO: 9829 - DNA, 368 bp, Zea mays
  unsure at all n locations
  Clone ID: LIB3150-043-Q1-N1-G1
gccggcgcctccatttcgttttcctcactctctcctccagctcagggtccggcggcgaagggaaggcaagatgtacaccgcgaggaagaagatccagaaggagaagggtcttgagccctccgagttcgaggactccgttgcccaggctttctttgatctggagaacgggaaccaggagctcaagagcgacctcaaggacctgtacatcaacaatgctatccagatggatgttacccggaagtaggaggctgttgtcattcacggtccataccggctgcgcaaggccttcangaagatccatgtcagactcgtcagggagctggagaagaaattcagcggcaaggatgtggtaattgttgctacacgga

SEQ ID NO: 9830 - DNA, 280 bp, Zea mays
  Clone ID: LIB3150-043-Q1-N1-G10
tatgggaagtggaccaccactggccacctgatctacaagcttggaggtattgacaagcgagtgattgagaagttcgagaaaaaagcttgccaaaatgaacaagcggtcataaaattatgaggggtgggttcacaatttaagcgttaaccgtaataaaggttttaaaattgattttgccctgtggaagtttgagaccaccaagtactactgcactgttattgatgccccgggacaccaacaacactctggtaatatgatcactggcacttcccaagctgac

SEQ ID NO: 9831 - DNA, 427 bp, Zea mays
  Clone ID: LIB3150-043-Q1-N1-G11
ctcgccacgaacaaacgtgacgcatctggagctccgagcctccgatggactcttcctctccatccccatcgccagcgcccagtggatcccgtgccgcctccaatgccacccagcggtggagcatccttcgccgcgcgctgcttgctcgttcctcctccgcgcgcgccctagggggaatttctagtgaccaccagattaaagatggtaccaataacatttcaagaaaggcttcacgtggttttaaaccggaccgaatgccactccttgccaatttcacagctactgaaatcacttgggaattcattaaacgaaaatgattttgaatgccagaaggatgtttatgtatgttataagctgccttgtagaggttcctctaaacttgatctggtatgtagaaaagaggattcccttgaactaaatgacattg

SEQ ID NO: 9832 - DNA, 443 bp, Zea mays
  unsure at all n locations
  Clone ID: LIB3150-043-Q1-N1-G12
ttgaaagcccataatgcctgggcgcactgaggtggaacagttgcacaagattttcaagctatgtggttccccttctgaggagtactggaagaagtctaaattgccacacgcaacaatattcaaacctcaacaaccctataaacgttgcatcagggagacatttaaagattttcctacatcggctctgccattggttgaaactctgcttgcaattgatccaactgagcgacaaaactggctcagcttgcataacacagtgatgtatgttcctatcctatctcttctgttttgttagaaagaattttttaggtgcataatcagaaatgttattatgaagcaaagtatggtgctgcaggaaaacgatttangtgtggaaaaaaagtatttgcttaaaaatgttaataactagatatggagcagaactccgttggctaggtgaacat

SEQ ID NO: 9833 - DNA, 407 bp, Zea mays
  unsure at all n locations
  Clone ID: LIB3150-043-Q1-N1-G2
caggcccttatcttcgtgacgcggtcgcgcagctggtcgtttgtggagcgtcctgggttcttgctggtctttgctttcttggtggctcagctgatcgccactctgatcgctgtatatgccaactgggcgttcgctgcgatcaagggcattggatggggctgggccggtgtcatctggctctacaacatcgtcttctacttcccgctggacatcatcaagttcctcatccgctatgctctgagtgggagggcatggaacctcgtccttgagcagaggatcgcgttcacgagcaagaagaatttcggcacggaagaaagggagcgcangtgggcgcatgcccagaggactctttacgggctccagccgccagaggcatccatcttcgagaacaagacgacattcaatga

SEQ ID NO: 9834 - DNA, 418 bp, Zea mays
  Clone ID: LIB3150-043-Q1-N1-G3
gagagttttcatctctgacgaatttgatgatcttcttcccaagtacctgagctttttgaagggtattgttgactcagacacgctgcccctgaacgtgtcacgagaaatgcttcaacaacatagcagtctcaagaccatcaagaagaagctgatccgcaaagcccttgacatgatcaggaaacttgctgaagaagaccctgatgagtacagcaacaaggataagacagatgaagagaaaagcgagatggaggagaagaagggccagtacgccaagttctggaatgagtttggcaagtcaatcaagctgggtatcatcgaagacgcgactaacagaaaccgccttgcgaagcttcttagatttgagagtaccaagtcggatggcaaacttgcctcccttgacgagtacatctcacggatg

SEQ ID NO: 9835 - DNA, 410 bp, Zea mays
  Clone ID: LIB3150-043-Q1-N1-G4
actggtcttactactgaggttaagtccggtgagatgcaccatgaggctctccaggaggcccttcccggtgacaatgttggcttcaacgtgaagaatgttgctgtgaaggatctgaagcgtgggtatgtggcctccaactccaaggatgaccctgccaaggaggctgctagcttcacctcccaggtcatcatcatgaaccaccctggccagattggcaatggctatgccccagttctggactgccacacctcacacattgctgtcaagttgctgagctcgttaccaagattgataggcgatccggcaaggagctggagaaagagcccaaatttctcaagaacggtgatgctggtatggtgaagatggttcccactaagcccatggtggtggagaccttttctcagtatcct

SEQ ID NO: 9836 - DNA, 414 bp, Zea mays
  Clone ID: LIB3150-043-Q1-N1-G5
cccacccacccactcgcttcagccgccggcgccgcgcgtaccaagcaggtggagacaggatgccggctggccacggcctgcgctcgcggacgcgcgacctcttcgcgcgccccttccgcaagaagggctacatcccgctcaccacctacctccgcacctacaagatcggcgattacgtcgatgtcaaggtgaacggcgccgtccacaaggggatgccgcacaagttctaccacggccgcaccggtcgcgtctggaacgtcaccaagcgcgccatcggcgtcgaggtcaacaagcaggtcaatgggcgcatcatcaggaagcgtatccatgtccgtgtggagcatgtgcagccgtcccgctgcacagaagagttccgcctgaggaaggcgaagaatgaccagctgaaggcggatg

SEQ ID NO: 9837 - DNA, 414 bp, Zea mays
  Clone ID: LIB3150-043-Q1-N1-G6
cttgcctccgatccccaattcctccttcggatctcgcattcagcgcagcgcaggtgtgaaggaagggggacgcggaggaagatggggctcgcgttcgggaagctcttcagccggctcttcgccaagaaggagatgcggatcctcatggtcggcctcgacgccgccggtaaaaccaccatcctctacaagctcaagctcggcgagatcgtcaccaccatccccaccatcggtttcaatgttgaaactgttgagtacaagaacattagcttcactgtctgggatgtcgggggtcaggacaagatcagacctctttggaggcattacttccagaacacccagggtcttatttttgttgtggacagcaatgaccgtgaccgtgttgttgaagccagagatgagctccacaggatgctg

SEQ ID NO: 9838 - DNA, 321 bp, Zea mays
  Clone ID: LIB3150-043-Q1-N1-G7
gtgctgggaagcacgtcccccgtgcgtgggttgttgaccttgagcccactgtcatcgatgaggtgaggactggcacctatcgccagctcttccatcctgagcagctcatcagtggcaaggaggatgcagccaacaacttcgctcgtggtcactacaccattggcaaggagattgttgacctgtgccttgaccgcatcaggaagcttgcagataattgcactggtctccagggcttcctcgtcttcaacgctgttggtggaggaaacggctctgggcttggttctctcctcctggagcgcctgtctgttgactatggcaaga

SEQ ID NO: 9839 - DNA, 398 bp, Zea mays
  unsure at all n locations
  Clone ID: LIB3150-043-Q1-N1-G8
cagacattccagaggcaatcttaccaggaccctttaacttgaggtcaaggggccagttaaatcttgaggcatcacataatggacatgctgctgagccacatctgcaaggcaccactaaggatggattctcaaatgcttcccacttcccacaatcttttcgaaagctaatgtcccagaaagtcattactgatggagctgaaagaactcaattgctacttgatccaacaaaactgagctctgtgagtgcttatgatacagaaggaacanacagaagccctaaaaagcaagacaaacatgcttcagttacagtgaactctgaaatttctgctactccaagccgtcatttgatctctcgttgtcaagagggtacgccaaaacaagagacctcagaatcacca

SEQ ID NO: 9840 - DNA, 438 bp, Zea mays
  Clone ID: LIB3150-043-Q1-N1-G9
cggcgtcttcacaaacgccggcgcaaactctcgcccgagcccgacagatcttcaattccccattccgcccaccgatcgaccttcacgccagtctcggtctcttccgaaggcgtcgcgcgcggttgtttgagaggagaggaggaagatgagggagtgcatctccgtccacatcgggcaggccggcatccaagtcggcaacgcgtgctgggaactttactgcctcgagcacggcatccaagcctgatggccaagtgcctggagataagaccgcgggacatcacgatgatgccttcagcaccttcttcagccagactggtgctgggaagcacgttccccgtgcaatcttcgttgatctagaacccactgtgatcgatgaggtgcgcactggcacgtaccgccagctcttccaccctgagcagctcatcagtggcaaggagg

SEQ ID NO: 9841 - DNA, 422 bp, Zea mays
  unsure at all n locations
  Clone ID: LIB3150-043-Q1-N1-H1
cgacataatgatttcttgccttggggacaaggaggggaatgcagctggcaatggcttcctgctgttggattcagagtttaatgtcaaaggacgttgggaaaagccaggtcacagtcccttgtttggatatgacttctggtaccagcctcgccacaaaacgatgatcagttcgtcatggggagcccctgcagcgtttaggacaggtttcgatcttcaacatgtccaggatggcctgtatggaaggcacctgcatgtgtacgactggcctggcggtgagctcaagcagacacttgatctangtgacactggactccttccccttgaggtgaggtttttacatgatccatcaaaggacactggctatgttggctgtgctttaacaagcaacatggtgagatttttcaagaccgcggatggatcgt

SEQ ID NO: 9842 - DNA, 217 bp, Zea mays
  Clone ID: LIB3150-043-Q1-N1-H11
gtgctgtgttgtcgtccccctcgtaccgaggactgttcgggttgagggtacttacggttatgacgaggggcgatagcagtcgctgatgtagagtaccgatgaatctgcagagaggcgttgcctgtgccaccagcaacgagtcggttgagaatgccttgaactactacagggagaacctcaactccaagggcatcaccgaccgtgagacggcgaagta

SEQ ID NO: 9843 - DNA, 431 bp, Zea mays
  Clone ID: LIB3150-043-Q1-N1-H12
gtcaccgccgctagaagaagagctcggcgattcccaggtcccgcgagaagatgccgaagcagatccatgagattaaggacttcctcctcaccgcgaggaggaaggatgcccgctcagtgaagatcaagaggagcaaggatgttgtcaagttcaaggtgcgctgctccaagtacttgtacacgctctgcgtcttcgatgctgagaaggcaaacaagttgaagcaaatcttttccccaagatttgaccgtcgaggaggtctgattggatacatggcaacgtcgggttgaactaccaaagcttgtttatcagtagcagagtatgctactctatgtacttttggaacctaagctattagacctgtcagtgttggatgtgtggatcttgcatttttggagaaataccaatttacctcgttcaaggatgcacctttc

SEQ ID NO: 9844 - DNA, 418 bp, Zea mays
  Clone ID: LIB3150-043-Q1-N1-H2
ctctccttcccggtctcctccgcccgttgccttcgtcccctccatctgcggctgcgacgccggcgagcccgacaccgcgaatcggatccgccgacaaggcgagagggaagagatggggctcacgttcaccaagctgttcagccggctgttcgccaagaaggagatgcggatcctgatggtgggactcgacgccgccggaaagaccaccatcctctacaagctgaagctcggcgagatcgtcaccaccatcctcaccatcggattcaatgttgaaactgtggagtacaagaacatcagcttcactgtctgggatgtcgggggccaggacaagatcaggccactgtggaggcattacttccagaacacccagggtctcatctttgttgtggacagcaatgatagggaccgtgttgttgaa

SEQ ID NO: 9845 - DNA, 415 bp, Zea mays
  unsure at all n locations
  Clone ID: LIB3150-043-Q1-N1-H3
gaagatgtcgagggggttggtaaggtgctcgacaaggccaatccacacgagaagcttgtgacttggcatgggcatgcttcggcagcgagcttgttcatgaaatctgggatgcaggtgggggctgtcatggctctcgtggaagccgagaggcggatatctccaaagagcagtagaatcgcatacgctttcttactcaagacatatactgaactggggatgcatgctgaggccggacgcatttggagtgtctacaaatccaaagtgccgtcgtgcaacacgatgtacatgtcgaggctaagcgcgttactcangacgaacgacattgatggggcggaagcgacactgaaagagtgggaaacggtgcctcttcgctatcatgatttcagattaatcaacgtaatggtcgatgcctact

SEQ ID NO: 9846 - DNA, 294 bp, Zea mays
  Clone ID: LIB3150-043-Q1-N1-H4
cacaaggtagatggcgaggcaacggcaaactggcggtctgctgcttcttggctgcagcaagtgctagcgctaaaagcctgcttcccagaagctttacactcagtcatggagcagtacatactagaacccgaatcaggtagagaagctacctctctgaactgaagcgtgcatttcttgcattgtgtgcctgactgcctgtccaggaccggaggtgctctctgatctgtagccaacaaagcaacaacctcgcgccgtcgcaagcagcatgaccaggccttgggcggggatgggaat

SEQ ID NO: 9847 - DNA, 415 bp, Zea mays
  unsure at all n locations
  Clone ID: LIB3150-043-Q1-N1-H5
gtccaggcaaggaagaaatcgagcagccaaggagaggagaagatggctcgtacgaagcagaccgcccgcaagtccaccggaggcaaggccccgcgcaagcagctcgccaccaaggcggcgaggaagtcggcgccgacgaccggcggcgtgaagaagccccacaggtacaggcccggcaccgtggcgctgcgcgagatccgcaagtaccagaagagcacggagctgctcatccggaagttgcccttccagcgcctggtccgtgagatcgctcangacttcaagacggatctgcggttccagagccacgccgtcctggccctccaggaagccgccgaggcctacctcgtcggtctgttcgaggacaccaacctctgcgccatccacgccaagcgcgtcaccatcatgcccaaagaca

SEQ ID NO: 9848 - DNA, 401 bp, Zea mays
  Clone ID: LIB3150-043-Q1-N1-H7
ccgccgccgacgcagcagcaggagacgcgccaaggagagcccgcaaggaggcgactatgagggccaagtggaagaagaagcgcatgaggaggctgaagaggaagcgccgaaagatgaggcagagatccaagtaggctgatggggattgtggatggtggtgtcggcatagttgtgttacgtttcttcgatgcgtgagttcatggagagatgtcacatcctagttcgtcgtcaccgtttgccatgggtccaatggctcgtcttggaacctgcacttcagtaggccatctatcgtggtttctagctatatccagagttttgtgctaagacaaatcagtcagtcgttttgtgaacctattatgatggagctttatttgctgctaatatcgacctacctattaagt

SEQ ID NO: 9849 - DNA, 176 bp, Zea mays
  Clone ID: LIB3150-043-Q1-N1-H9
ctactcctcacgaactagtccgtttccgtgcgctgctgctgacgagggagtgggagggatcatggtggcgccggacgtgaaggcggagacgatgaagctgatggatcagcggggtgccctagaggcggagatggacgccatcatcgcccgcctcactgcggcaggcggaccgggca

SEQ ID NO: 9850 - DNA, 350 bp, Zea mays
  Clone ID: LIB3150-044-Q1-N1-A1
tgcctcgcgctcaagatgctgcagatccaaccagacaaggacatcgtagtcgagttcatcaagaacgaggattacaagtatgttcgtgttctcggggccttctacctgcgcctcactggcacaattgctgacgtctaccagtatcttgagccgctctacaacgactaccgcaagatcagacacaagctcagcgatggacagttcacacttacccatgttgatgagttcattgatgagttgttgaccaaagattactcctgtgatacagccatgcctcgcatccagaaaagatgggttcttgaagcgtctggaactctagaaccgagaagaagtgcacttgatgacgattt

SEQ ID NO: 9851 - DNA, 318 bp, Zea mays
  Clone ID: LIB3150-044-Q1-N1-A10
tcggctgcatttatttgtcactgatcgttgagcagcctatctagctagcgctgttttcctgtgtgctaatggcgcccgttcaatgtgcgcgttcgcagagggtgttccacttcggcaagggcaagagcgagggcaacaagaccatgaaggaactgctgggcggcaagggcgcgaacctggcggagatggcgagcatcgggctgtcggtgccgccagggttcacggtgtcgacggaggcgtgccatcagtaccaggacgccgggtgcgcccctcccgcggggctctgtgccgagatcgtcgacgggctgcagtgggtgg

SEQ ID NO: 9852 - DNA, 413 bp, Zea mays
  unsure at all n locations
  Clone ID: LIB3150-044-Q1-N1-A11
ttcaagctgccgttccagcgcctggtgcgggagatcgcccaggatttcaagaccgaccttcgcttccagagctccgccgtcgccgcgctgcaggaggcgtccgaggcctaccttgtcgggctcttcgaggacaccaacctctgcgccattcacgccaagcgcgtcaccatcatgcccaaggacatccagctcgcccgccgcatccgtggggagagggcctaagcgtcgtcgcggtggaggtggaagtagtagtcgcagtttctgtcatcactgtctggctagaagttgtagagatgtgccggtttatgtaagttggngttataggtcgaatcattatgtagttgggtcttaactgctgtaaattaactatgactatggcatggcaatgaagttttcgggtataacttcccgat

SEQ ID NO: 9853 - DNA, 359 bp, Zea mays
  Clone ID: LIB3150-044-Q1-N1-A2
gtatgcccgcaccgcctctcaatcatttggagatacacagggtttttttgtgcaagcttatgatgacaatcatcaccgtctctctttcaaaaatcagggttcaactcatcgcttcgcagatccgtacttctatatgcctcaacaatcgtcagtgacggttgaatcaagcacaaggacacaaacagcaaacaatgacttgtgtttctggggtgaccagaatgctatgtacggcaatccaagtgaccaacaacagggtttcaactttggacaaaacccatcaagttggttgaaccagccatttccccaggttgaacaaccacgagtggtcaggcctcatgcaacggttgctccatttgatc

SEQ ID NO: 9854 - DNA, 364 bp, Zea mays
  Clone ID: LIB3150-044-Q1-N1-A4
ggtccaccgagacatcaagtcaagcaacatgcgtgctctttgaccatgatgttgcgaagatcggggacttcgacatctcaaaccaggcccctgacatggctgcgcgcctccactctactcgcgttcttggcacctttggctaccatgcaccagaatatgccatgactggacagcttagcacgaagagtgatgtctacagctttggagttgtgctgctggagcttttaaccggtcgcaagccagttgaccacacactgccccgtggccagcagagccttgtgacatgggctacaccgaggcttagtgaagacaaggtgaggcaatgcgtcgatccaagactcggagatgaatccccctcaaggct

SEQ ID NO: 9855 - DNA, 409 bp, Zea mays
  unsure at all n locations
  Clone ID: LIB3150-044-Q1-N1-A6
ctttggcatcatcacacttcactacagagggtgaggtagaatttaggtcaattctttttgttcctgctacaaggaaggaagatgtaactgctgatagtaggaagaccaagaatatcagactatatgttaagcgtgtattcatatcagatgactttgatggagaattgttcccaaaatatttgagctttgtgaagggtgttgttgactcaaatgaccttccattgaatgtttctcgtgagattcttcaagaaagtcgaattgttcgtataatgagaaaaaggctggtgcggaaagcctttgatatgatacttggacatttcttgcagtgaaaataaagatgattatgaaaggttctgggagaaacttggaaatttttaaaagctggtgccatggaagatanggaaatcac

SEQ ID NO: 9856 - DNA, 361 bp, Zea mays
  Clone ID: LIB3150-044-Q1-N1-A8
cattgctttgcgaggaaatttgggagctgtgatggagacggaaggctttgattacctggaggatacatgcccgtccctactatctgacttgttagctactgtggcagtcgtggacgacgatcttacatcccttaaccgaaaaaggggagtcagcgggaaccaagtcatggctctagtgggaagcgttgaaaggcgcacccggaggaagctttagtagctggcttccctagagggagactgtagttgacaacgatttgatttggacgctggtagctgtgaataatatcgtatccagatgattttttttttttttttgcagaagccaaaagtggaaattttttgaattgaatggctttttttt

SEQ ID NO: 9857 - DNA, 223 bp, Zea mays
  Clone ID: LIB3150-044-Q1-N1-B1
gtcagcgagcgagaggggatcgggacggccggggaccattccgagcgaatcggccgcgcctactctgacgacccctacacatgacagccaacacttaccatgccaacactatgatattgttacgaatcctgatgaactccaaggctagtgacttgaacactgatctgcccagaatatggtaacagaatgacactgccaagggggatatctgtgacgctatgga

SEQ ID NO: 9858 - DNA, 323 bp, Zea mays
  Clone ID: LIB3150-044-Q1-N1-B10
cgacgggatcgtcaacatcaccgtgttccgggacggccgcgtggcggcgttcacgccgtcgggcccctccaacaggttgccgaccgccttctatcaacgatccatcaaggaacaaccgtactacatcgccgtcctgcaggtgagggacctgatctggtctccggcgccggcggacggggtgcaggctccaccgcccgcgccgcagcccgacgcggcgccggggttgacggatctgctgtccaagaacggctgcggtggcttcgccagcctcctcgccgcgacggccgacgcagtcaccaagtacgacagcagcgccgccgggc

SEQ ID NO: 9859 - DNA, 166 bp, Zea mays
  unsure at all n locations
  Clone ID: LIB3150-044-Q1-N1-B12
acgaagctggagtcctctnatttttcccacgcgtcctcgacacccgcgtcaacatcaccttctggaagatgcttttaaataggagcgggggccccttaaatcccctcctacatgtctctcaacctccttatttcaacgatccatctaagaacaaccttactacatt

SEQ ID NO: 9860 - DNA, 377 bp, Zea mays
  Clone ID: LIB3150-044-Q1-N1-B2
gtgttttgctgctctccgaccccgagctccgaaggccgcagcatcaggcgaggcccccctcgcgtgtgaccgagatggcgctgccgaatcaggggaccgttgattaccccagcttcaagctcgtcatcgtcggcgatggtggaactggtaaaactacatttgtgaagaggcatctcactggagagtttgagaagaaatatgaaccaaccattggtgtggaagttcatccgttggatttcaccactaactgtggtaagatcaggttctactgctgggataccgcaaggcaagagaagtttggtggcctcagggatggatactatatccatggccagtgtgcgatcatcatgtttgatgtaacctcaaggcttacttac

SEQ ID NO: 9861 - DNA, 369 bp, Zea mays
  Clone ID: LIB3150-044-Q1-N1-B3
tagtttttccggaaattccggcaggggcgttaacaatccattcggggaaggccccccaaatctttgacagccgcggcaaccctacagtcgaggtcgacgtgttttgctcagatggaacctttgcaagggcagctgttcccagtggagcatcaactggtgtatatgaagctctggagttgagggatggtggctctgactatttggggaagggtgtctccaaggctgtgaacaatgtgaattctgttattggacctgctctgattggcaaggaccctacagcacagactgagattgataacttcatggttcaacaacttgatgggaccaaaaatgagtggggatggtgcaagcaaaagcttggtgctaatg

SEQ ID NO: 9862 - DNA, 376 bp, Zea mays
  unsure at all n locations
  Clone ID: LIB3150-044-Q1-N1-B5
aaatcctccccacccgtcccgtgggctatccgctgaatggatcgaccggcgaagtgatcctcggaaagcagccgctctccccaccagccctcagtggcgatctgggaacattcatgtcctgngtggatgacgttagaaagctcaaggtcctggcaaacgcggatacccctgaggatgcattggctgcacggaacaacggggcagaaggaatcgggttatgccggacagagcacatgttcttcgcttcggatgagaggattaaggctgtgaggcagatgattatggctcccacagttgagctgaggcagcaggcgctggatcgccttctgccttacccaaagtctgacttcgaaggcattctccgtgctatggatgg

SEQ ID NO: 9863 - DNA, 309 bp, Zea mays
  Clone ID: LIB3150-044-Q1-N1-B7
tagaaggccaagaagagcgtggagacctgggggatctacatcttcaaggtgctgaagcaggtgcaccccgacatcggcatatcctccaaggccatgtccatcatgaactccttcatcaacgacatctttgagaagctggccggcgaggccgccaagctggcgcggtacaacaagaagcccaccatcacgttccgcgagatccagacctccgtgcgcctagtcctccccggagagctcgccaagcacgccgtctgcgagggaaccaaggccgtcaccaagttcaccagcaactgatcgcgctgcgggatc

SEQ ID NO: 9864 - DNA, 366 bp, Zea mays
  Clone ID: LIB3150-044-Q1-N1-C1
gtaactttaccaatccgcgccggtggtaaccctgcctttggcggcggctagccggtacccagtgtgcgcactccctctatctccctcttggcgacgactgggcggccgtcgctgctgccctacgccgtcttcgggctcttcgttgtcgacgagcgccacaaggttcctaccatttttaagaaaaaagatcaatggaggcagctttgtcattctcccaggacagcccaccaatttcgataatttgtgttgcaaagcttgtgggtctacccctaaccatcaatcatagccttgctgctggctcggcacccaccctacagtttgcttctggagaatcactccatggtgtcaacccaatcatcctctaca

SEQ ID NO: 9865 - DNA, 406 bp, Zea mays
  unsure at all n locations
  Clone ID: LIB3150-044-Q1-N1-C11
tgattttctacatccgcactgatggaaagggtgcctagtagatggccacggcctacatggcatgctccttggaagaactatcgggtcatcagtggtcacttgggatgggttcgatctattgcatttgatccagcgaatgaatggttctgcactggttctgccgataggacaataaagatatgggatcttgcatcaggaaccctgaagcttacactgactggtcatattgagcaaattcgtggacttgctgtcagccaacgtcacacttatttattttctgctggtgatgacaaacaagtaaaatgttgggatcttgaacaaaacaaggttattaggtcctaccatgggtatctgagtggtgttactgcctagctctccatccaacaatngatatcttactgactgg

SEQ ID NO: 9866 - DNA, 261 bp, Zea mays
  unsure at all n locations
  Clone ID: LIB3150-044-Q1-N1-C2
gcgatccgtcggtggtgtcggagcggtggaggaggatggccgacgtgcagggagacaacgaggcagctctggaggacgacgctttccccgacgacgggcccttagataccgaagaaggaagtggaagaagaccccataaccggaggcaacaggaaaaggaggaggacgtcganggcctcgccagcttccttgagtcggagatcctctccggatccagcgacaaggatcctattgacgtgagcgctttttgcttttcttttc

SEQ ID NO: 9867 - DNA, 378 bp, Zea mays
  Clone ID: LIB3150-044-Q1-N1-C3
ttaaaagcgtcccaagccttccttttatttccgtccgagtctgacctaatttgggggcgcttccgccgccgttcgacgcccaccgcgcagccatggcggaacagactgagaaggctttcctcaagcagcctaaggtgttcctcagctcaaagaaatctggcaagggtaagaagccaggcaagggtggcaatcgattttggaagagcattggccttggtttcaagactcccagggaagcaattgaagggacctacattgacaagaaatgtccattcactggaaccgtttctatcagaggcagaattattgctggaacatgccacagtgctaagatgaacagaaccatcattgttcgcatgaactatctccactttgtta

SEQ ID NO: 9868 - DNA, 338 bp, Zea mays
  Clone ID: LIB3150-044-Q1-N1-C4
tgcagctagaatgggccaactgtttagctcggccaggcaaacatttgaagtctcatcatatgatgtagaagtaattccagatattgaagtcacaactgatggcactaaatacatattttcagatggtatcgggaagatttctactagatttgccagacaggttgccaaattaattggcttagaccctgctcatcctccttctgcttttcaaataaggtatgggggctataaaggagtcatcactattgaccctacttcctttttcaatctttctctgcgacctagtatgaagaagtttgaatcgaagagcactatgctgaacattacaaattggagta

SEQ ID NO: 9869 - DNA, 273 bp, Zea mays
  Clone ID: LIB3150-044-Q1-N1-C5
tctctctcccaaaccctagccgccgccgccgccgccgccttcataatcgccgtcaaccgccccctcgtctccgtgaaagccctatatggcgacatggtaaccgacgcccccggcatcgccttaccgcccgtcttcggggcgccgatccgccccgacgtggtcaggttcacccacaagctgctgtcctgcaacaagcgccagccctactcagtctcccgccgcgccggccaccaaacgtcggccgagtcctgtggtaccggccgcgccgtgtct

SEQ ID NO: 9870 - DNA, 239 bp, Zea mays
  Clone ID: LIB3150-044-Q1-N1-C6
tttgtaagcgaggggaggattcagccgtggcggggaagacctcaacgtcgtcggcggtgatggctgacggtctacgcggcgttagctaccctctggaggagtggagcgggcgcgtgaaggcgattgaggccgggttccgcgcgtggatggcgaagcaacccatgcaaatcgaggccgctgtgaccactgccgtgggggctgcgcagggctgggctctgactgggctcatgggctcgctc

SEQ ID NO: 9871 - DNA, 386 bp, Zea mays
  unsure at all n locations
  Clone ID: LIB3150-044-Q1-N1-D1
aatgagttcggacgtcctcgccgggcatatgagcgccacagcggcacaggccgtggctacgggatgaagcgtgaaggggctgggcgtggaaattggggaactgcaactgatgaaggccttgaacaggacactgtggatgctgttaatcctgaggagactactgccgtggtggaggatgaaaagaaacctgaagatgcaccacagtctgaggttgagaaggacaaggagggcgcggagaatgaagaagaaaaggaacctgaagataaggagatgactttggaggaatatgaaaaggtactggaggaaaaacgaaaagctttactctcccttaaggctgaggagagaaaagntgaaatngacaaggagctacaggccatgcaacaact

SEQ ID NO: 9872 - DNA, 396 bp, Zea mays
  Clone ID: LIB3150-044-Q1-N1-D3
tttccttcctcctctgagttcatgctttcaccctcctccctatacaaagcttggtttctttcgatggttttgctctctctttcctgtttgtctggccttttgttcgcttttccaatggatcgtttgctctccgatgacgattaaaaattactttcgttcttctgaagctgcaatgtggaagaacaatctggagacctgaactgaggagattcgatctcactcgacctatccttggtttcatttcctgaatttgcaggttggttttgttagcgtcctgttggtgaattctggctgatgcgctttcttgttgcgcactgcgcagctctcgagagaactgtttgttctgcatctggagttgtagatagcttagcaaaaaaaaacacaattttaacgtgt

SEQ ID NO: 9873 - DNA, 410 bp, Zea mays
  unsure at all n locations
  Clone ID: LIB3150-044-Q1-N1-D5
ttaaaatcctcccaccccgnccttttttcaaccaaggccgggggccatggctgcggggccgtcataacctcctcctccttcccgtcttacttgccttggctgctgctgctgcgcggcaggcgcagagtcatggggaagcctccgccgtcttcatcgatgcctcgtcgcaccgctaccttcgggaccagcaagccgaccaccaggacgcttcaatgtcgttaaatgaagtttctgcggttgtttctgtcttgcttggttttgcaccgtcaacatccctaccagctatttcttcttcgaagttgaacaaagttcttcttcctaatccatttgatagaccgcgtgctgttttcctcgtgcaaattgctgggttcgatgttcctagcttcgtatctgaaggcaacaacaatttc

SEQ ID NO: 9874 - DNA, 368 bp, Zea mays
  Clone ID: LIB3150-044-Q1-N1-E3
ctttaaatccttccaacccgtcctttccgccgtcatgtcaaaccgaggtagggagggttcttttgaaaacaagttccgcatgtcactgggtctaccggtggcggccacggtgaactgcgcggacaacacgggcgccaagaacctctacatcatctccgtcaagggcatcaagggccgcctcaaccgcctcccgtccgcctgtgtcggcgacatggtcatggccaccgtaaagaagggaaagcccgacctcaggaagaaagtgatgcccgccgtcatcgtccgccagcgcaagccgtggcgtcgcaaggacggtgtctacatgttacttcgaaaataatgctggaatggattgtgaattcccaagggtg

SEQ ID NO: 9875 - DNA, 267 bp, Zea mays
  Clone ID: LIB3150-044-Q1-N1-E4
aattggaaactcgagccatgattgtgctgatcgttgcccttgctctcctggcgctcgctgcgagcgccgcctccagtacaagcggcggctgtggctgccagacaccaccgtttcatctaccgcctccgttctatatgccgcctccgttctatctgccgccgcagcagcagccgcagccatggcaataccccactcaaccaccgcagctaatcccgtgccagcagttcggatcctgctgcgtctgcagcgtcggcagcccgttcctgg

SEQ ID NO: 9876 - DNA, 267 bp, Zea mays
  Clone ID: LIB3150-044-Q1-N1-E5
ggttaggccagcatggtgagggtctatgtgctcaacgatgcgctcaagtccatgtacaacgctgagaagattggccagaggcatgtcatgatcaagccggcatccaatggcatcatcaagtttctgacgggcatgcagcgccatgtgttcattggagagttcgagtaccttgattgaccaccgatcgggcaagattgtggtcaaactcaacgggtggctgaacaagtgcgggcgtaataagccctcgctttgatttatggcgttgaa

SEQ ID NO: 9877 - DNA, 295 bp, Zea mays
  Clone ID: LIB3150-044-Q1-N1-E6
cttaaaattctaccaacccgtcctttttatcaagcctcgactgctcatccttacggacccattgactgaccatcagccaatcaaggagtctgctctggggaacatcccgaccattgccttttgtgacactgactctcccatgcggtacgtcgatatcggcattccaaccaacaacaaggggaggaaccacctttgattgtctgttctggcttctgtccaggatggttctgcaaatgaggggcactatccttcctgggcacaagtgggaagtcatggtcgatctgttcttctacag

SEQ ID NO: 9878 - DNA, 385 bp, Zea mays
  unsure at all n locations
  Clone ID: LIB3150-044-Q1-N1-F1
tgatttcatgatgggcggtgtttcagctggtggttcaaagactgctgctgctcccatcgagcgtgtgaagctgcttattcagaaccaagatgagatgattaagtctggtaggctatcagagccgtacaagggtattgttgactgcttcaaacgtaccattaaggatgaaggtttctcttccttgtggaggggtaacactgctaatgttattcgttacttccctactcaggctttgaactttgcatttaaggactacttcaagaggttgttcaacttcaagaaggatagggatggctattggaagtggtttgctggcaacctggcctcttgtggtgctgctggtgcttnctccttgtttttgggtactccctggactacgcgagaa

SEQ ID NO: 9879 - DNA, 334 bp, Zea mays
  unsure at all n locations
  Clone ID: LIB3150-044-Q1-N1-F2
tgcctctcctcctctcctcccccacccgtcgaggngncccctccctccggtctgcgctcccacagcctcacccctgcgcccccgccgattcgcgtcgccctttgttggaaggaacgatggagcagaccttcatcatgatcaagcccgacggcgtccagcggggcctgatcggggacatcatcagtcgcttcgagaagaaagggttctacctcaaggggatgaagttcatgaacgtggagaggtccttcgcgcagcagcactacgctgacctttccgacaagcctttcttccccgggttggtggagtacatcatttccggccccgtggtggcgat

SEQ ID NO: 9880 - DNA, 437 bp, Zea mays
  Clone ID: LIB3150-044-Q1-N1-F4
ctggattcctttaaagtctacccacccgtcctttcccctctccctcgcggcctcgccttatggggttcgtcactcacctcgaccaccgccatggccatggccttggcctccgcgaccgccgccgcactcttccgctccgccctgtccgcgccacacggcgccggcgcgcgcgtccggccgcagcgccggcagccgttcttggctccgctccacgcggcgaagggccccggctcggcgccggtggtgctggagggcaaggccaagggaaagaagaagaaggggcccagctccgggaacctttccgcatccctcgacgtcgagatcagggaggcgcatgagtaccttgacagcgaccaacaagaacctgttccagaaaactttccatttgaattaatcgacgaagagggtatgagcgtggttattttgagaagggacta

SEQ ID NO: 9881 - DNA, 412 bp, Zea mays
  Clone ID: LIB3150-044-Q1-N1-F5
ctctggtgggtgctggcagtcctgaacagtgggactctgtgctatgccatctacatcttctggtgatgcgtgctccaatgttattttcctcggactataaaagcttctactgccaatttagtgatccttcatatgtgaagaagttgaaacttgagatgttgactgctatagcaaatgaaagcaacacatatgagattgtcactgaactatgtgaatatgctggaaatgttgatgtaccaattgcaagagagtctatccgggcagttggaaaaatagcactgcagcagtatgatgttaatgccattgtggacaggcttctacaatttcttgaaatggataaggattatgtgactgctgaaactctagtcttggtgaaagatcttctcagaaaatatcctcaatggagtcatga

SEQ ID NO: 9882 - DNA, 314 bp, Zea mays
  Clone ID: LIB3150-044-Q1-N1-G1
actccctcctcgagcacactgatgtggctagcgtgctggacaacgaggccatctatgacatctgccgccgttcccttgacattgagcgcccaacctacaccaacctcaacaggcttgtgtcccaggtcatctcatccctgactgcctccctgaggttcgatggtgctcttaacgtggatgtgaatgagttccagaccaacttggtgccctacccgaggatccacttcatgctttcctcctatgctccagtcatctctgctgagaaggcctaccacgagcagctgtctgtggccgagatcaccaacagcgccttc

SEQ ID NO: 9883 - DNA, 172 bp, Zea mays
  Clone ID: LIB3150-044-Q1-N1-G4
aacttaaactccaaataattcctcataaatcatgggtgtatatgcccaccacccccttatcgttgattcaagatgtgttctcaataattttggggctttgcactcaacaccctgtcattatgattatgtattgtgtcaattattttatccattgctagtgtagacttggttc

SEQ ID NO: 9884 - DNA, 378 bp, Zea mays
  Clone ID: LIB3150-044-Q1-N1-G5
cttcgatctcgtttcaaatccatccatccggggggtccttcgtcccgcagcatctcaaccccatggccaagatcaagatcgggatcaatgggttcggcaggatcggaaggctggtggccagggtggccctgcagagtgacgatgtctagctcgtcgccgtgaacgaccccttcatcagcaccgactacatgacctacatgttcaagtacgacactgtgcacggacagtggaagcaccatgaagtcaaggtgaaggactccaaaacccttctctttggtgagaaagaggttgctgtgtttggctgcatgaaccctgaggagatcccgtggggttcggttggtgctgaatatgttgttgagtctactggtgttttcactg

SEQ ID NO: 9885 - DNA, 417 bp, Zea mays
  Clone ID: LIB3150-044-Q1-N1-G6
gttggcgcaggtggtgacgaacccgctctgcgagaagaggccgaagcagtttgggatcggcggcgcccttccgcccaagaaggacctccaccgcttcgtcaagtggcccaaggtcgtgcgcatccagcgccagcgccgcatcctcaagcagcgcctcaaggtgcccccggcgctcaaccagttcacacgtaccctcgacaagaaccttgcaacaaacttgttcaagatgcttcttaagtaccgccccgaggacaaagctgccaagaaggagaggctcttgaagagggcccatgctgaaaacgaggggaaaactgttgagtcaaagaaaccaattgttgtgaagtacggccctaaccatgtgacttacctcatcgagcagagcaaggcccagctggttgtcatagctcatgatgttga

SEQ ID NO: 9886 - DNA, 359 bp, Zea mays
  unsure at all n locations
  Clone ID: LIB3150-044-Q1-N1-H2
cttaaaatccaaccaacccgtccgttcctctcaaccacgccggcaacggcagccggtgaccagtacctacatgtccagcctgatgtcgctagccagcgcactgatcggggacgccgcgaggcttcactcggccactggctctgccggggaggagcctgacagggtctacggcgccgtgctctgccgggcggactccgctggtgctaactacaggcgccgtcggggtgcccttggcgccatcgacggcgacggccactcaccttgcgcgctccacagcgacgtgaccgtctactccgagctgtaccatctncgtttctctgacaggaactttcctcgcaacttcaagaacgcgccgaaat

SEQ ID NO: 9887 - DNA, 337 bp, Zea mays
  Clone ID: LIB3150-044-Q1-N1-H4
ttgccactcacatggtgctcctccatcttgggagtcaccaacgcaaattgcaccaagaaatccattcgagaggccgtcgacaggggaattaatggcgtcgtcgtctagcagcagccaccgccgcctcatcctcgcagccgccgtcctgctctccgtgctcgcggctgccagcgccagcgccgggacctcctgcgtgccggggtgggccatcccgcacaacccgctcccgagctgccgctggtacgtgaccagccggacctgcggcatcgggccgcgcctcccgtggccggagctgaagaggagatgctgccgggagctggcggacatcccggcgtac

SEQ ID NO: 9888 - DNA, 340 bp, Zea mays
  Clone ID: LIB3150-044-Q1-N1-H5
gctactgtcattatattcatacatatgcatggtgcatcttatttacgaccgagagatgacgctcatgcaagtggtgtggtgcaaccacaagatgccgttggcggacgacctaaagaatggacttaaccaatggatgctcgccaagcgagtacctccaccagcatacactacttaagtgttaaattaaaggcaagccccggttttatgcataaccgtgatatatgctattttactgcacttaatgattgtaggtttgtactgtgcacttaagtgtaagagttgactgaaaccttatctgcataaactcaggattacgttttgaagatgatactagtatgct

SEQ ID NO: 9889 - DNA, 297 bp, Zea mays
  Clone ID: LIB3150-044-Q1-N1-H6
ctttaaattgttccaacgcgtcctttccgcctccccaagcgtccagcccgtacagcgtgctttcaaccgagcggacacgatgcaggcccacggcatcgccatccgcgcccgcgggccggtggcggcgacgcatgcccccgcgcgccgacggcaatgccgcgtgtctgcggcggcggtcggcgcgcccgccgcgcgagcccgcgtgacgcactctatgccgccggaaaaggcggaggtgttccgctcgctggagggctgggcggcgcggtcgctgctgccgctgctcaagcccgtgga

SEQ ID NO: 9890 - DNA, 451 bp, Zea mays
  Clone ID: LIB3150-045-Q1-N1-A11
gttttgctcagatggaacctttgcaagggcagctgttcccagtggagcatcaactggtgtatatgaagctctggagttgagggatggtggctctgactatttggggaagggtgtctccaaggctgtgaacaatgtgaattctgttattggacctgctctgattggcaaggaccctacagcacagactgagattgataacttcatggttcaacaacttgatgggaccaaaaattgatggggatggtgcaagcaaaagcttggtgctaatgcgattctggctgtgtcattagctgtttgcaaagctggggctagcatcaagaggattcctttataccagcacattgccaacctagctgggaacaagcagttagtgttgcctgtccctgcattcaatgtcatcaacggtggttcccatgctggaaacaagcttgctatgcaggagtttatgatc

SEQ ID NO: 9891 - DNA, 442 bp, Zea mays
  Clone ID: LIB3150-045-Q1-N1-A12
ctccgctcgccggcatggcgatccggaaggggtcttcacacgccgccgcggcactcctcgcgctcgcctctgtcgccgccgtcgcaggggaggtcttcttccaggagaagttcgaagatggctgggaaagtccgtgggtcaagtccgagtggaagaaggatgagaacatggctggtgaatggaaccacacttcgggaaaatggaatggagatgccgaggacaaatggattcaaaacctccgaggattacaggttctatgccatttcagccgaataccctgagttcagcaacaaggataagaccctggtgctgcagttctctgtgaagcacgagcagaagcttgactgctgtggtggctacgtcaagttgctgggtggtgatgtagaccagatgaaatttggtggagacacatcttacagcattatgtttggaccagatatct

SEQ ID NO: 9892 - DNA, 439 bp, Zea mays
  Clone ID: LIB3150-045-Q1-N1-A2
atccgcacctctctccatctccctgctccgtggcctccttcttgatccaggccggccagggatcgccatgtcggactcggaggagcaccacttcgaatcgaaggccgacgccggagcgtccaagacctacccgcagcaggctggcaccgtccgtaagaacggcttcatcgtcatcaagaaccgcccctgcaaggttgtggaggtttctacctcaaagactggtaagcatggccatgccaaatgccactttgttgccatagacatattcaacgggaaaaagctcgaagatattgtttcttcgtcacacaactgtgatattccgcatgtgaaccgtactgagtaccagctgattgatatatcagaggatggatttgtgagccttcttacttcagatggcaacactaaggatgatcttagactcccaactgatgagactctt

SEQ ID NO: 9893 - DNA, 431 bp, Zea mays
  Clone ID: LIB3150-045-Q1-N1-A4
aaatatttatgatctgcgcaatatgtctgaggctgagcaaaaaagagacggtggtttgaaatatcaaacacgatgtgttcgatgttttcccaacggaacaggatatgctcttagttctgttgaagggcgagtttctatggaattctttgatctatctgagtctgctcaatctaaaaagtatgctttcaagtgtcatcggaagtctgaggccggcagggacaccgtttatcctgtcaatgcaattgctttccatcccatatatggaacatttgccaccggagggtgtgatggatttgtgaatgtgtgggatggcattaacaagaaaagactatatcagtactcgaagtacgcatcaagcatcgctgctctatcattcagtaaggatgggcatctgcttgctgtggcattcagctacacttatgtagagggag

SEQ ID NO: 9894 - DNA, 435 bp, Zea mays
  unsure at all n locations
  Clone ID: LIB3150-045-Q1-N1-A5
cggacgcgtgggatgaccactgtccatgccatcactgctacccagaagactgttgatgggccctcgtctaaggactggaggggtggaagggctgctagtttcaacatcattcccagcagcactggagctgctaaggctgttggcaaagtgcttcctgtccttaacggaaagttgactggaatgtctttccgtgtcccaaccgtcgatgtttctgttgttgatttgactgttaggcttgagaagtcagcaacctatgatgagatcaaggctgcggtcaaggccgaggcagaaggtagcctcaagggcatcctgngttacgttgaggaggaccttgtttccaccgatttccagggtgacagcaggtctagcatncttgatgctaaggctggcattgccttgaacggcaacttcgtgaagctcgtgtcctggtacgac

SEQ ID NO: 9895 - DNA, 443 bp, Zea mays
  unsure at all n locations
  Clone ID: LIB3150-045-Q1-N1-A6
ctatcggccgctcatcccctcttccgatcgcccgccgccgccgccggcggcgcccgtccgcttcagtacgacgtcgagcaaggggaggtaaaagttcgtttggcgtgcgccatgtttaagaagttctcttcagaagatatatctggacagaatcaagttaaggcttctgtacaacgaaagattcggcaaagtatcgctgatgagtaccccagccttgaacctttgctagatgacttgctcccaaaaaagtcacctatgattgttgttaaatgccaaaatcatcttaatcttgtagtggtgaataatgttcctctatttttcaatatacgtgatggtccttacatgccaaccctgcgtcttcttcatcagtatcctgatatcatgaaaaagttccaagtggatagaggtgctatcaaatntgttctatctggcgcaaacataat

SEQ ID NO: 9896 - DNA, 442 bp, Zea mays
  Clone ID: LIB3150-045-Q1-N1-A7
ctctgctcgcgcactctcacctgcccgcgccgtcttcgaccgccagcaagatgaacaaggagaggctcatgaagatggccggcgccgtccgcaccggcggcaagggcaccatgcgcaggaagaagaaggctgtacacaagacggtcaccacggacgacaagaggctgcagggcactctcaagagagtaggggtcaacaccatccctgcaatcgaggaggtgaacatattcaaggacgatctcgtcatccagttcttgaaccccaaagtgcaagcttccatcgcggcaaacacatgggtggtcagtggatctccacagacgaaaaagctacaggatgttctccctggtatcattaaccagcttggccctgacaacatggagcacctgaagaggattgccgaggagatgcagaagcaggtggctgctgcctgtgcggcagcaca

SEQ ID NO: 9897 - DNA, 449 bp, Zea mays
  Clone ID: LIB3150-045-Q1-N1-A9
attcccattccaagtccccgctcttcgagtcccaacgacgagctcggagcttcttcttccctgctcggtgctcgtcgcaacagctgccgccatgtctgccgcgaaccagctcgccgctctggtcagcaacatgtacgccacgggtttgcttgacgatcagttccagcagctccagctgctccaggaccccagcgcccctgacttcgtctccgaggtcgtcacgcgtctcctgccaggacggcgagcggatcatcgaagagctggccaaactgctggagaagcccaacgtggattttgacagggttgacgcctttgtgcatcagctcaagggaagcagtgcaaatattggtgctcagaaggttaagaacacttgcattcagttccgcgaattctgtcagcagaagagcagagatgggtgcctcaaggtactggagacaatgaggattaac

SEQ ID NO: 9898 - DNA, 322 bp, Zea mays
  Clone ID: LIB3150-045-Q1-N1-B1
gtaaactataaaaggatgcttccgaccgcgcggccggtgatttcagacgagtgggtcaatctactccagatcgcacaaaaagccgataaaaaccctgaggataataatccttccgctgactataatgcctataactccaagcgccagatgaagccatacgaccagaagctgctgctcgcatccacttcctcccgcatgaactaccgccagaagaacgtgtagaagaatgccatcaacagcgtggtgacgtacatgatctacatcttgaacgtgctgaagcaggtgcacacctacatccgcatatccatgaaggccatgtcca

SEQ ID NO: 9899 - DNA, 442 bp, Zea mays
  Clone ID: LIB3150-045-Q1-N1-B10
acttgaagaggctcaatgcgcccaagcattggatgctcgacaagcttggcggagcttttgctcccaagccatcttctggacctcacaagtccagggagtgccttcctctgatcctcatcatcaggaacaggctcaagtatgctctgaactaccgtgaggtcatttctatcctgatgcaacgccatgtacttgttgatggcaaggtcaggactgacaagacctaccctggctgggtcatggatgtcatttccatccctaagacaatggagaactacaggctgctttatgacaccaagggccgcttccgtcttcacccaatcagggatgaggatgccaagttcaagctctgcaaggtgaggtccgttcagtttggccagaaaggcatcccctacctgaacacctacgacggccgtaccatccgctaccccgacccgctcatcaa

SEQ ID NO: 9900 - DNA, 443 bp, Zea mays
  Clone ID: LIB3150-045-Q1-N1-B2
gctatatgaacagtgccatacagtgtctggtgcacacaccacagtttacgaaagacttctgtgaagattatcatcgcgaaataaatcggcaaaatccactgggtaatgtgggtgaacttgcattagcttttggtgagctattgagaaaactctgggctcctggaggacgtgcccctgtttcacctagaccattcaaaatgaagctttcccggtttgcatctcagttcagtggatacaaccagcatgattcacaggagctgttggcgttcctattggatggactccatgaagaattgaatcgtgtgaagcatagaccttacataaattcaggggatgctgatggaagatcagatgaagaagttgcagatgaatattgggcaaatcatattgccagaaataattcaatcattgttgatgtatgccaggggcagtacaagtccact

SEQ ID NO: 9901 - DNA, 441 bp, Zea mays
  unsure at all n locations
  Clone ID: LIB3150-045-Q1-N1-B3
ctcaactcgtccaccgccgccgcccgccgtcgcaaaactcgccagcggccgagccatggggtacacgaaggaccagcttctcgcgcacctccagaagcttaagattgatttcacgtgctacgatcacccggttgtgttgacagtggaggaacaggccaaacatgttggccatttaggaggtgctttgagcaaaaatttactcttgaaggacaagaagcatcggctatatgttatttctgcccttgctggcaccaaagttgacatgaaaattctttcccaacgtctcgngttgggaaaaggtggtctacgaatggctcctgaggaaaatcttctagaagtacttcaggtgcccttagggtgtgttactccttttgctttaataaacgagtctgcgagtgctgtttcactttacttgatcaaggtttcaagtctaaacagagc

SEQ ID NO: 9902 - DNA, 436 bp, Zea mays
  Clone ID: LIB3150-045-Q1-N1-B4
gtttgtcgtcgcctccctccgctgtccgattgtgcgctgtcgcagcctgtgcccagactgccctctcccagcccgcttctccatctccggtgagacgcgaattgaatcgcatcgaatccatgggcagctcctcgaataccaacacaagcggcggggccagcgacaaggaggagaagaaggaggacaaggtcaaaggcaaggactcgtcggggccatccttcaaggagaacgaaagggtcctcgcctaccacggccctctcctttacgaggccaaggttcaaaggatcgaaaaccatgaagatgaatggcgctactttgtccattatctcggttggaataagaactgtgatgaatgggttgcaaatgaccgcttgttggaattgacggaggaaaacgtgcgcaaacaacaagagcttgataagaatcaggtagtttg

SEQ ID NO: 9903 - DNA, 442 bp, Zea mays
  Clone ID: LIB3150-045-Q1-N1-B6
cgcacatatctactatactatactctaggaagcaaggacaccaccgccatggcagccaagatgcttgcattgttcgctctcctagctctttgtgcaagcgccactagtgcgacccatattccagggcacttgccaccagtcatgccattgggtaccatgaacccatgcatgcagtactgcatgatgcaacaggggcttgccagcttgatggcgtgtccgtccctgatgctgcagcaactgttggccttaccgcttcagacgatgccagtgatgatgccacagatgatgacgcctaacatgatgtcaccattgatgatgccgagcatgatgtcaccaatggtcttgccgagcatgatgtcgcaaatgatgatgccacaatgtcactgcgacgccgtctcgcagattatgctgcaacagcagttaccattcatgttcaacccaa

SEQ ID NO: 9904 - DNA, 446 bp, Zea mays
  Clone ID: LIB3150-045-Q1-N1-C1
gtcgtagccaaagcaaagtccttcaaggccaggatgacggttcgcctagctgttgctggcgctttccatactagcttcatgcaaccagctgtttcaagattggaatctgcgttggctgccactgagattagaacacctagaattccggtcatctccaatgttgatgcgcagccccactcagatcctaacaccatcaagcagattttagctcagcaggtaacctctccggtgcaatgggaaaccactgttaagaatcttatgggcaaggggcttgagaaaagttatgaactcggacctggaaaggttatagcaggtattctcaagaggatcaacaaaggcactagcattgagaacatcggggcttaaacgtctgggatctgaagaactcttgatggaaccaagttacacagcagaggattgaaacatgccattattgtggaacgatg

SEQ ID NO: 9905 - DNA, 438 bp, Zea mays
  Clone ID: LIB3150-045-Q1-N1-C10
gagcggaaggcgaaagagtagcagcagcaggcggctccgagtagcggctccccacctcgagcttgccaccatggctagaggattgaagaagcatttgaagaggctcaatgcgcccaagcattggatgctggacaagcttggcggagcttttgctcccaagccatcttctggacctcacaagtctagggagtgcctgccactgatcctatataagaacagctcaagatgctctacataccgtgaggtcatttccatcctgatgcaacgccatgtacttgttgatggcaaggtcaggacagacaagacctaccctgctgggttcatggatgtcatttccatccccaagaccaatgagaactacaggctgctgtacgataccaagggccgcttccgccttcacccaatcagggatgaggatgctaagttcaagctttgcaa

SEQ ID NO: 9906 - DNA, 446 bp, Zea mays
  unsure at all n locations
  Clone ID: LIB3150-045-Q1-N1-C2
ctgccttgatgaaaataaggcttttctatcgaccgcagattctgctgtgcaattactcacagaagccaccaaaccagtttcaggatggaaggggattgagtatcgagcagcatttcctctacataagcctcccggtgctaacttctatcctcctgacatggacaaagcggagtttgaactttggaagagtaaactgacagataaagaacaaaatgatgccactgggtttttcaccgtcataaaacgacatgactctctgtcttcatcgtcattaacacaatcagatggatcggatcagaccaagactaaagatgatcnttttattgttccatactccaaggagtatagaccattcctagagaaagcagctgagcttcttgagaaagcatcaacgtgctctgattcttcaaagcctaagaatttgctgagaaccaaagcgaatgctt

SEQ ID NO: 9907 - DNA, 398 bp, Zea mays
  Clone ID: LIB3150-045-Q1-N1-C3
ctcgcatctatcacatactcatcaactggcggagtttataaagcccacggggcgaaactcgatgaacgaattcttgagatggaaggtaccaaggccatatgcccctcgcaatagtagtggccgaagtatccaagacttatcatttggttaaaaggtcaacacaaatgcacactttagtgctaaacacagtagaatcttacgatgaaggtactttaggttgacacttttggttaccaggcaaatgatatattctacatatacactataggtatcagaggataggtactatgccttcatctaaatagatatattctaggaggctcctgtcttcatgtaaatgtgaacatctctgttatatagataaataatattattgcatattatgcacgattcattgc

SEQ ID NO: 9908 - DNA, 121 bp, Zea mays
  Clone ID: LIB3150-045-Q1-N1-C4
cccgatctgatcgaatctaaagcttcctgcgggaattttaataaccatggcggtcggcacacccgctgctacttccatcagaacgtatgcagcatgacaggccttccttgatcattactac

SEQ ID NO: 9909 - DNA, 394 bp, Zea mays
  Clone ID: LIB3150-045-Q1-N1-C6
ctcgacgagcacccaccaggcatagagggagatggcaagtctaaccgggcgtcaccgcgaaccctaatccgaacaagtcattcgagatactgccgaacccaggtgactctgtctccagcctcagctttagtcccaagagtaatctgcttgtggcaacctcctgggataaccaggtgaggtgctgggagattgttggtggtaacagtcagccaaaggcgtccatttctcatgatcagccggttctctgctcggcttggaaggatgatggaactactgtcttctctggaggctgtgacaagcaggtcaaaatgtggcctcttctgtcaggtgggcagcctcagacggttgctatgcatgatgcccctgtcaaggaggtcgcctggattcctcagat

SEQ ID NO: 9910 - DNA, 446 bp, Zea mays
  unsure at all n locations
  Clone ID: LIB3150-045-Q1-N1-D1
ccggctcacgctcccccgcctgctctctggattctcgacgatggctgggcgaccgccgccgtcctacgccaggtattccgcgcttcaaggcggcaggcccttcgccggcgaagagcacccatcagattcccgagttgtttatcccagttatcttgcacccgagggctccgtagcatcttattatgcttcaagacctgttctacctgttggatcagatgttcttagaaacgatgtaatttctcaaccaagaacgcatggttatgatggtccagcaagagtgaccaatcctgctttggctggcctgactggactacctgctggagttacggcacggnggcctagtgctctggaagacccgtctttggctggtctgagtggattagctccagtccgggcaacgggcggagctacggcacgagggtctggtgctttggaagacccgtctt

SEQ ID NO: 9911 - DNA, 439 bp, Zea mays
  Clone ID: LIB3150-045-Q1-N1-D10
gtggttttgaggctggtatctccaggggtggccagacccgagaacatgctctccttgcgttcacccttggagtgaagcagatgatttgctgctgcaacaagatggatgcaaccactcccaaatactccaaggcacgttatgaagagattgcgaaggaagtctcatcctacctcaagaaagttgggtacaaccctgataagactgcctttgttcccatttttggtttgagggcaccaccatgattgagaggtccaccaacctcgactggtacaaaggcccaaccctgcttgaggctcttgaccagatcactgagcccaagaagccttcggacaagcccctgcgtctgcccctccaggatgtgtacatgattggtggtattggaactgcaccggttggtcgtgtggagactggcgtcatcaagcctggtatggtagtcacc

SEQ ID NO: 9912 - DNA, 193 bp, Zea mays
  Clone ID: LIB3150-045-Q1-N1-D2
ttacatcacctcgcctacgatctccatggggtgcatcgattcgagcatcggtcacgtcgccctactgcagaaagttcaacgatcagctaatcaagaatgctagctacatatgcacacctagcaaggctacacttgctgcatatgagttcactggcaccataagcaagcgcctttccagcatcaatgtcaagaa

SEQ ID NO: 9913 - DNA, 343 bp, Zea mays
  Clone ID: LIB3150-045-Q1-N1-D3
ttgtcatcgtctacacctacatcggccgggggtctcttcacgagcctgcggtgcaatccgaggatctgcggtggtagacagccgtcagccggcgattacgcgcctcgtggacaactagtacgactacctagacaagaatcgactcatcgacgactgcctcgtcagcgagactaacatggctcccaggtggacccgcaacgagccatgactcgagttcaagtacagcatcggtctaaagatcgccacccagaccctccagatgcaaaggtaaaccatccaaggtcaaatatgggattctgcggagcaagagaggtacagtgcaattccaagttcttactacaga

SEQ ID NO: 9914 - DNA, 413 bp, Zea mays
  Clone ID: LIB3150-045-Q1-N1-D4
gtgactctctctctctttcgccgagctggtggaaaccttaggagcgtgcttgaccggcggcggctaggtgatggctatggaccctgacgcggtagcgaaggccttcgtggagcattactaccgaacgttcgacaccaaccgcgcggcgctggttgggctgtaccaggagacctccatgctcaccttcgagggccagaagttccagggcccgtccgccattgacggcaagctcggatctctccctttccaggcctgcgagcataatatcgtcaccgtcaactgccagccatcgggtcctcaaggaggcatgctcgtctttcgtcttcggttccatacgcaccggtctcgaggagcaccttttcaagttctttcagtctttttatttgttgtctgccgctttgaccttttttgtg

SEQ ID NO: 9915 - DNA, 441 bp, Zea mays
  unsure at all n locations
  Clone ID: LIB3150-045-Q1-N1-D6
ataatttgaatgggaaaataaggtggctgtgaatactgtgattcaggatgagaaggaattcttgaatcacattatcaagtcaacgaacatgaaatgtctgacaccaccgtctgcactggatggggaatgtggtttccttgctgctaacctttatgcaaagagtgtgtttggcgaggacgctttggtgaacatcagcattgagaagcaacatgacggcaagctcagcggctacattcgaataaggagcaagacccagggaattgcactcagcttaggggacaagatcactctcaagcagaaaggtggcagttaactgtgacaagtaatcgcagttgtatcatcatttttcgcatttaggaaatccacgtgccagagagagaccagtgccgtggcattgaactgagtataaatgctntttgtacaaaaggatcgatcaaagag

SEQ ID NO: 9916 - DNA, 437 bp, Zea mays
  unsure at all n locations
  Clone ID: LIB3150-045-Q1-N1-D8
ttccccttccgtccgctgcattcctgcggtcttgctctcctcgctctcagaccacagttgccgccgccgccgccctaagccagggtgctgaggctttcgttggcctcttcgccggcagcgagcacccaccagttctgtagaaatggctgatggtgaggacatccagcctcttgtctgcgacaatggcaccggaatggtcaaggctggttttgccggcgatgatgcaccaagggctgtattccctagcatcngtgggcgtcctcgtcacaccggtgtcatggtagggatggggcagaaggatgcatatgttggtgatgaggcacagtccaagagaggtattctcacgctcaagtacccgattgagcacggtattgtaagcaactgggatgacatggagaaaatctggcatcacactttctacaatgagctccgtgttg

SEQ ID NO: 9917 - DNA, 240 bp, Zea mays
  Clone ID: LIB3150-045-Q1-N1-D9
gcgaagctggatgctcatagtcgaccttgcgtccttttttagagcgcatccagaagctcaaagaggctttttactggggcgggccgaactccatggcctagccgtcatatcaccgtccagcggttgatgaggaggcctcggcagccggctaggatgaggacacctgctcccatgtcgcgcccatcgtgaagcttgaggaggtcgccgttaccaccggagaggaggacgtggtctcgcttc

SEQ ID NO: 9918 - DNA, 421 bp, Zea mays
  Clone ID: LIB3150-045-Q1-N1-E1
ttttgattttagccgccgccgctgctcagctgacatccctcgagaagacgcgctgctcctcgccgatcgatacgatggccgtcttctccgacctccacaccgccgacggcctcaagtccctcgaggctcacctcgccggcaaaacctatgtgtctggtgactccattactaaggatgacattaaggtcttcgccgcggtgccgtcgaagcctggcgctgagtttcctaatgccgcccgctggtacgagaccgtctctgcggctgtagcctcaagattccctggtaaggctgttggtgtaaatctgcctgcgggatcagctcctgcggcagctgctcctgcggatgaggctgaggatgatgatgaccttgatctttttggtgatgaaactgaggaggacaagaaggcagctgatgagcgtgc

SEQ ID NO: 9919 - DNA, 445 bp, Zea mays
  Clone ID: LIB3150-045-Q1-N1-E11
gccacctccaccctcgaatcgttccccaccatggcgtcgcagggatcctccgtcttcgccgcactcgagcaggccccggaggaccccatcctcggagtgaccgttgcctacaacaaggatcccagccccgtgaaggtcaacctcggggtcggcgcctaccggaccgaggaagggaagcccctagtgctgaacgtggtcaggcgcgccgagcaaatgttgatccattatccgcacgtgtcaaggagtacctaccaatcaccggtctggctgaattcaataagctgagcgctaagcttatctttggcgctgacagccctgctattcaggagaatagggttgctaccgtgcagtgcctatcgggtactggttctttaagagtcggaggtgaatttcttgcaaggcactatcacgagcgcactatctacatcccacaaccaacctgggg

SEQ ID NO: 9920 - DNA, 194 bp, Zea mays
  Clone ID: LIB3150-045-Q1-N1-E12
ttcatcccgtccccgtccgcgccggcggacgcctccttttcgtccgggcgtcagcgtcgcggctccactgaacctgcgtgtcacccgccggaggcaagggccagccgttgttgccattgcctccggttacccccgctttgccgggatcggcttcttcatccggggcattcccgaatttcccaaaccaaggatcc

SEQ ID NO: 9921 - DNA, 433 bp, Zea mays
  Clone ID: LIB3150-045-Q1-N1-E3
ctttttggaactgtgtatacaggcggcggtggatgcataataatacagatgcagtacacatcaggacaccctggtccagttgagattgtacaaaacatgatgccatcatgctgcattgacgtcgaaacatatgacaagatttatactgcgagttttgcctgctaaggtggcatgctatgcatctcaagaggaaatgacaaaggcaattagtccccttattgaaaagtacttcctaaaagaatgctcctcaggtcataagtttgcagtgttatatgaagcaaggtcaaacacaggaattgatagaatgaaaatcataaacgcatcatcgaaatctgtaccacaacctaataaagttgacctgaagaacccagacaagactattgttgtccagattgcaaagaccatttgcatgatcggagttgaggaaaggtac

SEQ ID NO: 9922 - DNA, 167 bp, Zea mays
  Clone ID: LIB3150-045-Q1-N1-E5
tttaatagacatatgcttgtatcagggagtgattcctgcaggggacggtgtcaactaatcttaccattccatcttcaaattgctcattcaataaactatagactgtctgatggaactcgatactcagattaccttcataacttatgagcttattgacacgactaatc

SEQ ID NO: 9923 - DNA, 425 bp, Zea mays
  Clone ID: LIB3150-045-Q1-N1-E6
ttccaaatagtcgccctctcaactgggggggggtccgtcagtggattgtgctttttctccttaccgtcgcgtccaaatcatcctcacaccccgcagcatctccacgccgccacacctcgtcgcgtcgcgtcgtctcctccgagaagatggtcggaccaggcctctacaccgagatcggcaagaagaccagggatctgctgtacaaggactaccagacagaccacaagttcacccttactacctacagctccaatggcgttgctgtcactgctactagcacatagaaagctgacctgatcttcagtgagatccattcacagataaagaacatgaacatgaccgtatatgtgaaagcaaactcagagtcaaatatcattactacagttactgtcaatgagattgcaacaccatgactgaagactatc

SEQ ID NO: 9924 - DNA, 434 bp, Zea mays
  Clone ID: LIB3150-045-Q1-N1-E7
ctagccgcctgtcttgctgaagctgaacgtgctgatccgtcttccaagctgtggtgtcatcccctgagttctgatccaagatgtatctccagtattacatcaatgagaagggggacaaggtctacaccaccaagaatgagtcacctcttggggtgccgacgcagtctgctcacccagctcgcttctcaccagatgacaagtactctcgccagcggtacctgttgaagaagagatttggacttctgccaacgcataagccagcactgaagtactgaagcttcaacttttcaaccatggatgtgcactttgtgtcactgcttgatgcttgtcggttggaatgtagaataggtatctgaggaaacatatcaaacactgcttggcactactatgacatctcagctcattcaggcactatatttaatgctatgtgttga

SEQ ID NO: 9925 - DNA, 374 bp, Zea mays
  Clone ID: LIB3150-045-Q1-N1-E8
ttcgatctccgcctgcctcaaggcctggatgtccgtcgcccgggttgatgctcgcggggggacgccgcgtaccaccaggagacgctggagaacctcaagctctccatcaagtccaccaagaagctctgcgctgtcatgctcgacaccgttggcccggagctgcaggtggtgaacaagagcgagaccccgatctccctcgaggagaatggcacggtcgaactcacccttcaccggggccaagacgccttcttcagcttgctgccatcaacttttatggactctccaaggcggtgacaccaagggcaacaaatattcggggacaatacctggtcactggcagagagaccacctcagattggttgagaggtttttta

SEQ ID NO: 9926 - DNA, 268 bp, Zea mays
  Clone ID: LIB3150-045-Q1-N1-F1
gtagcagcacgcccacgcctctcccaggggcggcatcccatttagtgcttgcaaccatggctatgcgatcgaacaaccactctaagaggctcaatagcgcataagcattggatgctccgataaagctagccaagctctcattgccaagccatgtcatgtacctcactcatctagtgagtgacttgctcaagctctgatgatcacgaacagctctaagtatgctgaaaactaccgtgaggtcatatttatccagatgcaacggcatcta

SEQ ID NO: 9927 - DNA, 450 bp, Zea mays
  Clone ID: LIB3150-045-Q1-N1-F11
ggctcattgctccaaactcccactgcaggcctgaacaaaactggagggctgcagatgtgccgtttgaccctcttcagtaccagcaacaaaccgaaggcttcgaggaatcatacacctatcttgaaaatgcaatctctcacatggggaaatttgatggaatcctgggcttctctcaaggcgctgccatggctgccttattctgcaagcagcagcagaagatgtgccgcttttccaaagtccaggtttgggatgttctgctctggatatccagcacctgtgggcgattttggcaacgaaccaatcaagctcccctcgctccattgtttcggcaatggggatggtcatgataggcagatagcgaacagggcaagcgctgaacttgctggtttgttcgagcaggattgctgctccgttgttgagcatgatatgggccacataatccccacccgg

SEQ ID NO: 9928 - DNA, 441 bp, Zea mays
  Clone ID: LIB3150-045-Q1-N1-F12
ttacatttcgtttgggtggacgacgaggaagaggtggccaacgcccacagcaacaggcgaccagcccgcgaagacgtggcaccaggataggtgctcctgtcctgagcttcaaatccccaccccgcggccaagctgttacttgcgctgcggccttagcatgaggtggccgctggcgatctcgactcgccgccgccccctcctccttttcgtccttgttcgtggcctttacaccaattcctgggacatttttatcgaggcatggaacactcgatactgttgagatattttctactcatgaatggtttggcataccaacagtcgttttcggttgcaatggatagaataaatcagatttgccagatttgagggaggtgcacacgctatatacctttaagggtgaagaatcatggctgagcttccagattagatattcatgctatg

SEQ ID NO: 9929 - DNA, 443 bp, Zea mays
  Clone ID: LIB3150-045-Q1-N1-F3
ctcacccgcaggccgcgccgccccagcagatgtgacgcacagaaacaccaaagccccaaaggcccaaactcaccacctcccaatggagaacggcgacgaaaccctcgcctcccccacggccgccgccgagacggacgcgctcaacggcggtgtcgcggaggaggagcaggtccccatcacccaccccgcaaagtcctacgtcacgctcgccgacgacaaccccgctcctaacggcggcgtcgtgaaagaggaggagggcggcgcccacaccgccgcgaagtactactcagctgtcgcctgccaagcccagatcgaggactcttctgccgtcaacctcgatctggaggagaagctcgctgaggcccgccgtgagaacaagtgcttggccgaggagacgcaccgcagcgagcggatctttacgcaagcccgggaggaggtcacca

SEQ ID NO: 9930 - DNA, 134 bp, Zea mays
  Clone ID: LIB3150-045-Q1-N1-F4
cttactcgcactgtgtctctgtctatcggtggggatctcaaacaacagggccgtcctctatttcaacctaagctttcgttaatctataacgcggacacaaccatccactaccacaccggcagaaacgacacata

SEQ ID NO: 9931 - DNA, 202 bp, Zea mays
  Clone ID: LIB3150-045-Q1-N1-F5
tttatgagaagattaaggctctgaggcgggtgattatgtctcccacagacgagctgaggaatgactctctttatctctttaacaacttaccataagccttacctttaacgcatcttgcgggctatggatggtcttttacctactattaaactgttagaccctcaaactcaacaagtgccttccctaaaggaacttcatgtaa

SEQ ID NO: 9932 - DNA, 235 bp, Zea mays
  Clone ID: LIB3150-045-Q1-N1-F7
gtctacacacggatcaataacactaactgggggcccggtcattctccgggtggggcgtactactacctttttcaggcattctgaccaaccaacttctcgtgactgccatggctctgctctccgacctgatgaacctcaacttttcgggccggaccgggaagatcatcacctagtccatttggcttgccgtttccggcttggacacaaggagcaaagcatggaccctctccggact

SEQ ID NO: 9933 - DNA, 216 bp, Zea mays
  unsure at all n locations
  Clone ID: LIB3150-045-Q1-N1-F8
ctgacgcgtgggaacaaaaagccgcgttgaaacacttgaaagacaggcacggatagcttctgctgnangnnnccacccagagctacctataataattactggttcaaaggatgggacagctccaatgtggcaatctaacaaccacaagcctgagaacacccctaactaaggccctgagccaggttgggccttaaggtatataaaaagggtcaagaa

SEQ ID NO: 9934 - DNA, 445 bp, Zea mays
  Clone ID: LIB3150-045-Q1-N1-G10
tcgttcccattgtcctctgcggtaataggggggatgtgtagaacaggcgggtcgaagccaatcacgttactttccacaggaagaagaatctgcagtactatgaaatttctgccaagagcaactacaactttgagaaacctttcctgtacctcgcaaggaagctggctggtgatccgaaccttcactttgttgaagctgttgctcttaagcctccggaagttaccatccacattggctatgcaacaccagcatgaagctgagcttgctgcagcagctgcacaacctcttcctgatgacgatgatgatctgattgagtagaaaggatcatgagtcttgaacttgagcaggagttgtgccttgcgtgctttaagttgttctagggtgaactcttgagttctcattgtctggatcatctctttctccttggatgtgttgcatcttttga

SEQ ID NO: 9935 - DNA, 409 bp, Zea mays
  Clone ID: LIB3150-045-Q1-N1-G11
ttaagctcaatcaattcactcaaacgggggccccaaatcttcgaggagagtctcgttgacaagaagactagaaccgaacctgaccatgtctctgatccgccgcagcaacatgttcgatcccttctccctcgacctctgggacccctttgagggcttccccttcagctccggcagcagcagcagtctcttcccctcgttcccgcaggaccatctcggataccgtggccttcgcttgcgccgcggatcgactggaaggagactcctgaggcgcacgtgttcaaggcagacttacctgagctgaagaaggaggaggtcaaggtggaagtcgaggacagcaacgtccttcacatcatcatcgagcgcaacaaggagcatgaggagaagactgacacctgtcaccgcctggagc

SEQ ID NO: 9936 - DNA, 449 bp, Zea mays
  Clone ID: LIB3150-045-Q1-N1-G12
ctctctggtgggcacgatgcgcggccacgaacggctaggtgacggcgatcgcgaccccgatcgacaactcgccgttcatcgtctcctcctcccgcgacaagtccctgctggtgtgggacctgaccaacccggtccactccaccccggaatccggcgccaccgccgactacggcgtccccttccgccgcctcaccggccactcccacttcgtccaggacgtcgtcctcaagttccgacagccagttcgccctttccggctcctgggatggagagctccgcctctgggacctctccaccggcctcaccacccgccgcttcgtcggccacgagaaggatgtcctctccgttgccttctccgttgacaaccgccagatcgtctccgcgtcccgcgacaagaccattaagctctggaacaccctcggtgagtgcaagtacaccatcggaggtga

SEQ ID NO: 9937 - DNA, 341 bp, Zea mays
  Clone ID: LIB3150-045-Q1-N1-G2
cactactccgactcggccatggcgacacgcgcgagctctcctattcccggcgcgctcatctgcatcttctccgccgtcatccgcgcaggtagaggcggtggtcctcttcaacgtctgcgacagctacgtgcggcgaccggaccaggcagaccgtgtcatcggcaccctccttggatccctcctccccgatggcaccgtccacgtccgcaactcctacgtggtcccccacagcgagtcggccgaccaggtcgccatcgacatcgactaccaccataacatgtacgcctcgcaccagaaggtgaaccccaaggaagtcatcgtcggatggttctcgactggat

SEQ ID NO: 9938 - DNA, 434 bp, Zea mays
  Clone ID: LIB3150-045-Q1-N1-G3
cgccgacaaaaccagaccatcaaacaagtgcgagcgccctctcgcagtcgccgcaatggagagcaccttcatcatgatcaagcctgacggcgtccagaggggcctcattggtgagatcatcagccgttttgagaagaagggcttctacctcaaggccttgaagcttgtgaacgtggagaggtcgtttgctgagaagcactacgccgatctcgcctccaagcccttcttccagggcctcgtggactacatcatctctggccctgtggtggccatggtctgggagggcaagagcgtcgtcacaactggccgcaagatcattggcgccaccaaccccctggcttctgagcccggcaccatccgtggcgactttgctgtcgacattggcaggaatgtcattcatggaagtgacagcattgagagtgctaataaggaga

SEQ ID NO: 9939 - DNA, 414 bp, Zea mays
  Clone ID: LIB3150-045-Q1-N1-H11
ctgaaatgtacagaggcaccaacaagctgtggatttgatactgcttgcatgatatactccgaaatgattggcaatggtatgactgatgcaagatccacaggaaaatactaccactctgtgaggcttatgggtcgcgctgcttctcacattacattggaatgcgctttgcaaacacaccccaatgctgcactcattggggaagaggttgctgcgaagaaagaaacccttaaaaatggcacaaactacattactgatatcatctgcaagcgtgcagatcttggttacaactatggtgttatccttataccagaaggcctgattgatttcatcccagaggttcaaaaactcatcgcggaattgaatgaaattttagcacatgatggtgttgatgaggcatgggcctggaaaagcaag

SEQ ID NO: 9940 - DNA, 445 bp, Zea mays
  unsure at all n locations
  Clone ID: LIB3150-045-Q1-N1-H12
tctgaggcgaaggaggaggagcagcaggagcaggctgcgccgaggagcggcatcccactcagtgcttgcaaccatggctaggggattgaagaagcacttgaagaggctcaatgcgcccaagcattggatgctcgacaagcttggcggagcttttgctcccaagccatcttctggacctcacaagtccagggagtgccttcctctgatcctcatcatcaagaacaaggctaaagtttgctctgaactaccgtgaggtcatttctatcctgatgcaacgccatgtacttgttgatggcaaggtcaggactgacaagacctaccctgctgggttcatggatgtcatttccatccctaagacaatggagaactacaggctgcnttatgacaccaatggccgcttccgtcttcacccaatcagggatgaggatgccaagttcaagctctg

SEQ ID NO: 9941 - DNA, 445 bp, Zea mays
  unsure at all n locations
  Clone ID: LIB3150-045-Q1-N1-H3
gaaatacttggtgattatgatgctattcatgtgagacgtggtgatctattgaaaaatcggaaagatagatttggtgttgaacggagccttcatcctcatctagacagagacacccgacctgagtacattagaaaaagaattgcacaatggattccaccaggtcgaactttattcattgcatcaaatgaaagaactccaggcttcttttcccctctgtcagacaggtacaagttagcgtactcgtccaacttcagtagcatattggagccaataattgagaataactatcagttattcatggtagagaggctaatgatgcaaggagcaaagacatttatcaagacaatgcgagaatttgagagtgatttaaccctttgtgatgatcccaaaaagaacaccaaagtctggcaaaagccagtatatacagatgatngacgttagttgg

SEQ ID NO: 9942 - DNA, 226 bp, Zea mays
  Clone ID: LIB3150-045-Q1-N1-H4
tctctggcctgtgggtgattgggtgtgggcgtgtgggcctaaaatgggagggcgcatccaagcccgacccgtatttgccagattcgagtgaactggatccaactaaacaaacaattttccccatttgccattcccgacgagcaccttcaccgtctcctcccacctcgcgtggcacgccatggctttctccccgcgctcgccgtggtcgcgtgccaagaaaaaccga

SEQ ID NO: 9943 - DNA, 441 bp, Zea mays
  Clone ID: LIB3150-045-Q1-N1-H5
gtccccctctccctcagtaaacccctcggttcttcccgcggtctgctcgggcgatctgtgcagcagatctgaggtctcgagcgaccgtgaagcagcttcaatcgtcggcatggcgctcgtattgcatagtggggctggaaacaagaatgccttcaaagcacttattgctgcagaatacagtgggatcaaggttgagttgaccaaggattttgagatgggtgtctccaacaagacccctgagtttcttaagatgaacccccttgggaaggttcctgttctggagactcctgatggccctgtttttgagagtaatgctatcgcacgctatgttgctcgcttgaaggatgacaaccctctttttgggtcttcccatattgaacaagcccacgttgagcaatggatggattttgccgcaacagaagttgatcctggtgttgcatg

SEQ ID NO: 9944 - DNA, 391 bp, Zea mays
  Clone ID: LIB3150-045-Q1-N1-H6
ctggtatctccaaggatggacagacccgcgagcatgctctccttgctttgacgcttggagtgaagcagatgatttgctgttgcaacaagatggatgccaccacacccaagtactccaaggcccgttatgatgagattgtgaaggaagtctcttcctacctgaagaaggttggatacaaccctgacaagatccactttgttcccatctctggtttcgaaggtgacaacatgaatgagaggtccacccaaccttgactgttacaagggcccaaccttacttgaggctttggacttgatcaatgagccgaagaggctctcagacaagcccctgcgtctccccctacaggatgtgtacaagattggtggtattggaactgttcctgttgggcgtg

SEQ ID NO: 9945 - DNA, 416 bp, Zea mays
  Clone ID: LIB3150-046-Q1-N1-A3
tattcagactccatctcctccttgatatgtcacgtccatcaattggtgctgcacatttttatcaagtgccgtgggtgttagatcactatattcttcaagtgaagaggcatcctctgtaccttgaacgagaacctttggtagatcataacattcatcgttcattcgtatcactttatgggcgtgatccagccttgtcaacactactaccctctgcagtacatggtgctggctcactacttacacataataccctaaccatttcaaatcccacttacctatgcttgaagacattataggagttaaaggagcaaatattgcgtacatactatcttatagttgtgctgtttttacaattcatgagaatttgttttgtttctattattttaattttgtaatattaggtttcattttttatt

SEQ ID NO: 9946 - DNA, 376 bp, Zea mays
  unsure at all n locations
  Clone ID: LIB3150-046-Q1-N1-A9
gaagcggggatcctctaaagactactttcgcgtctttttttaatacggcaaaggaaantgtggaggactgttttaaaggttgaggtgaaatcctaacattccacccaaggatgatggttcaatagctttttaaaatgactttttcaaacgtcaagcttttttgacactttctttaccacttttatgtttaatacatatctaaatgcctttaaaatacgtttatacctttttaccaacattcctttcatataacttacatacttcacgacattttttatattttttgatggttgaacccaaaatcacattttcaatctttcatgataacattaactttttcttaaaaaaatttacattatctttttttatttttttt

SEQ ID NO: 9947 - DNA, 366 bp, Zea mays
  Clone ID: LIB3150-046-Q1-N1-B1
aaagcctcaatacgcaaatagcaccgccgttcataacaccatgaaaatgctcatcgtgctggtcttttacctggctcggtcggctgccaacacctctgcaatgcaaatgccctgcccctgcgcggggctgcagggcttgtacggcgctggcgccggcctgacgactatgatgggcgccggcgggctgtacccctacgcggagtacctgaggcagccgcagtgcagcccgctggcggcggcgccctactacgcccggttgtggccacacaagcgccatgtaccagccgctccggcaacagtgctgccagcagcagatgaggatgatggacgtgcagtccgtcgcgcagcagctgcagatgatgatgc

SEQ ID NO: 9948 - DNA, 183 bp, Zea mays
  Clone ID: LIB3150-046-Q1-N1-B10
atattacccaacccccatcgacagccattattcctactaaccagcatacttgatccattttttccttagtgcgacagccttcaccctttattaaaacgccggacgacctatcccgtttttatcatgacactgaatgtactgtcaccgaataggctttctttttttttgacaaatcttcataat

SEQ ID NO: 9949 - DNA, 359 bp, Zea mays
  Clone ID: LIB3150-046-Q1-N1-B12
agcggggatccttaaagacttcctacgcgtccgctgatacccccatatccgactcggagaagcattttttaaaatggaaggcccactctatttcctccactacctaccctcaccatgctgtcaccgttcttaagaacaacttcatcttcatcaacaaccgttccttttttgctttccaaagtttctaccatcaatacttttaatcatggtcactccaacatccaatttctcaccatacacatattccatgttaaaaatcatgaacatattttttctttatcacacaactcatacatattttatttttaccttacttaacatcaacttatttatatttcttaaaatttaattgctatcct

SEQ ID NO: 9950 - DNA, 396 bp, Zea mays
  Clone ID: LIB3150-046-Q1-N1-B2
aactggattatacatcgagatctaaagcgttccaacatactggtcatgggagaaggagatgaacatggaattataaagatagccgattttggacttgctaggatatatcaagctccactgaaaccattatgtgataatggggttgttgtaactatctggtatcgtgctcctgagctgttacttggggggaaacactacaccagtgctgtcgatatgtgggtagttggttgcaattttggtgaactgcttacacttgaaacctttattccaaggtgtggaagcaaaaaatccttctaacccattccagcttgatcaactcgacaagatttataaggtcttaggccaccctacagttgaaaagtggcctacccttgccaatctttcatggtggcaaaa

SEQ ID NO: 9951 - DNA, 148 bp, Zea mays
  unsure at all n locations
  Clone ID: LIB3150-046-Q1-N1-B4
actcgctccactccggccatggccaacccgtcgaccatttaaacggtcctgcccatccataaacatttactnataaaactctccctctatacaccctccaacataactcacgctcaactgacactactcttactttttttattttcac

SEQ ID NO: 9952 - DNA, 134 bp, Zea mays
  Clone ID: LIB3150-046-Q1-N1-B7
ttgtttccttctcgaccgtgcgctaacgtaggcagacaacaggtatgggggcgcgcggcacctatatccgcttccctcttcggccacctgatctcaatcgggcgcgtcagttaggctacttgggccaaggcgag

SEQ ID NO: 9953 - DNA, 329 bp, Zea mays
  unsure at all n locations
  Clone ID: LIB3150-046-Q1-N1-B9
gggggccaccacagccatatcctgtcatgaacnnggattggaactcatttatcaatccaagaccganggaccgtangacatggattttatttctctcatcgaaagaaacattcaaacaccgggtagagcgtctaatcaatgtcaacggtctgccagcaagtcaaaactatcaaatgtacaccacacccacacatgccttatagcatcgaacatgtatcctcagatgtgagaccctacactcttattaaggtcattttgtaacgtcacctatctagtaccttgaatcttgtaatactaaatacttatacccaaaaaaaataataaataaa

SEQ ID NO: 9954 - DNA, 443 bp, Zea mays
  Clone ID: LIB3150-046-Q1-N1-C1
ctttactctcccttatgagctatctggcgtagtgtagcttttccaatgagactgtcaccgccaatcctccatttgcatggcttcgctacaacaaggatgatattgaagatctggaggccttcctactcgagaaaaagattatcactcgaggtggcacaaggtttggagtggatgcaagggctgtcagagttagtatggttgacacagaccaagccttcaatgtgttcatcaatccgctggcccacaatgaagtgaaatttcagtgcaaattaataaagcactttgtggctactacaaggatgaccgcgttctagatggaacaatcgatgctttggaaagcttaataatgttttatgttgttgaataattccgtgtgttttcgggtatgttgtgtaatactcaatgtcaaatcctatgcttaatcgatgttgtggtccatcctg

SEQ ID NO: 9955 - DNA, 438 bp, Zea mays
  Clone ID: LIB3150-046-Q1-N1-C3
acacactcgcgaactccatttcgatccggggtgaaatcaacccatcctcgtgttcctccgtctagcagcctctcaccctcatggccaagatcaagatcgggatcaatgggttcggcaggatccgaaggctggtggccagggtggccctgcagagcgaccacctcgagcttgtcgcccgggaccaccccttcattagcaccgattcattaacctacatgttcaagtatgaccactttccacgacagtgaacgcaccatgaggtcaaggtgaaggactccaagacccttctctttggtgagaaggaggttgctgtgtttggctgcaggaaccctgaggagatcccatggggttccgttggcgctgaatatgttgttgagtctactggtgttttcactgaccaagagaaggctgcagctcacttgaagggtggtgccaaga

SEQ ID NO: 9956 - DNA, 439 bp, Zea mays
  Clone ID: LIB3150-046-Q1-N1-C6
gtctcaactactactatacccgtcggggggtggatctgagcacagaagcgggcaatcccaccccccctccactcttcctcgccgttgccagatgctccgccagagcctccccgaggccgggtccttcttccgccggctccttggccgcgtctcgaacgagggcgggcttgctgccggctcctccgcgtctgtccgacatttcgtcgaacagcttgtaggcggcacggccccgatcttcccgcgtacccatccgacctcgccgtcgcctccgcggagcgtgggaccggaggaagcaacggcgcttccttgacggtccacttccttcgccactcctgcggcctcgaagaagccgacgccgcgaaggcggccgagcgcgtgcacctccgcaccaccaagaacgcgcacgccgtggtcgcgctcctacgcgacacgctcggca

SEQ ID NO: 9957 - DNA, 423 bp, Zea mays
  Clone ID: LIB3150-046-Q1-N1-C7
acccattcgtccgctcgtaaccctaggagcgtgcttgaccgtcggcggttatgtgatggcgatggaccctgacacggtagcgaaggccttcgtggagcattactaccgaacgttcgacaccaaccgcgcggcgctggttgggctgtaccaggagacctccatgctcaccttcgagggccagaagttccagggcccgtccgccattgccggcaagctcggatctctccctttccaggcctgcgagcattaaaatctcaccgtcgactgccagccatcgggtccccagggaggcatgctcgtcttcgtctccggttccatacgcaccggccccgaggagcaccccatcaagttctcccaggcattccatttgctgccggccgctgggtccttcttcgtgcagaatgacatgttccgcctgaacta

SEQ ID NO: 9958 - DNA, 440 bp, Zea mays
  Clone ID: LIB3150-046-Q1-N1-D1
ctcgaaaccctaggagcgtgcttgaccggcggcggcgaggtgatggcgatggaccctgacgcggtagcgaaggccttcgtggagcattactaccgaacgttcgacaccaaccgcgcggcgctggttgggctgtaccaggagacctccatgctcaccttcgagggccagaagttccagggcccgtccgccattgccggcaagctcggatctctccctttccaggcctgcgagcctaagatcgtcaccgtcgactgccagccatcgggtccccagggaggcatgctcgtcttcgtctccggttccatacgcaccggccccgaggagcaccccatcaagttctcccaggcattccatttgctgccggccgctgggtccttcttcgtgcagaatgacatgttccgcctgaactatggctaaagacagccgatactcttgtgatg

SEQ ID NO: 9959 - DNA, 433 bp, Zea mays
  Clone ID: LIB3150-046-Q1-N1-D2
gtagagcgcgcggagagcgagagcccgggagaaacagcggccggcggcagagtggtgcagcggctcacctaccggaagcgccacagctacgccacaaaatccaatcagacccgcgtggtcaagacccctggtgggaggcttgtgtaccagtacaccaagaagcgcgcgagcggaccgaaatgcccggtcaccgggaagaagatccaaggaattccacacctgagacctgctgagtacaagaggtccaggttggcaaggaaccgcaggactgtgaaccggccatatggtggtgttctgtctggtaccgcagtgagagagaggatcatccgcgcctttgtggtcgaggagcataagatcgcgaagaagggtttgaagatccaaaataccaaggatcaggcctccaatgactaggcgatataggcatcttacacat

SEQ ID NO: 9960 - DNA, 201 bp, Zea mays
  unsure at all n locations
  Clone ID: LIB3150-046-Q1-N1-D4
ttcttctctcgcatccgcagcctctcgagcggtactccatcccctcgatctggaagcgcancagcagcagtcaggcggccatggacgccagcgcaccaggagccgccggaaaggcaaaaaaggccccggccggccccagggccgccggcccaaggaggaagccgggaccagggtcggcaagggccggccgtaagttcccgg

SEQ ID NO: 9961 - DNA, 318 bp, Zea mays
  Clone ID: LIB3150-046-Q1-N1-D8
tataactggattggtcacactacaaacacaatacagcagtactcttcttgattctgtcaaaagtgttcggtcatctattgcgatgcatattgttgcggcaaagccattattcttatcaaaagaactggtttctgcttctgctttaaaaaatgagcgtgaaatacttcgaactcaagccccaaagttctgggaaatcccaaatggctatggataacatcgtggaaggactattgacgaactactttgaggaacttgctctcatttatcaaaaatatgttttaaatgacagcactaacattaaaactgttcttattgact

SEQ ID NO: 9962 - DNA, 432 bp, Zea mays
  Clone ID: LIB3150-046-Q1-N1-E2
cacaactgcacatggtgttgtttcatctgatatgcatacctgccctcagccaggtatgggtcgtatagctggattggtcacactagaaacagaagacagcagtactcttcttgattctgtcaaaagtgttgggtcatctattgcgatgcatattgttgcggcaaagccattattcttatcaaaagaactggtttctgcttcggctttagaaaatgagcgtgaaatacttcgaactcaggcccaaagtcagggaaatcccaaatggctatggataagatggtggaaggacgattgaggaaagtacttgaggaagttgtgctcatggagcaaaaatatgttttaaatgacagcactaacattaagaccgtgctgaatgacttgtcgaaagaggttggttctaaggtaacaatcggtaacttcatcagaatggag

SEQ ID NO: 9963 - DNA, 376 bp, Zea mays
  Clone ID: LIB3150-046-Q1-N1-E4
ttgtcttgaggacggcgtgttccgggtgtaggcttattaagcggcgcgcgcctccacaaatcccagcctctcattcgcggacccgaagcggcgggaggcgcctcatgactggacggacatgcccgtctttgtccaggtatgcgaagtcatggcgatggaatcccagaaggtcttgataaagcttactactgggacatctttctatgatactggagaagcgagttacccacttgaacggactgggaaacgagtatttacatggaatacatatgcatggtgttttggaccagaaaccacttctgtttaccagacacaccctttggttttgactgttctcccttaaggaaaagcattgattgttcttgcatatacaatt

SEQ ID NO: 9964 - DNA, 225 bp, Zea mays
  unsure at all n locations
  Clone ID: LIB3150-046-Q1-N1-E6
accactgctacccagaagacggtttataagccgtgggcgggggactgaaagacagcatngtctgctacactcaacatcataaccagcagcactgtatctgataatgctgaaggcaaagtgctttctatccttaaccgaaagttgactggaaagtcattccttgtaccaaccgaccatgtttctgttgttgatttgactaataagcttgagaagactgcaacctat

SEQ ID NO: 9965 - DNA, 296 bp, Zea mays
  Clone ID: LIB3150-046-Q1-N1-F1
gttcttatatggcgagcgtgcacaaggccagcaccctttttctaatgttgggcctgctaacgctggggagagcggagtacctcaagtacaaggacccaaagcagcccgtcgctgttcgcatcaaggacctgctgcttcggatgactctcgcccaaaagatcgtccagatgacgcagatcgagagggaaaacgccacgtccgacgcgctaaccaaatactttatatgtagccggcctaaccggcttatgcagcttgcctgctcctcacgcgtttgcataggcttgatcctccattgt

SEQ ID NO: 9966 - DNA, 122 bp, Zea mays
  unsure at all n locations
  Clone ID: LIB3150-046-Q1-N1-F12
acctcctcacgcggccttttatcagcaccaganagactcgacagangctttttacaaacggaggacgcgacccaaacccctctcccatatcatttgatgtccgtgaccacacccgccctaca

SEQ ID NO: 9967 - DNA, 337 bp, Zea mays
  Clone ID: LIB3150-046-Q1-N1-F2
ctcttataccccatccttgactagctccggtcgggtactagatggccggcgggatgaaggagttagacggcgccagccctgccaagatcttcattggcgggctctccaaggatacaagcatgagtacattcaaagaacattttgggaagtatggggatataattgatgctgtcataatgaaggaccgctacacacaaaagcccagaggctttggctttattacttttgctgatcctactgttgttgacagagtgattgaggatgaacatgttatcaatggataaccgtgtgaaattaacagaacgatccttaagggagctgctcctttgaaagattt

SEQ ID NO: 9968 - DNA, 416 bp, Zea mays
  Clone ID: LIB3150-046-Q1-N1-F3
gtggtagacaaagccaggaactccaaaggtgggagttcggattcggaggccgacccacaccactccaccacaccctactcgagcgaagcgagccagcaatggcgcatcgcatccgcgggccgtgaccggcgtcgccggagactggaacaacaatggctgccgtggcgcgcggcggtcttgcgatgcccacagcagttgtgccggcggctgcggctgccgcggatgaagagattccggtggcggcacatagacagcgtcctgagcacggtgtcgttcgggttcgtggccaccgacatcctcgtgtccatgttcctcgccatggccatcctcgagcactttcttcgccccagggcccatacgcttgggcacacgccgccccggtggatccgccgccaactccccttttttctcggccg

SEQ ID NO: 9969 - DNA, 426 bp, Zea mays
  Clone ID: LIB3150-046-Q1-N1-F4
ttttctacgctcctcgcgccgacgtcgggtgtgcttctgtacaggtgaggagaggaagagggcgaaatggtgaagcacaacaacgtcatccccaacgggcacttcaagaagcactggcagaactatgtcaagacatggttcaaccagcccgcccgcaagcagaggcgccgcatcgctcgtcaaaagaaggctgtgaagatattcccccgcccgactgctggtcctctacgccccattgttcaatgccagactttaaagtacaacatgaagtcaagggctgggagaggctttacccttgaggagctgaaggctgctggcatcccaaagaagcttgctccaaccattggtatttctgttgatcaccgccgcaggaacaaatcccttgagggactgcaagccaatgtccagaggcttaagacatacaag

SEQ ID NO: 9970 - DNA, 446 bp, Zea mays
  Clone ID: LIB3150-046-Q1-N1-F5
ttaataactagtttcctatcttgctcccgaaaccagcgcaaacgcggccgtgacaccggcggcgccatggtgctcgaggcaacgatgatctgcatagacaattcggaatggatgcggaacggcgactacgctccgtcgcggttccaggcgcaggccgatgccgtcaacctcatctgcggcgccaagacccagtcgaacccggagaacacggtaggcgtgatgacaatggcccggaaagggtgttcgcgtgcttgtcactcccaccagcgacctcgggaagattctcgcctgtatgcacgggttagaagttggcgctgaggcaaacttggctgcggcaatccaggttgcccagcttgctctaaagcatcgccagaacaagaggcagcagcagaggattatagctttcattggaagtcctgtgaagtacgacaagaaagttttggaga

SEQ ID NO: 9971 - DNA, 202 bp, Zea mays
  Clone ID: LIB3150-046-Q1-N1-F6
ctcctttgtataccccacccttgactaactcctagctggttctatataggcggggggaggaaacatttagaccgctccagccctgccaagatcttcattggcggtctctccaaggatacatgcatgactacatccaaagaacattttacgaagtatggccatataacatattctgtcatattcatggacccattcacacaaa

SEQ ID NO: 9972 - DNA, 354 bp, Zea mays
  Clone ID: LIB3150-046-Q1-N1-F8
acaagcaccggcgacgaagcatcctcctatacaactatctcacgcgtttgtcaaaaccagcaaagcattatcagccgccctttcttacaagttgtgttggggacaacgccaacgcaaccaagatcccatttatccttacatctcatattttacccacatacacgcccgcttctaatcctcctatctacatactactctccactcctatctcaccctgacttgataggtcaagatccatcttaccaaatctccaaaacattctacctaatttatcacacacctataccgttgatgagctcatacttactagagacatttatgaccatactttttcttttagtttttaacttaatg

SEQ ID NO: 9973 - DNA, 226 bp, Zea mays
  Clone ID: LIB3150-046-Q1-N1-G1
gatcctctaaagacacctcatcgtcctttatctgccccgcctcctctcgtccgtccgcctatttttatagccgggatgagggtacacaaacttctttttaatagcaatgctgatctgcaatcacatcttaaggagtttaaatctgagctctccctgctactcttatccaatgtcaccgtctgatctcccaacaagctctccaagatcaaggttgtgctcaccttca

SEQ ID NO: 9974 - DNA, 257 bp, Zea mays
  unsure at all n locations
  Clone ID: LIB3150-046-Q1-N1-G10
gggatcctctaaagnctacttacgcggctgataacaagcaccagnntggctcgtctgtaccttttaacatgggggcgacgcgttactaaccccgctccccggtgatctgatgtcggcggcggcacgcgcgccaccgccgccgcgcgcactctacacgccgtctataaaagtcccctttcgtacccatgattctaatccgcgcctcgaccctgttctaggtttctcacgtcacgttctttctagggtaatgttcataa

SEQ ID NO: 9975 - DNA, 191 bp, Zea mays
  Clone ID: LIB3150-046-Q1-N1-H10
aaaaaaaataaaagaaaaaaaaaaaaagagggaaaaaaaaaataatagagaaaaaagaaaaaaaaaaaaaaaaaaaacgcgaaagaagaaaaaaaaaaaaaaaagaaacagaaaaaaaaaaaaaaaatgaaaaagaagaaaaaaaaaaaagaaaaatagaaaagaaaaaaaagaaaaaagggggggaagag

SEQ ID NO: 9976 - DNA, 422 bp, Zea mays
  Clone ID: LIB3150-046-Q1-N1-H3
aatcataggaccttaccccataaagggcctgctacttattaaaacgtatgcacgctccaactacacctcacgatcatgaatttccccatataatcaactgctacaccatgtaacctaaaggttttgtaaccaccaattttcttcgcttatcgtcaccaacaaatatttgaaactgtcgtgatcgtgatgtccaatatccatatgatctgttaaagtaagcttagtattcccggatgtaacctttaagtccaatgtactgtttgcccagcacttagaatgttaccgcatgttctatatttgaagaatataattcatttttcactgattaaaaaaaaatcatcatctaacataaatctatttcatctaatcttttatttcaacctcctttctttttttattttctataaatttattatttattt

SEQ ID NO: 9977 - DNA, 445 bp, Zea mays
  Clone ID: LIB3150-046-Q1-N1-H4
gtcatgttctttgccttcggtcgtgtcgtctgagggaaggttgctactggtgtgaaggttcggatcatgggtcccaactatgtccccgggcagaagaaggatctgtatgtcaagagtgtccagcgtactgttatctggatgggaaagaagcaagagtcggttgaggatgttccgtgtggtaacactgttgctatggttggtctggatcagttcatcacgaagaatgctacactcactaatgagaaagagactgacgcttgcccaatcagagcaatgaagttctccgtctctcctgttgtgcgtgttgctgttcagtgcaaggttgcctctgaccttcccaagctagtcgaaggtttgaagcgtctagcaaagtccgatcctatggttctctgtacaatggaagaatctggtgagcatatcattgctggagctggtgagcttcatc

SEQ ID NO: 9978 - DNA, 321 bp, Zea mays
  Clone ID: LIB3150-047-Q1-N1-A1
ttcaaaagcatttcaccaaaaaaaaataatctctaggcatggaacctatgcccagtggcaaaattgtacatcacaaattcattattttgaatactccttaacagctcatatttaaatataaaaaagggtaatggtactcctgcaactgaagcccagatgggtaaggatgttgtatcattcccttcatgggcagcttgagctcttagatggttttagattaatgttgttctttatgatttaattttatttatctatttttttcttaatctcccttttttatgttttatatttatctcctttatttatgttttttaattcatt

SEQ ID NO: 9979 - DNA, 453 bp, Zea mays
  Clone ID: LIB3150-047-Q1-N1-A10
ctctctcccccaaagttccgttccgttccggtccgttcagttcctctcccgcacgtcaaaaccctcaacctcccacgcggctcgctcgctcgctcgctgggtgggtcggccatggctccccccgcgctcggatctcaggtggccgccgcagcctcggtgcccgtcggctcggactctctcgccaagggcgcggcgctcaagggtaacagcactctaaactttcggaccaaaccatgcatcgggatggcattagcgtggaaaaacaggacccagcaaccacggcctctgaacaaggtactctgcatgtctgttcaacaagcaagcagaagcaaggttgctgtcatgcccgtcgagttggagaaggcaaaggagccaccgctccacctctacaaaccaaaggagccttacacggccacgatcgtctctgtcgagaggcttgtaggacccagagct

SEQ ID NO: 9980 - DNA, 359 bp, Zea mays
  unsure at all n locations
  Clone ID: LIB3150-047-Q1-N1-A11
gtctaaatcaccaacagcgccttcgagcgatccttcatgatggccaagtgcgacccccgccatggcaagtacatggcatgctgcctcatgtaccgtggtgatgtggttcccaaggacgtgaacgctgctgtggccacaatcaagaccaagcgcaccatccagttcgtggactggtgcccgactggcttcaagtgcggaatcaactaccagcctcccagcgtcgtccccggcggtgacctggccaaggtgcagcgtgccgtgtgcatgatctccaannnaagcagtgttgtggaggtcttctcccgcattgaccacaagttcgacctcatgtacgccatgcgcgccttcgtgcactggta

SEQ ID NO: 9981 - DNA, 451 bp, Zea mays
  unsure at all n locations
  Clone ID: LIB3150-047-Q1-N1-A2
cagaatttgaagctggcaggcttggaagattttttcatgatacgttgaagatggcctactattggaagagtgatgaatctgtctatgagcgtgaatgtgcgaacaaacctggttttgcagtgtacttcagatacccaaacagccagcgtgtgtcctacagtcagtttgttcgggttcattggaagtggagttcaagaatcaccaaagcacttaatcaatgtatggaatcaaaagaattccattggaaattcgaaatgcccttattgtccttacgaagatttctagtgtcttcccggtgattcgtaaaagtggtgtcaatcttgagaaacgggtggctaaactaaaaggggatgaaagagaagatcttaaagttctagccactggtgtagctgctgctttagctgctcgcaagagttcttggctatctgaagaagagtntggcgggggtcac

SEQ ID NO: 9982 - DNA, 66 bp, Zea mays
  Clone ID: LIB3150-047-Q1-N1-A6
tctgcctttttaagtttcatcatgctgtcctttcttttttgttctacttgcttataaatttgtttg

SEQ ID NO: 9983 - DNA, 394 bp, Zea mays
  Clone ID: LIB3150-047-Q1-N1-A8
attaatactactgacagcaagactggggtgatccacgaagcggtatggagtccgggtagggtagctaggatgacggattctgtgttgctgaacaagccaggcatggccagcatcaaggagatgcctgttctgtaggacaggcctccgccgggcggttttgcgcccgtgcgctacacgcagcctgattcccacgtctgtcgccagctccgatggaatgttcctcaatggcttccagggctttaaggtatggcatgtacaatgtcgatcaggacaacaagttgcgccatgcactcaaagaagataaaattactgttcgtaatgctatactgccgatgctccaagctgaagaggatgaaagatgtgtcaaagagtggaagaagtatcttgaggagga

SEQ ID NO: 9984 - DNA, 441 bp, Zea mays
  Clone ID: LIB3150-047-Q1-N1-B1
gtgccgccctttttttttttttttcaggggatgttgtcaggcagaagaatgacaaaaacgaggtttgctaatgttacaagtcaaaatttacataaatgaatcaacaagcccatggacactttattacatcgagcattctatgactctgattatttattatacatcggcttcagaaatcaaataacaataggatacactgaacaagaattttcaaggtttttttttctcaacagccattcttgaaaaatgaccaggggtttctctggatctaaatacaagactcagcttttctcaagcctgcaggaaactggcatactttgcgccaaggaagagcctttgcacacagatcaatgcatttttcctcacttcagtgttctcatgattcatgagtttcatgactcggtccttagccttgaagtctgccaccacgattcggccaga

SEQ ID NO: 9985 - DNA, 449 bp, Zea mays
  Clone ID: LIB3150-047-Q1-N1-B10
cagggatcgccatgtcggactcggaggagcaccacttcgaatcgaaggccgacgctggggcgtccaagacctacccgcagcaggctggcaccgtccgtaagaacggcttcatcgtcatcaagaaccgtccctgcaaggttgtggagggtttctacctccaagactggtaagcatggccacgccaaatgccactttgtcgccatagacatattcaatgggaaaaagcttgaagatattgttccttcatcacacaactgtgacattccgcatgtgaaccgtactgagtatcagctgattgatatttctgaggatggatttgtgagccttcttacttcagatggcaacactaaggatgatcttagactcccaactgatgagactcttgtggcccagattaaggaagggttcgaaagcgggaaggatcttgttgtgactgtccagtctgcgat

SEQ ID NO: 9986 - DNA, 450 bp, Zea mays
  Clone ID: LIB3150-047-Q1-N1-B12
gttatgctctgggattcgtgtaaatgacgcatataaggttgtgaagattggaggcaatgtgctgcgcgaaggtgagtggctatcgctgaatggatcgaccggcgaagtgatcctcggaaagcagccgctcttcccaccagccctcagtgccgatctgggaacattcatgtcctgggtggatgacgttagaaagctcaaggtcctggcaaacgcggatacccctgaggatgcattggctgcacggaacaacggggcagaaggaatcgggttatgccggacagagcacatgttcttcgcttcggatgagaggattaaggctgtgaggcagatgattatggctcccacagttgagctgaggcagcaggcgctggatcgccttctgccttaccagaggtctgacttccaaggcatcttccgtgctatggatggactttcagtgactattcgact

SEQ ID NO: 9987 - DNA, 437 bp, Zea mays
  Clone ID: LIB3150-047-Q1-N1-B3
ttgacgcgtgggcggacgcgtgcgggcggaggacttccctgcacgagtggggaagtcgctacggcatgcctggacgacgaagatgttagagctgcgattcatgccaaaccaaaaagctcaattggatcatgggaactgtacactgcaagaatagacttcacccatgatacagggacgatggtgagctatcacaagaagtttacagctttgggatatcgcgtgctaatctacagcgggataccatgacctgtgtattccttaccctggtaccgaagcgtgggtgaaatcaataggctaccaagttactgatagatggcggccatggtacttcggagaccaagttgccggatatacagaaggatacggtcacaatcttaccttcctcactataaagggagccggacatgctgtgcccgagtacaagcccaaggaggctc

SEQ ID NO: 9988 - DNA, 446 bp, Zea mays
  Clone ID: LIB3150-047-Q1-N1-B4
caagcgcccccgcgagccagctccggcgaggtcgacagcaccaagcatggcggacacgaaggcgtcacccgcggtgacgctccgcacgcgcaagttcatgaccaaccgcctactctcccgcaagcagttcgtgctcgaggttctccaccccggccgcgccaacgtctctaaggcggagctcaaggagaggctggctaagatgtacgaggtgaaggatcccaacttgatttttaggcttaaagttccggacccacttcggaggcggcaagtctaccggattcggtctcatctacgacaacgtcgactcagccaagaagttcgagcccaagtacaggcttatcatgaacggtcttgctaccaaggtggagaagtcgcgcacgcagatgaaggagaggaagaacagggcgaacaagatccgcggtgtgaagaagacaaaggctggggac

SEQ ID NO: 9989 - DNA, 164 bp, Zea mays
  Clone ID: LIB3150-047-Q1-N1-B6
gttgcgcgccacgaactcgcgacgctgtcgagagatccatggatcggcgcaagggcggcaaccgcgacaccaacggcagcctggtcgaggccacggcgtcgcggctgagggtcgaatccgacgaggaggcggaagaggtggggatggaggtggaagagagcttc

SEQ ID NO: 9990 - DNA, 442 bp, Zea mays
  Clone ID: LIB3150-047-Q1-N1-B7
ttatattcttccagagatactggatgggcacaatgttgccgattgtctggatccagatatccttgtaaggtgtgaagagttggaaagggaggaagggcttcgtctggaagaacaagctgcagaagatgctttccagattgatggtcatgaactaactcaggaacagaaggagattttggctcagattaggaagaagaaggcattacttatccaagaacatagaatgaagaagaagacttgcagaaagccgtcctattgtccctagaaagtttgacaaagataggaaattcacaactgataggatgggacgccagctttcatccatgggtatggatcctagtgctgccatgaatagaattcgcagtcagtctaggggtcgcaagcgtgagaggtcagtgagcagagctgcagcggatggtgacggtatggagatagatggcca

SEQ ID NO: 9991 - DNA, 449 bp, Zea mays
  unsure at all n locations
  Clone ID: LIB3150-047-Q1-N1-B8
gtgctccgacccctacccagctcaaggctgtgctggcctcatcaacccttcctccccaggacgtgatgaatgctctcctggaggctctctttggtggtgtgggtaagggattcaccaaagaggttgtgaagaacaagaagtaccttgcagttgctgtgccagatgagggtgcccagacccttctggttcaggccattgaggcttttggtgggaagtgcaaccctgaagcgcttaaaggagggtccggttgtcctcaaagccctctacgatggagatatcctggacgaggaaaccatngtggactggtacaatgatgctgtcgcagctgggaaggactcccaggttgtcaagaatgccaagccgttcgtcgagtggctccagagtgccgagtctgatgaagatggtgacgacgagtgaagaagccacgctgctctactgctaatggccaa

SEQ ID NO: 9992 - DNA, 405 bp, Zea mays
  Clone ID: LIB3150-047-Q1-N1-C1
tgccgctgcttgcgcctctctcgcccgcgtggccgcagggttcgcaaagatggcagtgccgctgctgacgcagaagatcgtgaagaagcgggtcaagcagttcaagaggccacacctcgaccgctacaagtgcctcaagccaagctggcgtaggcccaagggtatcgactcccgtgtcaggcggaagttcaagggatgcaccttgatgcccaacattggatactgctctgacaggaagacgaggcactaccttcccaacaagttcaagaagtttgtcgttcacaacgtctctgagctggagctgctgttgatgcacaacaggacatactgtgccgagattgcccacaacgtgtccacccggaagcgcaaggagaatcgtgaacgttctgcgcaactggacatctt

SEQ ID NO: 9993 - DNA, 394 bp, Zea mays
  unsure at all n locations
  Clone ID: LIB3150-047-Q1-N1-C11
tgtcaggctaacgtcagagagatcaagggggtctttatgaagtgctggaaccatcatcatgcaggaccgggcatgtcagactgtcatccgtaacgtgactatgaagtgctcagggacgaacaggatcatgacttcactagtataatgccancgcccagatcaaaactggccacttagatgctactggcctgcacgatagacagtttaccacgttagctgtctctgggtatgacggacttacggtcatgccctcagatacggagacaggcctgaccaaagaaaaaacgtctggagtaagcagttcatatggcacgtatatccaccagtaatacactctggaggcacactgtgctagctgagctatagctcgtaggggaggagtctcatgcatgac

SEQ ID NO: 9994 - DNA, 172 bp, Zea mays
  Clone ID: LIB3150-047-Q1-N1-C2
ctgcaagaaggtcatggctgtccgcatggcgggcataccctggagatgattcacctgctcaccgatgccaaccccatccaggtcgtcgtcgacgcgatcatcaacagtggaccccgtgaggatgccacccgtattggttccgctggtgttgagaggaggcagtccgattttt

SEQ ID NO: 9995 - DNA, 445 bp, Zea mays
  Clone ID: LIB3150-047-Q1-N1-C3
gcctgccgccgccacgccgcccgaaaggcggaggggaagctcctcgacgacgtagcggccagtggcagctcggacgatggcctcgtccaactccgccgccccggctcccgccgacgggggcgacgacctcgaccagctcctcgacagcgcgctcgacgacttcaccaacctcgatctctctgcctctgccgcccccaaaagctccggcgaggcatcggggtcaggatcgggagggcagggggccagtgaaggggctggggctggggcttccggaccccaaggcgccgaagcggcgcgcggggaagcagccgccgccgaggggcgcgtgcgccaaagaggcgctcgaggagctgacgcgcgagacgcgggaggctgtgcgcggtctcgagacggccactgggagtgtcccgtcactggacgatgacgccatgatggaggagtttgt

SEQ ID NO: 9996 - DNA, 456 bp, Zea mays
  Clone ID: LIB3150-047-Q1-N1-C4
agtgcgtcgagtttctgaggcatcagtgcaggccgacggcgacgccctactggtcgcctcagtgccagtcgttgcggcagcagtgttgccagcagctcaggcaggtggagccgcagcaccggtaccaggcgatcttcggcttggtcctccagtccatcctgcagcagcagccgcaaagcggccaggtcgcggggctgttggcggcgcagatagcgcagcaactgacggcgatgtgccggcttgcacaagccgactccatgcccctacgctgctgccggcggtgtcccccactgaagaaactatgtgctgtagtatagccgctggctagctagctagttgagtcatttagcggcgatgattgagtaataatgtgtcacgcatcaccatgggtggcagtgtcagtgtgagcaatgacctgaatgaacaattgaaatgaaaagaaaaaagtattgttcc

SEQ ID NO: 9997 - DNA, 230 bp, Zea mays
  Clone ID: LIB3150-047-Q1-N1-C6
tttcaactccaacattgaaattcatgcggggaattatagccagtatgggcgcattgttaccgaggacttcttgccacttccaagcaaagggaaatctgggaaggatggctggtatcctccaggccatggtgatgtgttcccctctttgaataacagtggaaaactcgacatcttattggctcagggcaaggagtatgtcttcgtcgctaactcagacaacttgggtgcta

SEQ ID NO: 9998 - DNA, 294 bp, Zea mays
  Clone ID: LIB3150-047-Q1-N1-D2
gtgaaacgtagcgtggatgatggtgagaaacgtttcaatcagctttcaattgaggagaggggcaagtttgatgaagagacacttgtcaacgtgaacagcatcaagaggaataaaggaggcagccaaagatcaagtggttttagcaacgagtacattgtgataaccatattggttgctgctgagggagtacataagctgccggttataaatagcagcaatgacttaaagacagctctacaaagaatgggtgccataccatcaagcaaaatactggcagtcgaggtcctgtggact

SEQ ID NO: 9999 - DNA, 206 bp, Zea mays
  Clone ID: LIB3150-047-Q1-N1-D3
ttttagcctcacctctatggcagcgagggcgatcgttatcaatgggttagggaggaccgcatgatctctgaccaccgtcgtgttgcagagagacaatggcgctctagctgactcgaacgttacctacatgcacatattatcaaccacgtatatactcatgcaaagcactagtcacggccagacgaagcactacgacgtcctggttt

SEQ ID NO: 10000 - DNA, 242 bp, Zea mays
  Clone ID: LIB3150-047-Q1-N1-D4
atccaggcgctcttctgctgcagcgccggctctcgtcctcccggcgtcatcgtcgccgccctgatctccgcaggccggcgtgtggcggagatccatccgtgcttgaactgactccttccttagctacaagtacctattatcaaccatgtttggacgcatgccaaggaagagtagtaacaataccaagtattacgaggttcttggtgtgtctaagaccgcaagtcaggatgagcttaagaaag

SEQ ID NO: 10001 - DNA, 455 bp, Zea mays
  Clone ID: LIB3150-047-Q1-N1-E10
gtctccgtcatgtcgaagcgaggtaggggaggttcggctgggaacaggttccgcatgtcactgggtctaccggtggcggccacggtgaactgcgcggacaacacgggcgccaagaacctctacatcatctccgtcaagggcatcaaggggccgcctcaaccgcctcccgtccgcctgtgtcggcgacatggtcatggccaccgtaaagaagggaaagcccgacctcaggaagaaagtgatgcccgccgtcatcgtccgccagcgcaagccgtggcgtcgcaaggacggtgtctacatgtacttcgaagataatgctggagtgattgtgaatcccaagggtgagatgaaaggttctgcaatcactggacctatcggcaaggagtgtgctgacctttggcctatgatcgccagtgcagcaaatgccatcgtttgagagcttgtcggaatgtgtttag

SEQ ID NO: 10002 - DNA, 450 bp, Zea mays
  unsure at all n locations
  Clone ID: LIB3150-047-Q1-N1-E11
cctactcgatccatcgcctcgccggggcggacactaggccggcggggccgtggccatgaagctggacatgtccacgctcgagaccaacttcgccaacctgaccgcctccgccggcgacgacacgtacttctgcgccgaggccccccgacttgccgtccatgttgctccttatctgcgacgacttcgacggctngcaggcggccactaaggatatggtgaagaataagaaggggacgaccacgcttgccttcatcttcgacaagggcgtcatcgtcgccgctgattccagggccagcatgggcggttatatatcctcacacaccgtgaggaaaattattgaaataaatccttacatgctggggacaatggctggaggtgctgctgattgccaattatggcataggaacctaggaaccaagtgtcgtctacatgagctttcaaacaagcgaa

SEQ ID NO: 10003 - DNA, 385 bp, Zea mays
  Clone ID: LIB3150-047-Q1-N1-E12
gtacgctgctatgagagctacagtgagtgtccaaaggttgtgcagtgactgacttcactcatctctggcctgcaaggtgacgctcctgcggattccgcgggaaggccgtatgttgggggaagtaagaaggtcgctgcgtgcgcgaagcactatgtcggtgatggtggaacgcataacggaatcaacgagaacaacacgatcatcgacacacacgggctgctgagcatccatatgcctccttactacaactctatcatccgaggtgtctccacggtcatggtctcctactccagctggaacggagtgaagatgcacgcgaaccatttcctagtcacggattttctcaagaacaagctcaagtttaggtgttttgtgatttccgact

SEQ ID NO: 10004 - DNA, 318 bp, Zea mays
  Clone ID: LIB3150-047-Q1-N1-E2
ttcttgccctgaggacgttggtggcattcgcgcattttttaaaatggttacggcaaccatatctcttctcccattgattcctttttttttgtttttgctcgattcttctattacatctatttttgttgttttctaatatttttttttttttattttttctttattcaatattttcttatattttctttttttttttttttttatcttttatatttttttttttttatattttttaatttttattatcttattttttttttatttattctttcattttatttttttctttatttttattattatttttattgtttatat

SEQ ID NO: 10005 - DNA, 139 bp, Zea mays
  Clone ID: LIB3150-047-Q1-N1-E4
tttttgtctacgtccactactaaaccgggtgagtatgtggaggagcacgagggctaggtaaacttccttgcttctaacccagttaacgaatgaactgatgcaacttcttgtgctcttgatattgaaaaaacttattatc

SEQ ID NO: 10006 - DNA, 176 bp, Zea mays
  Clone ID: LIB3150-047-Q1-N1-E5
tttcttatacacgtccaatgagttctcgccgatttttacctagggggggggcaccaagcattcaatgtaccattccaaaccctcctactagactgcgcaaactgcacagagccaatatatccttatttgattattaacgcttgtggtcattaggaaagtatgcttgcattattctt

SEQ ID NO: 10007 - DNA, 216 bp, Zea mays
  Clone ID: LIB3150-047-Q1-N1-E7
ccgacattcacgtgcagctgtcgggaggaggcaatggcgccggatctaagcgaactcgccgccgccgctgcagcccgtggcgcctacctcgccggcgtcggtgtcgcggtcctcctcgcatgcctgcttactaccagtagcccagtcgtcccgcgtgcaagataactcattggtgagagacataacccatatgccgtatagcagctatgggattga

SEQ ID NO: 10008 - DNA, 315 bp, Zea mays
  unsure at all n locations
  Clone ID: LIB3150-047-Q1-N1-E9
atcaagtgccagcgccctctcgcagatcgtcgttttttagagcgggggcggcatgatcaagcctgacggccttcacaggggcctcattggagagatcatcacccgtttcgagaagaagggcttctacctcaatgcctttaaactttgaaacctggagagggngattgcttgaattctctacgccagatcacgcctccaagccgcgactgcagggcctcgtggactacatcatctcaggccctgtggtggccatggtccgggaggacaagagcgttggcacaactgacctaaagatcatcggcgccaccaacccgc

SEQ ID NO: 10009 - DNA, 435 bp, Zea mays
  Clone ID: LIB3150-047-Q1-N1-F1
cttctactcccaaaatcccaaaaccctagctcgctaacgaccccaggcagacgcgccgtcctcccctcccccatggcgctcaagcagaagggcaccgacgccgccgccaccgacaccggtaccaagaagcgccgccgcgtcttcttctccgacaccgatgctggtgttgaggcaaatgagtgtatgaaagtgtttctagtatggaatccaggcgaggtgggctctgtagaccgcgactgttattcagccatttgacctaaaccatttttttggtgaagatgggaaaatatatggttacaaaaatcttaagataaatgtgtggataagtgcgaaatctttccatggatatgctgattgttcatttgacgaaacatctgatggagggaatggaatatcctatctaaagcctgttcttcagaacatttttggagataa

SEQ ID NO: 10010 - DNA, 431 bp, Zea mays
  Clone ID: LIB3150-047-Q1-N1-F10
ggttactgggagatagagagaggagagggagggtttcctcaaagagaacctgaacccaaacccaagcagagaacactagcgttccctcaccagggcgggcgtccatcccagcagccatggcgatggcgtacaagatggcgacgggaggggatgaacgtgaaggaggagtgccagcgctggttcatggagatgaagtggaagaaggtgcaccgcttcgtggtgtacaagatcgacgagcggtcgcgcgccgtgctggtggacaaggtgggcggccccggggaagggtacaacgagctcgtggccgcgctgcccggcgacgactgacgctacgccgtcttcgacttcgacttcgtcactgttgacaactgccagaagagcatgatcttcttcatcgcctgagcaccggcggcgtcgaggatcagggccaagat

SEQ ID NO: 10011 - DNA, 387 bp, Zea mays
  Clone ID: LIB3150-047-Q1-N1-F11
actaactgagacatcgacaatgcaggggggggctttgcaaccgctgagtgtgaacacaagccggacggcatggccaatggcctcactatcgacatcaatctccgctcgacgtactcttgcttctgcctgtcgctactttaccgtggtggagaacattagcaactaccatggcaaccgcaccacacttttatacggcgactgcatctactcttatctctttatctgataagcggccattaaccaggcggccatgaaccccaacaacaccgtcttttatgccaagcgtcttatcagcatgaggtccagtgatgcgtctgcccagagtgatatcaagctgtggcccttcaaggccataccagagccctgggagaagccaatgattgttgt

SEQ ID NO: 10012 - DNA, 349 bp, Zea mays
  Clone ID: LIB3150-047-Q1-N1-F12
aatacaagcaccagtttggctcgtgtgggcctcggcgcgtgccccggacgcgttgctgaccccgctccccggtgatctgatgtcggcggcggcacgcgcgccaccgtcgccgcgcgcactctacgcgccgtcgagaagagtccctttccgtgccgtgatcctatccgcgccgcgacccggggctagggttcgcgcggcgcggccttgcgaggggaatggtcataaccattgcctgttgacatcgtctagtctgaattcaagttctttgctatgccctgcatgcaattgttctcaaatggctttggccgacacaagaattgcttaccagcctggaattgacaagcatgct

SEQ ID NO: 10013 - DNA, 250 bp, Zea mays
  Clone ID: LIB3150-047-Q1-N1-F2
ctttccctcgcgccgccgccaacgcaacgcttgcagccccaatccgtcacagcaaccatggctggcgcgcaggagtccctctctctggtgggcacgatgcgcggccacaacggcgaggtgacggcgatcgcgaccccgatcgacaactcgccgttcatcgtctcctcctcccgcgacaagtccctgctggtgtgggacctgaccaacccggtccactccaccccggaatccggcgccaccggcgactacc

SEQ ID NO: 10014 - DNA, 256 bp, Zea mays
  Clone ID: LIB3150-047-Q1-N1-F3
cttatggtctcggagtggactaaaccgggagagtctttgaagacgcacggaggtgcgaaaaattgactgcactataacctgtttaacgtatgcactattcgcactcgcaacactgacaagactttgaaatctatttatattaagaagtcttctactaaattgttcacctttcgacttctatgaatatagtattgtgtcacctttttaatattttctcattttatttttgttatctttctttctattttttttttct

SEQ ID NO: 10015 - DNA, 192 bp, Zea mays
  Clone ID: LIB3150-047-Q1-N1-F5
ttatcaaggccggagcaaccacttgggggggtttttttactggtcggtgagctcctccaattcaccgccggattccgaccgacaccaccaaagaagaccaaacgttcccaccccactcgtgcaactcggcgtagccatccccaggaaggtcagaaaatctctcttcgcccaccagatcagcaccttctccac

SEQ ID NO: 10016 - DNA, 313 bp, Zea mays
  Clone ID: LIB3150-047-Q1-N1-F8
ttcgaaaagaaagccgagtgcgggggtggagtctttgcgcgcgagggctgggatcttcgcttggacgcagactcggttccacctgccggtgtggctgggtttcggcgcggcgttcaagcatgtcttggacaaggacatacggaatcttcagacccttcaggagatgtacaaccagtggccgtttttcagggtgacgatagacctggtcgagatggtgttcgccatgggtgattctggcatttctgctcttttatacaaggttcttgttttcagaggaccggtggcctttaggggcgcgttttagagccatttt

SEQ ID NO: 10017 - DNA, 431 bp, Zea mays
  unsure at all n locations
  Clone ID: LIB3150-047-Q1-N1-F9
atcaagtgccagcgccctctcgcagtcggcgcaatggagagcaccttcatcatgatcaagcctgacggcgtccagaggggcctcattggtgagatcatcagccgttttgagaagaagggcttctacctcaaggccttgaagcttgtgaacgtggagaggtcgtttgctgagaagcactacgccgatctcgcctccaagcccttcttccagggcctcgtggactacatcatctctggccctgtggnggccatggtctgggagggcaagagcgtcgtcacaactggccgcaagatcattggcgccaccaaccccctggcttctgagcccggcaccatccgtggcgactttgctgtcgacattggcaggaatgtcattcatggaagtgacagcattgagagtgctaataaggagattgccctgtggttccccga

SEQ ID NO: 10018 - DNA, 442 bp, Zea mays
  unsure at all n locations
  Clone ID: LIB3150-047-Q1-N1-G1
cgcctcaccagcttgccaaatctctaacgctaggtgcagcggcggagatggcccccaagcgctcggctccacctccgccgcctccgcccccggctgcctcctccgaggagaccgcctctggttcgggctccgaggaggaggaggaggaggaggaggcggaggaggagtcggcgaccgcccactcaccgccgccggtcgctcccaagagcgttgctccgcttgcccaaaaaggtccaggaacccctaagcgtccgacgaggatgagtatgacgatgaagatgacgagccgcatatggtccaggaacccgaagcgtccgatgaggatgaagactactaagaggatgatatctattaggacgagaaggccaaccacgtggncccttctttcgccaccaagaacccttcttcgtcgtctcagactgtctaggattccgaggctttt

SEQ ID NO: 10019 - DNA, 315 bp, Zea mays
  Clone ID: LIB3150-047-Q1-N1-G2
ctctttctcgggtagtcaaatacatacccctgtgttctttaacgggtgggggctccaaaatcttttaaccatctgatcgcttttcttctcatcctgtctctcaccatgatacctccatttgtattgttctcctatttttattatgaggtttacttataaatctgatttattttcttccattctctttctcttattttactctttatatatctttttattcttatttcttaaaatctttattttataatttatatttctttctttttttattattttattttttttatttcttcttttacctttttttttttttta

SEQ ID NO: 10020 - DNA, 197 bp, Zea mays
  Clone ID: LIB3150-047-Q1-N1-G3
gtcttcatccaacaataagatgcatgcagagtatgatctgtgtggccagctacctgctagatcatctcacttcctgagtgtgctgatgctcagccaataatgaaccattccatcttgatcggaaattcaacatataaaaaaaaaaaaaaaaaaaaaaaaaaaaaaaaagggaggtataaaaataaataatataaaaa

SEQ ID NO: 10021 - DNA, 451 bp, Zea mays
  unsure at all n locations
  Clone ID: LIB3150-047-Q1-N1-H11
tttctacatcagaggtcccggcccgggaggtaccttcagctgtactgggggtgcaggaagaagaagagattgtatccgccgctgtgcccgtttctgtgcacgatgtggctcctttgcagcaggcacagataggttaagatgtaccaaaacatgttgaaaaggaggtcgaggttccccaatggctgaagagtcttgctggtgaggaagcacatgactggagagcctttgtccgcactaggatcaatgggcatactgataggacctatactcacaagcaataccgccaccagttccgttccaaagcngaagtcaaactgtttgtggattctaatgggatgacaacgggcatatttaaaggaagaaatcttcaaaagaagaagatagctggtatggatgctcaaggggctggaacaagtgaatcttctgggagaagagcgtctgcctaccatgc

SEQ ID NO: 10022 - DNA, 448 bp, Zea mays
  Clone ID: LIB3150-047-Q1-N1-H2
cgtcggcgtcgagcagcggcggcgatggggacgagcctgaagaagaaccggaagaagcgcgggcacgtgtcggcggggcacggccgcatcggcaagcaccggaagcacccgggaggccgcggcaacgccggcggcatgcaccaccaccgcatcctcttcgacaagtaccacccgggctacttcggcaaggtgggcatgcgctacttccacaggctccgcaacaagttccactgacgcgccgtaaacgtggaagaggctctggtcgatggttcccgccggcaaggccccggaggcggacggcgcggaccaggccccgctcgtcgacgtgacgcagttgggctacttcaaggtgctcggcaaggggatgctgccgtccaggcccatcgtcgtgaaggccaagctcatctctaagggcgtcgagaagaagatcaaggctgccggaggcgcc

SEQ ID NO: 10023 - DNA, 451 bp, Zea mays
  unsure at all n locations
  Clone ID: LIB3150-047-Q1-N1-H3
ctcctccctcactctcgttccatttcccgatctcccagatccaattcgcgagttcttcctcctctgccgccatggcgctctctgtggagaagacctcgtctggacgggagtacaaggtcaaggatctctcgcaggcggacttcggtcgcctcgagattgagctggccgaggtcgaaatgcccggcctcatggcgtgccgcgccgagttcggcccgtccaagcccttcgccggccccaggaatctcggggtctcttcacatgaccatccagaccgccgtcctcatcgagaccctcaccgcgctcggcgccgaggtccgctggtgctcctgcaacatcttctccacgcaggaccacgccgccgccgccatcgcgcgcgactcggccgccgtgttcgcctggaagggggagaccctngaggagtactggtggtgcaccgagcgctgcctcgact

SEQ ID NO: 10024 - DNA, 438 bp, Zea mays
  Clone ID: LIB3150-047-Q1-N1-H5
gtggcctgatctaatgtaggggcaggaggaagcccttccactgttccatctctttcccggagtaggtggtgggcacgacgaaggcccctcgcccccaccagattcgtgcaactcggcgcctcatccgatcggcaccggccgcccaacgcgctacagacgcgctgccgcgtcgggactctggaggacacggcggcggcttggtggattgtgggagggagggccttctcttggatttcttgttgtcgaggacagggtcttgtattagctagctattcactggatgttggcgatggggacagaagagtgggagctctatccttgttcctacagcggctcacaggtgatagagtacaggccggtctctgaagacgaagacggccacgacgaccagaacggtgccgacgtggcagtgtcgctggacgccgttctcccagacga

SEQ ID NO: 10025 - DNA, 453 bp, Zea mays
  Clone ID: LIB3150-047-Q1-N1-H6
gttgcgcctcctccaccttccttttcagcacctgcaccaatccgttgcgctcgtgctcccctctcgtccgccgccagcacccccgcgccgccatggccacggactcctccgccggctcgttccagaagatccagatccagcgcgaggacaccacttttgatgcttatgttgttggcaaagaaaatgctcctggaattgtggttttgcaagagtggtggggagttgactatgagataaagaaccatgcgatccacatttccaaacttggtggaggatacaaagcactcattccagatttataccgtggaaaagttgctctggatgttgctgaggcacaacatctgatggagggtcttgactggcagggtgcagtcaaggatatccaggcttcagttaaatggctgaagtcaaatggatcacccaaggttggtgttactggctattgcatgggag

SEQ ID NO: 10026 - DNA, 379 bp, Zea mays
  Clone ID: LIB3150-048-Q1-N1-A11
ctcgctctcgcggagatcgaagagaagctgaggcctagcgccgcacccgccgccgcatcagccatcagccatggcgctggccgctcgcctcgtctcacgctcccgtcagctacattcggttcaagcagcttttgcgaatggaggtgtcactcaagttcgctcctttgccaaggatgcagctccagctgaccgtcctcctgttagtggggatgatctcccgaagggcctattccttggaggtaaagaagatggttgagacagctcttggcgtccttaaaaaggaaaaggtcactattgatccagacgacccagcggcagtttctcaatatgcccaagtcatgaagactgttagggtaaaggcgggtcttctttctgattc

SEQ ID NO: 10027 - DNA, 81 bp, Zea mays
  Clone ID: LIB3150-048-Q1-N1-A12
gtgtttttgattttatccgacaacattggtgatctcacatccttcgagaagacgcctgctactctcacgatcgatacaacg

SEQ ID NO: 10028 - DNA, 192 bp, Zea mays
  Clone ID: LIB3150-048-Q1-N1-A3
attactagaagcctacaggtagcggctttggtgacggcaggtatgagcaggaagatgaatacaagatgcctctgagtggtggtggcagtagctatagcggaggcaggtttgaaaatgttgaatatcggaagaagcccagtggtggtggctacggcggaggaaggtatgaggacgcagatgacattaggtaga

SEQ ID NO: 10029 - DNA, 450 bp, Zea mays
  unsure at all n locations
  Clone ID: LIB3150-048-Q1-N1-A5
ctcgtctctctcctctctgctgcgccccgctatcgtgcgtgattctatccaggattctagggttcgttcgcctcgtctcgcgatggacaagggcagcgtcgtcgtgcccccggcccctgccgccgccgccgcgaagaaagccaagcgcttcgagatcaagaagtggaacgccgtctctctctgggcctgggacatcgtggtggacaactgcgccatctgccggaaccacatcatggacccttgcatcgagtgccaggcgaaccaggcgagcgccaccagcgaggagtgcaccgtcgcttggagaatttgcaaccatgcattccactttcactgtatcagccgttggctaaagacccgtcaagtgtgccctcttgacaacagtgagtgggagttccagaagtttggncactagagagaatggcttcggcgtggaattgcttcatgtttctc

SEQ ID NO: 10030 - DNA, 383 bp, Zea mays
  Clone ID: LIB3150-048-Q1-N1-A6
ctcgtcggcaacgctagggttttaggcgagtccgcctccgctctcgggggggctgcgcgctactcgcccgatctcgcggtgctggtagcggtgaaaatatctgagatcgagtgaagctagcttttcatcgatatggcgcttgtactgcatgctggcagtagtaacaaaaatgcattcaaagcactaattgccgcggattacagcggcatcaaggttgagttggtaaaagactttcatatgggggtttccaacaaaacaccagagttcctcaagatgaaccctattgggaaggttcctgtcctggagacacctgatggtccttgttttgagagcaatgcaattgcaagatatgttacttgcttgaaggctaactacccacttta

SEQ ID NO: 10031 - DNA, 437 bp, Zea mays
  Clone ID: LIB3150-048-Q1-N1-A8
cttacgcgtgggtttgtttgcaaagctcctcctcgatccatcgatcactgcaccggccggcggcaccgcgctcgcaggggctagccaacgagacggcagcaatggcggaccgtgaccgcagcggcatctacggcggcgcccacgccacctacgggcagcagcagcagcagggaggaggcgggcgcccgatgggtgagcaggtgaagggcatgctccacgacaaggggccgacagcgtcgcaagcgctgactgtggtgacgctgttcccgctgggcgggctgctgctggtgctgtcggggctggcgctgacggcctccgtggtggggctggccgtggccacgccggtgttcctgatcttcagccccgtgctcgtccccgccgcgctgctcatcgggacggccgtcatggggttcctcacgtcgggcgcgctggggctc

SEQ ID NO: 10032 - DNA, 209 bp, Zea mays
  Clone ID: LIB3150-048-Q1-N1-B10
tttgaggcgcatcatacgacgcgttcgggcagccaggttacctgccggtgatcctgttccttccagcctttgaagtcctttaaaagattgcctaacttttcctccccgaatgccttttggtcacttcaatgaaggaccggattaaccctatcccataccagtacgttattgctcgacaagggaatgagaagattgatagtattctaggc

SEQ ID NO: 10033 - DNA, 102 bp, Zea mays
  Clone ID: LIB3150-048-Q1-N1-B2
tttaccccagccctgcttctttgccatggcgagcagcgctagccaggcgagccgcctgctccagaagcagctcaaggatcttgcgaagaaccccgggatggg

SEQ ID NO: 10034 - DNA, 424 bp, Zea mays
  unsure at all n locations
  Clone ID: LIB3150-048-Q1-N1-B4
ctatctgagccagtatcctcgcattgttaccgaggacttcttgccacttgccagcaaagggaaanctgggaaggatggctggtatcctcctggtcatggtgatgtgtttccctctttgaataacagcggaaaactcgacatcttattggctcagggcaaggagtatgtctttgttgcaaactcagacaacttgggtgctatagtcgacatcaagatcctaaaccatctgatcaataaccagaacgagttctgcatggaggttactccaaagacgctggctgacgttaagggtggcactctcatctcttacgaatgaagagttcagcttttggagattgcccaagtatccgatgagcatgtgaatgtatttaaatcaatccggatgttttagatattcaacactaacaacttgtggttgtacctt

SEQ ID NO: 10035 - DNA, 370 bp, Zea mays
  Clone ID: LIB3150-048-Q1-N1-B5
gtaggtgcccaagtacaagcaaatcaccgcttccatcctctccgagcgtctgaggatcaacggctcccttgctcggagggccatcaaggacttgatggcgcgtggcctcattcggatggtctcggtccactcaagccagcagatctacaccagggcaaccaatacataaggatggggaagaggtctaaaatgcattgtctgccctctctgcaagaggagctcgtctttagaacagttgccatctttgtcaagagttgccaatgttatgttactggtgatgagttccaggtgacggcaacattttagagattttgagtatttctattagttggtactatggtttgccaattataagttacttggcctaaat

SEQ ID NO: 10036 - DNA, 142 bp, Zea mays
  unsure at all n locations
  Clone ID: LIB3150-048-Q1-N1-B6
gtacaacccaacagacnanaanacaagaacatctctatttagccagggggaggacaaccaacttctattctatctcttatgtccttcattcgactcgattgcccgnggccccaaagggaaagtcacgagccaaccaagccat

SEQ ID NO: 10037 - DNA, 444 bp, Zea mays
  Clone ID: LIB3150-048-Q1-N1-C10
cccaccgatccatttcagccgccgccgcgcgtagcaagcaagagcagcaaggatgccggctggccacgggctgcgctcgcggacgcgcgacctgttcgcgcgccccttccgcaagaagggctacatcccgctcaccacctacctccgcacctacaagatcggcgactacgtcgacgtcaaggtgaacggcgccgtccacaaggggatgccgcacaagttcttaccacgcccgaaccggtcgcgtctggaacgtcaccaagcgcgccatcggcgtcgagataaacaagcaggtgaatggtcgcatcatcaggaagcgtatccatgtccgcgtggagcatgtgcagccgtcccgctgcacagaagagttccgcctgaggaaggtgaagaatgatcagctgaaggcggatgcaaaggagcgcggcgaggtcatcagcaccaagaggc

SEQ ID NO: 10038 - DNA, 208 bp, Zea mays
  Clone ID: LIB3150-048-Q1-N1-C12
tatatagcccagcccaattaaaaccctagactggctggcgtgctataaaagcaggtggccgccgcctttgccttgctcaccctgcccttctgtgtacgaagccgactagcagccgacgctaaagcttggtccggtgagcttcagagaaggggcggctacgtcaagatgcagttcttcgtgaagaccctgactggtaagaccatcaccc

SEQ ID NO: 10039 - DNA, 417 bp, Zea mays
  Clone ID: LIB3150-048-Q1-N1-C4
ctcagcttcaggaaagggaaggaagcatgttcgggcaccaccacggccacggcgggcaccaccaggccccgccgccgcacgagcagacgctgttcaggatcttctgccgcgccgacgaggcgtactgcctcaccgtgcgtcacgacgccgtcgtcctcgcgcccaccaacccccgcgacgagtaccagcactggtacaaggacatgaggcacagcacgaatgtgaaggacgctgagggccagccagcgttcgcgctcatcaacagggccaccggcctcgccatcaagcactcgctcggccagtcccatcccgtgaagctggtgccctacaacgcggagtacctggacgagtcggtgctgtggacggagagccacgacgtgggcaagggcttccgctgcatccgcatggtcaacaaca

SEQ ID NO: 10040 - DNA, 391 bp, Zea mays
  Clone ID: LIB3150-048-Q1-N1-C6
gtcgggccggatcgtgatggagctgtacgccaacgaggtgcccaagaccgcggagaacttccgcgcgctgtgcacgggcgagaagggcgtgggcaagtccgggaagccgctccactacaagggctccaccttccaccgcgtcatccccgagttcatgtgccagggcggcgacttcacccgcggcaacggcaccggcggcgagtccatctacggcgagaagttccccgacgagaagttcgtgcgcaagcacaccgtccccggtgtgctcttcatggccaacgccgggcccaacaccaacggctcccagttcttcatctgcaccgtcgcgaccccttggctcgacggcaagcacgtcgtcttcggccaggtcgtcgagggcatggacgttgtc

SEQ ID NO: 10041 - DNA, 258 bp, Zea mays
  Clone ID: LIB3150-048-Q1-N1-C7
atcccactggaaatgaacccatccgcgcgtcctccgtctagcaaagtctcaccctcatggccaagatcaagatcgggatcaatgggttcggctggatcggacggctggtggccagggtggccctacacagcgactacgcttagctcgtctccgtatacgacccctgcatgagcaccgattacatgacctacatgttcaagtatgacactgcgcacggacagcggaagcaccatgaggtcaaggtgaacgactccaaga

SEQ ID NO: 10042 - DNA, 367 bp, Zea mays
  Clone ID: LIB3150-048-Q1-N1-C8
gtttcatttgcaattgaacgtgccattggacgcaagtgctctgttgaaggtgaagttgctgattgcaccacaaaggattacccacaaaatagttttgacgtcatctacagccgtgacaccattcttcacatacaagacatgcctgctctgttcagaagcttcttctaatggctaaagcccggtggcatagtcctaatcagcgactactgtaagaatactggaaaaccatcagaagaatttgctgcgtacattaagcagagaggctatgaccttcacgacgtgaatgcttatggacagatgctgaaagatgctggttttcataatgtcatcgcggaagatcgcactgagcagttcttgaatgttctac

SEQ ID NO: 10043 - DNA, 320 bp, Zea mays
  Clone ID: LIB3150-048-Q1-N1-C9
ccgtcatcgatctcgtttcaaatccatcgatcgtcgtttcctccgtcccgcagcatctcaaccccatggccaagatcaagatcgggatcaatgggttcggcaggatcggaaggctggtggccagggtggccctgcatagtgacgatgtcgagctcgtcgccgtgaacgaccccttcatcagcaccgactacatgacctacatgttcaagtacgacaactgtgcacggaccggtgtaagcaccatgaagtcaaggtgaaggactccaaaacccttctctttggtgagaaggagggtgctgggtttggctgcaagaaccctg

SEQ ID NO: 10044 - DNA, 445 bp, Zea mays
  Clone ID: LIB3150-048-Q1-N1-D10
caacaagctttggatttgatactgcttgcaagatatactccgaaatgattggcaatgttatgactgatgcaagatccacaggaaaatactaccactttgtgaggcttatgggtcgtgctgcttctcacattacattggaatgcgctttgcaaacacaccccaatgctgcactcattggggaagaggttgctgcgaagaaagaaacccttaagaatgtcacaaacctcattacctgatatcatctgcaagcgtgcagatcttggttacaactatggtgttatccttataccagaaggcctgattgatttcatcccagaggttcaaaaactcatcgcggaattgaatgaaattttagcacatgatgttgttgatgaggcaggggcctggaaaagcaagcttcaagctgaatcaagggagctgtttgagtttttgcccaaaactattc

SEQ ID NO: 10045 - DNA, 414 bp, Zea mays
  Clone ID: LIB3150-048-Q1-N1-D11
ctgacgcgtgggctcgtttcaaatccaggcatcctcgtttcctccgtcccgcagcatctcaaccccatggccaagatcaagatcgggatcaatgggttcggcaggatcggaaggctggtggccagggtggccctgcagagtgacgatgtcgagctcgtcgccgtgaacgaccccttcatcagcaccgactacatgacctacatgttcaagtacgacactgtgcacggacagtggaagcaccatgaagtcaaggtgaaggactccaaaacccttctctttggtgagaaggaggttgctgtgtttggctgcatgaaccctgaggagatcccgtggggttcggttggtgctgaatatgttgttgagtctactggtgttttcactgaccaggagaaggctgcagctcacttgaagggt

SEQ ID NO: 10046 - DNA, 420 bp, Zea mays
  Clone ID: LIB3150-048-Q1-N1-D4
tttaattcttgtggcagcaccagccgggggggttattagagctatagctgcatctgctacaataaaaaacctaaccactttgatcaggacaaagagcagaagtccacagactacttctgggaaaacaactggctcaaagtcagctgctaagggtgcagctgatcaatctttaccattccaacacaatgctgctattggtctacttctgggtgcgttgtacttgctcagtaggtatgccacacactgcacttgggggacatctgatgctgactcgtctccatctatagtttgggccgcaaggggtcataatggcagaagagttatctttgatgactatcgtgaggcatactattggcttcgtcagaacactccttctgatgctaatattatgtctgggtgggactatggataccaaattac

SEQ ID NO: 10047 - DNA, 300 bp, Zea mays
  Clone ID: LIB3150-048-Q1-N1-D5
cttcaatttgacgtgcgcttcctcttgctcgctcgctctcggtcgcagtgatggctgatgtcgaccagtaccgttgcttcattgggaacctgtcctggtcaacgactgatgaaagcctcaaggatgcgttcagcaaattcggcaacctcactgaggcaaaggtggttcttgacaaattttcaggacgttctcgcggtttcagctctgtaacttttgatgagaagcaagccatgcaggatgctattgagggaatgaatggactgtacttgcacgggaggaacatcactgttgataaagctc

SEQ ID NO: 10048 - DNA, 373 bp, Zea mays
  Clone ID: LIB3150-048-Q1-N1-D6
gtcaaaacgaaacgaagcatccacgttggtcgctcccacgctggcaatggccgccgccgcatctcccgccaccgccgccgccgtccgcgaagcggcgccggcccacagacaaattggaatccgtccgggtcatggtccggccccattccgtatcggcttcctcgccaaaccgtcctcccggtgggccgcgatccctgtgccgcctgggcctcgccgcgcagctccggcggcgtccgcggccagagagagggtcgcggaggaggaggagaggcccgtgtcggtggagctggaacccatcgccagcgagcagcagctggactgggtccttggggaggcgcagcagctccagctccccatcgtcctgctgtggatg

SEQ ID NO: 10049 - DNA, 330 bp, Zea mays
  Clone ID: LIB3150-048-Q1-N1-D7
ggcaatccggtggcccaaactggtagtagccggcgccccgtcaccgtatcctcatatcaacggcgagcaaataccacaccactctactgacgcccgacgagcagtgtaacattttccttcagccatgggtaaggagaagactcacatcaacattgtggtcattggccatgtcgactctggcaagtcgaccaccactggccacctgatctacaaagctggaggtattgacaagcgagtgattgagaggttcgagatagaggctgccgagatgaacaagcggtcattcaagtatgcgtgggtgcctgacaagctcaaggctgagcgtgagag

SEQ ID NO: 10050 - DNA, 443 bp, Zea mays
  Clone ID: LIB3150-048-Q1-N1-D8
ccgccaccgatttgccgggaggcgtgggagggctgcagcgtcctcctcgacatcaatgacggcgaccgcctagccttcttccgcctcacccccggcgcgacggtgaagattgggaacaagacttgttcactgaagccgctcgtgggacgcccctttggctccctattccgcctcggcgccggcggactcgttccctgcgccgccgcggacgccacatctcgtgatcataacacgccagatgatgccaatggacaaacgcaggatgaaaccagagacaataggtctctggttgataataatacagctcaaaatttatctagcgatgacatagaggcaatgaagagggatggtgcaactggtgacgagattgtagaagctttaatagcaaacagctcaacatttggaaataaaactgtcttctcacaggagaagtacaagttaaa

SEQ ID NO: 10051 - DNA, 455 bp, Zea mays
  Clone ID: LIB3150-048-Q1-N1-D9
tgtagcaggagcgcagccagcaagctcaggccgccagccctactgccaccgcgccgaacgccatggccgagccggcagagcaccgtccagcggaggaggaggaggccgcggcggccggcgaggatgaggacaccggcgcccaggtcgcgcccatcgtgaagctggaggaggtcgccgttaccaccggagaggaggacgaggacgcgctcctggacatgaaagccaaacctctaccggttcgacaaggaggggaaccagtggaaagagcgcggcacaggcactgtgaagctgctcaagcacaaagacaccgccaaggtccgcctcgtcatgcgtcaggcgaagacgcttaagatctgcgccaaccatctcgtggtggcgacgactaagatgcatgagcacgcggggagcgacaagtcgtgcgtgtggcacgcgctggacttcgccgacggcgagct

SEQ ID NO: 10052 - DNA, 396 bp, Zea mays
  Clone ID: LIB3150-048-Q1-N1-E1
ccgtcatcgatctcgtttcaaatccatgcgatcctcgtttcctccgtcccgcagcatctcaaccccatggccaagatcaagatcgggatcaatgggttcggcaggatcggaaggctggtggccagggtggccctgcagagtgacgatgtcgagctcgtcgccgtgaacgaccccttcatcagcaccgactacatgacctacatgttcaagtacgacactgtgcacggacagtggaagcaccatgaagtcaaggtgaaggactccaaaacccttctctttggtgagaaggagagtgctgtgtttggctgcaggaaccctgaggagatcccgtggtgttcggttggtgctgaatatgttggtgagtctactggttgtttcactgaccaggagaaggct

SEQ ID NO: 10053 - DNA, 371 bp, Zea mays
  Clone ID: LIB3150-048-Q1-N1-E10
gtggcgagaagagcaagagcaactcgacgacgactcggaacagcgccgtgccggcagcaacgacaacgcctgctgcgagcctgtcgagctcgtgagacttgtagatagctttgtctgccgagagtagtataccagtaccagatacagaacttctgaagctctccatacatacatagcgacagctctgtaaaggtagctatgtaagccttttccttccccggatgactatataccttcggcttcgttcgccgtcacagctgcaggcagctccctccctcccgctggtttccgatggttaacaattcctttttttttgccaataattcttcagtataggatgtccggctatgttgcctcaattcccagtggct

SEQ ID NO: 10054 - DNA, 192 bp, Zea mays
  Clone ID: LIB3150-048-Q1-N1-E11
ctgctccttgcgatcctttctttgatgagagggcttcattatctgcgctgcagaggaggcactactgggtgatgctgtgatgtcaagatgatcaactgacctatctgccactgactgagttactgggcacatacgtccactaaaccgaggacattattatagattccaacaatgctagcgtcagcgacattg

SEQ ID NO: 10055 - DNA, 440 bp, Zea mays
  Clone ID: LIB3150-048-Q1-N1-E2
ccggcccccagtggctcgtagaacattcgagaacccctcgcctcctcccccaacgataaaatcctcaccgcgccgcaacgcatcttcgccccacaaaccctcgtctcgtgccactttctcagtcccctctagccgccgcctaccgctcgcgctctcctcgcgttcgggaaggtcgtttcgccatggcctcggagacggagacgttcgccttccaggcggagatcaaccagctgctctcgctcatcatcaacaccttctactccaacaaggagatcttcctcagggagctcatctccaactcctccgatgccttggacaagatcaggtttgagagtttgacggacaagaccaagctggatgcacagccagagctgttcatccacattgtccccgacaaggccaacacccgccgacaatcatcgacagcggcattggtatga

SEQ ID NO: 10056 - DNA, 420 bp, Zea mays
  unsure at all n locations
  Clone ID: LIB3150-048-Q1-N1-E3
atctgttcctgctgcattagtatcatcaggattatgctcgatagcaattggaacagatggtggaggttcagttagaattccatctgcactttgtggtattgttggtttcaagacaacatatggtaggacagatatgactggggtactatgtgactctgggactgttgaagttgcttctcctcttacatcatcagttgacgatgctatactagtgtattctgcaatagcaggttcaagacctatggttaagcttacacttagaccatcgccactatgtgtcccanatttagtgtctccagaaaacagcnnnatcctgggatcagtgtaattaggaaagtatacacaatggattaatgatgtttctggtcatgagatatcgggtacatgtgacgatgcacttaatactttttgcagtgcttt

SEQ ID NO: 10057 - DNA, 377 bp, Zea mays
  Clone ID: LIB3150-048-Q1-N1-E5
ctccatggctaactcccgccagaacatccggaaattggttaaggatgggtttatcatcaggaagcctcagaaggttcactctaggtcccgtgcaagaagggcacatgaggccaagcagaagggaaggcactctggatacggcaagcgcaggggtaccagggaggctaggctccccaccaagattctgtggatgaggaggatgcgtgttctgaggcgcctgctccgcaagtaccgtgaggccaagaagattgacaagcacatgtatcatgacatgtacatgaaggtcaagggtaatatgtttaagaacaagagggtacttatggagagtatccacaagtccaaggctgagaaggccagagagaagacactttcagatc

SEQ ID NO: 10058 - DNA, 440 bp, Zea mays
  Clone ID: LIB3150-048-Q1-N1-E7
ctgctacacataatgaccttgaaaacctagaccatcaaagggcttctatacaagacaggaagaatgctatcaagaagaaggatgaaaacatgcggaaagccacatataaactttccatgtgcgtgtcagttacaaatatcataccaaatttggaagatcgggataagatctcaagctatactgtcgacaagaatgggaagaagatacagaagttcgagtttgagaagacgacgccaccagttgagatctgtaacacgctttggaaaacaatttatggccgtgcagatcgttgttactgtctgttaacgaagattgtcaattgtacttgtatatatagctgactagctgaggatggtggacctctcatcttcaattgtgcttgaatttagggcgtgcaaaccgtcattagtgtctgctgattttacagtgttttgatttca

SEQ ID NO: 10059 - DNA, 227 bp, Zea mays
  Clone ID: LIB3150-048-Q1-N1-E8
cacccctcaaattttccagccgccactggctcttctcctttctcctctcacgcacaacttccttcttccctgtctcttcttcctcgcggttgcagcaaggagctcagctccttcttccctggcgcagcagcaagctccctcccatggcgcctccacctccctgcgcccagttcatctcctctgcccagcgccgtccccccctctctgtttcccttgagcccaagtgc

SEQ ID NO: 10060 - DNA, 184 bp, Zea mays
  unsure at all n locations
  Clone ID: LIB3150-048-Q1-N1-F1
ctcgctctgaagcttgccaagttaaagcaganaactctcatgagggcaaagaggaagagagaggtcatcatcttcgtcctcacgaagatcatatcacctgttactcacactgacaataacaaataaagcatttcattttcatgaatgtttcatctatagattttctactttttctctttcctac

SEQ ID NO: 10061 - DNA, 449 bp, Zea mays
  Clone ID: LIB3150-048-Q1-N1-F10
ccaagccagcaggcgctcgatacattcgagcacaacaacccccaggtctgggccagcccgcccacaggagttcccgcatctccctctctggtctggtcacaggagctccgagacctctccaatggcggttaagatctacgttgtgtactattccatgtatgggcatgttggcaaactagctgacgagatcaagaaaggtgccttatctgttgaaggtgttgaggcttagattttggcaggtccctgaaattctctctgaagaagtgcttggaaagatgggcgcgccccctaagcccgacgtgccagtcatcacaccgcatgaacttgcagaggctgacggtatcctctttgggtttccgacaaggttcggaatgatggcagctcagatgaaggcgttcttcgatgccaccggtgggctctggagggagcagagccttgctggcaagcct

SEQ ID NO: 10062 - DNA, 365 bp, Zea mays
  Clone ID: LIB3150-048-Q1-N1-F2
ttagatacccttattatctcacataatgggctagtggagactacccggactgtacagacttggcctaccataatgcaattgatgatggtgcagacatcattgactgtcctattcaagtgacaaatgatggagttcttatgtgcatgagttccactaacctgcttgacactacgaatgttcagagaacaacttacaactctctggtttctgttgttccagatattcagcctcaaccaggaatcctcacattcaacctcacttggtccgacattaacagtaatgttttaaaacctaaaatatcttctccagagagaggttatttccttgttaggaacccaagatacacatatcaagggaagtttttg

SEQ ID NO: 10063 - DNA, 351 bp, Zea mays
  unsure at all n locations
  Clone ID: LIB3150-048-Q1-N1-F4
gaagaacgttgctgtcaaggatctcaagcgtgggttcgtggcctgcaacgccaaggattaccctgccaaggaggctgccagcttcacctcccaggtcatcatcangaaccaccctgggcagattggcaacggctatgccccagtgctggactgccacacctcccacatcgccgtcaagtttgctgagctcattaccaagatcgacaggcgatctggcaaggagctcgagaaggagcccaagttcctgaagaacggtgatgctggtatggtgaagatgattcccaccaagcctatggtggtggagacattctccgcgtatccttccctgtgtaggtttgccgtccgcgacat

SEQ ID NO: 10064 - DNA, 443 bp, Zea mays
  Clone ID: LIB3150-048-Q1-N1-F5
ggatccccaacaacgtcaagtccagcgtgtgcgacatcccgcccaggggcctgtccatggcgtccaccttcatcggcaactcgacctccatccaggagatgttccggagggtgagcgagcagttcactgccatgttcaggaggaaggctttcttgcactggtacacgggcgagggcatggacgagatggagttcaccgaggccgagagcaacatgaacgacctcgtgtcggagtaccagcagtaccaggacgcgactgccgacgaggaggagtacgaggacgaggaggaggtgcaggccgatgacatgtgaggggagggctgttatcgtgtgaagccttgtggtccctatggcaagcggacctcgatgagttcggtgttccctttcgtgttgttgccatctttctactgctagcgtacccaccctcgtggcccattccgtcgc

SEQ ID NO: 10065 - DNA, 428 bp, Zea mays
  Clone ID: LIB3150-048-Q1-N1-F6
ctaagcccaagccgccgcaaccacgggtgcagctcgttgccgcgaggggcgatgtcttcgcggtcccgtcctccgccccgccgggccccccggcccccatagccttccgcaagcagtcccggccccgcccgataactgacgaggaccatccgatctctgcccttcctgcacagcgtccccacaaggacaaaaaggacaagatcgccaaggccatgaagcgccgcctggcggagcgcgccgcggatgccgacggtgagaggtgtagccggaccgatgtcaccgtcatagacaccagcatcgattgctggaaggccgccaaggtgctcatccgccggggagacgtctggaaagttcgtaacaagaagccttccgcggtgtctgaactggaggatgccattgctcagggcaagaggagggctggccttgtt

SEQ ID NO: 10066 - DNA, 403 bp, Zea mays
  unsure at all n locations
  Clone ID: LIB3150-048-Q1-N1-F7
ctaactcgccgtctgccttctgcgcctcgatttcggcctctgtcccttgcaagttcaatctcacctccaaccatgggtaaagagaagtcccacatcaacattgtggttattggccatgtcgactctggcaagtcgaccaccacaggacaccttatctacaagcttggaggcattgacaagcgtgtgatcgagaggttcgagaaggaggctgctgaaatgaacaagcggtccttcaagtacgcgtgggtgctcgacaagctcaaggctgagcgtgagagaggtatcaccatngatatcgctctgtggaagtttgagaccaccaagtactactgcacggtcattgatgcccctggacaccgtgacttcatcaagaacatgatcactggtaccttccaggctgact

SEQ ID NO: 10067 - DNA, 453 bp, Zea mays
  Clone ID: LIB3150-048-Q1-N1-F9
ctccagtttccatgcagagcagaaaagagcagctagcgagagaagcaatggcgtctgctcctgcgttctgcgtcgcgctgctgctgctgctggcttccgccgctgccgtccaagcggtgccgccccaagccggcacgtcgtccacctgcagcactgacctcctccgcctcctcccctgcctgcccttcatcgagggcaccgccaccgtgccggcggacacctgttgcggccaacctgggcagcatggtgcacgacgagccgcagtgcctctgccaggctctcagcaaccccagcacggcccccgtcgccgtcaacatgacgcgcgtgatggccatgcctcggctctgccgccttgacctcccgcccgccaccggcgcctgcgcagttgccggtcttcttccccatggaccatcaccgtcgctgccaccgccgtcgccgccaccggcggtcact

SEQ ID NO: 10068 - DNA, 72 bp, Zea mays
  Clone ID: LIB3150-048-Q1-N1-G1
ggagaagaaacttacgaggattcccctagtaacggctagcgaaccgggagcagcccagcttgagaatcgggc

SEQ ID NO: 10069 - DNA, 448 bp, Zea mays
  Clone ID: LIB3150-048-Q1-N1-G10
gccgccgcctgctcgctcgcctccgctggggcggcgagctctatgtcccgcgacgagcagcagctgccaccgacgcacgcagaccggggaataaatattggtattggtagtgtgatatctataagaagtcaagatggtgaagttcacagctgaagagctccgtgccatcatggacaaaaagaacaacattcgtaacatgtctgtcattgctcatgtggaccatggcaaggtctacgcttacagattccctagtggcagctgctgggattattgcccaggaagttgctggtgatgttcgcatgactgatactcgtgcagatgaagcagagcgtggcattacaatcaaatctactggtatatctctttactatgagatgactgacgagtcactgaagaactacaagggtgagagagatggttaccaatacttgatcaaccttattgactc

SEQ ID NO: 10070 - DNA, 447 bp, Zea mays
  Clone ID: LIB3150-048-Q1-N1-G11
gccacctacaccgagcagccaagcgaggaagcgaagacccatttggccgagcgcaagagtaccatggcggctgcggcagtttatggcggcctcaaggggaagcttggcgtcgaggatgcccccgagctgcagctgaatcgcatccgcatcaccctctcatccaagaacgtcaagaacctggagaaagtttgtgcggatttggtaaagggagccaaggattagcctctgagggtaaaggggcctgtcaggatccctactaaggttctccacatcaccacccgcaaatccccttgcggtgaaggaacaaacacatgggaccggtttgagttccgcatccataagagggtgatcgacctgatcagctccccagacgtggtgaagcagatcacctctatcaccattgatccgggtgttgaggtcgaggtgaccattgcagacgtgtaatga

SEQ ID NO: 10071 - DNA, 383 bp, Zea mays
  Clone ID: LIB3150-048-Q1-N1-G12
acccccatctacatctctcccttcattatcttcttcttcctctacaagatccttcttgtatgggacctgaccaacccgattcactcctccccataattctacaccacctccgactatctctttccctttctccgccttaacttccacttccacttatttcaaataattcgtccttaattccaacagccaattctcccttttcagctcctagtattaataacttcacctcttttaccttttcaccaatctttacaccctttctttttttttccaccataataatattctttcctttccttcttcttgacaaccatcaaatatttttcccttcttttactaaaccatattttttttaacaccctttttttttctattacaccttt

SEQ ID NO: 10072 - DNA, 401 bp, Zea mays
  Clone ID: LIB3150-048-Q1-N1-G3
ctcgttctaaacttattgaggcagtaagagcgaagaaggctgagcgttccagtattatcgcagagttgaagcctttgagtgctgagaacaaacaatataatgaagttgtgaatgagaagataaaagagatggagcctcttcgaaacagcttgggcaagtttcgtgaggaaaacaatgccatgagggcacagagtgcaggcttatgctcttccatcgaagagcttgacctaacgatcaagatgctgaatgatcgaatggtacatgaaagcttacctttatctgatgagaagcgtttagtgatagaaattaatgacctcgaaataactagatcgtaagtcatctctaatgcttgcttacagggcttaactgcaagggactgtggttgtaatagaggcttttct

SEQ ID NO: 10073 - DNA, 373 bp, Zea mays
  Clone ID: LIB3150-048-Q1-N1-G4
gtcaaaccctaagcagggagttgatttatccgctgcagccatgagtaagttgcagtctgagtctgtcaaggatgccatctcccagattgttggggatgccaaggagaagaataggaagttcactgagactgtggaacttcagattggtctgaagaattatgatccacagaaggacaagcgtttcagtggctctgttaagttgccccatatccctcgtcccaagatgaatgtgtgcatgcttggtgatgcccagcatgttgaggaggccgagaagatgggacttgactacatggatgttgaggctctcaagaaaatgaacaagaacaagaagcttgttaagaggcttgccaagaagtaccatgctttcttggca

SEQ ID NO: 10074 - DNA, 361 bp, Zea mays
  Clone ID: LIB3150-048-Q1-N1-H3
cccagccgcacgaaaccctaacgccgccgccgcttcacaggtaagccgcggtgatggtctccggttccggcgtatgcgcgaagcgcatcgtggtggacgcgcgccaccacatgctgggccgcctgtcgtcgattatcgccaaggaactgctcaatgggcagaaggtggtcgtcgtccgctgcgaggagatctgtatgtcgggtggactcgtacgccagaagatgaagtacctccgctttctccgcaagcggatgaacaccaagccattccatgggcccatccacttccgcgccccgtccaagatcctgtggcgcaccatccgcgggatgattccgcacaagaccaaaagggtggaggcggc

SEQ ID NO: 10075 - DNA, 212 bp, Zea mays
  Clone ID: LIB3150-048-Q1-N1-H4
ctccgatccatttcagccgccgccgcgcgtagcaagcaagagcagcaaggatgccggctggccacgggctgcgctcgcggacgcgcgacctgttcgcgcgccccttccgcaagaagggctacatcccgctcaccacctacctccgcacctacaagatcggcgactacgtcgacgtcaaggtgaacggcgccgtccacaaggggatgccgcac

SEQ ID NO: 10076 - DNA, 423 bp, Zea mays
  Clone ID: LIB3150-048-Q1-N1-H5
actcgaattcattccacccccgtctgctagaatcggactgaccaccgggcgagcatcggtgcggatcgcgtcagcagccatggtgaaagcctaccccacggtgaacgaggactacctcaaggcggtcgacaaggccaagcgtaagctccgcggcctcatcgccgagaagaattgcgccccgctcatgctccgcctcgcatggcactccgcgggcaccttcgatgtgtccaccaaatccgggggcccctttcgcaccatgtataacccctccgtgcaggcgcactggatccaccgccggactgtaaattgccatcaggctgctagtgcccatcatggtgcagttccccattctattctactcttacttcttccttcttgctttagtcgtttccattctagttactgtcttatcttttttttttt

SEQ ID NO: 10077 - DNA, 434 bp, Zea mays
  Clone ID: LIB3150-048-Q1-N1-H7
ctcagaaaggcatttgaagaagcagagaagaatgctccatctatcagttgcattgatgaaattgattccattgcacccaagagagaaaagaccaatggagaagtagaacgtcgtattgtttcacagctactgactcttatggatggactcaaatctcgttcccatgttattgttatgggtgctacaaaccggccaaacagcattgatcctgctcttagaagatttggaaggtttgaccgggaaattgacattggagttcctgatgaagttggccggctagaggttctccgtattcacactaagaacatgaagctagctgaagatgttaatttggaactcatttcaaaggatacccatggatacgttggtgctgatcttgctgccctttgcactgaggctgctcttcagtgcattcgtgagaagatggacatcat

SEQ ID NO: 10078 - DNA, 319 bp, Zea mays
  Clone ID: LIB3150-049-Q1-N1-A11
caaacacttgcgccgccactgcctcacaggtaaggccgccatggtctccggttcgggcgtgtgcgcgaagcgcatcgtggtggacgcgcgccaccacatgctgggccgtctctcctcgatcatagccaaggagctgctcaatgggcagaaggtggtcgtcgtccgctgcgaggagatctgcatgtcgggcggcctcgtccgtcagaagatgaagtacctccgcttcctccgcaagcggatgaacaccaagccgtcccacgggcccatccacttccgcgcccccgccaagatcctgtggcgcaccatccgcgggatgatt

SEQ ID NO: 10079 - DNA, 398 bp, Zea mays
  Clone ID: LIB3150-049-Q1-N1-A12
agctcatctccacgcgccgccgccgccgctcgacgcccaccgcgcagccatggcggaacagactgagaaggctttcctcaagcagcctaaggtgttcctcagctcaaagaaatctggcaagggtaagaagccaggcaagggtggcaatcgattttggaagagcattggccttggtttcaagactcccagggaagcaattgaagggacctacattgacaagaaatgtccattcactggaaccgtttctatcagaggcagaattattgctggaacatgccacagtgctaagatgaacagaaccatcattgttcgcaggaactatctccactttgttaagaaataccagaggtatgaaaagaggcactccaacattccagctcacatctccccatgccttc

SEQ ID NO: 10080 - DNA, 113 bp, Zea mays
  Clone ID: LIB3150-049-Q1-N1-A2
aaggttgaaccaagcgttcggcttcaaccttcaagggcctcaaccttcctggcggcctaactccttttgaggacgcggatccgtccggttagacaaagccgtccgcacccatg

SEQ ID NO: 10081 - DNA, 429 bp, Zea mays
  unsure at all n locations
  Clone ID: LIB3150-049-Q1-N1-A6
aagatcgcccaagccttccggcaggttctccgatcccggcccaaatcccacgacgccggcggcggccatgggcggcaaggacctgacggaggaccagatcgcctcgatgcgggaggccttctcgctgttcgacacggacggggacggccgcatcgcgccctcggagctgggcgtcctcatgcgctcccttggcgggaaccccacgcaggcgcagctccgggacatcgcggcgcaggagaagctcaccgcacccttcgacttcccgcgcttcctcgacctcatgcgcgcccatctcaagcccgagcccttcgaccgcccgctccgcgacgccttccgcgtcctcgancaaggcggctccggcaccgtcgccgtcgccgaccttcgccacgtcctcaccttcatcggcgagaagctcgaggcccacgagtt

SEQ ID NO: 10082 - DNA, 278 bp, Zea mays
  Clone ID: LIB3150-049-Q1-N1-A7
atcagttttaacttctaaaatctgttatttgcatatgatgtgttcataccaggatggaagcacaggtagctttgctaactcacatgcaattccgaggttcaaaacgtttaggaaaggacctcaaactcactggtcatcgaattcatggcaaggcgtacacaatcacagaaagagtaggtttgtctaaactgtaagaaagccaatggttgttttgcatttgatgctttgttgccttagagtattctttggtatagtacgtggtgcattcatgagtcatg

SEQ ID NO: 10083 - DNA, 335 bp, Zea mays
  Clone ID: LIB3150-049-Q1-N1-A8
agaaaactgagtcagagaggtgcagatcaatgcggcggtggtggtgcgccgccggcggcctcgcccgctgcgtcctctcgtcctccacctccgccatagcatcccatgcccgcccgctgccggcacccctgatgcccaaatctccctcctttaccgtccctttctccttgtcctgtcgcaggcaccactctctccagggattcttccacctggtcatcgcttcttccttccgccctccgtcggcgcatcatcagcaagtgcggcactacgccaagaagggagaggtcgcgcgctccgctcacgcccactaaatccaaagtcaagaaatacaagat

SEQ ID NO: 10084 - DNA, 414 bp, Zea mays
  Clone ID: LIB3150-049-Q1-N1-A9
cccacgcgtccgagcaagggaatcacatcgccatggcagccaagatgtttgcattgtttgcgctcctagctctttgtgcaaccgccactagtgctacccatatcccagggcacttgtcaccactactgatgccattggctaccatgaacccatggatgcagtactgcatgaagcaacagggggttgccaacttgctagcgtggccgaccctgatgctgcagcaactgttggccttaccgcttcagccgtgccagatgccaatgatgatgccaggtatgatgccaccgatgacaatgatgccgatgccgaatatgatgccatcgatgatggtgccgactatgatgtcaccaataacgatagctagtatgatgccaccgatgatgatgccaaacatggtttcaccaatgatgatgc

SEQ ID NO: 10085 - DNA, 405 bp, Zea mays
  unsure at all n locations
  Clone ID: LIB3150-049-Q1-N1-B10
gcgcatgaaggcagtggggatttgcggcagcgatgtgcactacctaagggagatgcgcatcgcgcacttcgtggtgaaggagccgatggtgatcgggcacgagtgcgcgggcgtggtcgaggaggtgggcgccggcgtgacgcacctgtccgtgggcgaccgcgtggcgctggagccgggcgtcagctgctggcgctgccgccactgcaagggcgggcggtacaacctgtgcgaggacatgaagttcttcgccaccccgccggtgcacggctcgctggcgaaccaggtggtgcacccggccgacctgtgcttcaagctccccgacggggtgagccctggaggagggcgccatgtgcgagccgcttagcgtggcgtgcacgcgtgccgccgcgnccggggtggggc

SEQ ID NO: 10086 - DNA, 408 bp, Zea mays
  Clone ID: LIB3150-049-Q1-N1-B11
gaagagggtacttcaagcccgccctagcaataggattgggttgcgcgtccacaccacacggctagtctgttgactttttgtgccaggtgagaacagactatcgggcgttagctagagctgaagcgagggggagggtacattataaactagggagcaagcagcgctacctaggagaatttcagggtagcccaatagataaaatacagaaatcagctcttggatcaaactcaaggcaaggtcagcttcctaagaaatagcgggcgttagcactctacttaggatcagaggatccataagccatttgccgaaggtttactacaggagttaaagagatgggcgacaagaaggcggtcaccagctgctaattatgggccgtcccacgaccattttagttgctgtcccctggca

SEQ ID NO: 10087 - DNA, 389 bp, Zea mays
  Clone ID: LIB3150-049-Q1-N1-B12
cggacgcgtgggttgagagctaacaaagcaacttctgcctggggtgttgaggctcgtgttccattccttgacaaaagtttcatcagtgtagcaatggacattgatcctgaatggaagatgataaaacgtgacctcggtcgaattgagaaatgggttatccgtaatgcatttgatgatgaggagaggccctatttacctaagcacattctctacaggcaaaaggaacagttcagtgatggtgttgggtatagttggatcgatggattgaaggaccatgccagccaacatgtctccgattccatgatgatgaatgctggctttgtttacccagagaacacacccacaacaaaagaagggtactactacagaatgatattcgagaaattctt

SEQ ID NO: 10088 - DNA, 398 bp, Zea mays
  Clone ID: LIB3150-049-Q1-N1-B6
gccccatcaacgaatcctatttctctgtgaagatgatggaggggatcattgcaacatcgtacaatgaaggcgacaagttctatatcgacccaatgaaattgctgccgctctcacgcttcctgccacaaccaaagggacaatctcaaggagcacctataggtggtgggcgtggtggaggaaggggttttgggcgaggccgtggtggtggttctttccgcggtggaagaggaccaccaagggggggtggtcgaggtccaaggggtggaggccgtggcggttttagagggcgaggaaagttctaggtgcagattgagtttgatgatgttttcccctagaagcatcatatctgcacaattggaaacttccatgttattgtaaccagatatgcttaatgtagc

SEQ ID NO: 10089 - DNA, 375 bp, Zea mays
  Clone ID: LIB3150-049-Q1-N1-B7
gtttcctgcatccgcctccgccccccaccggctccacctccgccccccaccgccccgccccacagcaggaaggatggaagccccgggctccccctacgcctcctcgccggaatccgcccccaagcgtgccccacgctcccctccgcagcagcagcagtctccctccgaggaaggagatgacaaggagaaaccaacacatttgagatttctagtgtctaatacggcagcagggtgcatcattggcaagggtggatcaaccattaatgattttcagtcccagtctggggctcgtattcagttatcacgtagcaatgagtttttccctggtacaaatgacagaatcatcatggtttctggactgtttgatgaagtaat

SEQ ID NO: 10090 - DNA, 392 bp, Zea mays
  Clone ID: LIB3150-049-Q1-N1-B8
ggatgatgaagaccttaggctttggaaaggatgggttgaatctcgattgcggcaactaactttgaagattgaacgtgatacatatggaatgctacagtgtcatccttacccacatgaatatgcagacccttctaggcagtgtgctcattgtgctttcttcatgggcttgtcaaggaaagaaggtgtgaaaatacaggaaggacaacagttcgatattcgaggaacggtggatgagttcaggcatgaaatcaacatgtatatgttctggaagcctgggatggagttagctgtttctcatgttcgtaggaagcaggtcccagcttatgtgtttccagagggttataaaagacctcgcccttcaagacatgtgaaccatcagtctgataaaaatg

SEQ ID NO: 10091 - DNA, 321 bp, Zea mays
  Clone ID: LIB3150-049-Q1-N1-B9
ggggggaaccattccaataacaacaaaccgtgttctacacggcacacaaaaaaaatacgaattgtgtcgtttggcaacacgaatcatcagtcttttaccaagatcgcttcgggacgaagcggtacacgaactaccacacaaaatagacttgtaaagccgtttttacactacttcgccacgccgtctaaaagcgaacaaacagcataaagttacaaattgcactcctccatccctccgccgccactggggccgggcgcgagatacgcctacgcgcgctcgccgcggatgcggcgggcgagcctggagtctttgggcatgatg

SEQ ID NO: 10092 - DNA, 373 bp, Zea mays
  Clone ID: LIB3150-049-Q1-N1-C10
cgaacgccggagctcgacgaggacgaccgaggacgcacgcagagatccggcgtactgcaaattttgaaaactgaactgtaagatggcatcagcagagctttcccgtgaggaaaatgtgtacatggcgaagctcgccgagcaggcggagaggtacgaggagatggttgagttcatggagaaggtagccaagactgttgactcggaggagctcactgtggaggagcgaaacctcctgtctgttgcatacaagaacgtcattggagcccgccgcgcctcatggcgcatcatctcctccatcgagcagaaggaggagggccgaggcaatgaggaccgagtaacactcatcaaggattatcgtggcaagattgagact

SEQ ID NO: 10093 - DNA, 395 bp, Zea mays
  Clone ID: LIB3150-049-Q1-N1-C12
ctcaacacagcacaggcagttcgagagagagagagagagagagagagataaagatgtcgtggttcgggcaccaccaccacaaccagccggctcccccggcgtcgggccccaaccaggtgttcaagatcttctgccgcgccaacgagaactactgcctggccgtccgcgacggcgccgtcgtgctggccccggtcaaccccaaggacgaccaccagcactggtacaaggacatgcgcttcagcacccgggtcaaggacgaggaaggcatgccggcgttcgcgctcgtcaacaaggccacggggctcgccatcaagcactccctcggccagtcccacccggtcaagctcgcgcctttcagcccggaccaggaggacgcctcggtgctgtggacggag

SEQ ID NO: 10094 - DNA, 160 bp, Zea mays
  Clone ID: LIB3150-049-Q1-N1-C5
ttaaaatccaaccaatccttccgaaaattttaaaaaaaaaaaaaaaaaaaaaaggggaaataaaaaaaaagaaatgggggaaaaaacaaagtaaaaataaaaaaatttaaatcaacataataaatactaataccgatcacattaattgttgacaaaaaca

SEQ ID NO: 10095 - DNA, 426 bp, Zea mays
  Clone ID: LIB3150-049-Q1-N1-C6
tcttttaaagtcaaccaacccttccggcgtactcggtctccctcttcctgtcagtagtagagtgagagtgaggcagcgagtgggagacaaggggaaatggggaagggagcgcaagggagcgatgcggcggcggcgggcggcgaggtggaggagaacatggcggcgtggctggttgccaagaacaccctcaagatcatgcccttcaagctcccgcccgtcggcccttatgatgtccgcgtgcgcatgaaggcagtggggatttgcggcagcgatgtgcactacctaagggagatgcgcatcgcgcacttcgtggtgaaggagccgatggtgatcgggcacgagtgcgcgggcgtggtcgaggaggtgggcgccggcgtgacgcaccttgccgtgggcgaccgcgtggcgctggagccgggcgtcagc

SEQ ID NO: 10096 - DNA, 335 bp, Zea mays
  Clone ID: LIB3150-049-Q1-N1-C7
gctggaagcgcgacacactgagggacctggatgagacccttgccattacgcagagtgtaatctttgtcaacaccctccatcaggaggactggctcactgacgggatgacgaccgagtaccacacactctctgagactcatggtgacatggaccaaatcactaaagacatcatcacgagggaggatgggcctggctatatcggtatgctcatcactactgacctgcctgctactggtatggatgtgcacccagtgttcctggacattaactatgatcttgccaccgatccctagaactgcctggatcgtattgctcgacttggaacttatgggcgg

SEQ ID NO: 10097 - DNA, 385 bp, Zea mays
  Clone ID: LIB3150-049-Q1-N1-C8
gctgtctttccatgatctaggagccgtcgccgtcgagagctgaggcgaagcaacatagaagacgaggggggagtgcgactcctcgtgacttgtgagggagagaagccatggcggagatggagccgagcatcgggaaccatatggccgaagaccaaccgactccggccgcctccactgtcgaggaggccgctatggatgcagataccagcggcgagcggcgtagcgctgccgcgttggtgggcctgctccgcgggttcctcgccgtgcaacagcgccgggccgaggcctactccacgctacgaaggggtttttctgagtatatggctttatgaggtgaattggcctatcaacaactgtgtggcaatattacagcggagttcaatga

SEQ ID NO: 10098 - DNA, 379 bp, Zea mays
  Clone ID: LIB3150-049-Q1-N1-C9
caagatcgaggctgaactgagcaatatcttgccacgatattccgtgatgagggactgcaaattatgaaaactgaactgtaagacggcatcaacagagctttaccgagaggaaaatgtgtacatggcagaagctcgccgaacaagcgaagaggtacgaggagatggatgagttcatgtaaaaggtaaccaatactgtatactggtaggaactaactgtggaggagcgaaacctcctgtactgagcatacaagaacgtgattggagcccgacgcgcctcatggcgcataatatactccatagagcagaaagaagaaggccgaagcaatgaggaccgagtaacactcatcaaggattatcgtggcaagactgagactgagct

SEQ ID NO: 10099 - DNA, 401 bp, Zea mays
  Clone ID: LIB3150-049-Q1-N1-D10
gccttcctttttttttttttttttttttggggtttcaaatgttcagatgttgaaattcttcgaaaatgttcagactttagacaaaaagtaactctaatatagcagcttcacacacgcacaggggacaactccgaaactgagtgggcagaagacttaacacggtcgaaaagctaaagcctatgggcgagcagcaaccggtgctggagatggagctgtagcagcagcaccaggaccagggcgggggcctccttgtccaccagcaggcctatcctccctgcgcctgaagcgctccggcggcttgcggtccctgcgcttctcacgggatcggacgcggacgatgtgagcgtggatcgcgcacgagacgcagtggtgcaccttggcgtacagcttcgggaggacgt

SEQ ID NO: 10100 - DNA, 404 bp, Zea mays
  Clone ID: LIB3150-049-Q1-N1-D11
ctcggagagcgaagataagagggaaaccaagctgtggggcgggcggttcgaggagggcgtcaccgacgccgtggagcgcttcacggagtccatatcctacgactggcagctctacaaatacgacataatgggcagcaaggcccacgcctccatgctcgctggccagggtttgataacagctactgatagggatatcatcttagaggggcttgatcagatagagaggctgatccaagaaggcaaatttgagtggaggaaggaccgggaggatgtgcatatgaacattgaagcggctctaattgaaagggttggtgagccagccaagaagttgcatactgctaggagccgcaatgaccaaattgtgacggatctaaggctatggtgccgtgatgctattgacaaga

SEQ ID NO: 10101 - DNA, 402 bp, Zea mays
  Clone ID: LIB3150-049-Q1-N1-D12
gtactacacagaacagtagcaccgggctccgggcaccagggcaggcgaattcctaggttcgctggagcctggtccgagggatggccgccgcctcgctcgcgttggcgagtcctctccggcttctcctccgcgtccgtcacccgcgcggagccatcgccgtcccgtgctacttcatctcgcgaggacggtatagcaccgccattgccgttgcagcagcgagggatttggcggtgaaaggaagcgtggacaggaattcagcggaggaagtcaggaacattctgaatatggcagaaagggcttcccaacgaagaaatgtttttcacaccaattttcttactccacctatagtgaaagaggctatgctggcacttgaaaagtttgcagataccaaagcagtagctc

SEQ ID NO: 10102 - DNA, 404 bp, Zea mays
  Clone ID: LIB3150-049-Q1-N1-D7
cgctgttaggttctaccaggagaccttcggcgtccctccggccacgcgagctcgccgaaatggtcgcccacaggttccatcagtaccaggtggtgggtcgcgcgctgccgaccccaaccgatgagcaccccaagatctaccgcatgaagctctgggccaccaacgaggttcgcgccaagtccaagttctggtacttcctgagaaagctcaagaaggtgaagaagagcaatggccagatgcttgccatcaacgagatctttgagcgcaacccgaccaccatcaagaactatggcatctggctgcgctaccagagcaggactggttaccacaacatgtacaaggagtaccgcgacaccaccctgaacggcgcagtggagcagatgtacaacgagatggcctcccgc

SEQ ID NO: 10103 - DNA, 410 bp, Zea mays
  Clone ID: LIB3150-049-Q1-N1-D8
gtcgggtcttcctctcccacaacaattgcctgtatactctcagccaactctgccccttgggccttttaccagcctggttggctatccatatttgcctcagaactattacctaccttcagcgccattccagcaagcgtactcaagtaatgggcctttccatcaatctgctgctcctgccgtgcctggagctggtatgaagtatccgatgccacaatacaagagcagccctcctgcttcgaccctaccacaaccatcatcactctctggttacggagggttcggaagtgcaaataatatccctggaaatttcagccaaaatcagggtgctcccgctgcacctacaactttgggatttgatgaagctttaggcacacaattcaaacaccccaatcattatgcagcactacagc

SEQ ID NO: 10104 - DNA, 404 bp, Zea mays
  Clone ID: LIB3150-049-Q1-N1-D9
cgctgcctccgcctctcgagtctcgtccacccgtcgtcctcctagctcctctactcgccagtcgccatgggcaagattaagatcggaatcaacggcttcggaaggatcggcaggctcgtggccagggtcgccctccagagcgaggatgtcgagctcgtcgccgtcaacgaccccttcatcaccacggactacatgacctacatgttcaagtacgacaccgtccacggccactggaagcacagcgacatcacactcaaggactccaagacccttctcttcggtgacaagccggtcaccgtctttggcatcaggaaccctgaggaaatcccgtggggtgaggctggcgctgagtatgtcgtggagtccaccggcgtcttcactgacaaggacaaggctgctgcaca

SEQ ID NO: 10105 - DNA, 401 bp, Zea mays
  Clone ID: LIB3150-049-Q1-N1-E11
ggcgaatttgcgagagaaccatccgccggttcttgtgtaactgccggttttaatggtgctggagggatgacgaggcaaacacatggtggctatgaaccagaaaggtcatacagaaattcagcagagaggtcttcgtcagagaaaaggattccccagagagagcatatcccctctgtggctgccggcagttcggatctgcgccataggctactgaagcaaagaaagtccaataataattcaaggtcggctgaagccctgggcaggcatgatacacatcttgaggatgagcgcaatgaccaacatcgtccgcgaggtgaacagcaggatggcctctcacggtctcgactgcatgatagaataagactacctggggagacagcgtttgacagtcctgggtcacg

SEQ ID NO: 10106 - DNA, 388 bp, Zea mays
  Clone ID: LIB3150-049-Q1-N1-E12
gaagaatgcctgagcaggtttcttcaaaacaggaggttgttgatgctcttgttaaaggacaattttctatggacgttgcacggtgggtggctacaaatctacgtcgaaccagtccattgggtcagcgaccatcttcaagcttctcatggacttttgatctaaatggcatctctgagatgtacaagtcttatgaggatactaacttatggaggattgtagagaatgtaccaaggggtgttcatattaattttctaaaagctgaacgaagtttgcatagatgggctctcgaagacctccaaagaatttatactgcggaggaattagctgcagatgaggggtggaggagttgaattcacgtgcttgaagatgcttgacaactgggtccatg

SEQ ID NO: 10107 - DNA, 311 bp, Zea mays
  Clone ID: LIB3150-049-Q1-N1-E4
tctttaaaagccaaccaacccgtccgcctcttgaagggtaccctcctgaagcccaacgtggtgactcctggctccgactctaagaaggtgacacctgaggtgatcgcccagtacaccgtccgtaccctccagaggaccgtccctgctgctgtgcctgctgttgtcttcctctccggtggacagagcgaggaggaggccaccctgaatctcaatgccatgaacaagctcagcaccaagaagccatgggccctgtccttctgcttcggccgtgccctacaggcgagcaccctcaaggcctgggctggcaaggt

SEQ ID NO: 10108 - DNA, 426 bp, Zea mays
  Clone ID: LIB3150-049-Q1-N1-E5
tcttttaaagtccaaccaacccgtccggggcttttaatcttgtccgagagtacgcgaggtcgcctccagattgatattgaccaggggtttctcccaccaactgaggtttcaatggcatttgcagggaccgtgctacagcttggcctttctggggaaaaggaatctcatgtgctgaatccccgggctccggggagggatcttgacatggactgctacgtatgactcctactaggaggcctcggtcgagggcgactcctactaccatgacgaggactactagtatgcccagagcgactacaacgagaactagctcgagctcctcaagtacggcaggcaccgggtgcgcaaccaggactgcacctaccgctgcgccttctgcctcagcaagaagaagcagggttacaagatcaaggacctgctacagca

SEQ ID NO: 10109 - DNA, 124 bp, Zea mays
  Clone ID: LIB3150-049-Q1-N1-E6
acctaaccaaaaacaacttcgggggaatttcaaaccttgcagttttctttaaaatgacgcacctccaggtcttccatgcgcctgatcagaacccgaacgaccaccttgaaccggtcccacccct

SEQ ID NO: 10110 - DNA, 380 bp, Zea mays
  Clone ID: LIB3150-049-Q1-N1-E7
gtttattgtttctcccaaataccgccgccggtccattccgtaacgcgacaccatgagggagtgcatttcgatccacatctgccaggccggtatccaggtcggaaacgcgtgctgggagctgtactgacttgagcatggcattcatgctgacggccagatgcacggtgacaagaccattgggggaggtgatgatgcttacaacaccttcttcagtgagactggtgctggcaagcacgtgccccgtgctgattatgtagaccttgaacccactgtcatcgacgaggtgagaactggcacctagcgacagctctgccaccctgagcagttcatcagtgggaaggaggatgcagccaacaactttgcctcggggcactacacca

SEQ ID NO: 10111 - DNA, 261 bp, Zea mays
  Clone ID: LIB3150-049-Q1-N1-E8
gttgatagtgcctgattcaattaactttcggccaactttggtgtccgggatgaactttagctggatttacttgagatacttgcaaaggaacccactgactgaacttaagggtgatcccagcgatgacttctccttgaccacattattcgcatctgccatgagaccagttacagactctgtagccaacctgtttgataggatgctgtgtgcatggtctacgactaaacaagtagctctctcaatatcagattctaccaaggc

SEQ ID NO: 10112 - DNA, 406 bp, Zea mays
  Clone ID: LIB3150-049-Q1-N1-E9
gttcatagagcaaatttgccatggatcaagatcttaagaatgccatattgaaaattctagactttgtgaagttacttgatcaagaaatctccaagtttcaaggccagtcacctgattatgatggactatgtgagaaaacacaacagttctctgcattagtcgataaagttctgtcaaacgttgatgttctaaatgatattgtcatagcactgtctgttatcttgtcagaaactagccagattaagttcacattgttgagagacaatagcaatgaagcagaaagtaataacttagattgtgttgataaagtgactctacttgaaaataaggtgcagcttgagccagtaaaagacaatgttcctggtatctgcccactgttgcctcattcatcttctgatcctgagtt

SEQ ID NO: 10113 - DNA, 403 bp, Zea mays
  Clone ID: LIB3150-049-Q1-N1-F10
cccgtcgtcggcatggccaccgacgtgctgcgcgcgcgcaacgtcctcttgccggcgccgccgcagaggatccgggcggcggcgccggcgcgcggtaggggagctcgcaccgacagtcaccaccccggcgccagcggcaccaggaggaggtcgccgccggccgggacatcgtcccccgcggcggggcgaagacaccccggcggcagaagggcgaggcctgcggcggaggtgtacgccggcccatcgttctcgacgtcccccgacccgagcttgctgccgctaccgcagttccctgccaggaaggccgtggccgtggccatgacgaccgccgtcgacgccgtcgccgccgcgacgcgcgacctcaggcttatcctgcggctggagtagccatcaggacacatag

SEQ ID NO: 10114 - DNA, 363 bp, Zea mays
  Clone ID: LIB3150-049-Q1-N1-F11
ggctgaatggcggcttctggtgagggcgcgtaactcccgactacgacgggcggcgaggatgcccaccgaccgagattgagctatttatacaagccaccgatcgtaaactactactacagccaaggatacccgatgaagcccgaactgatacaaatggatcactcaatagtcgtctaatacgaccttcagcgactacataagctctaacgatcgtacccgaactctgaggcctacattcgacgattacactccgacgactacgtctcctttgttgcgtacgccaccggaaacgcaggtgtgctcgacccacgcgccaataaccactttaacgtccgtgaggactgcaccatgttcgacggactc

SEQ ID NO: 10115 - DNA, 174 bp, Zea mays
  Clone ID: LIB3150-049-Q1-N1-F12
gcggaagcagatgccgcctataggacctggtaccgaattggcacaacgcattgaattacttccttcacaccaacttagatcacacagcatctattgaccggggataaggcggcgaccatgaatacgaatcgcgtgaagatcatatgcatggatatggcaaatacagcttagaga

SEQ ID NO: 10116 - DNA, 407 bp, Zea mays
  Clone ID: LIB3150-049-Q1-N1-F5
ttaaaggcggaccaagccgtccgcgttggttggccctgtgagctaatccgacgcggcggtcacttgagcccccgatggagttcgccgccggcgctgcggtggccccgcgcccgatgcccgccggccccggtcgaaaccgccgggtgggcggtggagcgatcggcatcggttgggcccgccgcgtgaccgggccggggctctcgctggctcccggcgttgcgagacgtgcggcctccgcgtcaggaggagcgaggccacaggcgcgtcatcgttcgctcaaccggcggcggctatctgtggttccgcgacgagggcgccgattgtgaaagtcgaggcaagcggctctactgccactccactctgcagcggtgccagcggtgatgaccacctctcggcctactgctact

SEQ ID NO: 10117 - DNA, 408 bp, Zea mays
  unsure at all n locations
  Clone ID: LIB3150-049-Q1-N1-F7
gcagaggctatgaacctgttgagttttcttttggagctggctggaaggctgagtctgtgcatgggactccttttgaaattgactgctctgaagatgaattttctgagtatgatgagaagggagaatgcccggttgagctaagcaagctgcagtcaacattcaaagtggtgaagaagcatgagaagggtggtaagacaagatttgtctagatccagtgacttggagtctgtcgggtattggaatcggaggtgtataaatggtacatttgggctaaaaggttgtgcgtaagacgtaccttctctgtctattgattntgtggatgccgtgaaccatgtgaagctttcagtgacagtgtccacagaggcattgccctggaccgattactatttgtctgtggtctgaggtcat

SEQ ID NO: 10118 - DNA, 312 bp, Zea mays
  Clone ID: LIB3150-049-Q1-N1-F8
gccaatggaagcacagcgacatcaccctcaaggactccaagacgcttctcttcggcgagaagccggtcaccgtctttggcatcaggaaccccgaggagatcccgtggggtgaggctggtgctgagtatgtcgtggagtccaccggtgtcttcactgacaaggacaaggctgctgcacatctgaagggtggtgccaagaaggttggtatctctgccccaagccaagatgcacccatgtttgtttgtggtgtcaatgacgacaagtacaccttcgatgttaacaattgtttcaatgctaactgcaccacaaact

SEQ ID NO: 10119 - DNA, 408 bp, Zea mays
  Clone ID: LIB3150-049-Q1-N1-F9
gcagtccccaactacccccagcctcggaaggaaccttccagaagcgcaagactgtaaaggccgtcgccttcccattcttcctcgccgcgggggtcgcctgagatcacataaacaatggtgaaggctgttgctgtgcttggtagcagcgatggtgtcaagggcaccatctttttcacccaagagggagatggaccacactacaatcctgcgagcaaggagcatggggcaccagaagatgagaaccgccatgctggtgatcttggaaacgtgacagctggagcagatggtgttgctaatatcaatgtcaccgacagccagatcccactgactgggccaaactcaatcattggcagagctgttgttgttcacgctgatcctgatgatcttggaaagggtgggcacgagctc

SEQ ID NO: 10120 - DNA, 404 bp, Zea mays
  Clone ID: LIB3150-049-Q1-N1-G10
ctagccgtctcgcgcgcttcaccttccccaccccgccgccgccatcgcacgcccgcatccgcatccgctatgggtgcgtacaagtacgtctcggagctatggcggaggaagcagtccgatgtgatgcggttcgtgcagcgcgtgcgctgctgggagtacaggcagcagccggccatcgtccgcctcacaaggcccactcgtcctgacaaggcgcgccgcctcggctacaaggccaagcagggttatgttgtttaccgtgtccgtgttaggcgtggtggcaggaagaggcctgtgctaaagggattggctatgggaaggccaaaccacaaggtatcacccagctcaagttccagaagaacaagaagtctgttgctgaggagagggctggacgaaagcttggtgga

SEQ ID NO: 10121 - DNA, 400 bp, Zea mays
  Clone ID: LIB3150-049-Q1-N1-G11
aaggataagaaaaatggataagcgaactaggaatagaagagaagaggaggacgaggagttaatgctctttcttttccctgctctttatctaattactaatggagggagagagaaaagagcaaggcatgcttctattctacctggcaaggagagacttaaagagattcttgaagggcacgagaagaactgtcttgtcgcattccgtatggagcctcgtatattcaaagatatagcaacatttcttagagaagaacacatcctatgtgacacaaggggtgttaccgtggaagaaaaactaggttgagtgcgtgtgcgtttttctttctttcctactgaacttgcaaagggcgctatgccacctgtgttcaaatgatacacaacatccaaagagaaagcatga

SEQ ID NO: 10122 - DNA, 384 bp, Zea mays
  Clone ID: LIB3150-049-Q1-N1-G12
cgacatgttcgtcctcgccttcgccgaacgcctcttccgccctaccttccgcaaggatgacttggtatttgggaagaagctcggggagggcgcattcggggtcgtgtgtaaggcttcactggcgaaccccgaagcggcgaagaagcaaggggatttggtcgtgaagaaagcaacagagtatggtgcagtggagatttggatgaatgaacgtgtcaagagggcatgcgctagtagctgtgcggattttatttatggcttttgcgagacaaaagccaaaggtaagggagctgaagaatattggcttatttggcggtttgaaagtgaggatacactttatgatctcatgccaagccaggaattcccttacaatgtggagacaaaaat

SEQ ID NO: 10123 - DNA, 376 bp, Zea mays
  Clone ID: LIB3150-049-Q1-N1-G4
ccaatttgacctcccacgcgtcctttttattgtgtagatgatgatccttcatgtgtgttcatcactgtcaacgaaacttgtgaattggctaacatcaattcctgcgaacgcagtgacggcaagcacactaacaactcaaaggtggctactgatccagcttgtcttgagattcctcaccacacctttgcgctataccaggaccctgtgcatgaatctcaggggcacgatcatgccatcttggatatttcatggtcaaaaaaatatagaattgctttctgggtctaaagacaaaactgttcgattatggaaagatcggtgcgatagctgtcataaggtttctcttgataataactatgtgacatgtgtacgagctaaa

SEQ ID NO: 10124 - DNA, 387 bp, Zea mays
  Clone ID: LIB3150-049-Q1-N1-G6
gaaaaggggcaggaagaaatcgagcctcactcgatccatcgcctcgccgcagcacacacgaggccggcggcgccatggccatgaagctggacatgtccgcgctcgagaccaacttcgccaacctgaccgcctccgccggcgacgacacgtacttctccgccgaggcccccgacgtgccgtccatggtgctccccatctgcgacgacttcgacggcttccaggcggccaccaaggatatggtgaagaataagaaggggacgaccacgcttgccttcatcttcgacaagggcgtcatcgtcgccgctgattccagggccagcatgggcggttatatatcctcacaaaccgtgaggaaaattattgaaataaatccttacatgctgggga

SEQ ID NO: 10125 - DNA, 406 bp, Zea mays
  Clone ID: LIB3150-049-Q1-N1-G8
gtttaccattcctccccaaaacacatcctgcgatcctcgaagcctccgccgagcatcgatcatgtcggcctactgcggcaagtacgcggatgagctcatcaagaatgctgcctacatcggcacccctggcaagggtatccttgctgctgatgagtcaactggcaccattggcaagcgcctttccagcatcaatgtcgagaacgtggaggagaaccggcgggctctccgtgagctcctgttctgctgccctggtgccctccagtacatcagcggtgtgatcctcttcgaggagaccctctaccagaagaccaaggatggcaagccttttgtcgatgtcctcaaagaggggagggtcctccctggcatcaaggtcgacaagggcaccaattgaggtgttggcaccgac

SEQ ID NO: 10126 - DNA, 166 bp, Zea mays
  Clone ID: LIB3150-049-Q1-N1-G9
gggtgcaacaagaaggaaaatatggggaggaagatgtggatggttcatgtgtatcaaaaaaaaaaaattgtgactgcgatgtaaatcagcccaatgcagcggacatcctttccccataatcacccattgcccgcgcagcacttgcgctgctgtcaaaacagacaca

SEQ ID NO: 10127 - DNA, 121 bp, Zea mays
  Clone ID: LIB3150-049-Q1-N1-H1
aaagcgaaccaagccttcgggccggtccttccttcgattcgaacatttgggggggctcaacggggtccttcctggaggccgaaataaaacttgcccttgccgagctggctcccggcgttcc

SEQ ID NO: 10128 - DNA, 267 bp, Zea mays
  unsure at all n locations
  Clone ID: LIB3150-049-Q1-N1-H10
cgcgagagctctcagaaggccctagcacgcagaaaccccacgagagagacgaatcttccgaatctctcggtggcgatggcgctctccgaccgctcccgcgagtcgctcctcccgagcttcctctacggctcctcggcgcgctctttcgctgccacaggagccgccgcgcgcctncctgtctcctccccggcgcctggcgcggctggagcaggaggcggcgtgccgttctcgatccaggcgcccaaggagaagatcgagatgtactcg

SEQ ID NO: 10129 - DNA, 228 bp, Zea mays
  Clone ID: LIB3150-049-Q1-N1-H11
gacaactccctaccgtccgagaccccaagcaccagcgcggcggcggcggcggcggcgaccatggctgtcgggaagaacaagaggatctccaagggaaagaagggtggcaagaaaaagaccgtcgaccctttctctaagaaggattggtatgacatcaaggcaccgtcggtgttcagtgtgcgcaacatcgggaagactctcgtattcaggacacagggtaccaggatt

SEQ ID NO: 10130 - DNA, 160 bp, Zea mays
  Clone ID: LIB3150-049-Q1-N1-H12
ctctagccaacacacacataatactctccattccattccattccattttaaaaggtagaataatgggccggctcttcacccagcctttcgggggccctcttccgctcggttggtacacccggaccccagggcggcccgttaccattgtgtccgccaagaa

SEQ ID NO: 10131 - DNA, 264 bp, Zea mays
  Clone ID: LIB3150-049-Q1-N1-H4
ctattatcctcctcccgatgtgccccctgtagaaaagcagccacactatggaatttcttcatatggacgagatgcacctccaagtgctcccccagggaatcaaaaccaagcacatgggtcatctcaggtgacacacagcatgcaagttcctctttcctatgctgatgctgtgataggggcagctggtgccagtatcagctacatccgcaggcatagtggagcaactataagtattcaagaaggtgctcctggcgagatgacagt

SEQ ID NO: 10132 - DNA, 268 bp, Zea mays
  Clone ID: LIB3150-049-Q1-N1-H5
ccagcacctagcaaatagtgccagccattggcggccaccttaagccttgaccttggggggcctttcctgcgtgaaagagccgagggcgcccaagtcgctgtttgtgcgcgcgcgcgccaacctggcgtttcagtcggtgtgggcggagctgaacggcgccatgggcgacctgggcacctacatccccatcgtgctgtcgctggcgctggcgcgccacctggacctgggcaccaccctcgtgttcaccggcatctacaacgccgtcacg

SEQ ID NO: 10133 - DNA, 362 bp, Zea mays
  Clone ID: LIB3150-049-Q1-N1-H6
accccccgcccgggaggacacacagcctgccccagctgccagaccctccaagcccaacctaaatataaagatggttcaaaatacggagaaaaatgtgtcctcaccatcgaaacctgctcatgctactgttaatgccctaccgggcgataaaggtgttcctaaaaacaaatcacctgatgagccagggtactcaatttttgttaagaatttacctttcgaagcaactgttgaaatggtcgaacaagagttcagcaagtttggtgctattaaatctggtggtgtacaagtcaaatgccagcctgatcagttttgctttgggcttgtcgaaattgagtctcagcaatccatgctagcagcaatcg

SEQ ID NO: 10134 - DNA, 327 bp, Zea mays
  Clone ID: LIB3150-049-Q1-N1-H7
ctatatacaccaccttctctttcgcatttttttttgaaggaaattattttcgcgcagatgtttattattcatgtgggcagaacaataaaatcttcactttcatgtatattatccatatgttgtggacatcatttacgtaaaatatcccattgtcttctatgaacttggtcattattcatccataacacatcatgtgtgcttctacttatcgaaaatacatcttccaaataacttatgaggacttaaccaagcaccattcaatcttcatttgcttctatagtttatttttgcattcttcatacataatattgcctatcaatgtatatt

SEQ ID NO: 10135 - DNA, 348 bp, Zea mays
  Clone ID: LIB3150-049-Q1-N1-H8
gctcgaggtagcagctccccccgcaaaaacgctagctttacctccccacaagcgcctccaagatgaagctcgtcaggttcttgatgaagctgaacaacgaaacggtgaccatcgagcttaagaacggcaccgtcgtacacggaaccattaccggcgttgacatcagcatgaatactcatctgaagactgtgaagctgacactaaaagggaaaaatcctgttacccttgatcaccttagtgtgaggggaaacaacatccgctattatatccttcctgacagcctaaacctggagactttgctggttgaggaaacacccagggtcaagcctaagaagcctacttctggga

SEQ ID NO: 10136 - DNA, 406 bp, Zea mays
  unsure at all n locations
  Clone ID: LIB3150-049-Q1-N1-H9
ggtacatctatggtggccatgttgctgactacatgaagaaccttgctgaagaggacccagaaaagtaccagagccacttcagtgcgtacattaagaagggagttgaggctgatgaaatagaagcgctgtacaagaaggtccatgctgccatccgtgccgatccttccattgttaagtcaaccaagcagccaccaaaggagcataagaggtacaaccccaagaagctgacatatgagcagaggaaggccagcctcattgaaaggctcaaccaactcaactcctccggtggtgctgatgacgacgatgaggacgacgagtaaagttaattgccatcgaagtagtgctatctcaatccagcgatcagcaattgtgtactgtcttatgcggngacctgtagtactgcaat

SEQ ID NO: 10137 - DNA, 329 bp, Zea mays
  Clone ID: LIB3150-050-Q1-N1-A1
gggttttgctgctctccgaccccgagctccgaaggccgcagcatcaggcgcggcccccctcgcgtgtgaccgagatggcgctgccgaatcaggggaccgttgattaccccagcttcaagctcgtcatcgtcggcgatggtggaactggtaaaactacatttgtgaagaggcatctcactggagagtttgagaagaaatatgaaccaaccattggtggtgaagttcatccgttggatttcaccactaacttgggtaagatcaagttctactgctgggataccgcaaggcaagaaaaatttggtggccttaaggattgatactatattcat

SEQ ID NO: 10138 - DNA, 404 bp, Zea mays
  unsure at all n locations
  Clone ID: LIB3150-050-Q1-N1-A10
gcccccgcgcctcgaatccttcgcgagaggtgctgttgtttgccgtgatttgagccaggtggaggtgtctcgcttcttgatcttgagaggtgttcctagttgattgttgggagcgaagaatgcatgataccttctgtgaggatctctcctggctctgcacccttctctggctccagcctacacttaaaattacattcaattccatccatctctagtctcaaaccctacaaatatgtggtctcctcgctgaaaccactctacctagcaccgctagatggtccacacacttctgagcttaagtcttggagacaaccacttgagttccgttgtgctgcttctgctgacgatgacaaggagtcaaagactcangtggtgccagttcagttggaaggcgcacagaggtt

SEQ ID NO: 10139 - DNA, 355 bp, Zea mays
  Clone ID: LIB3150-050-Q1-N1-A11
ctcgtgaaagatgaagaaggtactgaccctaacattgtgactggttcagattcagagaaaagcattggtgatctcaaagggaaagacttgctgaagcgtcttcatgaagttgggacgcttgctcagattacaagcattcaaagggatcaggtagttctacttggtcacagacgtttacagataactgagatggtcgaagaggatccactcacagttaaagttgatcatctaaaggaaaagccctacaacaaggatgatgatgttataaaagctacctcattcgaagttatatcaactttaagggaagttctaacgacaagttctctttgggaagatcatgtgcaaacctacacac

SEQ ID NO: 10140 - DNA, 368 bp, Zea mays
  Clone ID: LIB3150-050-Q1-N1-A12
tttaccaccaagtatggaaaggagtttgttgctggtgctatggaattgcgccccgacagcagtgtcaaccgcacaataattgaaaagctctcggtgaaggctccatcaggtgattcaaagctaaaagtcttgaaagctattgcccaagagtacaatattgaatgggattcatctaatactgaagcagaattcaacaagaaatatgaagatctactggacggctcgggatcttcggtccaccagatccagacacctatcattgagggctcagtgagctcaccagttgtttctgctccaagagataagacgccagcattgaattcacctgtcattgatgccgaaaaacaaccagttcgcgaatctccgac

SEQ ID NO: 10141 - DNA, 67 bp, Zea mays
  Clone ID: LIB3150-050-Q1-N1-A2
ggcggctgatcggatgacacaacgatgcggatagggtactaatcacgtacggcctgacgatcatgtc

SEQ ID NO: 10142 - DNA, 385 bp, Zea mays
  Clone ID: LIB3150-050-Q1-N1-A4
attttacaaggcacaaggatattctgttggaaaatctctcgtggaagaggataaacttgagctcgcaacttctcttattgagaaggcgaaggcaaagggggtttctcttttgcttcccactgatattgtagtagcggacaagtttgcagctgatgctgagagcaagattgtccctgccactgctatccctgatgactggatgggtcttgatgttggccctgatgccaccaaaacattcaacgaagcattggacaccaccaagactgttatttggaacggccccatgggagtgtttgagttcgagaagtttgcagctggcactgaggcgattgccaagaagctagctgagcttacaaccacgaaaggtgtcactaccatcatcggc

SEQ ID NO: 10143 - DNA, 344 bp, Zea mays
  Clone ID: LIB3150-050-Q1-N1-A5
cgcgtcgccgtcgcctcggcgctcgccgccaccgccgtcccggccctcgtccaggcgcgcggccaccgcatcgagaccgttcccgagatgcccctggttatctccgactcggcagagtccatcgagaagacctcccaggcgctcaagatcctcaagcaggtcggcgcctacgccgacgccgagaaggccaaggactccgtcggcatccgccccggcaagggtaagatgcgcaaccgccggtacatcaaccgcaagggcccgctcgtcgtctacggcacagagggctccaaggtcgtcaaggccttccgcaacctccccggcggtgacgtcgccaacgtcgagcg

SEQ ID NO: 10144 - DNA, 397 bp, Zea mays
  Clone ID: LIB3150-050-Q1-N1-A6
ctccctccctccttccttccttccccgccactgcgcagcgcgagtgcggcgacagccagtcacacactcccactccctcgaccgctctcggccctcggccccgtccgcgtcgccgcagggcgaggaggcaatggcggcgggcgggaatggcgccggcggggacaccagggcggccttcgcgcggatctacaagacgctcaaggaggagctgctcaccgacccggccttcgagttcaccgaggagtcacgccagtggatcgaccgcgtaacgatccctctctatctctctctctcgctgtcgctgccgtccttccttcctttttctgttcctgtttcctggcttgatccttgtggcgtgcgccgtgcggtgcgggggctccctgtgccgttcgtcacc

SEQ ID NO: 10145 - DNA, 353 bp, Zea mays
  Clone ID: LIB3150-050-Q1-N1-A7
cttttattgcaacaccatgaactcccatggtgctggttcgcattcacggcttttggacctaactatccccctgttgaaggggctggtgagggggcttcacgtttcaacagtatccctgtctctcatagagagggttcaagcagcatgcctgtacagcacattcaggcttcgagtagtacaccaccggctactggtgagcctcgcattggtatgcgtagttgccccatcgatgtggaaaccatccatgatgatgccggtatgtattcttcaagaccactgtctcgagcaagacagcagttgaccacgacagaaagtattactatcataatagatgatgattccgaaacaaacct

SEQ ID NO: 10146 - DNA, 336 bp, Zea mays
  Clone ID: LIB3150-050-Q1-N1-A8
ccttctcctcccccatcctctcccttgtgggtctagatccactcctccccgtgctcactgctcatccgcgaacaggttgagcggggacgccgtggaggggcgagggggagccagattgagccatggcctcctcctgggttcttgccctggttcttgcgctgtcggcaggcgcaagcctggcgcgtggctccgagccgtggtggaacgagacgcaggtgtacgccaccaccgccaactccggtggcggcaacggcgtcttcgtcggcctcacgctcatccagtcggcggcggccaaaggagcggtgtgcttggatggaagcttaccaggttaccacc

SEQ ID NO: 10147 - DNA, 385 bp, Zea mays
  unsure at all n locations
  Clone ID: LIB3150-050-Q1-N1-A9
gttctgttcctccccactcactcctgcgcttcctcgccgcgcggttccttctccctgatcctcctttggcttcgcggttcatggcgatgtggagggccgccgctaggcagctggtcgaccgggcgctcggctcaagggccgcgcacacgtctacaggcagcaaaaagatagtcggggtgttctacaaggccggggagtatgccgacaagaaccccaacttcgtcggctgcgtcgagggtgcactcggcatccgcggctggctcgagtcgcanggccatcaatacattgtcaccgatgacaaggaaagccccaactgtgaactggagaagcacattgaagacatgcatgtcctgattaccaccccattccacccagcttatgtcac

SEQ ID NO: 10148 - DNA, 404 bp, Zea mays
  Clone ID: LIB3150-050-Q1-N1-B10
cacctatcgtcccgcctacgcactgccgcgcaacgatctacgagctgccatggctaactcggcaccgggaggaatgaggtcgttcctgcaggccgtgtctacggtcaccgaggaggcgccgacgccactccgcgtcgtccagatggagggcctggctgtactgaagatcatcaagcactgtgaggagtttgcgccagctttagttacaggtcaattgcttggtttggatgttggtagtgttctggaagtgaccaactgttttccgttccctatcacggaagaggatgatgaagcagatgcagatggtgccaattatcagcttgagatgatgaggtgtttgagggaagttaatgttgacaacaatactattggatggtatcagacttgcttgcttggatcttttc

SEQ ID NO: 10149 - DNA, 402 bp, Zea mays
  Clone ID: LIB3150-050-Q1-N1-B11
gcgaggcaaaagcattgcgaccacagacagcgcgcgcttcaaggcctttttttttgagataacaaggaggagaggaggagatggcggtcacgatcacgtgggtgaaggcgaggcagatcttcgacagccgcggcaaccccaccgtcgaggtggacgtgggccttagcgacggcagctacgcgaggggggccgtacccagcggcgcatccactggaatatatgaggccttggagttgagggatggaggatctgattatcttggcaagggtgttcttaaggctgtcagcaatgtaaataacattattggaccagcaattgttggaaaggaccccactgagcaggttgagattgacaacttcatggtccaacagcttgatggaacctccaatgagtggggctggt

SEQ ID NO: 10150 - DNA, 407 bp, Zea mays
  Clone ID: LIB3150-050-Q1-N1-B12
ctccctttccccttccctccctccctctcgccgcgggccgccagaggcaatttcgccctcgattcgaccccgattcgtccgcccgcgaccgggattccctccgccaagcgcggatctgaacgctgcgctccgtgtcgtcgctcgaatccgccatgaagggggccaaatccaagggcgccgccaaggccgatgccaagctggcggtgaagagcaagggggcggagaagcccgccaagggcaggaaggggaaggccggcaaggaccccaacaagcctaagagggctcccagcgctttcttcgtgttcatggaggaatttcgcaaggagttcaaggagaagaaccctaagaacaagtctgtcgctgcggtgggaaaagctgctggcgacaggtggaaatccctgagcgag

SEQ ID NO: 10151 - DNA, 338 bp, Zea mays
  Clone ID: LIB3150-050-Q1-N1-B3
agatgagctgaggcagatatgtgtacagtttggagaacttatatatgtgaaaattcctgttggtaaaggatgtggttttgtacagtatgcatctagggcatcagctgaagaggcagtacaacgtcttcatggcacaatgattggccaacaagctgttcggctttcatggggccgaagtcctgcgagtaaacaggattcatcagctgtgtggagtcagcaagcagatccaaatcagtgggcaaacgcttactatggctatgggtatgatgcatatggatatgctcaggatccgtcatacgcttatggtgcttatgcaggatatagccaatatccccaac

SEQ ID NO: 10152 - DNA, 401 bp, Zea mays
  Clone ID: LIB3150-050-Q1-N1-B7
tctgcgtacacggtctccctcttcctgtcagtagtagagtgagagtgaggcagcgagtgggagacaaggggaaatggggaagggagcgcaagggagcgatgcggcggcggcgggcggcgaggtggaggagaacatggcggcgtggctggttgccaagaacaccctcaagatcatgcccttcaagctcccgcccgtcggcccttatgatgtccgcgtgcgcatgaaggcagtggggatttgcggcagcgatgtgcactacctaagggagatgcgcatcgcgcacttcgtggtgaaagagccgatggtgatcgggcacgagtgcgcgggcgtggtcgaagaggtgggcgccggcgtgacgcacctgtccgtgggcgaccgcgtggcgcttgaaccgggcgtca

SEQ ID NO: 10153 - DNA, 392 bp, Zea mays
  Clone ID: LIB3150-050-Q1-N1-B9
gcggcgtggcggtcggcgtggcgctgcacgccgtgacgcacctcacgtgcgacttcccgcgtctgctgcacgccagcgccgccgcgtacgagcccatgaaggcgtacttcggccagcgccggatccccaactactggtggttcctcaggggcgtggaggggatcaccggcgtcatcatggtcgtgctcatggccgtcgcctacacgctggcgcacccgtggttccgccgggggaagctcagcgagggcaacccgctgcgccggctcagcggcttcaacatgttctggtactcgcaccacctcttcgtcattgtctacgtcgccttcatcgtccacggcgtctgcctctacatcaacaggacgtggtacaagcagacgacatggatgtacctc

SEQ ID NO: 10154 - DNA, 326 bp, Zea mays
  Clone ID: LIB3150-050-Q1-N1-C1
tatatatgtgaaaggtcccgaaaaaaaggatgtggttttgtacagtatgcatctaggacatcagctgaataggcagtacaacgtcttcatggcacaatgattggccaacaagctgttcagctttcatggggcctaagtcctgcgagtaaacaggattcatcatctgtgtggagtcagcaagcatatccaaatcagtgcgcaaactcttactatggctatgggtatgatgcatattgatatgctcaggatccttcatacacttatggtgcttatgcatgatatacccaatatccccaacagtttaagttaacttattacgccacttc

SEQ ID NO: 10155 - DNA, 398 bp, Zea mays
  unsure at all n locations
  Clone ID: LIB3150-050-Q1-N1-C10
atgcaccagaaatcctggctgtaattggcaaagtacctcacctctccgagtttctcaactccctgtacaactgccagtataagtcgttcttcgttgcattttctggtctgacagagcaaatcaagttagaccgttatcttcagcctcatttccgctactacatgagggaagtgcgcaccgtggtatactcacagttcttagagtcatacaagagtgtgacaatggaagcaatggccactgcgttcggtgtaactgttgatttcattgaccaggaactgtcacggttcattgcagctgggaagctgcactgcaagattgataaggttgctggtgttctggagactaaccgacctgatgagaggaatgctttctaccangcgaccatcaagcaaggggac

SEQ ID NO: 10156 - DNA, 322 bp, Zea mays
  Clone ID: LIB3150-050-Q1-N1-C11
gcgttccacactccgctgctccgccatggcgaaccgctccaaggtctggatcgcgctgctgctcgcgctgaccgaagctctctccgcccggacggaagatgaacccgccaccgcggcagaaggcgaggccgtgctaaccttggacgtaaacaggttaaactaggacgctaccacacacagcttaatagtagctgagttcaacaccacatcgtgtggccactgcaagaaacttgctacatagtatgagactgcggtcaaggcacttatcacgcatgaccgaacgatagctctggctaaggtcgatgctaacgagaagaagaac

SEQ ID NO: 10157 - DNA, 400 bp, Zea mays
  Clone ID: LIB3150-050-Q1-N1-C12
gtccattccccctccatcattcctccccgctttctccaccatcagggcgaaaattttatgcgagctttggaaagcgcgagctagtttatccggccgggcgtggtcaccgaggcagtagcggcgagagaggggaggatctgatcgatgtcgtcgggcgaggacgggtactgcagctcggattcgccgcgggcggaatcccccgaccagccgcaggcagctgcggcggcggacgcggacgcggacgcggagtcgcctcgcgccggagccgggccgaacaagcgcgacctccacgcctcgtcgccggcagctaagcgcagccggagatcggtggagaagcgggttgtgtcggtgccgctggccgagtgcggggaggggccgccgccgtctgactcgtgggcgt

SEQ ID NO: 10158 - DNA, 407 bp, Zea mays
  Clone ID: LIB3150-050-Q1-N1-C6
gagacagcgggggacggtgaagtggttcaacgacaccaagggcttcgggttcatctcccccgaggacggcagcgaagatctcttcgtgcaccagtcgtcgatcaagtcggagggcttccgctcgctcgcggagggcgaggaggtggagttttccgtctcggagggtgacgacggccgcactaaggccgtcgacgtgaccggccccgacggatccttcgtcaggggcggcggaggcggaggaggaggcggcggcggctaccgctcccgcggcggtggcggatctggcggcggcggtcgcagctacggtggtagctggggcggcggccggagatccggcggcgggggcggtcccggcgcgtgctacaagtgcggcgagcccggccacatggcaagggactgccctagcg

SEQ ID NO: 10159 - DNA, 323 bp, Zea mays
  Clone ID: LIB3150-050-Q1-N1-C7
ctttttctcagctgatgactgagactgaggcaaaagctgagaaacagggggaagtgccgaacgaaacccaatgcatcagatacgtgcggtcgccgaccacaaactccgaggacaacattgcctcttgcttggttgcatcaacacctctatcatcttccccttcacgctccccactatcaacccttatgatatcatcatgcacatgagggcacatgctatttctctaacccttgctcactacctaaggtatatatgcatcgagcactatgaccagaagtatcctatttttatcccacacgagtacacatacacaagccaatacc

SEQ ID NO: 10160 - DNA, 334 bp, Zea mays
  Clone ID: LIB3150-050-Q1-N1-C8
atctcggcttgtatctctcatcggcacacgcgagctcgcgccctgcttgcacgtagaggtccgagtcctgctttgatggcgaccgacgtgactgagactccagcgccgttggtggatgcagccccagaggcgcccagcgacgccccgacggcgcctgctgcagacgcgaagccggccaaggccaagaaggccaccgcgccgaataagcgcgccaggccgacctacacgacatacgccgagatggtctcggaggcgatcacgtcgctcaaggagaggacggcgtccatcagatacgcgaatgccaagttcgtggaggacaagcacaaggccaagc

SEQ ID NO: 10161 - DNA, 401 bp, Zea mays
  Clone ID: LIB3150-050-Q1-N1-C9
gttgagttggtgaaggactttcaaatgggtgtctccaacaaaactccagagttcctcaagatgaaccctattgggaagattcctgtcctggagactcctgatggtcctgtttttgagagcaatgcaattgcaagatatgttactcgcttgaaggctgataacccactttatggatcttcactgattgattatgcccatattgagcaatggattgactttgctgcaacagagattgatgcaaacattggaaagtggttgtacccacggatggggttttatccccatgctggtgtggtagaagaatcaactattgctgccttgaagagagcattgggttctctgagcacccatcttgcatcaaacacattccttgttgggcattcagtgactctcgcggatat

SEQ ID NO: 10162 - DNA, 332 bp, Zea mays
  Clone ID: LIB3150-050-Q1-N1-D1
ccgagcctgcgcctcataagccgtcaaagctcccccgcttcataccattccctcccccgatccctcgcctcagccctcaactccgcccctcgttttccgaagcgccaccgccgacgtggcctccctcggctccaatggcgttgccctacctgcaggccgtgctttgctttatgattttcatgtacatatttgatacatatcttgacatccgtcagcatatatccctcaagctgccaactttgccaaaacccctgctgggaataattattgacgaaaagtttgaacgctctagagcttatagcctcgacaaaagctatttccattttgttcat

SEQ ID NO: 10163 - DNA, 402 bp, Zea mays
  Clone ID: LIB3150-050-Q1-N1-D10
tggtcgtcgtctcccgttcggaacgccaagccccccctccggcgaaatggcccccaagcgaggtggcagggcgccggtgccggccaagaagaagacggataaagtgacgaaccctctattcgagaagaggccgaagcagttcggcatcggcggcgcgttgccgcccaagaaggacctgcaccggttcgtcaagtggcccaaggtcgtgcgtatccagcggcagcgccgcatcctcaagcagcgcctcaaggtaccaccggcgctcaaccagttcacccgcaccctcgacaagaacctcgctacgaacctttttaagatgcttctcaagtaccggcctgaagacaaggctgccaagaaggagaggcttctgaagaaggcccaagctgagaatgaaggaaaaac

SEQ ID NO: 10164 - DNA, 267 bp, Zea mays
  Clone ID: LIB3150-050-Q1-N1-D11
gcctttcccagcagctattgtggtcgtgcgtcagccgcgtggcaccgtatcgcattctacgattcgaagctctctgtgctcgcagccatggcgaagaattacccaaccgtgagcgcccagtacagcgaggccgtagagaaggccaggcgcaagctccgtgccctcattgacgaaaagagctgtgcgcccctcatgcttcgacttgagtggcactccgcggggacgttcgacgtgtcgtcgaggatcggcggtcccttcggtcctatg

SEQ ID NO: 10165 - DNA, 404 bp, Zea mays
  unsure at all n locations
  Clone ID: LIB3150-050-Q1-N1-D12
cggactcgtgggtgcacttacgcaccctgaccttgacaaggagactgaggagttcattgcagatgtgcttggggtcgaggtgtttaggcagactattgctggaaatatccttgtggggagttactgcgccttctctaacaggggtggtttggttcatccccatacatccgttgaagaccttgacgagctctccacgctcctccaagttcctcttgtcgcaagaactgtgaacagaggaagcgaggtcattgctgcaggcatgacagtgaacgactggactgccttttgtggctcggacacgacagccaccgagctctcagtcatcgaaagcgtcttcaagctgaaagaaaggcagcccactgcgattgtggaggacatgangaagtctctgatagacagttacg

SEQ ID NO: 10166 - DNA, 404 bp, Zea mays
  Clone ID: LIB3150-050-Q1-N1-D2
gaacgcgtcggtgctgtggacggagagcaaggacgtgggcaagggcttccgctgcatccgcatggtcaacaacacccgcctcaacttcgacgccttccacggcgacaaggaccacggcggcgtgcacgacggcaccggcgtcgtgctctgggagtggtgcaagggcgagaaccagagctggaagatcctgccgtggggtcccgaggccaactccgacgcggcccacgcgggaggcccgcacgccgtgcgcgtcttctgcaaggccggcggcgaggactacagcctcacggtgcgcaacggcacggcgtgcctggcgcccaccaacccgcgggacgagtaccagcactgggtcaaggacatgcgccacagcacccgggtgcgggacgaggagggctacccggcct

SEQ ID NO: 10167 - DNA, 407 bp, Zea mays
  Clone ID: LIB3150-050-Q1-N1-D5
caccaccatatcgacatcgacgccagcgagccaaggacagaacagccggcgcccggccctaaaactgccgtgcagcgtgagagaagcgagggaaagatggaccggtaccagagagtggagaagcagagggaggaggcacccatcaaggaaaacgagatccgcattaccacgcaggggaggatgcgcaactacatcacctacgccaccggcttgcttcaggacaaaggttctgatgaggttgtattcaaggccatggggagggctatcaataagactgtcatggttgtggaattgatcaagaggaggattgttggcctccatcagaataccaccactggatctactgatattactgatgtgggagccattggaagaaggcctacttccgcttgagacaacaagacatg

SEQ ID NO: 10168 - DNA, 110 bp, Zea mays
  Clone ID: LIB3150-050-Q1-N1-D6
tcgcgctttcgcagccgcgattactcacgcggggcaaccttagggcaccccagttttcattatagatgtgctttttatcgctgggcataagcagactaatagtctgaata

SEQ ID NO: 10169 - DNA, 402 bp, Zea mays
  Clone ID: LIB3150-050-Q1-N1-D7
gaggattccgaggaggagaggcggagggaggaggagaggacgcggcggcgggctgagcggattgcggccatggccgcacgcgctattgctgagcgcgaagatgctgctgcgaggctcgagggggagaaggcggggcttgagaagctgctcgccgagcgtgagaaggagcaggctcatgaggcttcagagttgcagactagtatgattgaaacattggaagcagtggacatagagaaacagagacatcacagcactagaatggaagcccttgcacgtttggctagacttgaggttacaaacggtgagcttgcaaagtcacttgccagggaacaatggaatctggaagttcaagtagatcaagtggcgcagcttcgagaggaagttgaattgaagaaacttact

SEQ ID NO: 10170 - DNA, 290 bp, Zea mays
  Clone ID: LIB3150-050-Q1-N1-D8
gccgtcgacaacgctgtgtaccgtgcgagagcccaagcaccagcgcggtggccgatgcagaggcggaggctaccatggctgacggaaagaacacgaggatctccaacggaaagaagggtggcaagaaaaagaccgagcaccctatctctaagaaggattggaatgacatcaaggcactgtaggtgttcaatgtgcgcaacatcaggacgactcatcgatgcactacacaaggaaccaggattgattatgagggtgtgaatcacagagactttgacgattgactagctgat

SEQ ID NO: 10171 - DNA, 397 bp, Zea mays
  Clone ID: LIB3150-050-Q1-N1-D9
gtgttcattgcgggaaaatggtggcgggggcagcacttgcagaaagaccaaggaccataagcttctatagcttcctttcttaccgcatacctgtgaccagcggtgtctgcagtatgtgaaaacccaattcttacaaccctacgggatccaacaggcaatcgcatgcacgcatcttacctttatcacccttggtactacaacaaccgctagccctattacagcaggtacctttggtgcatttgttggcacaaaacataaaggcacaacaactacaacaacttgtgctaggaaaccttgctgcctactatcagcaacagcagtttcttccattcaaccaactggctgcattgaactctgctgcttatttgcaacaacaactaccatgcagtgagctagc

SEQ ID NO: 10172 - DNA, 349 bp, Zea mays
  unsure at all n locations
  Clone ID: LIB3150-050-Q1-N1-E11
cagacaagcaaggaatcccccgatggctcatcgcgttctcctactcctctctctcgcgtcggccgccgcggttgccgccgccgtcgacgcggaggacccgctgatccggcaggtggttcccggtggagatgacaacgatctggagctgaacgcggagtcccactttctgagcttcgtgcagcggttcggcaagtnctacaaggacgccgacgagcacgcgtaccggctgtccgttttcaaggccaacctgcgccgcgcgcgccggcaccagctgctggacccgtcggcggagcacggcgtcactaagttctccgacctcacgccggcagagttccgccggacctacctc

SEQ ID NO: 10173 - DNA, 405 bp, Zea mays
  Clone ID: LIB3150-050-Q1-N1-E12
gtccagtcggcccgcccctacggccagcgtgctgtcctcaagttcgcgcagtacactggcgcccatgccatcgctgggaggcacacccctggtaccttcaccaatcagctccagacctctttcagcgagcctcgcctgctcatccttactgacccaaggactgaccatcagccaatcaaggagtctgctctggggaacatcccgaccattgccttctgcgacactgactctcccatgcggtatgtcgatatcggcatcccagccaacaacaaggggaggaacagcattggatgcctgttctggcttttggccaggatggttctgcagatgaggggcactatcctccctgggcacaagtgggaagtcatggttgatctgttcttctacagagacccagaggaagca

SEQ ID NO: 10174 - DNA, 403 bp, Zea mays
  Clone ID: LIB3150-050-Q1-N1-E5
gggacgctatggcagcaagccctccagatgtaatctgctgttgtgaggtgcttgagagggcactgaagctcctgcaggaggatggcgcaagcaatcttgcacctgaactgctttcacagattgatgaaactttggaggagattacacctcgttgtgtattggagcttcttgctcttcctactgatgaaaaacataaaaataaacgccaagaaggtctgcaaggtgcaaaaaacatattgtggagtgttggcaggggtggtattgctactgttggaggaggattttctcgtgaggccttcatgaatgaggctttcttgcagatgacatcagctgagcagatggatttcttctctaaaacaccgaatagcataccacctgaatggtttgagatctatagtgtcgc

SEQ ID NO: 10175 - DNA, 373 bp, Zea mays
  Clone ID: LIB3150-050-Q1-N1-E6
gcgtgacgagcgtgaggaggcgggtgtcgtactgaatcgaaaaggcgtaaactcagtctctcgagtttcctcggaccggaagccatggctgccaatgaagcgaaaggcttgctcgccgcgaaaactacagcagccaaatccgaccacaaggacaaggtgaataaggtcccaatctcacgctcctacggcgcccgactacagttacctgttcggcgtatccaccgtcagctgaaacaacagactcatgcaaatgctcgcgttcgagctacctgaaccgtctactgagctcccattctctaatacttgactgccgacgttctggaacttgctgcgaacgctagtaaggatctgaaagtgaagcgtatcactcctc

SEQ ID NO: 10176 - DNA, 384 bp, Zea mays
  Clone ID: LIB3150-050-Q1-N1-E7
cgcggctgcggcggcgagggaacacatcctttctcgcatcatggccacctctacggagccggagggcgcgccgcccgcggctaaggggcctaaaggagaggccaacacgaaggggagcaacgaacatggagaggtcggcgcaggcagcggcggcggctcgcagaagcggaagaggaaggaggtcttcatctacggcaactacaggaactactatggctaccggattgatcgcaatgttggtgaagatcctcgccttgaggcgttcaagaaacagtggtttgaaaagaaggattgtctcgatattggatgcaaccagggtttggtaacgattggcttagccatgaaatttaaatgtcaaagcattcttggcgttgatattgattc

SEQ ID NO: 10177 - DNA, 341 bp, Zea mays
  Clone ID: LIB3150-050-Q1-N1-E8
attttactgtacaaggagaaaatactggacaaatcacctcgcatctaccagtgtgctctcaagggaaacaaacattcggtccacacccagaaatataaaatgttcatcaaagacaaaagatagattctgcagaagaacaaaaaagagaaacatgtgctagcagagggacccctgcgccactctacttttcagttctcctgcttcatttatcttcattgctgtctgttattattggacttgttgggcctgcgccaatgacccatacaagtttgttctttctcggcaagccttcatcagaatcgcttcaagcgtgccaaatcattgatcacttcgctggggcc

SEQ ID NO: 10178 - DNA, 386 bp, Zea mays
  Clone ID: LIB3150-050-Q1-N1-E9
acggacttatccaaactagaagcatttatcaagaggtgctggaacatattacctcaataaaccaacagaaaataatgcaagtgcaatacaagataccagatcatgtccacatatctacggaatgccagcaacttattgcccgtatctttgttgccaatccaatgaggagaatcacaatgaaggaaataaagagccatccatggtttttgaagaacctaccacgggaactcacggagactgcacaaggcatgtactacaggagggataacacggtcccttcttattcagaccaaacgtctgaagaaatcatgaagatagttcaagatgcaaggaccatgccgaaatcatccaaatcaagctatgggtggagcaatgagtattcggat

SEQ ID NO: 10179 - DNA, 406 bp, Zea mays
  Clone ID: LIB3150-050-Q1-N1-F10
tgcctggaatgctccccactagtgtaattgaaattctagcagctcgtgagaagcaaaccttcgcatcagattctgaggaagaaaatgtaaagcagaaggttcagaaaaggaagaagaggatgaaaactgccgggcccgaaactattctgctgaaagatgtccggtcgacacagcacgtgaagaacgcccttgatttcttggagcaaaggaaaaaacaggttccgagatcaaatgcagttttgaagaatgccagtaaggctttgcgtctcctgtcgtcaagaggtaattttctaagttaggcgtgtggtaagatagcgcagttttctgaatttgtgtttagaccaccatcccagcagagcagacgtggtcaagagaatctggacggtgtgtttgaatggaatcgatc

SEQ ID NO: 10180 - DNA, 401 bp, Zea mays
  Clone ID: LIB3150-050-Q1-N1-F11
gcagctcaacaccctcgaggtacctccattcgcagtcggccgtgtcctcggagccgcgggagatggcggatcaggagaccgtagctgtggttgaggcacctaccccggttcttggggaaccgatggacctgatgactgccctgcagctcgtcatgaagaagtcaggtgctcatgatggccttgtgaagggtcttcgtgaggctgccaaagccatcgagaagcatgccgctcagctctgcgtgcttgccgaggactgcgaccagcctgattatgtcaagctggtgaaggctctctgcgctgagcacaatgtccacctggttactgtgcctagcgccaaaactcttggagagtgggctgggctttgcaagatcgactctgagggcaaggcgaggaaggttgta

SEQ ID NO: 10181 - DNA, 392 bp, Zea mays
  Clone ID: LIB3150-050-Q1-N1-F12
cttcgtactcgcctacctccgcggctcaaacctttcccccttctcccaattcccgccgccgctccatcccgtaacgcgacaccatgagggagtgcatttcgatccacatcggccaggccggtatccaggtcggaaacgcgtgctgggagctgtactgccttgagcatggcattcaggctgacggtcagatgcccggtgacaagaccattgggggaggtgatgatgctttcaacaccttcttcagtgagactggtgctgggaagcacgtgccccgtgctgtttttgttgaccttgaacccactgtcatcgatgaggtgagaactggcacctaccgccagctcttccaccctgagcagctcatcagtgggaaggaggatgcagccaacaacttt

SEQ ID NO: 10182 - DNA, 406 bp, Zea mays
  Clone ID: LIB3150-050-Q1-N1-F4
cgttcgttcacttcctctctctcgcctcccgtttgccccgcgtgcgctctgtgtcgctccctctcttgtgaggagtgaggacgactggggcgaccgccgccgccgccgccgccctacgccagatgcccaggtaggggccattcgctagctcttcttcgtgcccttcgccggcgacgagcattcaccagttgctgatgcaaggctttcaaaagtttaacagtctcacttgatgcaaaagcaacacaatcactctaaaggtttggatcagtcatttcagagcatgggttcgcggtttccatcccatcagctaagcaatggcttgtatgtctctggccgacctgagcaacctaaagagaaggccccagtcatttgctcctcggctatgccgtacactggcggggacata

SEQ ID NO: 10183 - DNA, 353 bp, Zea mays
  unsure at all n locations
  Clone ID: LIB3150-050-Q1-N1-F6
agctcggatcgactcatacctnggcgaaaatgagagagatcttgcacatccagggagggcaatgtggcaaccagatcggtgccaagttctggtaggtcgtgtgtgacgaacactgcattgacactacatgtcggtacactggcacttctgaccttcagttggagcgcgtcaatgtctactacaatgaggcctcctgtggccgctttgtgccccgtgctgttctcatgtacctagagcctgagacatttgtacagttaccacactggacactttgtgcctatctctagccctgacaattttgtatattggcattctctttctaggaacaactgtgcaaaagagcattatactga

SEQ ID NO: 10184 - DNA, 292 bp, Zea mays
  Clone ID: LIB3150-050-Q1-N1-F7
ggtggagcacgtaaaggtggacgacaggtgggagcacagcatctacaaactgatggtgagctcggagctggcattctgtgcacacaagataggttgggacgctggaccgccagtgcgagcgccttgccagtgtcatggccaataacatggcgaccagtgacatcagtgtgatcactaacgcggatgggaggaagagcatgctgaagctggccaagaggatgatgatgagcttctgaagcggagtgactgcatgtgcgacgcaccaaacgactacactgaccagcacaggctc

SEQ ID NO: 10185 - DNA, 404 bp, Zea mays
  Clone ID: LIB3150-050-Q1-N1-F8
gccgtctcgcttcgccccttcctctctccgtcggttctcctccagatctctaagaccaggagcccggtgaatccacctcgcccgcagcgatgtcggcgagcagcacccccgtagacgcctcgggggagccgatcccgacttcgtcggtgctgatggcggcgtcgaagcacatcgcggtccggtgccgcccggagaacgttgccttcctcaactgcaagaagaaggaccctaaccccgagaagtgcctcgagaagggccgccaggtcacacgctgcgtcctcagcctgttgaaagaacttcaccaaaagtgtcccaaggaaatggatgaatatgctggttgcatgtattactacaccaacgaattcgacttctgccgtaaggagcagcaagcttttgaggaagcc

SEQ ID NO: 10186 - DNA, 400 bp, Zea mays
  Clone ID: LIB3150-050-Q1-N1-F9
cagacgcgccagggtttcaggcttccacgaatctccccgccgccctcaattcccctcggcgccgccgcctcctcccctcgcttcggtcctcggttagttaaccatccaggttctgtcaagatgtctgatagccatgagactgacaggaacattgagatttggaaaattaagaaactgatcaaggcattggaatcagccagaggcaatggcacaagcatgatctctctgatcatgcctccacgtgatcaggttgctcgagtggctaagatgttaggtgatgaatatggtactgcttcgaacatcaagagtagagttaatcgtcaatctgtgttggctgccatcacctcaactcagcagaagttgaagctctacaacaaagtgcctcctaacggattggttc

SEQ ID NO: 10187 - DNA, 389 bp, Zea mays
  Clone ID: LIB3150-050-Q1-N1-G10
atcttcttgtcccgctaggattatatccgagccttcccgcaaaacctcagagcggagacgagcgcacgatgttcggtttcgggcaccacggtcaccacggccagaacccgtcggtgcacggacgagtgcaccaacccaccttataagatcttctgcaaggccgacgaggggtactgtcttaccgtgcgggacggaaacgtggtgctggcccccgacaccctgtcgacgagcaccagcactgttacaaggacatgcactttaacactcacgtcaaggacgaggagggcaaccctgcattcgctctggtcatcaaggccactgggctcgacatcaatcactacctcggcctagaccacccggggaatgtggtgccgatcaatccggaatac

SEQ ID NO: 10188 - DNA, 399 bp, Zea mays
  Clone ID: LIB3150-050-Q1-N1-G11
gggatttgtttcctctaccttcatctacatatgctccaatccccctcaatccacccctaaccgaacaagccttaagtggtacattaatcctgatgttcctgaagcaggtgccctcatggctagtgcgacgaaagcacatagtcccattaagtggaacgaagttctatcttcgaatcagcctatgtctcatgttcctgaggaacagaaaatcgcttatatcagagatctgcacccatttgagaataaggatagggaattcttggtgacagtcactgtaaaaagattggtgataggtggtggtacaatgcatgcaaaaaatgcacccgcacagctgtggctcatggggattcctacaagtgcagcgatcaagtttgcgctaacattggcacgcctagccag

SEQ ID NO: 10189 - DNA, 380 bp, Zea mays
  Clone ID: LIB3150-050-Q1-N1-G12
gcaaattgcaccaagaaatccatcgagaggccgtcgacaggggaattaatggcgtcgtcgtctagcagcagccaccgccgcctcatcctcgcagccgccgtcctgctctccgtgctcgcggctgccagcgccagcgccgggacctcctgcgtgccggggtgggccatcccgcacaacccgctcccgagctgccgctggtacgtgaccagccggacctgcggcatcgggccgcgcctcccgtggccggagctgaagaggagatgctgccgggagctggcggacatcccggcgtactgccggtgcacggcgctgagcatcctcatggacggcgcgatcccgccgggcccggacgcgcagctggagggccgcctagaggacct

SEQ ID NO: 10190 - DNA, 152 bp, Zea mays
  Clone ID: LIB3150-050-Q1-N1-G2
aacttacccaccaagggagaaagaggccaaaaggaagggaagagtgtcgaattgctttcaattgtcgtttcaagaaggcccgttcttttatttcgccttttgaaaaacttaatcgaaccgtcttccgttcccggaattggttccgccttaag

SEQ ID NO: 10191 - DNA, 401 bp, Zea mays
  Clone ID: LIB3150-050-Q1-N1-G4
cgctcgcggggagtcgagtcgagaccagcttcgttccttcataaaaagctcacttagttgttgtccccgcctctttttttcgctgttcttgtttgattacatcatcttattttgtgcttgaatctaacctgccattaagtttttatcgcttcgttatttctctgttgtgcttgtcttgttcttttgttgctctaaccatggacgcaggctcccgctcgatctcctcggcgaagaaccgcgccgccgccgtcgccgccgcgccccggccaccgctgcaggaggcgggctcccgcccctacatgccatcgctgagctcgggaccccgcaacccgtcggccaagtgctacggcgacaggttcatcccggacaggtcggcgatggacatggacttggcgcactac

SEQ ID NO: 10192 - DNA, 381 bp, Zea mays
  Clone ID: LIB3150-050-Q1-N1-G8
cccggctctccccacccaccatatatcctagtatccgcgcctcaaatccctcgcgaaacgccccgccgttagcagttgttgtctgccgtgatttgagccgggcggacggattgatcccgggacgaggtgtctcagcttttgatcttgatcctgatcctgggaggcgttcctggtttattggtgggagcgaagaagccatgataccttccgtgaggctctctcctggtcctgcagccttctcaggctccagcctacgctcaaaattaccgtcaattccatccatctccagtctcaaaccctccaaatatgtggtctcctcgctgaaaccactctacctagcaccgctagatggtccgcgcactggcgagcttaagtctcgga

SEQ ID NO: 10193 - DNA, 378 bp, Zea mays
  Clone ID: LIB3150-050-Q1-N1-H10
ctggagatcaaggcggaatgcaccatccccaaagacgaccgcagcttggcgacgttcgtggggttccgcgtgcagcatgataacgcccgcgggccgatgaaaggcggcattcgctatcacaatgaggttgatccacatgaagtaaatgcccttgctcaactcatgacatggaagacagatgatgcagcaatgccatatggtggagcaaaaggagggatcgggtgctctcctggtgaactaaatagaagtgagttggagcggttgacacgagtatttacccagaaaattcatgatcttatcggaacgcatacagatgtacgtgctcctgacatggggaccaatgcacaaaccatggcatggatgctggatgagtactcg

SEQ ID NO: 10194 - DNA, 143 bp, Zea mays
  Clone ID: LIB3150-050-Q1-N1-H11
cggcatgggctggaagggcctgtgcaagggcggagcgaagcgccaccggaaggtgctccgcgacaacatacagtggatcacgatgccggcgatacgactgctggcgcgcagggtctgtgtgaatcgcatcgtacagctcatct

SEQ ID NO: 10195 - DNA, 270 bp, Zea mays
  unsure at all n locations
  Clone ID: LIB3150-050-Q1-N1-H12
ccacgcaggaccacgccgccgccgccatngngcgcgactcggccgccgtgttcgcctggaagggggagacccttgaggagtactggtggtgcaccgagcgctgcctcgactggggcgaggccggcggccccgacctcatcggcgacgaccgcggcgacgccacgctgctcatccacggaggtgtcagggcccgagaggactacgagaagaccggcaagatccccgatccggagtccaccgacaacgctgagttcaagatcgtgctcacca

SEQ ID NO: 10196 - DNA, 407 bp, Zea mays
  unsure at all n locations
  Clone ID: LIB3150-050-Q1-N1-H3
tctttaaaagcgaaccaacccgtccgacaaacttgagtttgctaaaaagctagcatctgttgctgacctttatgtcaatgatgcttttggcacggcacaaagagctcatgcttcaaccgaaggagttcccaagtatttgaagcctgctgttgccggcttcctcatgcagaaagaacttgactaccttgttggagctgttgccaacccanagaagccatntgccgctattgttggtggatccaaggtctcaagtaaagattggtgtcattgagtccttgctggcgaaggtcgatatcctcatccttggtggtggtatgatctacacattttacaaggcacaaggatattctgttggaaaatctctcgtggaagaggataaacttgagctcgcaacttctcttattgag

SEQ ID NO: 10197 - DNA, 377 bp, Zea mays
  unsure at all n locations
  Clone ID: LIB3150-050-Q1-N1-H4
gcacgacgcacgcagagccgcagagatccgtcacactgcaagttttgaaaactgaactgtaagatggcatcagcagagctttcccgtgaggaaaatgtgtacatggcgaagctcgccgagcaggcagagaggtacgaggaaatggttgagttcatggagaaggtagcgaaaactgttgactcggaggagctcactgtggaggagcgcaacctcctgtctgttgcatacaagaacgtcattggagcccgccgtgcctcatggcgcatcatctcctccatcgagcagaaagaggagggtcgaggcaatgaggaccgtgtaacactcatcaaggactaccgtggcangattgaaactgagctcaccaaaatctgtgatgg

SEQ ID NO: 10198 - DNA, 375 bp, Zea mays
  Clone ID: LIB3150-050-Q1-N1-H5
caggggttctcttccctcccgccggagatcgccgaggaactgttcagggcggagctagctgacactgacagcgaggtgtgctcgagcccgctcagcgcggagctgaggaaggtccggacgacggccactgtcaacttcgacaactccctgagccccgcgcacacgctggttcagatcgtctgcgctgaccagaaggggctcatttacgatatcttgaggacgatgaaggactgcaacatccagatattttacggccggttcagatcagacaagaaagggtcagccagcaaaagttcatcaagttgccgtgagggggatcttttcgtgaagcaagtaaacgggaagaaagtgactgatcctgcgaaacaagacgcg

SEQ ID NO: 10199 - DNA, 389 bp, Zea mays
  unsure at all n locations
  Clone ID: LIB3150-050-Q1-N1-H6
accaacgccgcgtccctgcatcttctgactcatgcaaggaactgccatcgctatcgaccgggtcctcgagcgcgggagatggcggatcaggagaccccagttgcagttgaggcccctaccccggtccttggggagccgatggacctgatgactgctctgcagcttgtcatgaagaagtcgggtgctcatgatggccttgttaagggtcttcgtgaggctgccaaagccattgagaagcatgctgctcagctntgcgtgcttgcggaagactgtgaccagcctgattatgtcaagctggtgaaagctctttgctctgagcacaacgttcacctggttactgtgcctagcgctaaaactcttggcgaatggtctgggctttgcaagattga

SEQ ID NO: 10200 - DNA, 317 bp, Zea mays
  Clone ID: LIB3150-050-Q1-N1-H8
cgcaatcaactacctaagctatccacaagcacccatgtaagtgcacgcagagaggggctgcgaccaaacaaatccaatccaatggctgatggcaccggtgcgcatcatgcgtcaggatctgtccccagacgctcagcagggtcaaccgtcgggcccagttccgctgctggtaccggtacaagctacgctgcatcgattgcggcgaatgaagcaaactggacaccgcccatgctcacatgctctgcatatgccaactacataaatgccctggtaccggaccaagatgacgctccaatgatgcacttcgtgagggtgat

SEQ ID NO: 10201 - DNA, 406 bp, Zea mays
  Clone ID: LIB3150-050-Q1-N1-H9
ctcgtctgctcgcatttcctcccaatccagcccgcctccaaacccgaactccaagtcgccccgcatcgatggcgcccaaggccgagaagaagcccgcggcgaagaagccggcggaggaggagcccgctgccgagaaggcgccggccgggaagaagcccaaggcggagaagcgtgtcccagcaggcaagtccgccggcaaggagggcggcgagggaaagaggggccggaagaagggcaagaagagcgtggagacctacaagatctacatcttcaaggtgctgaagcaggtgcacccggacatcggcatctcctctaaggccatgtccatcatgaactccttcatcaacgacatcttcgagaagctcgccgccgaggccgccaagctcgcgcggtacaacaagaagcc

SEQ ID NO: 10202 - DNA, 340 bp, Zea mays
  Clone ID: LIB3150-051-Q1-N1-A10
cgcaacaccaggcgctccagcagaacagcactcggagctcgcctgcccgacggcccaccatgatcatccccaagaagaaccgcaatgagatctgcaagtacctcttcaaggagggcgtgctgtatgccaagaaggactacaacctgtcgaagcacccacagattgatgtgcccaacctccaggtgatcaagctcatgcagagcttcaagtccaaggagtatgtcagagagaccttctcctggcagtactactactggtacctcaccaacgatggcattgagcacctacgcaactacctgaacctcccgtctgagattgtgcctgccacgctcaagaagtc

SEQ ID NO: 10203 - DNA, 356 bp, Zea mays
  Clone ID: LIB3150-051-Q1-N1-A11
gcctctctacctctacctaccggagcagggagcacgccgcacgagccctttccgccgccgccaaaatggtgaacgttcctaagaccaagaagacctactgcaagaacaaggagtgcaagaagcacactctccacaaggttactcagtacaagaagggtaaggatagcctgtctgcccagggaaagcgccgttatgaccgcaagcagtcaggatatggtggccagaccaagcctgtcttccacaagaaggccaagaccaccaagaaaatcgtgttgaagctgcagtgccagagctgcaagcactactcacagcacgcaattaagaggtgcaagcattttgagattggtggagacaag

SEQ ID NO: 10204 - DNA, 222 bp, Zea mays
  Clone ID: LIB3150-051-Q1-N1-A12
cggagctcaactgccggtgccggcgcgcgacaggcggcacacacgcccctcggctcctcgcgtatggcgaccacgttgacgcccacgcagcgctatgcggcggggacgctcctggcgctggcgctccgccaggcgcagatccaccagtccgagcccctcggctccggccccgacgacgaggagcgcgccagcagcgccagcgggagctccttcttcaccata

SEQ ID NO: 10205 - DNA, 75 bp, Zea mays
  Clone ID: LIB3150-051-Q1-N1-A3
aaagtggaccaacgcttctgaacgcttacaaccggcggttgcggctgccagcgaccgccgccggttcatctaccg

SEQ ID NO: 10206 - DNA, 252 bp, Zea mays
  Clone ID: LIB3150-051-Q1-N1-A5
cttaaaatccaaccaacccttccggaaaattttggaaggaagccattttaatttcctggtcatccatgtacacctgaacatctacaggtccttgtcaaagcagttccaattaaacaaggcacacttgaaaattatttcaatcatccaaaccgtgtacaaaaggcttgagcataccattatgtctaagaaagatttttactactaaatgatgcttattgagcggaagatgaatattatcttgggatactaaat

SEQ ID NO: 10207 - DNA, 364 bp, Zea mays
  Clone ID: LIB3150-051-Q1-N1-A6
cccggcgcccgctactacggcggcaacgacgtcatcgacgagatcgagaacctctgccggtcacgcgcgctcgctgccttccaccttgacgccgcgtcctgtggcgtcaacgtgcagccctactcgggctcccccgccaacttcgccgcctacaccgcgctgctcaacccgcacgaccggatcatggggctcgaccttccctccggcggacacctcactcacgggtactacacggccggcggtaagaagatctccgccacctcgatctactttgagagcctgccgtacaaggtgagcgccgcaacggggtacatcgactacgagaagctcgaggagaatgcacttgacttccgccccaagctca

SEQ ID NO: 10208 - DNA, 365 bp, Zea mays
  Clone ID: LIB3150-051-Q1-N1-A7
acgacttggagcaaggggaggtaaaagttcgtttggcgtgcgccatgtttaagaagttctcttcagaagatatatctggacagaatcaagttaaggcttctgtacaacgaaagattcggcaaagtatcgctgatgagtaccccagccttgaacctttgctagatgacttgctcccaaaaaagtcacctatgattgttgttaaatgccaaaatcatcttaatcttgtagtggtgaataatgttcctctatttttcaatatacgtgatggtccttacatgccaaccctgcgtcttcttcatcagtatcctgatatcatgaaaaagttccaagtggatagaagtgctatcaaaattgttctatctggc

SEQ ID NO: 10209 - DNA, 313 bp, Zea mays
  Clone ID: LIB3150-051-Q1-N1-A8
tgactggcgaggcaaaagcattgcgaccacagacagcgcgcgcttcaaggccctttttttttgagataacaaggaggagaggaggagatggcggtcacgatcacgtgggtgaaggcgaggcagatcttcgacagccgcggcaaccccaccgtcgaggtggacgtgggccttagcgacggcagctacgcgaggggggccgtacccagcggcgcatccactggaatatatgaggccttggagttgagggatggaggatctgattatcttggccaagggtgttcttaaggctgtcagcaatgtaaataacattatt

SEQ ID NO: 10210 - DNA, 345 bp, Zea mays
  Clone ID: LIB3150-051-Q1-N1-A9
ggaagaggagggcaggatgtcgcaccgtaagttcgagcacccgaggcacggctccctcggcttccttcccaggaagcgctcctcccgtcaccgcggcaaggtgaagtcattccctagggatgaccccaagaagccttgccatctcactgccttccttggctacaaggctggcatgactcacattgtccgtgaggttgagaagccaggatccaaactccataagaaggaaacttgtgaggctgttaccatcattgaaacccctcctcttgtcattgttgggctcgtggcatatgtgaagactcctcgtggcctccgcacactcaactctgtttgggcccaacatct

SEQ ID NO: 10211 - DNA, 383 bp, Zea mays
  Clone ID: LIB3150-051-Q1-N1-B10
ctcgtccacccgtcgtcctcctagctcctctactcgccagtcgccatgggcaagattaagatcggaatcaacggcttcggaaggatcggcaggctcgtggccagggtcgccctccagagcgaggatgtcgagctcgtcgccgtcaacgaccccttcatcaccacggactacatgacctacatgttcaagtacgacaccgtccacggccactggaagcacagcgacatcacactcaaggactccaagacccttctcttcggtgacaagccggtcaccgtctttggcatcaggaaccctgaggaaatcccgtggggtgaggctggcgctgagtatgtcgtggagtccaccggcgtcttcactgacaaggacaaggctgctgcaca

SEQ ID NO: 10212 - DNA, 88 bp, Zea mays
  Clone ID: LIB3150-051-Q1-N1-B2
gtccccgcggacctcactcgcatgggcctctccgagatcgtcaacagcctcctcgcagccgcccgaggccgggaccaccaagtcgcca

SEQ ID NO: 10213 - DNA, 228 bp, Zea mays
  Clone ID: LIB3150-051-Q1-N1-B3
gggggagtacaagggaataggggcagttggacatgcgcggaaacgaggataaggactggccccacttcgttgaggcgttggagccatactccgtcaccgccttcttcaccggtagctgtaactccatcgccatagtgaactacggcgcgttgtctacatggggatggacccaacgctggaggctcgggcacccgccggataccaagacggagagctccccgggccccg

SEQ ID NO: 10214 - DNA, 363 bp, Zea mays
  Clone ID: LIB3150-051-Q1-N1-B4
caaccaaactccactgtctccaactctccatcgcgtctgctacgcctctcctgcaggacgaccaatggcttccaggaagttcttcgtgggtggcaactggaaatgcaacggtactggcgaggacgtgaagaagatcgtcaccgtgctcaaccaagccgaggtgccctctgaagacgtcgtcgaggtggtggtgagtccgcctttcgtttttctgcagcaggtcaaggggctgctgcggctggacttcccgtcgcagcgcataactgctgggtgcgcaagggcggcgccttcaccggcgagatcagtgctgagatgctggtaaaccctgaggtgcccctgggtcattttgggacattctgagcg

SEQ ID NO: 10215 - DNA, 387 bp, Zea mays
  Clone ID: LIB3150-051-Q1-N1-B5
atgagctacaattcctgtacatcagcaattcacagcggccttcgcatcctacgtagctctaaaacaggatgaaaatggatcaggccttccatatcaagcgattttgtccgggctcagcacaataaaccttgtgggaggcgcgagacacctctgaagacgtcaaacaatagtcgacaacgtcaccgtggtgatacatcagttgtgctaaactgagagctgttcatgttggtctgtgtgctgtatgattcagctgggttgcttttagtgctttggcttgaggacgtgtctgctatcaaacccccaaagccaccggtacgctgccgaggttctttcagcacacctggtggagctacattttgcagatcaatttctgtttggttagatagc

SEQ ID NO: 10216 - DNA, 323 bp, Zea mays
  unsure at all n locations
  Clone ID: LIB3150-051-Q1-N1-B6
gggttttgctgctctccgaccccgagctccgaaggccgcagcatcaggcgcggcccccctcgcgtgtgaccgagatggcgctgccgaatcaggggaccgttgattaccccagcttcaagctcgtcatcgtcggcgatggtggaactggtaaaactacatttgtgaagaggcatctcactggagagtttgagaagaaatatgaaccaaccattggtgtgaagttcatccgttggatttcaccactaactgtggtaagatcaggttctactgctgggataccgcanggcaagagaagtttggtggcctcagggatggatactata

SEQ ID NO: 10217 - DNA, 396 bp, Zea mays
  unsure at all n locations
  Clone ID: LIB3150-051-Q1-N1-B7
agcgttcccccttctcccatccttctctgagttctaaccaccgncggcgctaccccctttcgacaacaccatgagggagtgcatctcgatccacatcggccaggccggtatccaggtcggaaacgcgtgctgggagctgtactgcctcgagcatggcattcaggctgatggtcagatgcccggtgacaagaccattgggggaggtgatgatgctttcaacaccttcttcagtgagactggcgctgggaagcacgtcccccgtgctgtttttgttgaccttgagcccactgtcatcgatgaggtgaggactggcacctatcgccagctcttccatcctgagcagctcatcagtggcaaggaggatgcagccaacaaccttcgctcgtggtcactaca

SEQ ID NO: 10218 - DNA, 373 bp, Zea mays
  unsure at all n locations
  Clone ID: LIB3150-051-Q1-N1-B8
caggagtggaagagaccttgtcaacatggcaaagaagaggaccaatgtgatccccattattgaggatgccaggcatccggcaaggtaccggatgttggttggcatggttgatgttatcttctctgatgttgcacagccagaccaggctaggatcttagcacttaatgcttcatacttcttgaagaacggtggccactttgtcatttcaatcaaggctaactgcatcgactccaccctgcctgctgaggccgtgtttgcagcggaagtggagaagctcaaggcggatcagttcaagcccgcggagcangtgacgttggagccctacgagcgtgaccatgcatgtgttgtggtgggtacagggtgcccaagaagc

SEQ ID NO: 10219 - DNA, 369 bp, Zea mays
  Clone ID: LIB3150-051-Q1-N1-B9
tctgacggcactatttgttggccatccaattcgaacggtttctggttgtctgaattggtttgaacaaaattgcagaggttggtagagcgagcgagaagaaggcaatggcggcggagagcttcctgttcacctcggagtccgtgaacgaggggcacccagacaagctgtgcgaccaggtgtcggacgcggtgctggacgcctgcctggcgcaggaccccgacagcaaggtggcctgcgagacctgcaccaagacgaacatggtgatggtgttcggcgagatcaccaccaaggcgagcgtggactacgagaagatcgtgcgcgacacctggcgcgagatcgggttcacctccgaacacgtggggctcgacg

SEQ ID NO: 10220 - DNA, 383 bp, Zea mays
  unsure at all n locations
  Clone ID: LIB3150-051-Q1-N1-C10
agcccccaaaccccaatcaccctccggagcgtcgcagcgatcccacccctccttctccccttcacccatccatggcggagcgcggcggcgagcgtggcggcgagcgcggcgggtttggtcgtggcttcgggcgtggcgggcgcggcgaccgtggcgggcgccgaggcggccgtcgcggcccgcgtcaggaggaagagaagtgggtccccgttacgaagctcggccgcctcgtcaaggagaacaggatcaccaagatcgaggagatctacctccactcgctccccgtcaaggagcaccagatcgtcgagaccctcgtgccggggctcaaggacgaggtgatgaagatcacgcncgttcagaagcagacccgcgccggacagcgc

SEQ ID NO: 10221 - DNA, 324 bp, Zea mays
  Clone ID: LIB3150-051-Q1-N1-C11
ctcaagatggtggaggaagttcgtcggcagttcaacaacatccctgggctcatggaaggcaccacaaagcctgactacgcaacttgtgtcaagatctcaacggatgcatccatcaaggagatgatccccccaggtgctcttgttatgctcacaccactgatcgttgggattctatttggggttgagaccctctctggagtccttgctggtgcccttgtctctggtgttcagattgccatttctgcatccaacactggtggtgcctgggacaacgccaagaagtacattgaggctggagtttcagagcatgccatgacccttggc

SEQ ID NO: 10222 - DNA, 370 bp, Zea mays
  Clone ID: LIB3150-051-Q1-N1-C12
ccccgctccgcctccactcctcgcgccgctgccgcatctcctctacaggtaagaaggagagaaagagggcgaaatggtgaagcacaacaacgtcatccccaacgggcacttcaagaagcactggcagaactatgtcaagacatggttcaaccagcccgcccgcaagcagaggcgccgcatcgcacgtcaaaagaaggctgtgaagatattcccacgaccaactgctggccctcttcgtcccattgttcaatgccagactctcaagtacaacatgaagtcaagggctgggagaggctttacccttgaggagttgaaggctgcgggcattccaaaaaggcttgctccaaccattggcatttctgtggatcac

SEQ ID NO: 10223 - DNA, 364 bp, Zea mays
  Clone ID: LIB3150-051-Q1-N1-C5
gccgacccaaatggcatccacctcgccggaacccgccgccgccgacgaaactatcgacaccatccacatccgtcgcctagagtgttccgaccacgagaggggcttcgtcgcccttctctcccagctctccccctgcccggacctcaccacatccgtgtttgccacgcgcttcgccgagctcgcggcgcatggcgacgaccacatcatcctcgtggccgaggacccctccgcctcggaccggcggatcctcgcgacagggtgcctcttcgtggagcgtaagttcctgcgaggctgcggcaaggtggggcacgtggaaggacgtggtggtcgatgccgccgcgccgcgcatgggtctcgggctccg

SEQ ID NO: 10224 - DNA, 339 bp, Zea mays
  Clone ID: LIB3150-051-Q1-N1-C7
ctagccttctacccttcatccacccggcgagcttcgagcactcatgtgccgagcctgctgaggctcatgagagatgtcacgcttctgtcgatccggcccgtcttctacgatccgctacacgtactgactactcgtgctctacatgacgttgcgtacatctgctgatgacctcttgcctctcttatacacgtacagatagattgtcgacatctacataccaagggaccgccggactggtgactcgcgcggattcgcgttcgtgaggtacaagtacaaagacgaggcacataacgcagttgtaaggctcagatggagattggtagacgggagggagatcat

SEQ ID NO: 10225 - DNA, 390 bp, Zea mays
  Clone ID: LIB3150-051-Q1-N1-C8
gttgcagaagatgtggaaagtgaagcattgggcactttgattattaacaagcttcgtgcaggcatcaaggtctgtgctgtcaaagctcctggttttggggaaaacaggaaggcaaacttacaggaccttgcaatccttactggaggagaggtaataactgaagaactaggaatgaaccttgagaattttgagcctcacatgctgggtacatgcaaaaaggtgaccgtctctaaggatgacactgttattcttgatggagccggagacaagaagtccattgaagagagggcagagcagattagatcagcaattgagaatagcacttcagattatgataaggaaaagctccaggagcggttggcaaaactcttttgaggggttgctgtctga

SEQ ID NO: 10226 - DNA, 393 bp, Zea mays
  Clone ID: LIB3150-051-Q1-N1-C9
ctcccaaggtcccttttttttctcgatctggaagcgccgcagtagcagccatggacgtgagcggagcaggcgggaaggcgaagaagggcgcggccgggcgcaaggccggcgggccgacgaagaagtcggtgtcgcggtcctccagggccgggctgcagttccccgtcagccgcgtcgggcggtacctcaaaaagggccggtacgcgcagcgtgtaggcacgggtgcccccgtctacctcgccgccgtcctggagtacctcgcggccgaggtgctcgagctcgccggcaacgcggcaagggacaacaagaagacgcgcatcatcccgcgccacgtgctcctcgccatccgcaacgacgaggagctcggcaagctgctgggccgcgtcaccatcg

SEQ ID NO: 10227 - DNA, 358 bp, Zea mays
  Clone ID: LIB3150-051-Q1-N1-D12
caaagtctcagccaccccagtatactcctccggatccgtgttccatcacggctacaaaaatactccgcctgcatctccaaagcacacggctccctctggtttcccgcctcctcttcacctccttcgcgtcccgacgctccctcatggccgccgctgccgcagcagcagcagcagtttcctccccgattgctccacgcgctgtggccgccgcggcctcccgccgggggttcgtcacgtttggtggaggcgccgcccgctcctcgcccacgctgcggtccggccgcgggttctctggtgtgcaaacccatgttgccgctgttgaacaagcagttgtaaaagatgctacgaagctggaagc

SEQ ID NO: 10228 - DNA, 400 bp, Zea mays
  Clone ID: LIB3150-051-Q1-N1-D2
cgttgttccttccgcagctccgagctccggaatcgagcaaagcacccgagcctgcgccgcgtcaagccgtcaaagctcccccgcttcataccattccctcccccgatccctcgcctcagccctcagctccgcccctcggtttccgaagcgccaccgccgacgtggcctccctcggctccaatggcgttgccctacctggaggccgtgctttgctttatgattttcatgtacatatttgagacatatcttgacatccgtcagcatagagccctcaagctgccaactttgccaaaacccctgctgggagtaattagtgacgaaaagtttgaacgctctagagcttatagcctcgacaaaagctatttccattttgttcatgaggctgtgactattttaatgg

SEQ ID NO: 10229 - DNA, 338 bp, Zea mays
  Clone ID: LIB3150-051-Q1-N1-D3
tttgcgtaaggtaaacttaaccaagcagaatccgtccaaccaaccgcattgccggaggacaaggagtacgcgcccgtgccgttcggccaggcggcggccgaggcggcatcccctgactccaaggaccctgccaagtcgccgccggaaccaatctcgcccggaacgtccactcgcaaggcattctttgctgttcttcaaagctgggtgtcaagaaaaattatgaactggatgtgtagttcttttgccaattgctgtcacattcttcatcaacttggggtttatccaatttgttgatggtttttcagcccactctatgcaaaacctgggtttgacatatt

SEQ ID NO: 10230 - DNA, 311 bp, Zea mays
  Clone ID: LIB3150-051-Q1-N1-D5
gtcgaagcgaggtaggggaggttcggctgggaacaagttccgcatgtcactgggtctaccggtggcggccacggtgaactgcgcggacaacacgggcgccaagaacctctacatcatctccgtcaagggcatcaagggccgcctcaaccgcctcccgtccgcctgtgtcggcgacatggtcatggccaccgtaaagaagggaaagcccgacctcaggaagaaagtgatgcccgccgtcatcgtccgccagcgcaagccgtggcgtcgcaaggacggtgtctacatgtacttcgaagataatgctggagtga

SEQ ID NO: 10231 - DNA, 361 bp, Zea mays
  Clone ID: LIB3150-051-Q1-N1-D6
cgcaggccgcatccgcgccggggtcagggcgggcttcgctcgccagctccgctgcctgctccatcgatctcgtcaacagcttccgcatcggcggcagcggagacgggggcggggacctccgcttcctgtgcgagaacctcggcctctccggccccgacgacttcgccatcccgctggccgactgggaggcacacaaggccgctcgatcatccgcctccgcttcagctcccccaaccccgcacgccccaactacgactcccctcaccgccctcagcgggactcaccgctctctcaggtgggtgccgaggagcccgcccaggcttcggacgccgagacggagctaccggccgcaaccggaaag

SEQ ID NO: 10232 - DNA, 402 bp, Zea mays
  Clone ID: LIB3150-051-Q1-N1-D7
ccagtgtccacgcacgtacgctccacagaagagagatggcgatgcggatggcggcggcggcggcagtggcgctggtggcggtgatgggcgtgctggcgccccgagcggcggcgcagacgccgaactgcgcggagaagctgatcccgtgctcgccgtacatgaacacgacggggacgccgccggatacctgctgcggcccgctcaaggacgccgtccagaacgacctcaagtgcctctgcgacctctacgcctcgccggagatcttcaaggccttcaacatcagcctcgaccaggccctcggcctctccaagcgttgcggcctcagcgacaccaccgccgcctgcaagggcctttctcctacgcagtctcctccaggttcgccgccatcaggcggcagcagca

SEQ ID NO: 10233 - DNA, 325 bp, Zea mays
  Clone ID: LIB3150-051-Q1-N1-D8
cctccctgcttccttccttccccgccactgcgcagcgcgagtgcggcgacagccagtcacacactcccactccctcgaccgctctcggccctcggccccgtccgcgtcgccgcagggcgaggaggcaatggcggcgggcgggaatggcgccggcggggacaccagggcggccttcgcgcggatctacaagacgctcaaggaggagctgctcaccgacccggccttcgagttcaccgaggagtcacgccagtggatcgaccgcgtaacgatccctctctatctctctctgtcgctgtcgctgccggccttccttgccttttctgtt

SEQ ID NO: 10234 - DNA, 396 bp, Zea mays
  Clone ID: LIB3150-051-Q1-N1-D9
ctgtagctagctgatctccctccgaaactctctgctcgcccgctgcctgctggaagcttggcgcggtcccggcggcggcattctccggcaatggggtgcaaggcgtgcgacaagcccaagcccagctaccgcaagggcctgtggtcgccggaggaggaccagaagctccgcgactacatcctcctccacggccacggctgctggagcgcgctccccgccaaagccgggctccagcggaacggcaagagctgcaggctgcggtggatcaactacctccggccgggcctgaagcacggcaccttctccccggaggaggaggagacggtgatgagcctccacgccacgctcggcaacaagtggtccaggatcgccaaacacctgcctggcaggaccgac

SEQ ID NO: 10235 - DNA, 360 bp, Zea mays
  Clone ID: LIB3150-051-Q1-N1-E10
ccgtctctcaacacagcacaggcagttcgagagagagagagagagagagagagataaagatgtcgtggttcgggcaccaccaccacaaccagccggctcccccggcgtctggccccaaccaggtgttcaagatcttctgccgcgccaactagaactactgcctggccgtccgcgactgcgccgtcgtgctggccccggtcaaccccaaggacgaccaccagcactggtacaaggacatgcgcttcatcacccgggtcaaggacgaggaaggcatgccggcgttcgcgctcgtcaacaatgccacggggctcgccatcaagcactccctctgccagtcccacccggtcaagctcgcgcctt

SEQ ID NO: 10236 - DNA, 401 bp, Zea mays
  unsure at all n locations
  Clone ID: LIB3150-051-Q1-N1-E11
aatctagaagcgcccctctccctctctctctctctcttcgccgtccgaagctccgcaccccaatctaatcgacacctcgccgagatgggccgcaagttcttcgtcggtggcaactggaaatgcaatggaaccacagatcaggtcgagaagattgtcaaaaccctgaatgaaggacaggttcccccttcagatgttgtggaggtcgttgtcagccctccttatgtcttccttcctgtggtcaagagccagctgcgccaagagttccatgttgcggctcagaactgctgggttaagaaaggaggtgctttcaccggggaagtcagtgctgagatgctcgtcaacccttgtgttcccctngtcattcttggacactctgaaaagagagcctctgctggagaatc

SEQ ID NO: 10237 - DNA, 374 bp, Zea mays
  Clone ID: LIB3150-051-Q1-N1-E12
cgaaagagtagcagcagcaggcggcgccgagtagcggctccccacctcgagcttgccaccatggctagaggattgaagaagcatttgaagaggctcaatgcgcccaagcattggatgctggacaagcttggcggagcttttgctcccaagccatcttctggacctcacaagtctagggagtgcctgccactgatcctcatcatcaggaacaggctcaagtatgctcttacataccgtgaggtcatttccatcctgatgcaacgccatgtacttgttgatggcaaggtcaggacagacaagacctaccctgctgggttcaaggatgtcatttccatccccaagaccaatgagaactacaggctgctgtacgatac

SEQ ID NO: 10238 - DNA, 424 bp, Zea mays
  Clone ID: LIB3150-051-Q1-N1-E2
cttaaaagcgaaccaagccgtccgttctcccttaacctttctcctcccttccctggccttgctcctctctgtcccgaccgagcagcagccgcgagcggatgtcaagaatcactggcatgtcgtcatggcacgtcgcagccgcgagcgctccatgctccaggggaagcggcggcctgttcaggtcgccggtgcttgcacctcctacttcactgttcaagaactttggcacagccactatgagtaagggcttgatggggccgagttttgaggcatcaggacggtacagctacagcggcaagcagccgacgacacctctctccatcatcttctcctctccaagagaagcgctaggcatggatatcggccaccatggccgccatgagcaccacccaaaaggatatcacgccagcgacatcgccgatga

SEQ ID NO: 10239 - DNA, 426 bp, Zea mays
  Clone ID: LIB3150-051-Q1-N1-E3
cttaaaagccgaccaacccttccgcagtccgtagggccatccctagcttcatcccaattcttgttcgtgcagctgctggtggcagcctgagaccaggcgcgaggatgctggcggtgttcagcggcgaggtggtggaggtgccggcggagctggtggcggcggggagccggacgccgtcgcccaagacgaatgcgtccgagctcgtcgcgcgcttcctggggaccagctgccccgccgccgtgtccgtgcgcctcgccgacctcggccacctcgcctactcccacgccaaccaggccctcctccgcccaaggtcgttcgcggcgaatgacgaggtgttctgcctgttcgagggggtgctggacaacctggggcggctgagccagcagtacgggctgtccaaaggcgccaacgaggtgctcctggtca

SEQ ID NO: 10240 - DNA, 358 bp, Zea mays
  Clone ID: LIB3150-051-Q1-N1-E6
caccgccgccagcccgccagaaggtctcctcccgtctctagagtggctctttctctctccgtcaaatggctctcgcgtgcgcctctcacgcgtgccgctttctcctcgccggccaggcgagatctttccacgcccagccctaccatgccaaggtcggcgtggtggagttcctgaacggcgtcgggaaaggggtggaggcgcacgccgcgaagctggaggaggctgtgggcggcgacctccagaggctccttgaggcccgcacgctgcggctcaagaagctcggcatcccctgcaagcatagaaaatggattttgagttttgcacacaagtaccgtcttggtctctggaagcccaaagc

SEQ ID NO: 10241 - DNA, 396 bp, Zea mays
  Clone ID: LIB3150-051-Q1-N1-E7
caagctttggatgctggacaagcttggcggagcttttgctcccaagccatcttctggacctcacaagtctagggagtgcctgccactgatcctcatcatcaggaacaggctcaagtatgctcttacataccgtgaggtcatttccatcctgatgcaacgccatgtacttgttgatggcaaggtcaggacagacaagacctaccctgctgggttcatggatgtcatttccatccccaagaccaatgagaactacaggctgctgtacgataccaagggccgcttccgccttcacccaatcagggatgaggatgctaagttcaagctttgcaaggttaggtctgttcagtttgggcagaagggcatcccgtacctgaacacgtatgacggccgcaccat

SEQ ID NO: 10242 - DNA, 402 bp, Zea mays
  Clone ID: LIB3150-051-Q1-N1-E8
atttgctgcgtctccttgcccgcgccgccgctcgccgtttgcccctcgtctccgcaccgcgcgctgttgtccatccttgtgcagcaaaaatgacggctggctacattgttggctcactggtcggatcctttgccattgcatacctgtgtgacacatttatctctgacaagaaggcatttggaggtagcacccccaagactgtttctgagaaggagtggtggcaagccacagacaccaagttccaggcctggcctcgcactgctgggccaccggttgtcatgaaccccatcagccgccagaacttcatcgtcaagtccactgagtaggtttgggctggagaagctggttctgcgacttggtgccgccatgaagccagagttccttttctaaggtcttaatcaa

SEQ ID NO: 10243 - DNA, 405 bp, Zea mays
  Clone ID: LIB3150-051-Q1-N1-F10
taattttcctctcgatacccgaatcggtgaaggaaaacaagacgagtccgtcggtcgtgatcggtaccaatggaaggcgcagcggggatcaggacgaggccggcggtgtgcgtgaccggcgcgggcggcttcgtggcctcgtggctcgtcgagcgcctcctcgccggcggccgatacatggtccatggcaccgtccgtgatccgggcgacgccaagaacgcgcacctggcggcgatggacggcgccgcggaccggctgcgcctgttcagggccgaattgctcgactacggcagcgtggcggcggccatcgccggctgcgacggcgtcttccacgtcgcgtccccagtccccatgacctatccaatcggtgaccccgaggtagagctgctcgctcccgccgtgacg

SEQ ID NO: 10244 - DNA, 384 bp, Zea mays
  Clone ID: LIB3150-051-Q1-N1-F11
catcgatctcgtttcaaatccatccatcctcgtttcctccgtcccgcagcatctcaaccccatggccaagatcaagatcgggatcaatgggttcggcaggatcggaaggctggtggccagggtggccctgcagagtgacgatgtcgagctcgtcgccgtgaacgaccccttcatcagcaccgactacatgacctacatgttcaagtacgacactgtgcacggacagtggaagcaccatgaagtcaaggtgaaggactccaaaacccttctctttggtgagaaggaggttgctgtgtttggctgcaggaaccctgaggagatcccgtgggggtcggttggtgctgaaatatgttgtgagtctactggtgtttcactgaccaggag

SEQ ID NO: 10245 - DNA, 218 bp, Zea mays
  Clone ID: LIB3150-051-Q1-N1-F12
gaacgctgaaacgcagcagctgctgggtatcgtactgctcgaacgaataccctggcatgtatggatgaacgcatgatggcgcaccgtgcggatggtaagctgtctgaacccaacgccaggtgcgagctcaacctgagcaggtgatagcggtgtcacgatacggaacatgaactggctgcgtactgcctctgggctcgcgacttgtgtgggcttcatct

SEQ ID NO: 10246 - DNA, 110 bp, Zea mays
  Clone ID: LIB3150-051-Q1-N1-F5
gcgacgcgcttgcgcacgaagccgcccggccacggaacgctagaagcgcccgtcagttggcttcagttcgaagccgcgcccacttcgctagggttctagcccacacgcaa

SEQ ID NO: 10247 - DNA, 339 bp, Zea mays
  Clone ID: LIB3150-051-Q1-N1-F6
gcgtacactgtctccctcttcctgtcagtagtagagtgagagtgaggcagcgagtgggagacaaggggaaatggggaagggagcgcaagggagcgatgcggcggcggcgggcggcgaggtggaggagaacatggcggcgtggctggttgccaagaacaccctcaagatcatgcccttcaagctcccgcccgtcggcccttatgatgtccgcgtgcgcatgaaggcagtggggatttgcggcagcgatgtgcactacctaagggagatgcgcatcgcgcacttcgtggtgaaggagccgatggtgatcggtcacgagtgcgcggtcgtggtctaggaggt

SEQ ID NO: 10248 - DNA, 381 bp, Zea mays
  Clone ID: LIB3150-051-Q1-N1-F7
gattgaggagctgcctgccaatgttgctgaccttctgtgatcaatttcaagaaaaaacaaaacaaaaaagggtggtgaggaacctggtaaggcttggttttgtcgaaataccgtgggagagggggtgataaggacggtggggtttctatgttgaagtcgtggtcatggacaatttgtgattttttctcctttatgccatgttttggaatttttgtagctgcctaggccttgtggtaatgtgctgctgtgggggttcattagtatgaataggaagacgctgctggcgctgagtctttctctttattagtattttgtttaaaactatgtatgaccgaatggtggtatttatttgtgtcatccttgactcttattctgctgcat

SEQ ID NO: 10249 - DNA, 300 bp, Zea mays
  Clone ID: LIB3150-051-Q1-N1-F8
gcgctggggaaagcgaacagcttgattcacagttgtgaatgtccgagtgaggcgtgcttaatgggctcaatgaacctgagctggataatatagcacggaacattcatgagctggagaggggacgcatagatgaagggaactcgactcaagttagcgaccaatcagagctgaacgacaacttgtgatccgagctcttaggggaagactttggagacacggcaagacagccatgagttggaaggaagaactgaagacgagaatgacctcgctcaacaactggggtatctgagttgtaacagc

SEQ ID NO: 10250 - DNA, 404 bp, Zea mays
  Clone ID: LIB3150-051-Q1-N1-F9
cagattgatgcatatgttggcgatgaggcacagtccaagagaggtattctcacgctcaagtacccgattgagcacggtattgtgagcaactgggatgacatggagaaaatctggcatcatactttctacaacgagcttcgtgttgcaccagaggagcaccctgtgttgctcactgaggctcctttgaacccaaaggccaacagggagaagatgacccaaattatgtttgagactttcaatgttcctgccatgtatgttgcaatccaagcagttctatcactctatgctagtgggcgtactactggtattgttcttgactctggtgatggtgtgagccacactgtgcccatttacgaaggatatgcccttcctcatgccattcttcgtttggatcttgctggtcg

SEQ ID NO: 10251 - DNA, 405 bp, Zea mays
  Clone ID: LIB3150-051-Q1-N1-G10
tgcattctcaaacgagcagtgcctgaacccaagtgcagtgcagcagccatgggagcagcagcagcaggtggccacgcgctgcgcgccgtcggcgacgtcgtctcgttccccgcgaccgtcgccgccttcgtggaggcgctgctccagggctgggccgaggccagggccgggctgctggtgccgctgctccgcgccgcggtgctgctgtgcacggccatgtcgctgatcgtgctggccgagaaggtgttcctgggcgcggtcagctccgtggcgaagctgcggcgccggcggccggggcgggtgtacaggtgcgaccccgacgaggaggcggatgcggcctcctgggcctatcccatggtgctcgtccagatccccatgtacaacgagagggaggtttaccagcta

SEQ ID NO: 10252 - DNA, 320 bp, Zea mays
  Clone ID: LIB3150-051-Q1-N1-G11
ctaaacggctccatgctgtgagaccaccaacagtgtccatggctctggacgccccggtggagcgacgggacgaggtacagatcgcgatggggaacggaaacggcgtggcgccgtctcaaccgtcgcggccagccggtcggccaacggctgctgcggcggcagcgccatacgcggacaggcggctgcggctgaacccaaatgcggatcacaagccggaagactacagcgacgtgcgcggcgagtacgcgcccgccgtgtacagcgcactcgagcggcatctcccacccagcctcatcgatgcccgaaccggatgtcaagct

SEQ ID NO: 10253 - DNA, 330 bp, Zea mays
  unsure at all n locations
  Clone ID: LIB3150-051-Q1-N1-G12
gccggcttcctcatgcagaaggaacttgactaccttgttggagctgttgccaacccaaagaagccatttgccgctattgttggtggatccaaggtctcaagtaagattggtgtcattgagtccttgctggcgaaggtcgatatcctcatccttggtggtggtatgatctacacattttacaaggcacaaggatattctgttggaaaatctctcgtggaagaggataaacttgagctcgcaacttctcttattgagaaggcgaaggcaanagggggtttctcttttgcttcccactgatattgtagtagctgacaagtttgcagctgatgc

SEQ ID NO: 10254 - DNA, 383 bp, Zea mays
  Clone ID: LIB3150-051-Q1-N1-G4
gaacaagtccagtctgtccagaaatacattagaaaaaagagccaaagagaggaacaccggccggcgaggtggacgaagcggaccgccgaggaaatggcgtcgatgcagagctggcgcaaggcctacggcgccatcaaggacaccaccaccgttagcatcgccaatctcaactccgacttcaaggatctggatgtggcgatcgtgaaggcgactaaccacgtggagtgcccgcctaaggagcgacacctgcgcaggggttgcgtggacgtccatcaccaggcctcgggcagatgtcgcctactgcatccacgcccttgcccgccgtcttgccaagaccccgaaacctgatcgttgctctaaaaagccacttgtagtgatccata

SEQ ID NO: 10255 - DNA, 325 bp, Zea mays
  Clone ID: LIB3150-051-Q1-N1-G5
cccaaatccaccgccggctcggctcgcccatcttcgcgccaagcaccgaatctccgatggcccgcacgaagcagacggcgcgcaagtcgacgggcggcaaggcgccccgcaagcagctggccaccaaggcggcgcgcaagtcggcgccggcaaccggtggcgtgaagaagcctcaccgcttccgccccggcaccgtcgcgctccgggagattcgcaagtaccagaagagcacggagctgctcatccgcaagctgcccttccagcgcctcgtccgtgagatcgcgcaggatttcaagaccgacctccgcttcagtcctccgtgtcg

SEQ ID NO: 10256 - DNA, 368 bp, Zea mays
  Clone ID: LIB3150-051-Q1-N1-G6
ctcccgtgttccctcggatctttggccacgaggctggaggtatcatagagagtgttggagagggtgtgactgacgtagctccgggcgaccatgtccttcctgtgttcactggggagtgcaaggagtgtgcccactgcaagtcggcagagagcaacatgtgtgatctgctcaggatcaacaccgaccgcggtgtgatgattgccgatggcaagtcgcggttttcaatcaatgggaagcctatctaccactttgttgggacttccaccttcagcgagtacaccgtcatgcatgtggttgtgttgcaaagacaaccctcggctcccctgataagttgcgtcctagctgggattctaccgtctggtgcatca

SEQ ID NO: 10257 - DNA, 407 bp, Zea mays
  Clone ID: LIB3150-051-Q1-N1-G9
ctcttccaaatcccaccagcaaatccccagggcctccgagttcgagcgaccatgtcggggcgtggcaagggcgggaagggtctgggcaaaggcggcgccaagcgtcaccgcaaggttctccgcgacaacatccagggcatcacgaagccggcgatccggaggctggcgaggaggggcggcgtgaagcgcatctcggggctcatctacgaggagacccgcggcgtgctcaagatcttcctcgagaacgtcatccgcgacgccgtcacctacacggagcacgcccgccgcaagaccgtcaccgccatggacgtcgtctacgccctcaagcgccagggtcgcaccctctacggattcggcggctgagaggcgctaccgccgctggtggccgtggcaaaagtcttgggtcg

SEQ ID NO: 10258 - DNA, 343 bp, Zea mays
  Clone ID: LIB3150-051-Q1-N1-H10
ctcatccatatggttcaatgccattgttgccctcacacatgctgcgtctgctcctcctgaaggcctcaatggtgctcccatgacatatgaggtcttgatggctcagagatcccacatcatccagcagtccatcaggcaggctgctggagatatgcgcttgatgaacccagtagcccttgttgagaaccatccttcgtgcaggaaaaaccgtgagggccagaaagtgcttccgaatggccaaagctggaggcatcagatgctgcttttgtgctactcctcaaagatattatcagaagccaactcacttctgaagcttcaggatcctaatcctggaaaagctttt

SEQ ID NO: 10259 - DNA, 366 bp, Zea mays
  Clone ID: LIB3150-051-Q1-N1-H11
cgactctgtgcacggacagtggaagcaccatgaagtcaaggtgaaggactccaaaacccttctctttggtgagaaggaggttgctgtgtttggctgcaggaaccctgaggagatcccgtggggttcggttggtgctgaatatgttgttgagtctactggtgttttcactgaccaggagaaggctgcagctcacttgaagggtggtgccaagaaggttgtcatctctgctcctagcaaggatgcccccatgtttgtcgttggtgtcaacgagaaggagtacaagtctgacataaacattgtctccaatgctagctgcacaaccaacttgcttgctccttttgctaaagtcaataattgacaagttcg

SEQ ID NO: 10260 - DNA, 311 bp, Zea mays
  Clone ID: LIB3150-051-Q1-N1-H4
gcagctcttgagctttctctcgctcctgagtgcagtctctctctctgcgccctgcgctctgcgccgccgccatggaggacgacgatgactgccctcctctcgccgttgagctccctccgcgggtgccgtcccctccagagcaatctccctcagacgcctcgccagttggcgtcaccgtcatcaccggctacctcggggctggcaagtcgacgctagtcaactacattctgaatgagcaacatgggaaagagatttgccgtgatactaaaatgagtttggaagagaaaatttgggtcgaaaagggcgatgat

SEQ ID NO: 10261 - DNA, 236 bp, Zea mays
  Clone ID: LIB3150-051-Q1-N1-H5
cggacgcgtgggccgggcgaggcggctaaggccccctcaccgtccaccggcgactgggccggccgtcgctgccgccctgtctcttcaccgtcgccggcgacgagcaccaccaggtgtttttgagtctctggtgcgagtgttgtggccatgtccatggtcaataggatcttcgggaagcccaaagagcaagccaactccaatgctttggccactctggacaagttaaatgaagacac

SEQ ID NO: 10262 - DNA, 308 bp, Zea mays
  unsure at all n locations
  Clone ID: LIB3150-051-Q1-N1-H6
gcgcggcgttaatatctcccctcccttccctcttctggtctccgccccgctccttgcctccgatccccaattcctccttcggatctcgcattcagcgcagcgcangtgtgaaggaagggggacgcggaggaagatggggctcgcgttcgggaagctcttcagccggctcttcgccaagaaagagatgcggatcctcatggtcggcctcgacgccgccggtaaaaccaccatcctctacaagctcaagcctcgcgatgatcgtcaccaccatccccaccatcggtttcaatgtttgaaactgttgagta

SEQ ID NO: 10263 - DNA, 405 bp, Zea mays
  Clone ID: LIB3150-051-Q1-N1-H9
ctcattcatatggttcaatgccattgttgcgctcacacatgctgcgtctgctgctcctgaaggcctcaatggtgctcccatgacatatgaggtctcgatggctcagagatcccacatcatccagcagtccatcaggcatgctgctggagatatgcgcttgatgaacccagtagcccttgttgagaaccatccttcgtgcaggaaaaaccgtgagggccataaagtgcttccgaatggccaaagctggaggcatcagatgctgcttttgtgctactcctcaaagatattatcagaagccaactcacttctgaagcttcaggatcctaatcctggaaagctttttggcttccgtttccgctcaccacctcttcctttcttgttgtcctcactcttgcagtctagagc

SEQ ID NO: 10264 - DNA, 409 bp, Zea mays
  Clone ID: LIB3150-052-Q1-N1-A1
cataaatctaggaaccaaaaagcacagagataagtactttgatggaattgacaatttggattatccaggctgtttcgcaatgacagaactacatcatggatcgaatgtccaagccctacagactaccgctacatttgatcctgtcactgatgagttcattattaacactccaaatgatggagctattaagtggtggatcggcaatgctgcgcttcatggaaaatttgctactgtctttgcaaggttaattttaccccttcaaggaaaaggaggggaggctgctgatatgggcatccacgcgtttatcgtccccatacgggaccttgaaactcacgctgttcttcctggaatcgagatcaatgactgtgggcacaagatcggcctaaatggtgtagacaatggtgcgctg

SEQ ID NO: 10265 - DNA, 306 bp, Zea mays
  Clone ID: LIB3150-052-Q1-N1-A10
gtcttttctgctctcacccccttgcaggcagcgattgtacaccgatcgagcgggtgcgtgctgcatggaaactgccgacgtctcccacgcacaagccggccgccatatcatgctggcccgagacaagggctagtagagcctgcacacagctcaactagggcctagacaatcgctgttccacggcaggaagcgacacactggtgctcgtacacgcccagacgccgagcccatgctacgccgccatggacagagcaaggaacatgatgacctcaaacgtgctggcaagagactagaggcacgcctact

SEQ ID NO: 10266 - DNA, 414 bp, Zea mays
  Clone ID: LIB3150-052-Q1-N1-A11
ctcaaatattggtcggtttttccttaaagatggatgtatcatctggaccattttcattggtggctgaagaggactcagatgaattgagaaaagatggcgctgaagaaattttggaagatattactgaccttgtcaatgaaaccatctttgatgatggttcatataacatttcatttacaaaggaaggtatactctctgcaattgatgatgggaagtctgagggaggtccatctggacgacattgggtgcttgatccgattgacggtactaaaggtttcttgaggggcgaccaatatgccattgcattggctctgcttgatgaaagtaaagttgttttgggtgtattggcttgtccaaatcttgcattgtcatcaataaacaacatcaatggtaactcttcgggagataaagttg

SEQ ID NO: 10267 - DNA, 418 bp, Zea mays
  Clone ID: LIB3150-052-Q1-N1-A12
ttcgtttctcctgcaggacgaccaatggctgccaggaagttcttcgtgggtggcaactggaaatgcaacggtactggcgaggacgtgaagaagatcgtcaccgtgctcaaccaagccgaggtgccctctgaagacgtcgtcgaggtggtggtgagtccgcctttcgtttttctgcagcaggtcaaggggctgctgcggctggacttcgccgtcgcagcgcagaactgctgggtgcgcaagggcggcgccttcaccggcgagatcagtgctgagatgctggtaaacctgcaggtgccctgggtcattttgggacattctgagcgcagagctctgttgggtgaatccagtgattttgttgctgataaagttgcatatgcactcactcaaggtctcaaggtaattgcttgcattggtgaga

SEQ ID NO: 10268 - DNA, 421 bp, Zea mays
  Clone ID: LIB3150-052-Q1-N1-A2
ctcgcaaaccctatccccgaccccgattcccctctcgcctctcgatctctggcggcggcgccgtcgttttcccccatcggctcagcgactctcgagtcccgacctcgacgctaccggctcagcggctctggtgctccgtcctccactcctcctcctccttcatccattcctccggtgcaaggtccgtctctggtgtaccgcgccgtcctgttcggcggcctcagcaacgacgtcatctcggccggagccctggggatcacgaccgcacagctggtgcgcatcaacgacctccacagccggacggtgcaccaggagaacgccctgtcgaaccgactcgccaccctgcaggaagacatcgccaaccgcccgctcctgcccatcgtgcggcagcgcgagctcgccaccgcgacacgactgggag

SEQ ID NO: 10269 - DNA, 433 bp, Zea mays
  Clone ID: LIB3150-052-Q1-N1-A3
ttccacccttccgtaaccttgcttcctttatagtcaacccacccttccgaaattttatttttaaaaaaaaaaaaaaaaaggggggggttttttataaaaaaaagggagaataaaaaaataataaaaaagggttgacattaaaaaaaatttaaggcccggccccccaaagggtctccctcccccttttttccgcccatttcctttccgcttaccaagttttttaaattttgcctttttaaagctcttttcacttttctgtttcacttttccttccgttcacattttttcaacatcatatttccccacagcttactaaccgaaaccttcgggttttattccgtgggctccttgtgattatttctaattcccttacttccctttttctaattggcaaattttctgtcccaaaacctttaaaacctctttctttatt

SEQ ID NO: 10270 - DNA, 405 bp, Zea mays
  Clone ID: LIB3150-052-Q1-N1-A7
gtcgcatctgatatcaacttcataaatctttatccaagatggcgctgcaaaacattggtgcttcaaacagggatgatgccttctacaggtacaagatgcccagaatgattaccaagatagaaggccgtggtaatggtatcaagacaaatgttgtgaacatggttgacatagcaaaagcacttgccaggccagcttcctacacaaccaagtactttggatgtgagcttggtgcacagtccaaatttgatgagaagacagggatttccttggttaatggggctcatgatactgcaaagctggctggtctccttgaggtattcatcaagaagtatgtccaatgttatgggtgtgggaatcctgagactgagattctcatctcaaagacccagatgatatcattgaaat

SEQ ID NO: 10271 - DNA, 393 bp, Zea mays
  Clone ID: LIB3150-052-Q1-N1-A8
gggttttggcctcgccgcgcacgcctcctgaagcttctagacgttcgaggaggaggagaggctcccgccgccgccgcagccatggcgtccaccaaggtgcagcgtatcatgacccagcccatcaacctcatcttccgtttcctccagagcaaagcgcgcatccagatctggctcttcgagcagaaggacctccggattgagggtcgcatcatcggattcgatgagtacatgaacttggtcctcgaagatgctgaggaaatcaacgtcaagaaaaacactaggaagacactgggccggatactcctcaaaggtgacaacataactttgatgatgaacagtggcaagtgaaagttcttatggcaggaacgatgtttggtgctcgcgttgagtatt

SEQ ID NO: 10272 - DNA, 407 bp, Zea mays
  Clone ID: LIB3150-052-Q1-N1-A9
ctcttctctgttctcacccccttgcaagcaacaatcgttcaccgatcgatccagtgcgtcctgcatggaaactgccgccgtcgccgccgccggtgccgggcgccgcatcatggtggccgtggacgagggcgaggagagcctgcacgcgctcaactggtgcctcgccaacgtcgtctccccggcaggaggcgacacgctggtgctcgtccacgcccgccgcccgcgcccggtctacgccgccatggacagcgcagggtacatgatgacctcggacgtgctggcgagcgtcgagaggcacgccaacgcggtctcggcggcggcggtcgacaaggccaagcgcgtctgcgcggaccacccgcacgtcaaggtggagacgatggtggagagcggggacccgcgggacgtca

SEQ ID NO: 10273 - DNA, 109 bp, Zea mays
  Clone ID: LIB3150-052-Q1-N1-B1
aaggttggtttctttgggctaaggcggccctcctttgccatttatggcaccgggaagatccataccaggctcagcctcttttgctgacagcgataaatgatggacagct

SEQ ID NO: 10274 - DNA, 406 bp, Zea mays
  Clone ID: LIB3150-052-Q1-N1-B10
gatttccaccccgttcaacaaaccattctttgagttggaacaaatgttggtgacattgcggtgtgggaagttggttcacgggaaaggatagctcacaagactttcaaagtttgggatattggttcctgtaccttgcctttgcaggcttcgctgatgaaagatgctgcagtatctgtcaatagatgtctgtggagccctgatggaactattctaggtgttgctttctcgaagcatattgttcagacatatacttttgtacctaatggagatttacggcagcaagcagagattgacgcacacatcggtggggttaatgatatagccttctctcaccctaataaaactctatctatcatcacatgtggtgatgataaactcaatcaagtgtgggatgctcaaacaagac

SEQ ID NO: 10275 - DNA, 331 bp, Zea mays
  Clone ID: LIB3150-052-Q1-N1-B11
cgccttaatccccatgaagccccaagcgcgcacccatgttctggcctttccagccgccaagccttctagaagcttcaagagctcgattcgatcggaaccctcgccatggccgacgaggcgaaggcgaagggtaacgcggcgttctcggccggccgcttcgaggaggcggcgcggcacttcacggacgccatcgcgcttgccccagacaaccacgtcctctactccaaccggtcggaggcgctcgcctcgctccaccgatactccgatgctctcgccgacgcgcagaagaccgtcgagctcaagcccgactgggccaaaggctactcccgcc

SEQ ID NO: 10276 - DNA, 419 bp, Zea mays
  Clone ID: LIB3150-052-Q1-N1-B3
cggttatctccgccgccgcccgctttgggaaggcgcgacaaaggcaggcgagaggctccagccggacgaggaggaaagaggagcagcagggccggaggagagatgttcctgtgggactggttctacggggtgctggcctccctcggcctgtggcagaaggaggcgaagatcctcttcctcggcctcgacaacgccggcaagaccacgctgctccacatgctcaaggacgagcggttggtgcagcaccagccgacgcagcacccgacgtcggaggagctcagcatcggcaagatcaagttcaaggccttcgacctcggcggccaccagatcgcgcgccgcgtctggaaggattactacgcaaaggttgatgctgtagtatacctggtagatgcgtatgataaggagcgatttgctgaatc

SEQ ID NO: 10277 - DNA, 419 bp, Zea mays
  Clone ID: LIB3150-052-Q1-N1-B4
gcggttctgccgtctacgcctccaatttggcctctctcccttgcaagtttaagcttcaccttcaaccatgggtaaggagaagtcccacatcaacattgtggtcattggccacgtcgactctggcaagtcgaccaccaccggccacctgatctacaagcttggaggcattgacaagcgtgtaatagagaggtttgagaaggaggctgctgagatgaacaagcggtccttcaagtatgcttgggtgctcgacaagctcaaggctgagcgtgagaggggtatcaccattgatattgctctgtggaagtttgagaccaccaagtattactgcaccgtcattgatgcccctggacaccgtgacttcatcaagaacatgatcactggtacctcccaggctgactgtgctgtccttatcattgact

SEQ ID NO: 10278 - DNA, 431 bp, Zea mays
  unsure at all n locations
  Clone ID: LIB3150-052-Q1-N1-B5
accctggaaccctataaagtcaacccacccttccgttcgttttaaatccatccatcctggtttccgcgggcccgcagcatctcaaccccatggccaagatcaagatcgggatcaatgggttcggcaggatcggaaggctggtggccagggtggccctgcaaagtgacgatgtcaagctcgtcgccgtgaacgaccccttcatcagcaccgactacatgacctacatgttcaagtacgacactgtgcacggacagtggaagcaccatgaagtcaaggtgaaggactccaaaacccttctctttggtgagaaggaggttgctgtgtttggctgcaggaaccctgaggagatcccgtggggttcggttggtgctgaatatgtngttgagtctactggtgttttcactgaccaggagaaggctgcagctcacttg

SEQ ID NO: 10279 - DNA, 415 bp, Zea mays
  Clone ID: LIB3150-052-Q1-N1-B7
atttgctgctgcaacaagatggatgctactacacccaagtattcaaaggcccgttatgatgagattgtgaaggaagtctcttcctacctgaagaaggttggatacaaccctgataagatctacttcgttccaatctctggttttgaaggtgacaacatgattgagaggtccaccaaccttgactggtacaagggcccaaccctacttgaggctctggacttgatcaatgagccaaagaggccttcagacaagcccctgcgtctcccccttcaggatgtgtacaagattggtggtattggaactgtccctgttggacgtgttgagactggtgtcattaagcctggtatggttgttacttttgggcctactggtcttactactgaggttaagtccgttgagatgcaccatgaggctc

SEQ ID NO: 10280 - DNA, 420 bp, Zea mays
  Clone ID: LIB3150-052-Q1-N1-B8
ggacgcccaccagcacctgccctcctcgccggcgccgcctccctccgcgcgaccgatctaccctccgccaccaccatgtcgctgatcgccggggaggacttccagcatatcctgcgtttgctgaacaccaacgtggatgggaagcagaagatcatgttcgccatgacctcaatcaagggtgtcgggcgccgcttctccaacatcgtctgcaagaaggccgacatcgacatgaacaagagggccggcgagctgacgcctgatgagctggagcgcctgatgacggtcgtggccaaccctaggcagttcaaggtgccggactggttcctcaacaggaagaaggattacaaggacggcaggttctcgcaggtcgtctccaacgcccttgatatgaagctcagggacgaccttgagaggctcaag

SEQ ID NO: 10281 - DNA, 400 bp, Zea mays
  Clone ID: LIB3150-052-Q1-N1-B9
gtcaatcgttgggatcatgcaaagacttagaggttgaacctgcgagggattgctgatgaacagatcaagccaacggagatggcgactgctctgctacaaataactgacagatcctacaccaggacaaaagctctttgtgtatcaagctctgaccagcagcgaaccgtcaaagtaactagtgaagcaatggagaaggacgtgcacaagaaagggtatacgatggtgacgacaaacgtgatgctgtagtgagatgggttatgactgcaatctaaggaagaccttgcgctgccgcagacaaaaacttgtatgaccggaagacagccttaagggatgacgtaacatatgcgttgcttacactaaagggatcctggaggatattacacaaagttataaggatacc

SEQ ID NO: 10282 - DNA, 403 bp, Zea mays
  unsure at all n locations
  Clone ID: LIB3150-052-Q1-N1-C1
cggacccttggccggcccggcccggcccctgggacggcaacaagacaagacaccgcccgtgaggaggagtgtaggaccaggcagcgccagcggctccgggctcggctcttgcgtgcgccgctcgtcgtgaaggattcgtcggtggaggtagcaggagtccgcagcaacaagatgattgatggcaggcggcattcggtggacatccccgtctcgagggccctgttggccatcatgcggtccagatccctgagggacccggacaccaactcactggccaagttctccgccaagaaaaccatctgggagggcagctccctcgacgaggacgaactggagggggcgaacaacaagaatgcctacggcaggcacagcttcagctacaacgcgtacgatcacctncagc

SEQ ID NO: 10283 - DNA, 409 bp, Zea mays
  Clone ID: LIB3150-052-Q1-N1-C10
catggtcatctttcatgtttgacttccacatgctcctttttctgttcccagctggcctttatttctgtttcaagcgtctgtcagatgccacaatatttattgttatgtatggcctcacaagtatgtactttgctggtgtgatggtccggttaattcttgtggcagcaccagccgtttgccttattagtgctattgctgcatctgctacaataaaaaacctaaccactttgatcaggacaaagagcagaagtccacagactacttctgggaaaacaactggctcaaagtcagctgctaagggtgcagttgatcaatctttaccattccaacacaatgctgctattggtcttcttctgggtgctttttacttgctcagtaggtatgccatacactgcacttgggtgacatc

SEQ ID NO: 10284 - DNA, 399 bp, Zea mays
  Clone ID: LIB3150-052-Q1-N1-C11
ggtcccttccatctcctagccgccgccgccgccgccgcccaaaaccctacctaccctcttctccccctcactctcctttcatctccattctaatggcggcccaacccgtccggcgaagctgctagtgcttgtatctactatcttcatcaggtacttcgcgatcctactgaagtattccccgccgccgctgccatggccaccctcaaccctttcgaactcctcggcgccgacgacaacgacgacccgtcgctgttgattgcggcggcggcggctgctgctcagaaagccgaggcgaagaagtccgccgtggcgcctgctgggaaggctgcccagcctgcggcgaccaccaagttcccgaccaagcccgctcctccctcgcagacggttcgggatgcacgc

SEQ ID NO: 10285 - DNA, 414 bp, Zea mays
  Clone ID: LIB3150-052-Q1-N1-C12
agcgaagaagggacagatgccgtcgcagatcggtgtcctgctccgtgaccagcacggtatcccccttgtcaagagcgtcaccggcagcaagatcctccgcatcctcaaggcccatgggctggcaccagaaatccccgaggacctgtacttcctcatcaagaaggcggtggcgataaggaagcaccttgagaggaacaggaaggacaaagactctaaattcaggctcattcttgtggagagcaggatccaccgccttgcccgctactacaagcgcacaaagaagcttccacccacctggaagtatgagtcaaccacagccagcactctggtggcctaagtgtggtatcctccgacagcttgttctagatctgaatttatgtaatgcttattatgtctcgagccggttaaatggac

SEQ ID NO: 10286 - DNA, 236 bp, Zea mays
  unsure at all n locations
  Clone ID: LIB3150-052-Q1-N1-C2
aacatattttccggctaccaagttttatccaaaaatagagggactagtttttatatggtcgtttcaaattatatatagcctgtttgttcaatctaaatattttcctgtcgtttcatggctactagaatagatgctggacgcatatacatctaggatagtcagatatgtaaatcgttaaagcttgtgctagtctaatctngatctgtggtccttttagtcatgatgttatgccgata

SEQ ID NO: 10287 - DNA, 411 bp, Zea mays
  Clone ID: LIB3150-052-Q1-N1-C3
cggagggcgaggccgtgctcaccctcgacgtggacagcttcgacaaggccgtcgccaagcaccctttcatggtcgtcgagttctacgccccctggtgtgggcactgcaagaaacttgctccagagtatgagaatgcggccaaggcacttagcaagcatgacccaccgattgttctcgctaaggttgatgctaacgaggagaagaacaggccgcttgctaccaagtacgagatccaagggttcccaaccatcaagatcttcagggaccaggggaagaacattcaggaatacaagggccctagggaggctgatggcattgtggattacttgaagaagcaggttggccctgcgtccaaggagatcaagtcaccagaagatgcgacggcccttatcgatgacaagaagatctaca

SEQ ID NO: 10288 - DNA, 412 bp, Zea mays
  Clone ID: LIB3150-052-Q1-N1-C4
cgcactagaccgacccgcgaatcccccgcgcgcgcgccgtgcggtcaccgtccgaggccacggcaccgccggcccccgcccccgccccggccgccaagagcaaaggcaaggccgacgcttcctcctcgtcgtcctcctcctccactccaccgaggttgcgccgcgcgcttgccgtcgtgatggccgcgtcgctgctcgtgctcgccgtggcgttcttggttggctctggctccggggggatcgatgggggcgcagcggctcccgtcgaggtggagggcaccgaggtggcctacggtagtgtgatcaagctgatgcacgagaagacgaagcaccgtctgcactcgcacgatgtgccctacggctcaagcagcggtcagcagtctgtcaccgggtttcctgaaggcgatgactc

SEQ ID NO: 10289 - DNA, 311 bp, Zea mays
  unsure at all n locations
  Clone ID: LIB3150-052-Q1-N1-C5
gtgcaaatttgcaaaagatcatgctgttgcaaatggcccaattgtccttgagatggatacctacaggtaccatggccactctatgtcagatccaggaagcacttaccgcaccagggatgagatttcaggtgtcaggcaggaacgggacccaattgaaagggttagaaagttgcttttggctcacgacttggcaactgctgctgagctcaaggatatggagaaagaaatcagganacaagtagatgacgccattgcaaaagcaaaggaaagttctatgcctgatacttctgagctcttcacaaatgtttata

SEQ ID NO: 10290 - DNA, 399 bp, Zea mays
  unsure at all n locations
  Clone ID: LIB3150-052-Q1-N1-C6
ctgggacccttaaagtcgacccacccttccgcacgatttcaccaaccaaactccactgtctgcaactctccatcgcgtctgctacgcctctcctgcaggacgaccaatggcttccaggaagttcttcgtgggtggcaactggaaatgcaacggtactggcgaggacgtgaagaagatcgtcaccgtgctcaaccaagccgaggtgccctctgaagacgtcgtcgaggtggtggtgagtccgcctttcgtttttctgcagcaggtcaaggggctgctgcggctggacttctccgtcgcagcgcagaactgctgggtgcgcaagggcggcgccttcaccggcgagatcagtgctgagatgctggtaaacctgcangtgccctgngtcattttgggacattc

SEQ ID NO: 10291 - DNA, 413 bp, Zea mays
  Clone ID: LIB3150-052-Q1-N1-C7
atctgcgtacacggtctccctcttcctgtcagtagtagagtgagagtgaggcagcgagtgggagacaaggggaaatggggaagggagcgcaagggagcgatgcggcggcggcgggcggcgaggtggaggagaacatggcggcgtggctggttgccaagaacaccctcaagatcatgcccttcaagctcccgcccgtcggcccttatgatgtccgcgtgcgcatgaaggcagtggggatttgcggcagcgatgtgcactacctaagggagatgcgcatcgcgcacttcgtggtgaaggagccgatggtgatcgggcacgagtgcgcgggcgtggtcgaggaggtgggcgccggcgtgacgcacctgtccgtgggcgaccgcgtggcgctggagccgggcgtcagctgctggcgc

SEQ ID NO: 10292 - DNA, 419 bp, Zea mays
  Clone ID: LIB3150-052-Q1-N1-C9
gtcgtcgcccagccacgccatggactctcgggtcgccagctacgcctcttccgacgacgacgctgatgaggctccacctgctcctcctcctgctcattcccccgccgtcgccacttcctccggtggcggcgcaggcgggtttttctcctcgctcccgcaacccaagtccgcccccgcaccgctcttctcctccctcccggcgcccaaatccacccccacgccgctcttctcctctctctcggcgcccaaatcctcccccgcccctaaccccaccttctcctctatcccgccgcccaagtcttccggaggaaaccctaagcgcgtcgtccagtatcgcccgcagccgattcggcagcccacaggcgacagctccgacgacgacgaggacgatcccaagaaccgccgcgcgagcaacagcg

SEQ ID NO: 10293 - DNA, 408 bp, Zea mays
  unsure at all n locations
  Clone ID: LIB3150-052-Q1-N1-D1
cccacgcgtccggtccgccccaatacttcgggggaaaacctccgcgatttcctttcccaaccggcccacccaccggggcagtcgcctcccctcctacaaataacccccgatcctccacgaggacgggagtaccttctgcagcaagtagtgaccaggagcgagcagccaaggaaacgagtcaagcaatggagaaggccgtcgacaggcagcgggtcctgctgcggcacctcaaccccgccgcggcggngagccccgccccgcccgccatctccgcaagcgcgtgcgcggcggnggacagcgcggcgtaccaccggaggccggccttcgccgacgacgtcgtcatcgtcgctgcttacaggacggcaatctgcaaggccaagagagggggtttcaaggatacctttgctg

SEQ ID NO: 10294 - DNA, 368 bp, Zea mays
  Clone ID: LIB3150-052-Q1-N1-D10
gtcccttactgtttagtattaattatgaatgaatttgtttgggacggttgaaaaaaaaaaaaaaaaaaaaaaaaaaaaaaaaaaaaaaaaaaaaaaaaaaaaaaaaaaaaaaaaaaaaaaaaaaaaaaaaaaaaaaaaaaaaaaaaaaaaaaaaaaaaaaaaaaaaaaaaaaaaaaaaaaaaaaataaggggggggccccccccaaaaaatcagaccgagactctggagggaaaaaaatttttctaaaaggagagcttaaaaaaactggcaaaaaaaaagcaaaaaaactttccgtgggaaaaaattttttccctaaaaaataccaaaaaaaaataagccgaaaaaaaaaaatgtaaaaccccggggg

SEQ ID NO: 10295 - DNA, 354 bp, Zea mays
  Clone ID: LIB3150-052-Q1-N1-D11
gtcttttacataggcctacggtcctacgagctggtgatcatcgagagcgactagggagtcgctacctctgtgcaagccgttaagctggtgcggctgtacctgactggaaagaaggaaggcactagatccagacgtaaggaatgggatcgtgatggcatcacttgggagcgatcactgtgtgagagtgattgctggaattatatatatgcatgagcaggactgcaatgaggctctcaagcacacacactctggaggaactctggatatgggtgcgttgtatggacacagcttgatcaagatgcctagggcagactatgctgagaagcaaatgatgatcatgcagcagattgatga

SEQ ID NO: 10296 - DNA, 417 bp, Zea mays
  Clone ID: LIB3150-052-Q1-N1-D12
gtttaccattcctccccaaaacacatcctgcgatcctcgaagcctccgccgagcatcgatcatgtcggcctactgcggcaagtacgcggatgagctcatcaagaatgctgcctacatcggcacccctggcaagggtatccttgctgctgatgagtcaactggcaccattggcaagcgcctttccagcatcaatgtcgagaacgtggaggagaaccggcgggctctccgtgagctcctgttctgctgccctggtgccctccagtacatcagcggtgtgatcctcttcgaggagaccctctaccagaagaccaaggatggcaagccttttgtcgatgtcctcaaggagggaggcgtcctccctggcatcaaggtcgacaagggcaccattgaggttgttggcaccgacaaggagaccac

SEQ ID NO: 10297 - DNA, 275 bp, Zea mays
  Clone ID: LIB3150-052-Q1-N1-D2
ttgggtcttcagaccattagctttatctactccggagcgcaaaaaaacccgatcgacaccatgagggtgttgctcgttgccctcgctctcctggctctcgttgcgagcgccacctccacgcatacaagcggcggctgcggctgccagccaccgccgccggttcatctaccgccgccggtgcatctgccacctccggttcacctgccacctccggtgcatctcccaccgccggtcacctgccgccgccgtccacctgccaccgccgtccatgtgcc

SEQ ID NO: 10298 - DNA, 279 bp, Zea mays
  Clone ID: LIB3150-052-Q1-N1-D3
ggggcgccccaaaaataattttttaagctcccattttattcaaaaccagggtaacaggaaaaacacattctccacggactacattacatataccgctagaaagctcacaacagctacacattattgatcaccataaccataaaaatcggcggccgggaaaagaaaagaaaaaaggaaaacttgaaagaacaaaccgccctaaaaacaatcgatccctaaagaaaactcaatgccacacaagagcatttaattctgacctaagggtgggtggaccatatc

SEQ ID NO: 10299 - DNA, 407 bp, Zea mays
  Clone ID: LIB3150-052-Q1-N1-D4
gtggtgctcatggggaagaacacgctcatcaggcgctgcatcaaggtgtacgccgagaagaccggtaaccacacctttgacccgctcatggacctcctggtcggcaacgtaggcctcatcttcaccaagggagacctcaaggaggtgcgcgaggaggtcgccaagtacaaggtgggggctccggctcgtgttggtctggttgctccagttgatgttgttgtgccccctggcaacactggtctggatccgtcccagacctctttcttccaggtgcttaacatccccaccaagattaacaagggtaccgtggaaattatcacccctgtggagctgatcaagaagggtgaaaaggtgggctcgtccgagtctgccctgctcgccaagctgggtatccgccccttctcgta

SEQ ID NO: 10300 - DNA, 417 bp, Zea mays
  Clone ID: LIB3150-052-Q1-N1-D5
ttctgttcttccgcctccgcctgatccatcgaagacagggatcgccatgtcggactcggaggagcaccacttcgaatcgaaggccgacgctggggcgtccaagacctacccgcagcaggctggcaccgtccgtaagaacggcttcatcgtcatcaagaaccgtccctgcaaggttgtggaggtttctacctccaagactggtaagcatggccacgccaaatgccactttgtcgccatagacatattcaatgggaaaaagcttgaagatattgttccttcatcacacaactgtgacattccgcatgtgaaccgtactgagtatcagctgattgatatttctgaggatggatttgtgagccttcttacttcagatggcaacactataggatgatcttagactcccaactgatgagactc

SEQ ID NO: 10301 - DNA, 133 bp, Zea mays
  Clone ID: LIB3150-052-Q1-N1-D6
ggctatttttctctgcggcccgtatcctatagcggctcgatccactgcaccgagctagcgatatacgactgttgctgccgaagtatctgctgatggtgcttgctcaatcctgaatcgacacattcggccttat

SEQ ID NO: 10302 - DNA, 380 bp, Zea mays
  Clone ID: LIB3150-052-Q1-N1-D7
gctaattgcaccaagaaatccatcgagagggcggcgacaggggaattaatggcgtcgtcgtctagcagcagccaccgccgcctcatcctcgcagccgccgtcctgctctccgtgctcgcggctgccagcgccagcgccgggacctcctgcgtgccggggtgggccatcccgcacaacccgctcccgagctgccgctggtacgtgaccagccggacctgcggcatcgggccgcgcctcccgtggccggagctgaagaagagatgctgccgggagctggcggacatcccggcgtactgccggtgcacggcgctgagcattctcatggacggcgcgatcccgccgggcccggacgcgcagctggagggccgcctagaggacct

SEQ ID NO: 10303 - DNA, 420 bp, Zea mays
  Clone ID: LIB3150-052-Q1-N1-D8
gtagtttcgcagtcgcttgcgcgcagcagcggttcgcaccgccgccccatccgatcgccgccagtgtctgctcgatccgatggctcccacgaagaagtcgaagaagagcacagagagcatcaacaacaagctgcagctggtgatgaagagcggcaagtacaccctgggctacaagaccgtcctcaagacgctgcgcaactccaagggaaagctgatcatcatcgcaaacaactgccctccacttaggaagtctgagattgagtactacgccatgctggccaaagttagcgtgcaccatttccacggaaacaatgttgatcttggcactgcctgcggcaagtactacagggtgtgctgcctcagtatcatcgacccaggtgactcggacatcatcagtaccacccctggcacccagtgagc

SEQ ID NO: 10304 - DNA, 414 bp, Zea mays
  Clone ID: LIB3150-052-Q1-N1-D9
atctattaccgcacccaagccacgggggggggtcctgccaccgaggccagggcgaccgagccattcacggaccacggccacctcaaccatctgttgcacctgtccctgttcatcgcatcaggggggctatctgtccacttctcctcgccggagccgtaccttcaggaggcccgcacgcgcctgcacggatggggacccaacccacaaaactgagactacgcgcgctggacagacctgtgcaacactgctagtccagagaacaatactgaatgttgacggcgcacatgctgaccttgatcaagggcttatgcaccagctcgcggtcattgctagacgtgctactggcagatctggatgtgtaggaccgtcaaatcatcatgctgtactaccgcatggcaaccttcgaggtagtcg

SEQ ID NO: 10305 - DNA, 402 bp, Zea mays
  unsure at all n locations
  Clone ID: LIB3150-052-Q1-N1-E1
ttcgggggtgctcaaactttcgccgtccggcgggttcaaaaaccttttaaccatggcgcgccgaacaaccgcgggggccgaagccgcaacgccgaagccgccacggcagtacaagctagctccgcaaagcgagctgcgtgtggaggtgctccccgacgcgcccttccgagtgcgcctcgtcactggcaccgcaaagatcttcggcaccgagctgcctccggagggctgggtccccgtccttccccgatccaagatcgccattttcacctgccacggcgcgacggtggaattggacggngtgagcgagagcgagtacacgtctgacgagactccaatggtaatttatgtcaacacgcacgccattctggatgcccgcanggcaagggcgagaacagccgcagc

SEQ ID NO: 10306 - DNA, 415 bp, Zea mays
  Clone ID: LIB3150-052-Q1-N1-E11
gagaataatggttctaatgattattctgtgtgggcaaataagacaaaagtatttgccaactgtgatgccactaatagtagtatatcatttaactacgggatgttttctagtgcactgagtaaaggtgctgtatcatctccattccttgagaagtatttcttttgcctatggtggggcttgctgcagcttagttcaagcggaaatcctctcgtgacaagtgcatttatcacagagaatgcatttgcgatagcaattggtgctatcagtctcatactctttgctcagttgattggcaaaatgcagacatacctgcagtctatcagtaaaaggcttgaagagtggaggctgaggcaaaaggacatggatgagtggatgagacaccatcaactcccatctcatcttcaagaacgtgtgc

SEQ ID NO: 10307 - DNA, 384 bp, Zea mays
  Clone ID: LIB3150-052-Q1-N1-E12
gcggttgtctcaaccgcaggcgagctcggatcatgtcacccgtggatccacgcaaccatgtgtaggaggaagaccagcgagcccaaggaggagaacgttacccttgaacccattgtatgtgaaggacagtttgactttagggttgctcatatctgtgtatacatcaatgacaccttcattcatgtcactgatatttatgggagggaaacttacgtacgcatcactggaggcatgaacgtttacgctgatcgtgatgagtcgtcttcttatgctgctatgcttgctgctcaagatgttgcatcatgatgcaaagagcttggtatcaccgatctgcacattaatcttcttgctaatggaggcagcaagaccaataccgatggacct

SEQ ID NO: 10308 - DNA, 396 bp, Zea mays
  unsure at all n locations
  Clone ID: LIB3150-052-Q1-N1-E2
gtccttgtcctaatccgtccaggggagcaaacaggcaagcaggtaaacggccgaggagctggatagaggccggcgactcgaagcaaccgccgatcggagccgcggctgaggaggaggagcaagctcgagatggtgggtctcgtcggcggcagcacggcgcgggcggagcacgtcgtggccaacgccggaggagagacggagtacgtgcgccgtctgcaccgncacgcgccggccgagcaccagtgtacttccaccctcgtcaagcacatcaaggcgcccgtccacctcgtgtgggagctggtccggagcttctaccagccgcagcggtacaagccgttcgtcagaaactgcgttgtgcgcggtgaccagctcgaggtcggtagcctgcgcgacgtc

SEQ ID NO: 10309 - DNA, 416 bp, Zea mays
  unsure at all n locations
  Clone ID: LIB3150-052-Q1-N1-E4
cgcgaggggggccgtacccagcggcgcatccactggaatatatgaggccttggagttgagggatggaggatctgattatcttggcaagggtgttcttaaggctgtcagcaatgtaaataacattattggaccagcaattgttggaaaggaccccactgagcaggttgagattgacaacttcatggtccaacagcttgatggaacctccaatgagtggggctggtgcaaacagaagcttggagcaaatgccatccttgcggtttcacttgctgtgtgcaaagctggagctatggtgaagaagattcctctttaccagcacatcgcaaatcttgctgggaacaaaactctggtgctccctgtacctgcctttaatgtgattaatgnagggtcacatgctggaaacaagcttgccatgc

SEQ ID NO: 10310 - DNA, 416 bp, Zea mays
  Clone ID: LIB3150-052-Q1-N1-E5
gcccttcttttctcccatctcggctagggtgaggtcgtctcgccaagtcgccatgatgcagcagcccccgccgcagcagccgcagccgggcatggcgccgcctccgcctccgcaggctgctggcgggcagccaccgcagtggggtgggatcccgccgccgatggcgcagcagtacggcgcaccgcctccgcagcagcctccggcgatgtggggccagcctccgccgcaggcgcactacgggcaggcaccaacccctcagcagtactacgccgcgccgccggtgccggtgcaggcgccagccgcccccgctgcggcggacgaggtcaggacgctctggatcggggacctgcaatactggatggacgagaactacgtcttcgggtgcttttcgaacactggggaggttcaaaatgtga

SEQ ID NO: 10311 - DNA, 436 bp, Zea mays
  Clone ID: LIB3150-052-Q1-N1-E6
ggatcccttaaaatccacccacacctccggcgcggttggcggaatctaccgcgaggacggggaaggatgtcaacccgcacgagtgcgtcaaggcctactccgcccacatcaagcgctccggcaagatggagctccctgagtgggttgacattgtgaagactgcgaggttcaaggagcttcctccttatgatcctgactggtgctacatcagggctgcatccattgcaaggaagatctacctaaggcaaggcatcggtgtgggtggctttcaaaagatctacagtggccgccagaggaatggctcccgcccaccacacttctgcaagagcagtggtgctgttgcacgcaacatcctgcagcagctgcagattatgggcatcatcgatgtcgatcccaagggtggacgcctcatcaccaaccaaggaaggcgtgatct

SEQ ID NO: 10312 - DNA, 419 bp, Zea mays
  Clone ID: LIB3150-052-Q1-N1-E7
cccctgtagaaaagcagccacactatggagggtcttcatatggacgagatgcacctccaagtgctcccccagggaatcaaaaccaagcacatgggtcatctcaggtgacacacagcatgcaagttcctctttcctatgctgatgctgtgataggggcagctggtgccagtatcagctacatccgcaggcatagtggagcaactataagtattcaagaaggtgctcctggcgagatgacagtggagattacaggaagtgcttcacaagtacagactgctcaacagctaatcaagaatttcatggctgaagcttctccccagggaccaccagccccaggtccacacggtcaaccagtggacacgggttacggctcgtacccaccttacggtggagcatcctatgggtctcctccaggtgct

SEQ ID NO: 10313 - DNA, 418 bp, Zea mays
  Clone ID: LIB3150-052-Q1-N1-E8
ctttcttccttctcactccatccccgtcgggtctctcccagtcgctttgcgtcgtcatggcgccgatcgagtgcactatgcacgtcggcgccgtgaaagtcggcgtgggcgcctccgtggccgccgacgaagacgacgctcgccaagcgcgggttgacgaccacttgggtttcgaggtgcctgccgtacgtgcaggacgacggcaggcgtatcactcaccggcacacactcccgtgcacgctaaatgcagtagccggtgccatctcggggctctgggtgttcgcgcagggagaggcgaccaccgcggcggcatcatcttcttctcatagtttggttgcaaggccatagcttttgccctctgcttttttagtgtggttgtctattatctgggatgcagtaagatttgataagaaagggg

SEQ ID NO: 10314 - DNA, 418 bp, Zea mays
  Clone ID: LIB3150-052-Q1-N1-E9
aggagacctgcgccgcccctccggccacgcgagctcgccgaaatggtcgcccacaggttccatcagtaccaggtggtgggtcgcgcgctgccgaccccgaccgatgagcaccccaagatctaccgcatgaagctctgggccactaacgaggttcgcgccaagtcgaagttctggtacttcctgagaaagctgaagaaggtgaagaagagcaatggccagatgctcgccatcaacgagatcttcgagcgcaacccaaccaccatcaagaactacggcatctggctgcggtaccagagcaggacggggtaccacaacatgtacaaggagtaccgcgacacgaccctgaacggcgccgtggagcagatgtacaacgagatggcctcgcgccaccgcgtgaggtccccctgcatccagatca

SEQ ID NO: 10315 - DNA, 416 bp, Zea mays
  Clone ID: LIB3150-052-Q1-N1-F10
gaagccattccctcttcaagaagggatcatcagattgggcttattattccttattactccaggcaaggatcggagttgctctgaattgactgaaccatggcggcgacaatggcagtgacgacgatggtgacgaggagcaaggagagctggtcgtcattgcaggtcccggcggtggcattcccttggaagccacgaggtggcaagaccggcggcctcgagttccctcgccgggcgatgttcgccagcgtcggcctcaacgtgtgcccgggcgtcccagcggggcgcgacccgcgggagcccgatcccaaggtcgtccgggcggccgacaactgcgacatcgcgcgccagcttggcgccgccgttcccgggcagcaggccgcctgggaggcggaggaagaggcaacgaagaggaggaa

SEQ ID NO: 10316 - DNA, 402 bp, Zea mays
  unsure at all n locations
  Clone ID: LIB3150-052-Q1-N1-F12
caggcgtcttcgtactcgcctatctccgcgacccaaagcgttcccccttctcccattcttctctcatttctcaccaccgccgccgctaccccctttcgacaacaccatgagggagtgcatctcgatccacatcggccaggccggtatccaggtcggaaacgcgtgctgggagctgtactgcctcgagcatggcattcaggctgatggtcagatgcccggtgacaagaccattgggggaggtgatgatgctttcaacaccttcttcagtgagactggcgctgggaagcacgtcccccgtgctgtttttgttgaccttgagcccactgtcatcgatgaggtgaggactggcacctatcgccagctcttncatcctgagcagctcatcagtggccaggaggatgc

SEQ ID NO: 10317 - DNA, 419 bp, Zea mays
  Clone ID: LIB3150-052-Q1-N1-F2
cctccccaaaacacatccggcgatcctcgaagcctccgccgagcatcgatcatgtcggcctactgcggcaggtacccggatgacctcatcaagaatgctgcctacatcggcacccctggcaagggtatccttgctgctgatgagtcaactggcaccattggcaagcgcctttccagcatcaatgtcgagaacgtggaggagaaccggcgggctctccgtgagctcctgttctgctgccctggtgccctccagtacatcagcggtgtgatcctcttcgaggagaccctctaccagaagaccaaggatggcaagccttttgtcgatgtcctcaaggagggaggcgtcctccctggcatcaaggtcgacaagggcaccaatgaggttgttggcaccgacaaggagaccaccacccagggcca

SEQ ID NO: 10318 - DNA, 367 bp, Zea mays
  unsure at all n locations
  Clone ID: LIB3150-052-Q1-N1-F3
ccgactcaaatctatctgccccgcgccgccgtggccatgccgttcactccgggtccctactctggcgtcagcaccctcgcccttgtagcgagggcatcggtcttcggcttcggtgtcgtctacgggagcatcaagctctcaatcctcaaggcaacaaagcctaaaaaggaagaagcgcatgctcatcactaangacgacagggctgctacatgttaatttctatggaaggatgatataaaaatgtggttgcactctttctccatacgtgcaatttgatttatgatttgtggacatcttgctgtaacacacctgctgagttatcttagttntgtgtcataataaaattcttagccaatgacttgaaat

SEQ ID NO: 10319 - DNA, 411 bp, Zea mays
  Clone ID: LIB3150-052-Q1-N1-F4
gccatggatttcctgcaggggcaaagcgtcgagaccacagtggccgtcgccgtcgctgtcgccgccgtcgccgcaggcggcgccttcctcctccttcgatccaggaagcccaagggctgcttggatcctgagaacttcaggaagttcaaacttgttgaaaagaagcaaataagtcataatgttgccaggttcaagttcgctcttccaactccaacttctgtattgggccttccaatcggtcaacatatcagctgcagaggacaagacgctacaggtgaagaagtaatcaagccttatacccctactacattggattctgatcttggatattttgagcttgtcataaagatgtatccccaagggagaatgtcccatcatttccgcgagatgaaagttggtgattatttgtct

SEQ ID NO: 10320 - DNA, 419 bp, Zea mays
  Clone ID: LIB3150-052-Q1-N1-F6
cgacggctccgacaccgtcactttcatgttcgagtcgcccaagcaagataagatcgcggatttcgagatgaaactgatggacattgatagcgagcacctcggaatcccggattccgagtaccaggccatcgtccgcatgccttctgctgagtttatgaggatctgcaaagatcttagcagcatcggagacacagtcgtcatctcggtgactaaggagggcgtgaaattctccacatctggagaaattgggagtgcaaacattgtctgcaggcagaaccaaactattgacaagccagaagaggctaccattatagagatgcaggagccggtttccctgacctttgccctgcggtacatgaactccttcaccaaggcgtcttcactgtctgagcaagtcactatcagcctgtcgtccgagc

SEQ ID NO: 10321 - DNA, 418 bp, Zea mays
  Clone ID: LIB3150-052-Q1-N1-F7
gtggttttgatcctcaccggcgtcgccgtcggaatcgtcttggacagcggcaccagaacctctgcctccgcagggtgcttgctggtatcattacaatctggtagttttagtggttgggcttgacttcctactattcagaaacacagtaccgagaagtctttaggtggggtcaaagatggtgtcgctgaagttgcaaaagcgccttgccgcgagctacctcaagtgtgggaaaggcaaggtgtggcttgacccaaatgaagttagtgagatctccatggcaaactcccgccagaatatccggaagttggttaaggatgggtttatcatcaagaagcctcataagatccactctagatcccgtgcaagaagggcacatgacgccaagcaaaagggacgccactcaggatatggtaagcgt

SEQ ID NO: 10322 - DNA, 416 bp, Zea mays
  Clone ID: LIB3150-052-Q1-N1-F8
atggtcgcaatgatattaaaagtatatcctgtgaaatggagggtaagacagaagaggaagttcaacgctatgctaaagttttcaaggagagatacaaggagctgactgattatgatagaattataaaaaatattgaaaggggggaagcaagaatatcccgcaaggatgagattatgaaggctattgggaagaagttagaccgctacaagaacccatggttagagttgaaaattcaatatggccaaaataaagggaagttctataatgaggaatgtgaccgctttatgctttgcatggtgcacaaacttggatatgggaactgggatgaactgaaagctgccttccgtatgtctcccttgttccgatttgattggtttgtgaagtccagaactacccaagagttggctaggcggtgt

SEQ ID NO: 10323 - DNA, 108 bp, Zea mays
  Clone ID: LIB3150-052-Q1-N1-F9
gctctcccgtggctcgcgcaggcgggcgacgcaacgaggctaaatccctatcgcgaggaggcgtgtgaggccagcggctttgcgatgacagcaccagcggacaagggg

SEQ ID NO: 10324 - DNA, 416 bp, Zea mays
  unsure at all n locations
  Clone ID: LIB3150-052-Q1-N1-G1
ctagtggccaaggtgatcaacaagataaagatcgaagctggtgggtctcatcactttatcagatatatagcagacgatacttgctacgccgaagtgctttggaattattcatggtagataggtcgaatttcttttttgactttgcggatattgatgcccgtaaaaacgcttatcgggccattgttcataccaaacctcctaacttgaatgacatctttttagctacccagagagctgagcagattcttaaaagaactcagttgatggagcgctgggctaattgngagatcaacaantttgagtacttaatggaacttaacacactggctgggcgcagttacaatgacattactcagtaccctgtttttccctgggtagtagcagattacaaatcnccgagtgttgaatctggatga

SEQ ID NO: 10325 - DNA, 417 bp, Zea mays
  Clone ID: LIB3150-052-Q1-N1-G12
gctcgtcgtcttcacaaacgccggcgcaaactctcgcccgagcccgacagatcttcaattccccattccgcccaccgatcgaccttcacgccagtctcggtctcttccgaaggcgtcgcgcgcggttgtttgagaggagaggaggaagatgagggagtgcatctccgtccacatcgggcaggccggcatccaagtcggcaacgcgtgctgggaactttactgcctcgagcacggcatccagcctgatggccaagtgcctggagataagaccgcgggacatcacgatgatgccttcagcaccttcttcagccagactggtgctgggaagcacgttccccgtgcaatcttcgttgatctagaacccactgtgatcgatgaggtgcgcactggcacgtaccgccagctcttccaccctga

SEQ ID NO: 10326 - DNA, 150 bp, Zea mays
  Clone ID: LIB3150-052-Q1-N1-G2
cccgtccaccgtccatccgtattcccgtcacgcccccaacacccccacaacccgaagcagcgaaagctcccctaacccttttcgggcattcgatcgcaaggaaaaaaagggagattagcttcttcgggcaggaaccccccgttggggttc

SEQ ID NO: 10327 - DNA, 405 bp, Zea mays
  unsure at all n locations
  Clone ID: LIB3150-052-Q1-N1-G3
ggcggcggnggncttcgaggcggacggttccgtaattcggcacaagagtaacaaggctttcgtcagcgtgcttacggcgtttttgacctcaaataaatttgccaaggttaagaagccaggcaagggtggtaatcgattttggaagagcattgtccttggtttcaagactcttagggaagcaattgaagggacctacattgacaagaaatgttcattcactggaaaccgttctatcagaggcagaattattgttggaacatgccacagtgctaagatgaacagaaccatcattgttcgcaggaactatctccactttgttaagaaataccagaagtatgaaaagaggcaattcaacattccaactcacattttcccatgcttccgtgtgaaggaaggtgattattt

SEQ ID NO: 10328 - DNA, 422 bp, Zea mays
  Clone ID: LIB3150-052-Q1-N1-G4
aagacttgggagaaactgcagcttgcagcgagggttatcgttgccatcgagaacccgcaggacatcatcgtccagtccgcccgcccctatggccagcgtgctgtcctcaagttcgctcagtacactggcgctcatgccatcgctgggaggcacacccctggtaccttcactaatcagctccagacgtccttcagcgagcctcgactgctcatccttaccgacccaaggactgaccatcagccaattaaggagtctgctctggggaacatccccaccattgccttctgtgatactgactctcccatgcggtatgtcgatatcggcatcccagcgaacaacaaggggaggaacagcattggatgcctgttctggcttttggccaggatggttctgcagatgaggggcactatcctccctgggca

SEQ ID NO: 10329 - DNA, 390 bp, Zea mays
  unsure at all n locations
  Clone ID: LIB3150-052-Q1-N1-G5
gcgcgcctggggtttccctagggtttggttgttaccaaccccagccgggggagcgcggaggtggcggcggcggcggaaatggagggggaggagattggcctggtcctcgcccgcgcctcggacctccgcaccaggatatcggcctgcgccgctgccgcggcgggggcgccgtgtccgcggcgggacgatgaggaggcagcgaagcggttggacgcggcgganggcgatgaggagggagccgaggaagaggaggatgaggaggaggaggtggggagccttgtcggcatcagcgacgcgctcgagtcgctcgagcggcagctcgccgcccttcaggatctccagcaccaacaaagatacgaacgggaaaccatcttgagccagatcgaccga

SEQ ID NO: 10330 - DNA, 419 bp, Zea mays
  Clone ID: LIB3150-052-Q1-N1-G6
attcctcccaacaccacctcgcctgcgatctccgtagcctccgtcgcgtcgagcatcgatcatgtcggcctactgcggaaagtacaaggatgagctcatcaagaatgctgcctacattggcacccctggcaagggtatccttgctgctgatgagtccactggcaccattggcaagcgcctttccagcatcaatgtcgagaacgttgaggagaaccgccgtgccctccgtgagctcctattctgctgccctggtgctctccagtacatcagcggtgtgatcctcttcgaggagaccctgtaccagaagaccaaggatggcaagccttttgttgatgtcctcaaggagggaggcgtcctccctggcatcaaggttgacaagggcaccattgaggttgttggcactgataaggagaccacca

SEQ ID NO: 10331 - DNA, 419 bp, Zea mays
  Clone ID: LIB3150-052-Q1-N1-G7
ctgttttcccccctcccgagtccaaacgctggacctaaacctctcacccggcgccgccgccgccgccgccaccgccgccgccccgaggccccatcccagcgaaaccgacttccgcctcggattgaagcaatgtcgtcggacgacgaggtcagggaggagaaggagctcgacctctcctccaacgatgtcgtcaccaagtacaagactgccgccgaaatcctgaacaacgctctgaagctggttgtgtctgagtgcaagccaaaagcaaagattgttgacctttgtgagaagggtgactctttcataagagagcaaactgggaatgtctacaagaatgcaaagaggaagattgaaaggggcattgctttcccaacctgtgtttcggtgaacaacacagtctgccacttctccccgcttac

SEQ ID NO: 10332 - DNA, 417 bp, Zea mays
  Clone ID: LIB3150-052-Q1-N1-G9
gggacgacgacgtcgaccagcgcgccgagctcttcatcgccaacttctacaggcagctgcggatggagcgccaggtctcgctgcagctgcggtacgtcagggggaacagctgggacaggacccctggcgcaactccttctcctgcttcttccaggggatgatccgtagattgcgtagcgaaataagaatttgcaaggtagagatcctttcctttcagagcgcgcggtgacgcgatttagatgggtatcctcttttttttttcctccatcgtttctgcacattcttttttttttgggtgctgaatagtactgtacagtttatgatttgcttggactcatgatcgagagtgtaataaatacaaaaaaaaagagagagagattgggattacagtctgtaaaaaaaaaaaaaaaagggcgg

SEQ ID NO: 10333 - DNA, 377 bp, Zea mays
  Clone ID: LIB3150-052-Q1-N1-H11
cgatgatggcctacaaggctgctcaggacattgcgctggctgagctggcacctacccatccgataaggcttgggcttgctcttaacttctcagtgttctattatgagattctgaactccccagacaaagcttgcaaccttgcaaagcaggcgtttgatgaagctatctcccagttagacacccttggggaggagtcatacaaagatagcactctgatcatgcagctccttagggacaacttgaccctttggacctctgacctcacggaggatggtgctgatgagggcaaagaagccccgaaaggtgaggctggtgacggacagtaatcttgggagagcgcatattgttcgagcccattgttttagatgctctatgct

SEQ ID NO: 10334 - DNA, 413 bp, Zea mays
  Clone ID: LIB3150-052-Q1-N1-H12
ttatttccagctcttccatcctgagcagctgatcagtggcaaggaggatgcagccaacaacttcactcgtggtcactacaccattggcaaggagattgttgacctgtgccttgaccgcatcaggaagcttgcagataattgcactggtctccagggcttcctcgtcttcaacgctgttggtggaggaacgggctctgggcttggttctctcctcctggagcgcctgtctgttgactatggcaagaagtccaagctcggtttcaccgtgtacccatccccccaggtgtccacatccgtggttgagccatacaacagtgtcctgtccacccactctctcctcgagcacactgatgttgctgtcctgctcgacaatgaggccatctatgacatctgccgccgctcccttgacattg

SEQ ID NO: 10335 - DNA, 419 bp, Zea mays
  Clone ID: LIB3150-052-Q1-N1-H2
cacattaaaccactgatttcacaatgaaaagggagacaatgccttcatggctagaactgttgcttgcaacacaattctttacgacttgtgctaaccatcttcttgctagtcgcaatgaatgtaacctattttgcacccagtgtgagaccaaaccagctgctttctgtaactattgtcgttcaagtgatcattccacccaccgtgtaatccagataaggcgttcatcgtaccatgacgttgtgagggtgtccgagattgaggatatccttgatgtcagcgatgtgcaaacttatgtaatcaatagtgcaaggattgtattcctgaatgagcggccacaactgcgtgcttctagtgtccccatttgtaaggcacccacatcatcaacacatagctgtgagacatgtagccgtgtgctactt

SEQ ID NO: 10336 - DNA, 421 bp, Zea mays
  Clone ID: LIB3150-052-Q1-N1-H3
ctagactagaccgaccgccaccattgcccccgtgtcttaacacggggcgaaaattcctttcgagatctcgcttctctaagcttccgcggcggcacggtgatgactatgacccccgctccggtggcgaacggcgcagcggccggcgctggcgggggcatgaagcggcggggcggtaggttgtggtacgcggtcgccggtgctctcctcgtggccctcctcgccgtggccgtgagctaccgcagcttcccgggcgtcccttcctcctcctcgtcacctggaagctgcggctgccctgctgcgaggaagtacacggggatggtggaggactgctgctgcgactatgagacggtggacgccatcaacgaggaggtcctgcatccaatcctacaggaactcgttaagttgcccttcttcaggtact

SEQ ID NO: 10337 - DNA, 412 bp, Zea mays
  Clone ID: LIB3150-052-Q1-N1-H4
agcgcattgtcgcagcacagcatcacgagcaaagtccccgtgccagcgaggaaacaccgatccgattcgagcgggagcgcgcgtaccagtggggaacatctggttgatgtattcgagagcgctggacttgtccatttctccggcgagatctctgccccgcgcgcccgcgctcggaggatctggcgaggtctagaaggatctggaaggggagggtggtgcggaggagctgatctggcggcgaacgggcgccgggcttcccctcgcgcacgcgaggggaggtggtggcgagagaggtggaatcgccggcggatactactccccgtcgttggcagctcggtggttcaacgggtgggcgcggagtccaatagcccgcttcctattatgagagttgtaaaagttgaagtgttcactt

SEQ ID NO: 10338 - DNA, 310 bp, Zea mays
  Clone ID: LIB3150-052-Q1-N1-H6
agccagcccccccaaaccctaggctgccgccaacccgactggctcccccctccctcttctcccgccatgaactaccgcttccagaacctcctcggcgccccgtaccgcggcggcgacgccgtgttcgcgggagactcacccgttctcctctccgctgttgggaatcgcgtggcctccactgacctcactgcctcctcgtctctcacgcttccgttcgagtcctcatccaacgtcacccgcctcgccacttccccctcgggcgacttcctcctcgcagccgatgacaatggccgcgcgctctacgccaacc

SEQ ID NO: 10339 - DNA, 415 bp, Zea mays
  Clone ID: LIB3150-052-Q1-N1-H8
cgtctcctctctctctttccccgagctgtcgaaaccctaggtgcgtgccgaccggcggcggcggcgaggtgatggcgatggacccggacgcggtggcgaaagccttcgtggagcactactaccggacgttcgacaccaaccgcgcggcgctggtggggctgtatcaggagacctccatgctcaccttcgagggccagaagttccagggcccatccgccattgccggcaagctcggatctcttcccttccaggcctgcgagcaccagatcgtcaccgtcgactgccagccgtcggggccccagggaggcatgctcgtcttcgtctccggttccatccgcaccggccccgaggagcaccccatcaagttctctcaggcattccatttgctgccggcagctgggtccttcttcgtgca

SEQ ID NO: 10340 - DNA, 417 bp, Zea mays
  Clone ID: LIB3150-052-Q1-N1-H9
cagctttccactcgcctcgctcgcccctttcgcgtccaccgaccccgaccccgaccccgatccccgccggtgcttcgccaccccgatccccaccgcgcgatggcggagccggctccggctcccccggtgaccgcgccgctggtggggctgctgtacgacgagcggatgtgcgcgcacgcgacgcccaacggggaggaacacccggagaaccccgagcggctgcgctccatctggcgcaagctcaacgccgcgggcgtcgcgtccaggtgtgtggcccttaaggcaaaggaagctgaggacaagtatatagcttctgttcacagcaagaggcatataaagctgatgaaggaaattagctcaacaatatatgatgccagcaggaacaagattgctaggaaattcaattccatttacttg

SEQ ID NO: 10341 - DNA, 321 bp, Zea mays
  Clone ID: LIB3150-053-Q1-N1-A1
ctagctctctctctctctctctcaagtgggagggggagcgagatatatacatctgaatccagcagcagcaggtagcatagagcatatatagcatagatatggcggcggaggtggaggctgccaaggacatcgccgaggagaaggccgtcgtgccgttgccaccgtcgcccgccaagccggccgacgacgactccaaagccatcgtcgctcttgtcaaggacgctgctgctgggaaaccttctacagctattattggaggctcaactgaaagagatgcttacctcgccaagatcgtgtccgagaaaaggctgagtctgatca

SEQ ID NO: 10342 - DNA, 368 bp, Zea mays
  unsure at all n locations
  Clone ID: LIB3150-053-Q1-N1-A11
aaaggcacttccttcaagttggaaagaagtgattgaacttcttgacatattattaaggtggtttgtcttacgcttttgtgaatctaacacaacgtgtttgttgaaggttcttgactttcttcctgagctttttgatattttaaaagaccagtcatacatgttgacagaagctgaagctgcaatttttcttccttgcctcatagagaagtctggtcataacattgaaaaagtcagggaaaaaatgggggagctgataaagcaaatgatcaacatttactctcttcccaaactaattccctatatactngaggggctccgctccaagaataaccgacaagatagaaatgtgtgatattatggatatttca

SEQ ID NO: 10343 - DNA, 326 bp, Zea mays
  Clone ID: LIB3150-053-Q1-N1-A2
gtccccgatccgaagctgtgcctcgtaccggttggatccaatggcgccgacgtcgaagctgtcgacgggcatcaagcgcgcttcgcggtcgcacgcgtaccatcgccgtgggctgtgggccatcaaggccaagaacggcggcgccttccccaaggccgacaaggccgccgccgccgtggaacccaagttctaccctgccgacgacgtcaagccccgcgttcccagcacccgcaagcctaagcctaccaagctcaggtcgagcatcacgcctgggacggtgctggatctcctcgcaaggcgcttcatggggaaaaaaaggggggttt

SEQ ID NO: 10344 - DNA, 349 bp, Zea mays
  Clone ID: LIB3150-053-Q1-N1-A3
ctgctttctacgaggctttcgggctgacggggggggaggccatgacctgcggcctgcccacgtttgccacagcctacggcggtccggccgagatcatcgtgcacggcgtgtctggctaccacatcgacccttaccagggcgacaaggcgtcggccctgctcgtggacttcttcgacaagtgccaggcggacccgagccactggagcaagatctcccagggcgggctccagcgtatcgaggagaagtacacctggaagctctactcggagaggctgatgaccctcaccggcgtgtacgggttctggaagtacgtgtccaaccttggagaggcgcgagaccccgcggtacc

SEQ ID NO: 10345 - DNA, 300 bp, Zea mays
  Clone ID: LIB3150-053-Q1-N1-A4
accaggtgcagagtctttcgtcatctcttgtccggcgaagaacccccagtcgcccaccagatcacttgttaaactttgttgaggggtgatggcggtttctttcgcaaacctcaacaccgaggcagggcttaaaaagcttgatgagtaccttctcactcgcagctacatcactggctaccaagcttccaaggatgacttggctgtctacacttcgttttcgtctgcttccttcgtccaatatatcaacgtagcaaggtggtttaatcacattgatgcgctcgtgaagctgagcggaattac

SEQ ID NO: 10346 - DNA, 376 bp, Zea mays
  Clone ID: LIB3150-053-Q1-N1-A6
taagacaatcacccttgaagtggagtgttcgcacaccattgataatgtcaaggctaaaatccaggacaaggagggcatccctcctgaccagcagcggcttatcttcgccggcaagcagcttgaggacggacacacacttgctgactacaacatccagaaggagtcaaccctccacttggtgctgcgccttaagggaggcatgcagatctttgtcaagaccttgactggcaagacaatcacccttgaagtggagtcctcaaacaccattgacaatgtcaaggcaaaaatccaagacaaggaaggcatgccacctgaccagcaacgtatcatctttgccggcaagcaattggatgatgggaggacccttgctgactac

SEQ ID NO: 10347 - DNA, 330 bp, Zea mays
  unsure at all n locations
  Clone ID: LIB3150-053-Q1-N1-A7
gcaccgcgcaggcgctggccacgcggcggggggtcggggacgtgcttgtcacggaggcccgcgcccgccccggcggcaacattaccaccgtcgagcgccccgacgaagggtacctctgggaggagggtcccaacagcttccagccctccgaccccgttctcaccatggccgtacgctcctcgctggcgccgcagcgtcttcttctcagactcatgcggagccatggaattgagatgctgaatggattttatgcgcgcgcgcangtggacagcggactgaaggatgacttggtttttggggacccaaacgcgccgcgtttcgtgctgtggg

SEQ ID NO: 10348 - DNA, 366 bp, Zea mays
  Clone ID: LIB3150-053-Q1-N1-A8
cggaactgtcatgcgatcactgggtgaggggccaaccgaggctgagctccaggacatgatcaacgaggtcgatgcggacggcaacggcaccatcgacttcccggagttcctcaacctcatggcccgcaagatgaaggacaccgactccgaagaggagctcaaggaagcgttcaaggtgttcgacaaggaccagaacggcttcatctctgcggcggagctccgccacgtgatgaccaacctcggcgagaaactgaccgacgaagaagtcgatgagatgatccgcgaagccgacgtccatggcgatggccagatcaactacgaggagttcgtcaaggtcatgatggccaagtgagtaaagcctgcggt

SEQ ID NO: 10349 - DNA, 338 bp, Zea mays
  Clone ID: LIB3150-053-Q1-N1-B1
ctccaccttgtgctccgcctcaggggaggcgtgcggatctttgtgaaaaccctgaccggcaagactatcaccctcgaggtggagtcctctgacaccattgacaacgtcaaggccaagatccaggacaaggagggcatccctccagaccagcagcggctcatctttgctgggaagcagcttgaggacgggcgcacgcttgccgactacaacatccagaaggagagcaccctccacttggtgctgcgcctcaagggaggcatgcagatcttcgtgaagaccctgaccggcaaaactatcaccctcgaggtggagtcttcagacaccatcgacaacgtcaa

SEQ ID NO: 10350 - DNA, 167 bp, Zea mays
  Clone ID: LIB3150-053-Q1-N1-B10
tcttcttagagcacgagctcaccaccgcgagggcagagtgatctcactccaccgacacgaacatctctaaccacacctagccgaccgctacatacattgccccgctgctccccttgttccttaaaaaagccatcatagcttcactacttagtaacgccctttaaatc

SEQ ID NO: 10351 - DNA, 377 bp, Zea mays
  Clone ID: LIB3150-053-Q1-N1-B11
tcgcagcaccccgatcctgggccagtgcgtggagttcctgaggcatcagtgcagcccgacggcgacgccctactgctcgcctcagtgccagtcgttgcggcagcagtgttgccagcagctcaggcaggtggagccgcagcaccggtaccaggcgatcttcggcttggtcctccagtccatcctgcagcagcagccgcaaagcggccaggtcgcggggctgttggcggcgcagatagcgcagcaactgacggcgatgtgcggcctgcagcagccgactccatgcccctacgctgctgccggcggtgtcccccactgaagaaactatgtgctgtagtatagccgctggctagctagctagttgagtcatttagcggcga

SEQ ID NO: 10352 - DNA, 319 bp, Zea mays
  Clone ID: LIB3150-053-Q1-N1-B2
gatgagattggtaatatttccacatcacgtggggggagtgattctatgaagacccaactggaaatagaaccaaggtttccattgtttggtgggtggcaaacaaccttcactgttggttatggtttaccacttgaagactttgttttctattctgatggaaagagatttctcaatatcacatttggttctccattggaggaaattctcattgaaaagcttatcgtaaaagttgttctacctgaagggtcaaaagatatcgaaatttcagcttcctttccaacacagcagcagcaagaagttaagtattcacaccttgaca

SEQ ID NO: 10353 - DNA, 368 bp, Zea mays
  Clone ID: LIB3150-053-Q1-N1-B3
gcccggaggagggggagcaagcagcagccggcggtggaagatgtcgtacctgctgccgcatctgcactcggggtgggcggtggaccaggccatcctcgccgaggaggagcgcctcgtcatcatccgcttcggccatgactgggacgagacctgcatgcagatggatgaagtgctagcagcagtagctgagaccataaagaactttgcggtcatctaccttgttgacatcacagaggtccctgatttcaacaccatgtatgagctgtacgacccttcgacagtgatgttcttcttccggaacaagcacatcatgattgatctcgggactggaaacaacaacaagatcaactgggccctgaaggacaagc

SEQ ID NO: 10354 - DNA, 305 bp, Zea mays
  unsure at all n locations
  Clone ID: LIB3150-053-Q1-N1-B4
gttcgccgcccccgtcgagaacctgcactgcggcggcgaggcggccagtgccgagcactcggggtccgtgcacggcgcctactcgtcgggcatcgccgctgccgaggaatgcaggaagcggctcctggcgctgaagggcatcccggacctggtccaggtcgcggcgtgggaggagatggccggagctgtggctcctctgcagatttgcaggacctgagtgagattggatcactggctgcctttggacattggagtggatcgtggatcgcttcgctgctccctgatggntgccgagtcttttttat

SEQ ID NO: 10355 - DNA, 335 bp, Zea mays
  Clone ID: LIB3150-053-Q1-N1-B5
tgagggtctgatgaccactgtccatgccggcactgctacccaaaagactgttgatgggccctcttctaaagactggaggggtggaagggctgctagtttcaacatcattcccagcagcactggagctgctaaggctgttggcaaaatgcttcctgtccttaacggaaagttgactggaatgtctttccgtgtcccaaccgtcgatgtttctgttgttgatttgactgttaggcttgagaagtcaacaacctatgatgagatcaaggctgcggtcaaggccgaggcagaatgtagcctcaagggcatcctgtgttacgttgaggaggaccttgttt

SEQ ID NO: 10356 - DNA, 365 bp, Zea mays
  Clone ID: LIB3150-053-Q1-N1-B6
agggaattgaagggctctttaaaaagaacagggtgacttatgttaaaggctttggaaaactgtcatccccctcacaagtgtcagttgatttgattgatggtggtagcaccattgtcaaaggaaaaaacataataattgcaactgggtctgatgtaaaatcacttccatgaataacaattgatgagaagaaagtgtttcatctactgatgcactgtgcttgtcagagatcccgaaaaaactggtggtaatcggagcaggttatattggccttgagatgggttcagtctggaaccgtcttggttcagacgtcactgttgttgaatttgccccggatataataccatcaatggatggcgaggtcagga

SEQ ID NO: 10357 - DNA, 293 bp, Zea mays
  Clone ID: LIB3150-053-Q1-N1-B7
tcccatccacccgtacctaagcttctatcctatatactcaacccactcgttctactaccacccgaaaattcatgagcgtgggggtttaatttgtcatcattctcactccattatcttcaaagcaaccgggtaatcataccatgctcttcttagacctatctctccaaatatatctcatatggcataaatagaacgacacacacccccataagtaagctcgattgtcaactcttgcacctaccataataaacaacttcaatatcacacatcttttcataacataaccaccataa

SEQ ID NO: 10358 - DNA, 304 bp, Zea mays
  Clone ID: LIB3150-053-Q1-N1-B8
gccaaagccctcctctcctccccgcgtccgcctccgacctcgaacattcttctccaatggcgacggcccccgcatccctctcgctctccgcctctaccctgcccacccggctccgtgccgcagcggtgctggcgggcatgcgctggaggcagccgcaacgcgggcggatggtggtgcgcgccaagatccgggagatcttcatgccggcgctgagctccaccatgacggagggcaagatcgtctcctggtccgctggagagggtgatcgcgtctccaatggtgacgccgtcgtggtcgtcgagtc

SEQ ID NO: 10359 - DNA, 350 bp, Zea mays
  Clone ID: LIB3150-053-Q1-N1-C1
tttctttctctgcctgttgccgttaccggggctgatttctccacttccgttttccatgtgaccccgccgggccaccatcaccggaggtggccaagtctgttgcagccccgccgccacctgaggtggcctatccgacgccgcccacttgccctcgcactcctacgcgtgtcatcagccgcgcccgcgcgccgtcgtgccaccaccatgatgccgtcgccatcgaattgtcctcgcccggcgccaccattccgccctcattaggactgcgcctcaccctcatctcacaccccagttcctccctcgagaagaacgccgccaactgtctagtaaactgtgactccgtcctcgat

SEQ ID NO: 10360 - DNA, 357 bp, Zea mays
  Clone ID: LIB3150-053-Q1-N1-C10
gctttttactgtgagcaacagttccctgtgagaatttgctgttttgggctttgaattgggttactccatggagaacccaaactcattggtcatatgggaagctcagtttggtgatttttccaatggagctcaagtgatatttgatcagttcctgagtagcggggagtcaaaatggctccgccagactggccttgtcgtttgtcttcctcatggatatgatggccaggggcctgaacattctagtgcaagattggagcgctttcttcagatgagtgatgacaacccttatgttatacctgagatggacccaacactgcggaagcaaatccagcagtgcaattggcaggtcgttaatgt

SEQ ID NO: 10361 - DNA, 364 bp, Zea mays
  Clone ID: LIB3150-053-Q1-N1-C11
cttcgggcccttagccgcgacgagcacgagcagggagtagaagaggttaaccttctggttggaaacgatgtacttcgaaggctatggcttccgtggaagtactttcgagcagacatatcgctgctatcctgcgtctttcatcgacaagccacaacttgaggccggtgacaaaattataatgccaccatcagctcttgatcgtcttgcatctctgcatattgaataccctatgctatttgaagtccacaatgcagcagcagaacggacttcgcattgtggtgttctggagttcattgcagaagaaggcatgatctacatgccatattggatgatgcaaaatcttctgttgcaagagggagatatg

SEQ ID NO: 10362 - DNA, 376 bp, Zea mays
  Clone ID: LIB3150-053-Q1-N1-C12
gccaccaccattccttccccaactctgcgggctgctcgtcgccctccctccacgccggacgcgccccgatccagatccaggggcgtaacatggcatcaaaacgtatcctcaaggaattaaaggacctgcaaaaggaccctccaacgtcatgcagtgctggtcctgctggtgaggatatgttccactggcaggcaaccatcatgggtcctcctgatagtccatatgctggaggtgttttcttagtgaacattcatttccccccggactaccctttcaagcctccaaaggtatcttttaagacgaaggtcttccatccaaacatcaatagtaatggaagcatatgtctcgacattcttaaggagcagtggagccctgc

SEQ ID NO: 10363 - DNA, 329 bp, Zea mays
  unsure at all n locations
  Clone ID: LIB3150-053-Q1-N1-C2
cacattcttaaaaacttgttaaattcataggtaaggacctttacataactgctctaagttccattgatacgtttcatcgattttcggaggaatttattcgaggaatctagtgtttgaccggctccgctcgattctgcttcgttaccacgcgggtgctatcgaatcttggcggagatggggctcacgttcacgaagctgttcangcggctattcgccaagaaggagatgaggattctcatggtcggtctcgatgcagctggtaagaccactatcctctacaagctcaagctcggcgagatcgtcaccaccatccccaccatttgatttaa

SEQ ID NO: 10364 - DNA, 356 bp, Zea mays
  Clone ID: LIB3150-053-Q1-N1-C3
ggagaagtgcaaggaagcaggcggccaccagggggaagggacgcacgggacagcgcgtcaggctctacgtccggggcaccatcctcggatacaagaggtccaagtcgaaccagtacgagaccacgtcgctcgttcagatcgagggggtgaacaccaaggaggacgtcgcgtggtacgctggcaagcgcatggcgtacatctacaaggctaagaccaagagcagcgagacccgctacaggtgcatctggggcaaggtcacccgcccgcacggcaactcgggcgtcgtccgcgccaagttcaagttcaacctcccgcctgagtacatggggcgcaaggtcagagtgttcatgtacccg

SEQ ID NO: 10365 - DNA, 318 bp, Zea mays
  Clone ID: LIB3150-053-Q1-N1-C4
gtcacggctcatcttcggaccttccccagggccgcgcgatatcgctagggtttccgcgatggcgacacttcgctccccgagcccccgcggagacgttctcctcgactcggcgccgctcctcggtggtgtcgggcggcgccgcgcgggcgcgctgcgccggccgtctctccggggcgcggcgcggctgctgcggcgtggcgggcgccgagcgatgcgggagccgtcactgctggtgcgggaggccgcggcggagcagctggaggaacggcaggcggattgggcctactccccgcccgtggtggcgctcgacttactttg

SEQ ID NO: 10366 - DNA, 337 bp, Zea mays
  Clone ID: LIB3150-053-Q1-N1-C5
ggccacttcaccaagcgccccgaggggaggggagctggtgaccagggacacatgttcgggtatgcgaccgatgagacccctgagttgatgcccctcagccatgtccttgccaccaagctaggtgctcgtctcaccgaggtccgcaagaacggaacctgcccctggctcaagcctgatgggaagacccaggtgacagtcgagtaccgcaatgagggtggtgccatggtccccatccgtgtccacaccgtcctcatctgcacccagcacgacgagacagtgaccaatgatgagatcgctgctgacctgaaggagcatgtcatcaagcctgtcatccctg

SEQ ID NO: 10367 - DNA, 349 bp, Zea mays
  Clone ID: LIB3150-053-Q1-N1-C6
tcaagaccaagggcgggctcacggggacgggggcgaccaccaacgtgtaccgtcacagggacttcaaggcccacatgcggcacacccagtcggagtgctgcagccccagcgaggtgctcttctgcccggacttcgccgagtccctctactgccacctcctctgcggcctggtcctcgccgacgacgtccgcacggtgtccgccaccttcgcccacagcctcgtgctcgccttccggacattcgagcgggtgtgggaggagctgtgcgccgacatccgacacggcgctccgtcgccgacgcgggtcaccaacccggccgtccggcgggccgtgtcggcccttctcgtcgc

SEQ ID NO: 10368 - DNA, 373 bp, Zea mays
  Clone ID: LIB3150-053-Q1-N1-C7
gactgactgcctaatgaagatcctgacggggaggggttattccttcaccacgacggcagaacgggaaatcgtgagagacataaaggagaagctggcctttgtggccctagactacgagcaggagctggagaccgctaagagcagctcctccgtcgagaagagctacgagctgcccgatgggcaggtcatcacgatcggcgcggagaggttcagatgcccagaggtgcttttgcagccgtcgctgatcgggatggaagctcccggcatccacgagaccacctacaactcgatcatgaaatgtgacgttgatatcaggaaggacctgtacgggaacatcgtcctcagtggagggacgaccatgttccctggcatt

SEQ ID NO: 10369 - DNA, 353 bp, Zea mays
  Clone ID: LIB3150-053-Q1-N1-C8
gccggaagctcatcttcacccgcggggagcggtacgccgaggagtacgatgcccaggagaaggaactggtacagcttaagcgtgaggcccgtttgaagggtggtttctatgtcagccctgaggcaaagctgctatttgtggtccgcatccgtggtatcaatgccatgcaccctaagaccaggaagatattgcagcttctgcgtttgaggcagatcttcaatggagtgttcctgaaagtcaacaaagcaaccattaacatgcttcgcagggttgaaccttatgttgcatatgggtacccgaacttgaagagtgtcagggagttgatctacaagaggggctacggaaaactgaac

SEQ ID NO: 10370 - DNA, 352 bp, Zea mays
  unsure at all n locations
  Clone ID: LIB3150-053-Q1-N1-D1
ctcctcccgctccgagaaagcaaacaaggggggggtccgccggcggcctcgcgctctctcccccgccgcaccttctctacgccaggactgccaagatgaagctcgtcagattccttatgaagctaaacaatgagacggtcaccatcgagctcaagaacggcacggttgtccacggcaccatcaccggtgttgacataagcatgaacactcatctgaagacagtgaagcttacactgaaagggaagaaccctgtaacgctggaccacctcagcgtgcgaggaaacaacatccgctattacattcttcctgacagcttaaacttggagactntgctggtagaggaaacccctag

SEQ ID NO: 10371 - DNA, 368 bp, Zea mays
  Clone ID: LIB3150-053-Q1-N1-D10
tcgagcgacatcaccctcaaggactccaagagtgttgttttatgccagaagccggtcaccgtctctggcatcaggaaccccaaggagatcccgtggggtgaggctggtgctgagtatgtccaggagtccaccggtgtgttcactgacaaggacaaggctgctgcacatctgaagggtggtgccaagaacgttgttatctctgccctaagccaagatgcacccatgtttgttgtcggtgttaatgaggacaaatacacatgctctgttaacattctttccaaagctagctgcactacaaactgacttgcttcccttgctaaggtcattcatgacaacttaggcattatttagggcttgataacaactgt

SEQ ID NO: 10372 - DNA, 65 bp, Zea mays
  Clone ID: LIB3150-053-Q1-N1-D11
ggcgtctgcacaaacgccctgcacaaacggtggcccgaacccgacagatctttaatttcccattc

SEQ ID NO: 10373 - DNA, 261 bp, Zea mays
  Clone ID: LIB3150-053-Q1-N1-D12
tcggaatgaaccccttggccgtggaaccgagggaagattacatctgcgagatgaggccaaggagtacttggaagaggataagcttaaggatttggttaagaagtactctgagttcatcaacttccctatctatttgtggtcaaccaaagaggttgatgttgaagtgccagctgattaagatgaaacaagggaaaaaaaagattccttcccagaaacttccgaagaagagaccggagaagattaagaggaagattaaaaggc

SEQ ID NO: 10374 - DNA, 345 bp, Zea mays
  Clone ID: LIB3150-053-Q1-N1-D2
tagctttatctactccagagcgcagaaggggccggtcgacaccatgagggtgttgctcgttgccctcgctctcctggctctcgctgcgagcgccacctccacgcatacaagcggcggctgcggctgccagccaccgccgccggttcatctaccgccgccggtgcatctgccacctccggttcacctgccacctccggtgcatctcccaccgccggtccacctgccgccgccggtccacctgccaccgccggtccatgtgccgccgccggttcatctgccgccgccaccatgccactaccctactcaaccgccccggcctcagcctcatccccagccacacccatg

SEQ ID NO: 10375 - DNA, 321 bp, Zea mays
  Clone ID: LIB3150-053-Q1-N1-D3
gcgaccacagacagcgcgcgcttcaaggcgggtgttttttgagataacaaggaggagaggaggagatggcggtcacgatcacgtgggtgaaggcgaggcagatcttcgacagccgcggcaaccccaccgtcgaggtggacgtgggccttatcgacggcagctacacgaggggggccgtacccagcggcgcatacactggaatatatgatgccttggagttgagggatggaggatctgattatcttggcaagggtgttcttaacgctgtcaacaatgtaaataacattattggaccagcaattgttggaaaggaccccactg

SEQ ID NO: 10376 - DNA, 337 bp, Zea mays
  unsure at all n locations
  Clone ID: LIB3150-053-Q1-N1-D4
ccctcctctcgcggccacgcactcccccggctgcgcaacctctcaccgccggtccccgccctccgaccctccacgcgcaaacagcccgcctccatccaccaggatccccgatgagctaggagaagtgttgatttggatattcgtggagtgtgcaatggtggactttgttcgacggctcgcctctgccctgctcaagtgctgcgaccttgacatacccaatcggccaaagggcctcgaggaccccgaacgcctggctagagaaactgtttttaatgtgaatgaaatcgangctctgtatgagctgttcaagaagattagcagtgctgtggttgatgat

SEQ ID NO: 10377 - DNA, 372 bp, Zea mays
  Clone ID: LIB3150-053-Q1-N1-D5
cgcaacttcacagcgtatcatcggggtcgggcgctcctactcctatcatccagaaaatctgagcggtattgatggcgcccaaggcggagaagaagccggcggcgaagaaggtggcggaggaggagccctcggagaaggcggctccggcggagaaggcccccgcggggaagaagcccaaggcggagaagcggctacctgcgggcaagtccgccggcaaggagggcggcgacaagaagggtaggaagaaggcgaagaagagcgtggagacctacaagatctacatcttcaaggtcctgaagcaggtgcaccccgacatcggcatctcctccaaggccatgtccatcatgaactccttcatcaacgacatcttcg

SEQ ID NO: 10378 - DNA, 258 bp, Zea mays
  unsure at all n locations
  Clone ID: LIB3150-053-Q1-N1-D8
ttaagagcataatgcatgaggagggcgtctgtccaccttcacctcatcctcgcanccttcttccttctctccgtactcacggctgccagctccatcatcgggacctactgcgtgccaaattggtccattccgcacaacccgctccctaccttcctctacttcattacccgcctgacctttttcatcatgccgcgcctccccctccccaatctcaataggagatactgcctccatctcccccacatcctcttttactaa

SEQ ID NO: 10379 - DNA, 369 bp, Zea mays
  Clone ID: LIB3150-053-Q1-N1-D9
tcgctcccccgcctccacaacccccctcccaggagccgcccaggtacgtcgccggcggcgatgacgacgcgcttcaagaagaaccgcaagaagcgcggccacgtgtccgccgggcacggccgcatcggcaagcaccggaagcatcccggaggtcgcggtaacgccggtggcatgcaccaccaccgcatcctcttcgacaagtaccatcccggctacttcggtaaggtcggcatgcgctacttccacaagctccgcaacaagttctactgccccgcggtcaacatcgagcgcctctggtcgatggtgcccgccgacaaggcggcggaagccggcggcgacaaggccccgcagatcgacgtcacgcagttc

SEQ ID NO: 10380 - DNA, 348 bp, Zea mays
  Clone ID: LIB3150-053-Q1-N1-E1
gtaccaatagaattggccctcaaaattgcgggtgggattaaagcgggagaacgctttgcagtgtatgtaatgataccaatgtggcctgaaggagtccctactgcatcatctgtgcaagaaatccttttctttcacgcccagacaatggagatgatgtataaaataattgcagatgagctcaaggcaacggacaataaagatatgcaccctgaagattacttgaacttcttttgtcttggaaatcgggaagaaccaccatctaatggtagcccagaatcagagaaatctacagataaaagtgcagcggccttagctacgaaatatcgacggttcatgatctatgttcac

SEQ ID NO: 10381 - DNA, 375 bp, Zea mays
  Clone ID: LIB3150-053-Q1-N1-E10
cgcagcctccaaagccactcccaaaccgccgcttccagaaccttctcgaagctccccgccgcctcctccactcgcaccgatggcgaaggaaccaatgcgcgtgctcgtcactggcgccgcaggacaaattggatatgccctggttcccatgattgctaggggtgttatgcttggtgcagaccagcctgttattctgcacatgcttgacattccgccagcagctgaagcccttaatggtgttaagatggagttggttgatgctgcgtttcctcttctgaagggagttgttgctacaactgatgttgtggaagcctgcactggggtcaatgtggccgtcatggttggtggattccccaagaaagagggaatggaaag

SEQ ID NO: 10382 - DNA, 194 bp, Zea mays
  Clone ID: LIB3150-053-Q1-N1-E11
gtcgccgtcgctctgccctcgtatcccggcccacgacacccagacaccaagatgaccgggccaaccccggaggagcttgccacccaaaacgagccgcaaaagcttgaggggccaaaaaaccaagccaaagaaatttttgttgaagaataagaagaagaaaaataagaccattaccattattacaagggtgatga

SEQ ID NO: 10383 - DNA, 340 bp, Zea mays
  Clone ID: LIB3150-053-Q1-N1-E12
gtggattcttcatccgtggtcatgcctggactatggatacaatttcttttgcagtgcatttctggtcaaaaggagaggcacaagctatgtttctgcgccatgagggctttctaggagctcttggtgcatttatgagttatgagaagcatggtcttgatgacttaagggtacatcatttggttgaacgcttcccaatgggtgctccatatgttggtggaaagattcacgggccacctcttggagatctcaatgagaagatatcatggatggagaagtttgtgcaaaagggtactcagattatagcccctgtacctatgggagttccagctacgacaggtat

SEQ ID NO: 10384 - DNA, 343 bp, Zea mays
  Clone ID: LIB3150-053-Q1-N1-E2
gcgctcctcatcgaccctctcgagagattggtgtgcacgatgaggtcgcttcagggcgcgctcatcatcgccggcgtcttccaggccgtcgtcggcttcttcggcatatggagagtcttcattaggttcctgagccccctcgcggcggtccccttcgtcacgctcacgggcctgggactcttcttcttcgcgttccccggggtcaccaagtgcatcgaagtgggtctccccgcccttgtcctcctggtgatcttcgcagagtacgcctcccacgtgttcgctaaggggagcttcgtgttcagccggtgcgccgtgctggtgaccgtcgtgatcatctggatct

SEQ ID NO: 10385 - DNA, 276 bp, Zea mays
  Clone ID: LIB3150-053-Q1-N1-E3
tccagttcggctagcggggcaacgctccctgctggttctccctccctgggactcctccagtcgcggcctcccactccccagccgatttctctgcgcgcgatactccctccagtcctccctgctcgcgtcgtgaattccctgccatggacgcgcgccgagctcctcgcgcgggtctctggtgcccagccgactagctcatctcccttttctctgatggcgcgcccaagcactgctcctgcaccgtgccgcgttccagctcagactaccctgctccta

SEQ ID NO: 10386 - DNA, 383 bp, Zea mays
  Clone ID: LIB3150-053-Q1-N1-E4
gaaaaaagtaacaaagaaaacgaacaaggggtgggcagtgagacgaaaaaagaagaggaaagagcataaaaaacgaaaagataataggagaagaaaataaaaaaaaaaaaaaaaaaaataaaaacgaaaaaatacaaaaataaagaagagcaatgaatatagtagaagataattaaaaggaaaaggagaaagaaaaaaaaaagaagcaaaaaaagaaaaaagtgataaaaatgagaaaaaaaatacaggagaaaaaaaaaggacaaaaggtaagagaaggagagattgaagagaaaagaacaaaaagcagacacaaaagagggcaaaaaaaaggagatgaaagaagcttataaaaaaaagacaccaaatataaaaaaaaaaca

SEQ ID NO: 10387 - DNA, 360 bp, Zea mays
  Clone ID: LIB3150-053-Q1-N1-E5
gtcaaatttgttggcgatggctatgctcggtgtgaaacttccgggtctggtcggtgtgaaattaacaacggagggtgctggaaagataccaagaatggtcggacatactctgcctgtactgatgatggctgcagatgccctgacggactcaagggtgatggcaagcacaaatgtgaagatattgatgaatgtaaggaaaggactgcgtgccagtgcgaacaatgcatatgcaaaaacacgtggggaagctacgagtgcggctgcagcgggggcctgctttacatgaaggagcatgacacatgcataagcaaaaacggagcatcagaagccggctggggcttactgtgggccgacgtcttc

SEQ ID NO: 10388 - DNA, 363 bp, Zea mays
  unsure at all n locations
  Clone ID: LIB3150-053-Q1-N1-E6
ctcatcttttcgcgtttagaacctgtaggggttcccccactcgccagtcgcagcagcacctgtagccatggacgccagcggagccggtagcaaggggaagaagggtgcggccgggcgcaaggcaggcggccccaggaagaagtcggtgacgcggtccgtcaaggccgggctgcagttccccgtcggccggatcgggcgctacctgaagaagggccggtacgcgcagcgcgtgggcactggcgcccccgtctacctcgccgccgtcctggagtacctcgccgccgaggttctggagttggcagggaacgcggcgaaagacaacaagaagacgcgcatcatnccgcgccacgtgctcctggcgat

SEQ ID NO: 10389 - DNA, 346 bp, Zea mays
  Clone ID: LIB3150-053-Q1-N1-E8
gtccgcgccgccttttcgtccccgcgtccgcgtcgcggctccactgggcgtgcgcgtcaccggcgggaggcgagggcaggcggtggtcgcgatggcgtccgccgacgctcgcttggcggggattgcctcctccatccgcgtcatccccgactttcccaagccagggatcatgttccaggacatcacgacactgctgctcgaccccaaggcgttccgtgacaccatcgacctcttcgttgagcggtacaaggaccaagggatcaccgtagttgctggtgtggaagctagagggttcatttttggtcctcctatcgctctagccatcggtgctaaatttgtacctttg

SEQ ID NO: 10390 - DNA, 287 bp, Zea mays
  Clone ID: LIB3150-053-Q1-N1-E9
tcgaagacaattaccctttacgctgagtctgcagacaccattcataatggcaatgctaatatacaggacaaggagggtatccctcctaaccagcagggggttatctatgccgccctgcatcttgaggacggacacacactcgctgactacaacatacaaaaggagtcaaccctacaattgcttctccgccttaggggaggcatccagatatttgtcaaaacctagactggaaaaacaatcacccttgaggaggattcctcagacaccattgacaatgtcaaggcaaa

SEQ ID NO: 10391 - DNA, 326 bp, Zea mays
  Clone ID: LIB3150-053-Q1-N1-F1
ctcccatccagccgccaccaggtgcagagggtggggtcatctcttctccggcgaagaacccccagtcgcccaccagatcacttgttaaactttgttgaggggtgatggcggtttctttcgcaaacctcaacaccgaggcagggcttaaaaagcttgatgagtaccttctcactcgcagctacatcactggctaccaagcttccaaggatgacttggctgtctacacttcgttttcgtctgctccctcgtccaagtatatcaacgtagcaaggtggtttaatcacattgatgcgctcgtgaggctgagcggaattactgcaaaaggc

SEQ ID NO: 10392 - DNA, 354 bp, Zea mays
  Clone ID: LIB3150-053-Q1-N1-F10
ctcgctcgccaagagttcttcttgttgggcaaggcaaaagcagaagcaaaaaaagaaaggtcttgttgccgatggggagctcagggttctcgtggacgcttccggaccaccccaagctccccaaggggaaaccggtggctgtcgtcgtgctggacggatggggcgaggccaaccccgaccagtacaactgcatccatgtcgctcagactcctgtcatggactcgctaaagaatggcgctcctgagaaatggagactagtgaaggctcatggaacagctgtgggcctcccatctgatgatgacatgggcaacagtgaagttggtcacaatgcacttggtgctggtcgaattttcg

SEQ ID NO: 10393 - DNA, 357 bp, Zea mays
  unsure at all n locations
  Clone ID: LIB3150-053-Q1-N1-F11
cacggacggaaacccctcaaccagtcgagcccgaccccctcgaggcctcgacccgacccgacccgcctccaactccaagccaagccgccatggcggctccgcccgcgaccaccgccacgactcaccaccgcgcgctccttccgcccacgcgcacccacgccgncgttacgcactccgcactccgcctcccgctccgcgcgcattcccacgcccacgcccagcgcgcgcgcctcaccgncgtcgttgncccggcccccgcggcgtcgacggcctccctcgagtcctccgccgtggggaagcctacggtgctcgtggccgagaagctcggcgccgcggggcttgcgctgctgcgggaat

SEQ ID NO: 10394 - DNA, 273 bp, Zea mays
  Clone ID: LIB3150-053-Q1-N1-F12
gatcgctaccttgtgtcaacagtggacgtgccagatcaaaaaccattagaaaacctccgtacaattccatctatcaataacatgacgaacataacacatcaatgcatggatttataccaattctcataaggtaaattacactttgcacatatgcatacatgacaccctcaaatacctatcaaattatacaagtctacagtattctaaatcaacaaccactctctataagtgccaaaactattattcgttgacaaatgcaactctcacgaataa

SEQ ID NO: 10395 - DNA, 368 bp, Zea mays
  Clone ID: LIB3150-053-Q1-N1-F2
cgctgggccaccagctttgaccgccgcctgcctggccctccgctactgctcctcctcaccccactcccccgcaggagcggcggcggcggcggcgaggtcgtaccccacatcggcgagcggcggcggcaccgccggaggcaaaggcaagatgttcgggcgcgcgccgaagaagagcgacaacaccaagtactacgagatcctcggggtgcccaagtcggcgtcccaggacgatctcaagaaggcctaccgcaaggctgctatcaagaaccaccccgacaagggcggtgaccccgagaagttcaaggagctcgcacaagcctatgaggttttgagtgatccagagaaacgtgagatttatgatcagtatg

SEQ ID NO: 10396 - DNA, 288 bp, Zea mays
  Clone ID: LIB3150-053-Q1-N1-F3
ccttcctcgggttggaaattggaatggaggcgggggcgatggcgtggacggcggcggtggtcggggcggggctggtgtactggttcgtgtgggtgatgggcgcggcggaggtgaaaggcaagcgggcggtggatctcaagatgggatccatcacgcgggacaaggtgcaggacaagtacacccagtactggtccttctttcgccggcccaaagagacggcaaccacagcggcgtcggcggagaaagtgccggccttttttgacaccttctacaacctggtgacggaca

SEQ ID NO: 10397 - DNA, 362 bp, Zea mays
  Clone ID: LIB3150-053-Q1-N1-F4
cgaaccgcacggtgctggtgctggtgctgggggggcagaagataagaaagtggaatgatgcaacaggcgcttaaaatggaggccacggctctgtgtggttagctaagaaacaataattgttgtggatggttatgtacttgggtgatgggttgagctcattattcaagcattatattctatacgaaagccttggacagttggacaacaagattcactctcgctattacatttgcgactgcaagttcaactcccttctattcagacagaccagaccagcagcagcgattagtaatgcaactggtaaggatccggagtgtcataacaagttcaacccatcaccaaagtatatcgattctcaacac

SEQ ID NO: 10398 - DNA, 369 bp, Zea mays
  Clone ID: LIB3150-053-Q1-N1-F6
gcgagcccccccgccgcaacccgcggccgcgtcgggagacccgcagccgccgatggcgaaaaagcacagggacccagcctctgaggccgcgagcggcgactccccggccgcgtccatccgctccctcttctccgcggacaacccgttccgccggaaggcctctacggaggagccccccgcgactcctgcacccgccacgacgcccctccccatgcaacccagccgtgacgccagggatgccgagccgtcctcgaagaagaataataagagcaaggaggagggcccgcggcgcaagcggaagcgggacgagttggaggccggccgggagcggcggcgaggcgcggagaatacgtcgagagttggggagaa

SEQ ID NO: 10399 - DNA, 374 bp, Zea mays
  Clone ID: LIB3150-053-Q1-N1-F7
gtccgattcaaaccacaccgttcccggtggccgagccacgcaagccgagctcaatccccaaaggccagagccagctgctcggcgctccacgcgatggcgcacaaggagaccaatggcagcaacggcgagcacatctacacccgcccgccgacgaccccgtcgcccctccgcttctccaagttcttccaggctaacctgcggatcctggtcactggtggggcggacttcatcggctcgcacctcgtggacaggctcatggagaacgagaagcacgacgtcattgttgctgataactttttcaccggttcaaaagataacctgaagaagtggatcggacacccaagatttgagctcatccgccatgatgtcactga

SEQ ID NO: 10400 - DNA, 374 bp, Zea mays
  Clone ID: LIB3150-053-Q1-N1-F8
ggaaggccgccatggacgacgaggggcggggggtttacggccaggagatccctgaggacggcgatatggacggcgctgacgttgatatggccgccgccggggacgacgcggcgaagcttcaggagcttgacgagatgaagcgcaagctgaaggagatggaggaggaggccgccgccctccgcgatatgcaggccaaggtcgccaaggagatgcaaggaggtgaccctagtatatctacagctgaggcgaaggagcaggtggatgcccggtctgtgtatgttggaaatgttgattatgcttgcaccccagaagaagtgcagcagcatttccaagcttgtggaactgtcaacagggtgacaatcttgactgacaag

SEQ ID NO: 10401 - DNA, 356 bp, Zea mays
  Clone ID: LIB3150-053-Q1-N1-F9
gaaacagaagaggcacagcttatacccggccactgaccgcgaagtgcacagaggggggaaggaaggagagaccacgtaccgtctgcgaggaggacgacgaagaaggagaagaggctgattcgatcgagcagcatggcgcggcggccacggccgtgtgcccacctgacggccacgctccttctgctcgccgtcgccgcggcggtcgccagagccgccgacggcgacgagaagtgcggcagcccgtgcgggaacccctgcggcgagccgtgcgtgtacgcgagcccgccgccgccgccggtctactacccgccgccgccgcccgccgtgtactcgccaccaccggcgccggagtacta

SEQ ID NO: 10402 - DNA, 375 bp, Zea mays
  Clone ID: LIB3150-053-Q1-N1-G10
tcgctagttcatcacccatggcaaagttcgtgggctacaccatcatccaaggactcttgatgctttccatggtacttctggcatcgtgtgctattcatgcacacataataagtggggaaactgaacaggttagcaacacatggagcccgacagtgatggtcacgatgggggcaaaccgaaagataattgaagataataaaaatttattgtgctatctaagggctctagaatactgttgtgcaaggaccagacaatgctatgatgacataaaaaaatgcttggagcattgccgcggctgaaaggtgtaataaaggatatgctttctttggatcttagttggtgatcagaaaaatgttctacccattcatgcatgta

SEQ ID NO: 10403 - DNA, 243 bp, Zea mays
  Clone ID: LIB3150-053-Q1-N1-G11
cgagggcccatttcgccgtctttcactcgatcaccccctctcccccgtccctttcccctcagccctcagccctcagccatctccttccccctcacctcgccatggcgttcttctctcaccaccatctccagcagccacacccgcagcaggcaccgcccccgaatcagcagcagccggtgcttccttccttcaggaacgcgctaccggtgcctgtggatggccagatcccagcgcccctcacct

SEQ ID NO: 10404 - DNA, 376 bp, Zea mays
  Clone ID: LIB3150-053-Q1-N1-G12
ctcagatacccctgcaaagcacttttgcgtccaggataacgaatttggctaccaaggtcacaaataaagttcgttctcgggtcagcacagacgattatggcatagaacgggaaggtggcagtggtgagagtcattgttcggatcgtggtgcaaaggaagaaccaacatctagcggaacaaatacacctagagggaatgcaccacatggtcccttttctacagatgagaactcccctgggaaatcaacgaacccaagcagtgatgaattagaaggaaaagtaggtctgcacaagtttttgagttcaaaggcagaggcactactgaacaagaaagggatatcatggccttggaaagtgcgcgagaatgacggacctga

SEQ ID NO: 10405 - DNA, 321 bp, Zea mays
  Clone ID: LIB3150-053-Q1-N1-G3
gcgatgagacctctgaatctgatgaggagcgtgcggagaagcctgctgctaaacccttggctgcagttgcgaaaaatggttcgaagacagtcaagcaagagagcagcagcgatgaggacagttctgaagatgagtcggatgacgacagtgatgatgaacctgcaaagaaggctgctgctaaacccttgggtgccgttgctaaaaatggtttgaagaaaggcaagcaagaaagcagcagcgatgggagcagttctgatgatgagtcagacaataatgttaaacttcttgcccacttaaaaaaacatttggggcttgttcacc

SEQ ID NO: 10406 - DNA, 356 bp, Zea mays
  Clone ID: LIB3150-053-Q1-N1-G4
attaaggtcaaatttccttggcacaaaatgggtggtatacgatactcatccgccatacaatggaactagtcaaacagtggcagggaaaacaagtcagagattctactccaagaagggatcaaccaaggtttcttgcaggtggtacagtattgcacaaatctcatacgagctgaatgtcttgggaactcgaggcccaaggcggatgaactgtgtaatgcactccatcccagcttcatgccttgaggctggtggcagtgtcccttgccagccggacagcattgcagcccactctgttggcggatcattcagcagtgtgtccttgtcaaagtcatcgactatggaccactctatgcatt

SEQ ID NO: 10407 - DNA, 358 bp, Zea mays
  unsure at all n locations
  Clone ID: LIB3150-053-Q1-N1-G6
ggccgccgcccgccgcccgctgccggtgcgtgcgcctctctcgcccgcatcgccgcagggttcgcaaagatggcagtgccgctgctgacgcagaagatcgtgaagaagcgggtcaagcagttcaagaggccacacctcgaccgctacaagtgcctcaagccaagctggcgtaggcccaagggtatcgactcccgtgtcaggcggaagttcaagggatgcaccttgatgcccaacattggatacggctctgacaagaagacgaggcactaccttcccaacaagttcaagaagtttgtcgttcacaacgtctctgagctggagctgctgttgatgcacaacangacatactgtgccgaga

SEQ ID NO: 10408 - DNA, 212 bp, Zea mays
  Clone ID: LIB3150-053-Q1-N1-G7
gtcggattccccactcaccggcggcggcgggcgagcccgatccggctgctaggtcttgcacctccgggctctgggcatggctgccgaagctggcccaatctccaaggtcctcatcgtcttagcgatgcagacggaggcgatcccgctcgtgcacaatttcaaactcgtcgaggcgccaccccacgaatccacattttctaaaggtgccccat

SEQ ID NO: 10409 - DNA, 292 bp, Zea mays
  Clone ID: LIB3150-053-Q1-N1-G9
gcaaatcacaagggttcttctggagcgtggcatagtgaaccgcccccatccttgggggttacttattactttcattgaattgataaagaatccgcgttacaacttttggagccggtcttttacacactgtgcacctgagatagagaaactgttcgagtcggtggcaaggtcatgtggcgcaaaagttgtggacgaaggaatcagcgtgcaggatggcagccactaaagccatctgctttgttcaagtgtgtgttttgtgctatttcttctctggcactgggaattttctgtg

SEQ ID NO: 10410 - DNA, 261 bp, Zea mays
  Clone ID: LIB3150-053-Q1-N1-H1
cgcaggccttcccgcacacctttggccaggcgcgggtcagcttcgtcgcgccggccgccggcgccggcgccgttgaggagcgccacccgatcagggtgggcgtggtgttctctgggaggcagtcgccgggagggcacaacgtcgtctggggcctccatgacgcacttaaagcctacaatcctcagagcttgctctacggattcgtcggtggcacggagggactgtttgcaaacaaaacgttggagatcacagacgatgttc

SEQ ID NO: 10411 - DNA, 138 bp, Zea mays
  Clone ID: LIB3150-053-Q1-N1-H11
gttaatatctcccctcccttccctcttcgggtctccgccccgctccttgcctccgatccccaattcctccttcggatctcgcattcagcgcaacgcaagtgtgaaagaaaggggacgcggaagaaagatgggctcgcg

SEQ ID NO: 10412 - DNA, 366 bp, Zea mays
  Clone ID: LIB3150-053-Q1-N1-H12
tcggaaggaatctgctgagagcacgatgagggcctacaaggctgctcaggacattgcgctggctgagctggcacctacccatccgataaggcttgggcttgctcttaacttctcagtgttctattatgagattctgaactccccagacaaagcttgcaaccttgcaaagcaggcgtttgatgaagctatctcccagttagacacccttggggaggagtcatacaaagatagcactctgatcatgcagctccttagggacaacttgaccctttggacctctgacctcacggaggatggtgctgatgagggcaaagaagccccgaaaggtgaagctggtgacggacagtaatcttgggagagcgcata

SEQ ID NO: 10413 - DNA, 364 bp, Zea mays
  Clone ID: LIB3150-053-Q1-N1-H2
aacaacaacaacaacccgcacaacggcacgattgtcctcctccgtccgcgtagctctcggtttcggcgatgtcggggcgcggcaagggcggcaaggggctgggcaagggcggcgccaagcgccaccgcaaggtgctgcgcgacaacatccagggcatcacgaagccggcgatccgtaggctggccaggaggggcggcgtcaagcgcatttctgggctcatctacgaggagacccgcggcgtgctcaagatcttcctcgagaacgtcatccgcgacgccgtcacctacaccgagcacgcccgccgcaagaccgtcaccgccatggatgtcgtctacgcgctcaagcgccagggccgcacgctcta

SEQ ID NO: 10414 - DNA, 265 bp, Zea mays
  Clone ID: LIB3150-053-Q1-N1-H3
caggcaaccagctgccgagggaggaacccgggcggaacactgtgcaggtgacggcggcgcgctaccggtgacgggggatacggcggcatcgtccccctcggcccctcctccatccccggcgcggcggcgccagcagccggcctgcaggttttgcaggtttcacacttcttatcatggatgataagaacaaagtcaagaaggaaatagatggcccccttggacccccacctcgcaaggggggacttaaattcgcaccaaaagtacc

SEQ ID NO: 10415 - DNA, 79 bp, Zea mays
  Clone ID: LIB3150-053-Q1-N1-H4
tgaaaaggtgtctctcttccttctgtttgaagtgcgatccctccatcaacaatttcatcaagacacaatatgaaaaaga

SEQ ID NO: 10416 - DNA, 235 bp, Zea mays
  Clone ID: LIB3150-053-Q1-N1-H5
cgcagccgccctagcacccgcgacgagcgggatctgcccagttgctcttgcggtagttcccccaactgtcaccatgcagaacgaggagggtaagactgtggacctctatgtccccaggaagtgctcggccacaaacaggatcatcactgccaaggaccatgcctatgtccagatcaacattggccacttggatgcgaatggcctgtatgatggtcacttcacaacgttcgctctc

SEQ ID NO: 10417 - DNA, 365 bp, Zea mays
  Clone ID: LIB3150-053-Q1-N1-H6
ctcacatgctgcattttaatgaccagctgtgcagcattgaacaagatagatgacattgaagaacttctaaaagaaatggtagaaaaagatgtgactcttgggtggtctgcatacagcacacttgcttctatctatgtaaatgctggacaatttggaaaagcagaatctgctctgaagaaacttgagggccttatcagtgctcatgatgacagacagccttttgatttccttctgagcctatacgcttcactaggaaatttgagcgaggtcaatagggtatggaatgtgataaagtccaaattctcgaaagtaactaacacaagctaccttggcatgcttcacgctctttacaagctcaatgatat

SEQ ID NO: 10418 - DNA, 372 bp, Zea mays
  Clone ID: LIB3150-053-Q1-N1-H7
ggagtctgatgaagaaagaaatttgagaggggaaatcaacctcctgaaggtggatcttaaagaaatcgagggaaagatgagtaatggttctgagcagacatcggtagatgcaaaagatttgtctgagaagatatctatgttggaaagccagcttgagcagctttcaagggagttggatgacaagattcgatttgggcaaaggccacgttcttgtgcagccagggttacaacacttgcacccactagttttaggggaggaaccacaagctacaagggtggacagaccacgttctcgtggtggtatggaaccacccccaaagcaggaagaaaagatgggatttcaaggaagccgagaaaagggctcgtttggtg

SEQ ID NO: 10419 - DNA, 299 bp, Zea mays
  Clone ID: LIB3150-053-Q1-N1-H8
accttagcttctctcctatagacccaccccacccttactaggagactctctttcttctatttcgggttgcgtgccttcattaacaattttgtcactacacaatatctaaagaaatagctgtaaaagtgtctgctctccgatcggaaggcgcttcattggcttaacacactctatttaatgccctaacacttgcgacaaaccatctggcgaaggctatactcatgtgacgttgtgctttatatttttggcgtgacgaccgacgatctattattgtgtctcgatgacacaattcttttttt

SEQ ID NO: 10420 - DNA, 348 bp, Zea mays
  Clone ID: LIB3150-053-Q1-N1-H9
ggaaaaatatccccaaaccctagctccggatctcgatggcgaaccctcgcgtcttcttcgacatgaccgtcggcggcgccccggcgggccggatcgtgatggagctgtacgccaacgaggtgcccaagaccgcggagaacttccgcgcgctgtgcacgggcgagaaaggcgtgggcaagtccgggaagccgctccactacaagggctccaccttccaccgcgtcatccccgagttcatgtgccagggcggcgacttcacccgcggcaacggcaccggcggcgagtccatctacggcgagaagttccccgacgagaagttcgtgcgcaagcacaccgcccccggtgtgc

SEQ ID NO: 10421 - DNA, 356 bp, Zea mays
  Clone ID: LIB3150-054-Q1-N1-A1
gaagggagccgaggggaggaccatctactgcaaagccgacggtggcggcaggcggtgccagtacctgggctgcacgaagagcgccgaaggccgcaccgaccactgcatagcccacggcggcgggcggcgctgcagccaggacggctgctcgcgcgccgcgcgcgggaggtccggcctgtgcatcaagcacggcggcggcaagcggtgccagagggagagctgcaggaggagcgcggaggggcactcgggcctctgcatctcgcacggcggcgggaggcggtgccagttcccggagtgcgccaagggcgcccaggggagcacggggctgtgcaaggcgcacggcggcgggaagcgct

SEQ ID NO: 10422 - DNA, 369 bp, Zea mays
  unsure at all n locations
  Clone ID: LIB3150-054-Q1-N1-A10
caaaatcgcagcgcgcgaaaacgcatgagcaacccgtccactcgccaccaccggccgcgcgcacggcggcgaccgatggccccgctcgtgccgatgtcgcanccatgggtggagaaatacctgccgatgcaagtcaaggatgtggctcaccatgaggaggtgattcgcgtgctcaccaacaccctacataccgccgacctggcgtacatgctattctacggcccggcggggacgggaaagaccaccaccgcactagccatcgcctaccagctctatggtgcagagctgtataagtcaatggttttggagctcaatgctagtgatgatcgtggaattaatgtggtgaggacgaaaatcaagaactttgct

SEQ ID NO: 10423 - DNA, 380 bp, Zea mays
  Clone ID: LIB3150-054-Q1-N1-A11
cgcacaagaagctagctcctgcctgtaccgccccgtcatggcgatgctatcccgcgcagcctcctccgcggcccggcgcccgctcctgccgccgcctaggcttctggcggtgagggcgatggcgtcgtcgctcttcggccacgtcgagccggcgcccaaggaccccatcctcggcgtcaccgaggctttcctcgccgacccctcgtccgacaaagtgaacgtcggcgtcggcgcctaccgggacgacaacggccagcccgtcgtgctcagctgcgtgcgcgaggccgagcgccggatcgcgggcaacctcaacatggagtaccttccgatgggaggcagcgtcaagatgattgaagagtcactgaaactggcgtacggag

SEQ ID NO: 10424 - DNA, 138 bp, Zea mays
  unsure at all n locations
  Clone ID: LIB3150-054-Q1-N1-A12
cccacgcgtncgccgaacccgcctagggattcctaccgagggaggccgcacgcaaccatggatttcctgcaagggcaaagcgtcgagaccacagtggccgtcgccgtcctgtcccgccgtcgcgagcgggcttctctc

SEQ ID NO: 10425 - DNA, 384 bp, Zea mays
  Clone ID: LIB3150-054-Q1-N1-A2
ataagctcgaggaggtgtatgggagctatgacgccccgtcgcagaagaagaagggcttcgtgctgccgaggcctaagatgtccaacgctgacctgggcaggatcatcaactctgacgaggtgcagtctgtggtgaagccactcaacaaggaggtgaagcgcacggagaagaggaagaacccactcaagaacatggctgctgtgctcaaactcaacccctacctcggcactgcccggaagatggccacccttgctgaggctgctcgtgtgaaggccaggaaggcgaagctcgactccaagaagaccaagcttaccccggagactgccaaggttaaggctgctggcaaggcatggtacaagaccatggtctcggacagcgactaca

SEQ ID NO: 10426 - DNA, 386 bp, Zea mays
  Clone ID: LIB3150-054-Q1-N1-A3
ctcaaatcctagtgttatgcttggtgctggtcttgtggctaagaaagcttgcgagttgggtcttgaggttaaaccatgggtgaagacaagccttgcccctggatcaggagttgtcacgaagtacttgcttcagagtggtcttcaagaatacctcaaccagcaaggattccatatcgttggctatggctgtaccacttgcattggaaactctggtgatctcgatgaatccgtatcaactgccattacagaaaatgatgttgttgctgctgctgttttgtcgggtaaccgtaacttcgagggtcgtgtgcaccctttaactcgggctaactatcttgcttcaccacctcttgttgttgcttatgcacttgctggaactgttgatattg

SEQ ID NO: 10427 - DNA, 380 bp, Zea mays
  Clone ID: LIB3150-054-Q1-N1-A4
ggagttgagggatggaggatctgattatcttggcaagggtgttcttaaggctgtcagcaatgtaaataacattattggaccagcaattgttggaaaggaccccactgagcaggttgagattgacaacttcatggtccaacagcttgatggaacctccaatgagtggggctggtgcaaacagaagcttggagcaaatgccatccttgcggtttcacttgctgtgtgcaaagctggagctatggtgaagaagattcctctttaccagcacatcgcaaatcttgctgggaacaaaactctggtgctccctgtacctgcctttaatgtgattaatggaaggtcacatgctggaaacaagcttgccatgcaggagttcatgatcc

SEQ ID NO: 10428 - DNA, 361 bp, Zea mays
  Clone ID: LIB3150-054-Q1-N1-A5
gccaaaaccctagcttgcatacgcgcccgaacaaagcttcgtctgcgaggggcgtcctcctgccgccagaagctttcaggagcatcagcgatggtgtggttccaatgcgaggactgtggcgagaacctcaagaagcccaaacttgccggccacttccgctcctgctccgcgtacaagctgtcatgcatcgattgcggcgagttattcagccaggacaccgtgcaggggcacacgcagtgcatctccgaggccgagaagtacggtcctaagggacagaccaaaccatccaatggtgcacagggtaaggcagataagccaaagccaaatgcagatgtcgatatcaatgttgggctgtcgacac

SEQ ID NO: 10429 - DNA, 377 bp, Zea mays
  Clone ID: LIB3150-054-Q1-N1-A6
gcaaagcggcagtgcgtagagaggatcgtcgaacagaacagcatgaagatggtcatcgttctcgtcgtgtgcctggctctgtcagctgccagcgcctctgcaatgcagatgccctgcccctgcgcggggctgcagggcttgtacggcgctggcgccggcctgacgacgatgatgggcgccggcgggctgtacccctacgcggagtacctgaggcagccgcagtgcagcccgctggcggcggcgccctactacgccgggtgtgggcagacgagcgccatgtaccagccgctccggcaacagtgctgccagcagcagatgaggatgatggacgtgcagtccgtcgcgcagcagctgcagatgatgatgcagcttgagcg

SEQ ID NO: 10430 - DNA, 372 bp, Zea mays
  Clone ID: LIB3150-054-Q1-N1-A7
gtggcgatccatccctcaccatgtcgtcggagaaggaggcggcgctcgccgccgtgctcgatgacagcccaaccatatttgacaagatcatcaaaaaggaaataccttctactgtggtttatgaggacgagaaggtactggctttcagggacataaaccctcaagctccaacacacattctcatcatccccaaagtcaaggatggactaactggcctggcaaaggctgaagagaggcacatagaaatacttggctatctcctctatgttgccaaggttgttgcgaagcaggaaggacttgaagatggctatcgcgtcgtcatcaatgacggcccaagtggatgtcaatctgtttaccacatccacgttcatc

SEQ ID NO: 10431 - DNA, 378 bp, Zea mays
  Clone ID: LIB3150-054-Q1-N1-A8
gtgaagactccccgtggcctccgcacactgaactctgtttgggcccaacatcttagcgaagaagtgaggagaaggttctacaagaactggtgcaagagcaagaagaaggctttcacaaagtatgctctcaaatatgaaaatgatgctggcaagaaggaaattcagctgcagcttgagaagatgaagaaatatgcttctgttatccgtgtcattgctcatacccagattaggaagatgaagggtttgaagcagaagaaggctcacctgatggagattcaggtcaatggtggtaccattgctgacaaggtggactatggctacaaattctttgagaaagaggtccctgttgatgctgtcttccagaaggatgagatgatt

SEQ ID NO: 10432 - DNA, 379 bp, Zea mays
  Clone ID: LIB3150-054-Q1-N1-A9
attagctttatctactccagagcgcagaagaacccgatcgacaccatgagggtgttgctcgttgccctcgctctcctggctctcgctgcgagcgccacctccacgcatacaagcggcggctgcggctgccagccaccgccgccggttcatctaccgccgccggtgcatctgccacctccggttcacctgccacctccggtgcatctcccaccgccggtccacctgccgccgccggtccacctgccaccgccggtccatgtgccgccgccggttcatctgccgccgccaccatgccactaccctactcaaccgccccggcctcagcctcatccccagccacacccatgcccgtgccaacagccgcatccaagcccgtgcc

SEQ ID NO: 10433 - DNA, 372 bp, Zea mays
  Clone ID: LIB3150-054-Q1-N1-B1
gctagttcgggcagcgagcggggtgagacggctatggcgtgctgctccgccgtcctgcaccatccgctgggcttctcactcaccccgtgctccgcctcccgagccccaccgcgcatccagcgcgtgggcgtggcaactccctcggccgcctccgcccgccctctttctcgcgccaggatctcaccgcgctgcacctactccggtggcgccagcgctgcccctggtcctggggagctacccgcggcggcgctccgacgggtccttgagatgccgggtgcgcaccaggcgcccgcctgctacgacgcgctgagcgcacgcctcgtcgagcgcgccgagttcagggcctgcttcacgagcggtttctcaatctct

SEQ ID NO: 10434 - DNA, 370 bp, Zea mays
  Clone ID: LIB3150-054-Q1-N1-B10
cgcacagccctaggcaccaaactgcccacacgcacagccgcggagccgccagagcctgacgctgccgccgtcggccgtcctccgccctccagttcttaaggaaagatgagtttgatatcccagaacgcggtccagaagcgctgcctcagaaaaagtgaagctgataattgcaatgatgaggacattggctctccgacctctatagatgcagaagttgggaaggaagcaaaattgaagaatcacaataaggaaaggaagaagaaaaagactaagttgttggaatcccagcagaacaaagaggaagaggagatgcggcagctggagagctcattgtttggttccctttatgctccactggagtttggcactg

SEQ ID NO: 10435 - DNA, 367 bp, Zea mays
  Clone ID: LIB3150-054-Q1-N1-B11
tcttacacaacagtatctcaaaaaacccaacagacctcaacaaggagagcaaagacccgggattcgccggcgcggtagcgagagcgagagatggacgggaggatgttcggtctcgagacccccctgatggtggcgctgcagcaccttctggacgtgcccgacggcgacgccggcgcgggcggcgacaaggcgggcggcggcgggcccacgcgcacctacgtccgcgacgcgcgcgccatggcggtcaccccggccgacgtcaaagagctccctggcgcgtacgcgttcgtggtggacatgccggggctgggcacgggcgacatcaaagtgcatgtggaggacgagcgggtgctggtgatcagcggcg

SEQ ID NO: 10436 - DNA, 373 bp, Zea mays
  unsure at all n locations
  Clone ID: LIB3150-054-Q1-N1-B12
cgccgccccccaccaaccacgaaccacgcgagcgaacccggccggcgcggggcagcggcgatggcggagatcccggtgatcgacctgcgcctcgccggctcgtcgcccgacgagtcggcgcggctgcgcgacgcgtgcgagcgcctgggctgctttcgggtgaccggccacggcgcgcccgcggggctcctggccgacatgaaggccgccgtgcgcgcgctcttcgacctccccgacgacgccaagcgccgcaacgccgacgtcatccccggcagcggctacgtcgcgccctgccccgccaacccgctctacgaggccttcgggctcctcgacgccgccgcgcccgccgacgtngacgccttctgcgcgcgcc

SEQ ID NO: 10437 - DNA, 381 bp, Zea mays
  Clone ID: LIB3150-054-Q1-N1-B2
cggacgcgtgggcggacgcgtgggcggacgcgtgggctcactacccagtacccaccagtccaccacccacccagcaccactgttacatcgtgtgctccgaatgcgacgatggcggcgagctccaccagcgcgcccacgatgccggcgacggtcacgcctctgccgggctacggctaccagggctctgccgcgggcgcgggcgcgggcggcgagcctctgtacagctcctcggggtcgtcgtccatgggcaccttcttcggggtgctcgtcgcggtcgtggtgctcaccctgctgtcctgcgtcttcggccgggtgtgcgcgggccacgccgaggggcccgacgagcggtacgactgcacgaggctggccccgcggtggtgg

SEQ ID NO: 10438 - DNA, 372 bp, Zea mays
  Clone ID: LIB3150-054-Q1-N1-B3
gttcggagcgcacacacacacaaccagatctcccccaaatccacccgtcggcacctccgcttcaagatgcagatctttgtgaaaaccctgaccggcaagactatcaccctcgaggtggagtcgtctgacaccattgacaacgttaaggccaagatccaggacaaggagggcatccccccagaccagcagcggctcatcttcgctggcaaacagcttgaggacgggcgcacgcttgctgactacaacatccagaaggagagcaccctccaccttgtgctccgcctcaggggaggcatgcagatctttgtgaaaaccctgaccggcaagactatcaccctcgaggtggagtcctctgacaccattgacaacgtc

SEQ ID NO: 10439 - DNA, 383 bp, Zea mays
  Clone ID: LIB3150-054-Q1-N1-B4
cagaagccgatgcccatgcagccgcaggcgccatcgatgaccccggccgccggaatcaccacggagcagatccaaaagtatctggatgagaataagcagcttattttggccattttggaaaatcagaacctaggaaaattggcagaatgtgctcagtatcagtcacaacttcagaagaacctcttgtatctcgctgcaatcgcagatgcccaaccagagactgctgtaagccggcctcaggaaatcaactgggaggcctgcacaacctttatggccctagtatgtactaccaggcttataagaaactatgttgattcaaatcttttgcaaggtctgatagtcaccatttcttcggtgtcctaatacaatggagcagagctggt

SEQ ID NO: 10440 - DNA, 362 bp, Zea mays
  Clone ID: LIB3150-054-Q1-N1-B5
ggatccagatgtctgataagttgatggatgtttggttggatttctgcagttggagctaaggtgtggattgctagttagacattctgagttctagacatttccatctatggagtcttccttccagtgataaattattctatgcactaactttatttttaagctgtctttaacctatatgccatcatacgatggtgcaggttcactattattcttgatttaagatttttaaaacaattggttcctagtaggatgttttacctgagcgtatgaccgtatgttcatattttatagtccaaaattctcgatttctctgttagggcccatactaatgttagtctagttcttggattgcttcttgcaca

SEQ ID NO: 10441 - DNA, 372 bp, Zea mays
  Clone ID: LIB3150-054-Q1-N1-B6
ctcttagattgtgcttgtattgctcgtgcttgaggaccagaaaattaaactcttggcggtgtggtactgttgtgatttgcaagaataaaaataattggtttaaaaaaaaaaaaaacaaaaacaaaaaaaaattgacagaaaagagaaaaaaataaaacaaaactaaaaaaaaaaccgattggataaagaagcaaatcgcaaaagcccaaccagaaaaccgattaaagacggccttaagaaaataaacaccaaaaccaagggggggcgcccccggaataattgccaccccccctgcggagagcaaactttttttatttaagggggttataaaagagtggggaaaaaaagggaaaaagtgttctttggggaaaa

SEQ ID NO: 10442 - DNA, 387 bp, Zea mays
  Clone ID: LIB3150-054-Q1-N1-B8
tcagaagccgatgcccatgcagccgcaagcgccatcgatgaccccggccgccggaatcaccacggagcagatccaaaagtatctggatgagaataagcagcttattttggccattttggaaaatcagaacctaggaaaattggcagaatgtgctcagtatcagtcacaacttcagaagaacctcttgtatctcgctgcaatcgcagatgcccaaccagagactgctgtaagccggcctcaggaaatcaactgggaggcctgcacaacctttatggccctagtatgtactaccaggcttataggaaactatgttgattcaaatcttttgcaaggtctgatagtcaccatttcttcggtgtcctaatacaatggagcagaactggtgga

SEQ ID NO: 10443 - DNA, 382 bp, Zea mays
  Clone ID: LIB3150-054-Q1-N1-C1
gtaattacaaatgggcctgtcacaggaagggctggtgatgtgcttgctgctgccaacacagcagcagaagtcgcaatgcggcttgtgagacctgggaagaaaaataaggatgttactgaagcaattcagaaagttgctgctgcttatgattgcaaaattgtggaaggtgttcttagccatcaactgaaacaatttgtgattgatggtaacaaagttgtgctcagtgtctccaatgctgatacaaaggttgatgatgctgaatttgaagaaaatgaagtatatgcaatcgatattgtcaccagcactggggaggggaagcccaagttattggatgagaaacagaccaccatctacaaaagggccgtagacaagaattatcact

SEQ ID NO: 10444 - DNA, 373 bp, Zea mays
  Clone ID: LIB3150-054-Q1-N1-C10
gggtttgctcgcgtctcctccttcccttggctgctgtcgtgccggtcggcggcgacagcaagggagggaacatgtcgaagaagaacaatcttgccaagaggaagaagcagtacgagttcgacctccaacgggagaaggaggccaaggagaagcaggccaagaagctgcaagccaagaaatccaagatgaagatagatggtgctgaaaagaaacgtaaaggtggccaatttaaggtcggcaagaaaaaggtgaagacgaaactttcagccttagcaaaagccaaagccgcgcaagccatggaggtcgacaagtgactgcggagcacaagcatcatcaccttaagcgtcgagccagagttggaactctgaattct

SEQ ID NO: 10445 - DNA, 370 bp, Zea mays
  Clone ID: LIB3150-054-Q1-N1-C11
tcttggatcactagctagctctcgctcgtcgcaacaagcgaagagcttggtcgttttggttatggcggtgatgaagagcaggacggtcatcgtcgccgccgttctgttggcggttgtcattctgtcctcgctgtgtccatgctacgaagccggcggctgcatcgggaagccgcccaagacgccggcgccgaaaaggccctgcttctcgccctactccgaggaccactgtgaccgccagaactgccgcttcgtctgcatgtcgcacggttacagtgacggtggctggtgtgacgagagggaggtgcgcaaaatgtgctgctgctaccattagttagaataataacaatagcagcgtgtagtgttgtgtgct

SEQ ID NO: 10446 - DNA, 370 bp, Zea mays
  unsure at all n locations
  Clone ID: LIB3150-054-Q1-N1-C12
ggattattcatgggcatctttgcaatccttatattcctcttccttgggtccgtcgagggattcagcacaaagagtcaaccttgccactatagcaaggacaagacttgcaagcctgcccttgctaatgccatcttcagtactatagcttttgtgcttggtgcggtcacctcactggtttctggttttcttggaatgaagatagcaacttatgctaatgcccggacaactttagaagccagaaagggcgtcgggaaagcatttattactgccttccgatctggtgcagntatgggcttcctgcttgctgacaacggncttttggttctttatattgctattaatttggttggaatttattatggtgatgact

SEQ ID NO: 10447 - DNA, 133 bp, Zea mays
  Clone ID: LIB3150-054-Q1-N1-C2
ctcatctgcgtacacggtctccctcttcctgtcagtagtagagtgagagtgaggcagcgagtgggagacaaggggaaatggggaagggagccgcagggagcgatgcggcggcggcgggcggcgaagtggaaga

SEQ ID NO: 10448 - DNA, 376 bp, Zea mays
  Clone ID: LIB3150-054-Q1-N1-C3
cggcgttgcgggaggcgtacaagaagaagaacctgctgcccctcgacctccgccctaagaagacccgtgccatccgccgccgtctgaccaagcaccagctttctctgaagacggagagggaaaagaagcgtgagaagtacttccccatgaggaagtatgctatcaaggcataggtcagaactgtgagatgctgtgctttgcatatcatcggctgtgttttaatttttggtttgtatggacatttgttgtggctcggaagtacgatgtattcctctgttgccttataaatggctagattggtttgactggcaattcttattggcgttcatatttggtggcaacttctctttgtattcagctaaactatatgttttct

SEQ ID NO: 10449 - DNA, 303 bp, Zea mays
  Clone ID: LIB3150-054-Q1-N1-C4
cgtggtactatacacaaagagagggagctcgtacatgtccttctgattccttttgtggatcgagggagtggccaaccggagataatatagctagccaggctcgccatgcctcgacagaggacactaggctacgcggaagctggcggccggcttctgctcgaggaggtggccgtccttatgcgtctgttcgtgcctgccgggcgcgcggaaaccccaggtcgcgaggtcaccgagttgccttggttcacggacaaacttcactccaagcactactcacggtacttaacagttgtggacatgagc

SEQ ID NO: 10450 - DNA, 374 bp, Zea mays
  Clone ID: LIB3150-054-Q1-N1-C5
aaaaaatccacgaaccaatttctcagcagccagcagcacgacctgtgagggttcgaaggaagtagcagtgttttttgttcctagaggaagagatggcaaagggggaggggccggcgatcgggatcgacctgggaacaacgtactcgtgtgtcggcgtgtggcagcacgaccgcgtcgagatcatcgccaacgaccaggggaaccgcaccacgccgtcctacgttgccttcaccgacaccgagcggctcatcggcgatgccgccaagaaccaggtcgccatgaaccccaccaacaccgtatttgacgcaaagcggttgattggtaggaggttctcggacccgtccgttcagagtgatatgaagctatggccattc

SEQ ID NO: 10451 - DNA, 377 bp, Zea mays
  Clone ID: LIB3150-054-Q1-N1-C7
gtccgccgtcgtgcgctcgctacccctctgcctcgaggcctttgccggcgaagagcgcccagtcgcccaccaggatgaagtttgttgctgcctacctgcttgctgtcctcgctgggaactccagcccctctgccgaggacttgacagccattctggagtcagttggctgtgaagttgacaatgaaaagatggaactccttctgtcccaactgagcggtaaggacattaccgagctcattgccgccggcagggagaagtttgcttcagtcccatgtggcggtggcggtgtggctgtcgcggcagctgcccctgctgctggcggcgctcctgcagctgaggcgaagaaagaagagaaggtggaggagaaggaagaaagt

SEQ ID NO: 10452 - DNA, 385 bp, Zea mays
  Clone ID: LIB3150-054-Q1-N1-D1
cgccggatacggccgcaaggactgcgtcgcgctcctgctcgagagcggcgccgccgtgacgctgcagaacctggacgggaagacgcccatcgacgtggccaagctcaacaaccaggatgacgtcctcaagctgctggagaagcacgccttcgtatagacgtcccacgccgccggccgacccgtcttgctcgtctgctcctgtcgccgccgccgccgccacgtcgcttgcctctgctactgctgctgccgccgccgccgccattaatgctttgttgatttctctcctggtctagacaacgcaggttccttcaccacttcactgttgagtatttgcattgggtgtgtatgtatcggattttgctttgcgtgatcacggtatcatatt

SEQ ID NO: 10453 - DNA, 359 bp, Zea mays
  Clone ID: LIB3150-054-Q1-N1-D10
gtcacgaagggcacgccgaatgcgcacggcaactgtggcacggagaccggattcctcacgcctgctggcgtcgatctcctacggaggctgcttctcaccgcttatccctgcaccagttcgagttggagaagacgaacttccaccgtcttgggaccctatatcctctcctttagttaccatgcttggaagggggtctccaagattaaacatgcttgcaagggggtctcctagatttaacatgctcttatctaaaggtgcacaaaagaaaaaatctactatagctactgcttcaaagacacatggaggctctccaaaagggaaaacaagagcaaattggaattctatgttaaagaagaccc

SEQ ID NO: 10454 - DNA, 326 bp, Zea mays
  Clone ID: LIB3150-054-Q1-N1-D11
gtttgaaatgccgaaagacagccgatccgtgttgccgaaagcgcgaaactagtcttctctcctgctggcggcgtgcggaaggtcatacgccgagtcgacaagaagacatgacatgagcggcggtgctgtgttacgctctgatcgcgctgggccctgcctgtttcctcttctccggcgtccacgtcaggaagaccttgctcaggctcaccctgctctctagcaccttatttcggcttataaatttgatagttctctcggtaatatggagaggatgtcattctataaagtcacgagctcggtgggcatatgagattatgatccttaca

SEQ ID NO: 10455 - DNA, 376 bp, Zea mays
  Clone ID: LIB3150-054-Q1-N1-D12
aagcaagagcattactactgcttccgaccgaaacctttcttggaacgcaagaaggatccccaccccgaccgacctaccctaatcggcgatggcgacggtggcgatggacatctcgaagcccactccagtggcgtccggcgacgaggccgcggcggcggccaaggggaggagcggcggagggggcgaggggctgcggcagtactacctgcagcacatccacgacctgcagctccagatccggcagaagacccacaacctcaaccgtctcgaggcccagcgcaatgacctcaactcccgagttagaatgctcagggaagagttgcagttgcttcaagagcctggctcatatgttggtgaggtggtgaaggtcatgggg

SEQ ID NO: 10456 - DNA, 327 bp, Zea mays
  unsure at all n locations
  Clone ID: LIB3150-054-Q1-N1-D2
cgccgcgggagtcctaaaatgtggcaaggggaaggtgtggctcgaccccaacgaggtctacgagatctcgatggcaactcgcgtcaaaacattcgtaagctggtgaaggatggattcataattaagaagccacagaaaatccactcaaggtcccgggcaaggagggcccatgaggccaagcagaaggggaggcactcgggttacggtaaagcgcaggggtaccagngaggctaggctccccaccaaaatcctttggatgcgcangatgcgtgtcctcaggcgtctgctgcgcaagtaccgtgaaacaaaaaaaatcgacaagcacat

SEQ ID NO: 10457 - DNA, 381 bp, Zea mays
  unsure at all n locations
  Clone ID: LIB3150-054-Q1-N1-D3
taccggccctatttcaccttccgtctcaccccacggtgaggaggaggaagcaaacgtcggagcacgagcacgcgttcttcgcctctcaccccacgggagggacgggaggcgagggcgcggcgagccggcgggcgcaatcggatttggggaggcaaaaggaaaattccggagagcagttcctttccgcctccccatttcctccggatagatttgggtttggcctgcgtcgattagtccggcgctcgaacccgcaccaatccattcgccgagggatcgagcaagcgaggcgtggatcgcaggcggtattccctgcctgcctcttcttctccttcgcctgttctttgccgggtcntccccttccgccgatctggactcgacaga

SEQ ID NO: 10458 - DNA, 307 bp, Zea mays
  Clone ID: LIB3150-054-Q1-N1-D4
gtcattgtgacctctgttctattgaatggacctacagatgtatatgatcaagcagtcttgggcttgggcttaagtctcttcaattgcgagtataggaaaactccagcaagagcgatcccggtaccaagagagttgatgggagaaacaggggtcctgaagaacagaacagaggtcacaatgaccaccacacgcttgacgcaattgcccactgaatgtgtgactggggataccctggcgaggatcatgtatgatacctgttggtatgcatggaagcagaatgcagcaatcaatgaccttgtgtatacct

SEQ ID NO: 10459 - DNA, 357 bp, Zea mays
  Clone ID: LIB3150-054-Q1-N1-D5
aggatatcatgagacggcatggcgacaagagcgatcatgacatcctggcagagatggatgtcctctaccggtgcatcaaggaggcccttcgtctccacccgccgctgattatgttgcttcgccaatcacacagtgacttcaccgtgacaacaaaggaaggcaaagagtacgacatccccaagggccacatcgtcgcgacatcgccatcctttgccaacaggctgccccacatctacaagaaccctgactcgtatgaccctgatcggttcggtcctggaagggaggaggacaaggctgcaggcgccttctcatacatctccttcggtggcggcaggcatgggtgcctcggtgagccct

SEQ ID NO: 10460 - DNA, 372 bp, Zea mays
  Clone ID: LIB3150-054-Q1-N1-D7
ctgctgaccggaccatctctgaaacggtggcaggaagagggggccccaagaagagcaggcggtcggcgctggtgggctggttcggggagaaggacgtgaaggcggagcgggtggtgtacaccgccgacttcaccgtcgacgggtccttcggcgagccgggcgcggtcgccgtgctcaaccggcaccagcgcgagttcttcgtcgagagcatcgtggtggagggctttccctccggccccgcgcacttcacctgcaactcgtgggtgcagcccacgcgcgtgcaccgcgacccgcgcgtgttcttcaccaacaagccgtacctgccggcgcagacgccgccggggctgcgggagctccgccgcctggagctca

SEQ ID NO: 10461 - DNA, 142 bp, Zea mays
  Clone ID: LIB3150-054-Q1-N1-D8
taaggcttcattttgggctgatcccagcgatttccaagacatatttgacgtggactacttcatagcgtcgctgagagacgaggtccggatcctgaggcagctgccgccgaggctcaagagaagagtggagaatggatccctt

SEQ ID NO: 10462 - DNA, 375 bp, Zea mays
  Clone ID: LIB3150-054-Q1-N1-E1
ggagagccgcgacgtcggccacggcttccgctgcgtgcgcatggtcaacaacatctacctcaacttcgacgccttccacggcgacaaggaccacggcggcgtgcgcgacggcaccaacatcgtgctctggaagtggtgcgagggcgacaaccagcgctggaagatcgtcccctggtaaatgtgctgttctgtggctgcactggtcatcaccatgatctggagctttgaaggcatagccacctgtggtcagcaactgctgccgtgttgttagaataaagttggtggcgatcgatcgatcctgggggatgagtgtccctatctgtgtgtctgtgtttagttccagtcgtctgtgaggaagtcagttatgtttgagtg

SEQ ID NO: 10463 - DNA, 372 bp, Zea mays
  Clone ID: LIB3150-054-Q1-N1-E12
ctccttttctccatgtggcattttttacaggaatgaaagatgggagaggttcatggagtctgagagagaaaagagcaatggagaatgccatggtggcagacatgcatctgacgttatgaacaaacgaatgacaaaccaccgtggtggttggcggggtgctggatcccgtggccatctgaggaacttccgaggtccaagaatgcgcaatgagtttgctgatgaatctattggtggcaacaggcactcatttgaagatgaacctgggcacacccgaggtccacataggaggcggcattcaccaccacatggctgcctcatgagagatacggacattgacgaattctacggaagagagattccagagtataggct

SEQ ID NO: 10464 - DNA, 301 bp, Zea mays
  Clone ID: LIB3150-054-Q1-N1-E3
tacacgtggggcttgtccgagactcctcgagagacgctggcgcaagcagatatgatgcagtgctctatgtgtaaggacaggatagatggcgatcatatggtgcttaactctatatactagataccgatagatgacgtaggcgagacactatattaagaattgcattgccacacatgctcatttgcatgccattcatggaaattggatgcagatacagatttgcacttttggtaagccgcatttggaagtgacaacatgtgcaggtgaccataatgtgatgactaaaccttaactgcatgct

SEQ ID NO: 10465 - DNA, 306 bp, Zea mays
  unsure at all n locations
  Clone ID: LIB3150-054-Q1-N1-E4
ggagggcaacggtgagctacctctggagggaacaatgcctgatatgacttcccttactgagtattatgtaagcctacaaaagatttaccaagctaaggcagaatttgactgtcttgccctggagcatcatgtaaaggaaatcttaaagaggattggtagagatccggattcaatttcaagagcatatatcaaaacattttgtaaaaattctagaaaactaagggtttctaggtatcgtagttttgaggaggaatntagctctccgtttgtctctgagattcagaggtatttcaccgatgaagacta

SEQ ID NO: 10466 - DNA, 375 bp, Zea mays
  Clone ID: LIB3150-054-Q1-N1-E5
gccatcctccgccgcctccgtctctgcttgcctagagccgtcgcgatggcagcagcccctgccggtgcccctgcaatcaccgcatcctcctcctttgtttcttcgtctccgttctgtctcaaggcatcgatgaccagccagcgccgacccgcggggagagtctccatcgtcatccgctgcgtcagtagcccgccggccgtcgacacatctttcaagactaatgtcccgcgcaatgctaatatggccaaactccaagcaggatatttgtttcctgagattgccaggagaagagccgctcatttgctgaagtttccagatgccaaaattataagccttggaataggcgacactaccgagcccattccaaatgtcata

SEQ ID NO: 10467 - DNA, 376 bp, Zea mays
  Clone ID: LIB3150-054-Q1-N1-E7
tgcagtgcgtagagaggatcgtggaacagagcagcatgaagatggtcatcgttctcgtcgtgtgcctggctctgtcagctgccagcgcctctgcaatgcagatgccctgcccctgcgcggggctgcagggcttgtacggcgctggcgccggcctgacgacgatgatgggcgccggcgggctgtacccctacgcggagtacctgaggcagccgcagtgcagcccgctggcggcggcgccctactacgccgggtgtgggcagacgagcgccatgtaccagccgctccggcaacagtgctgccagcagcagatgaggatgatggacgtgcagtccgtcgcgcagcagctgcagatgatgatgcagcttgagcgtgccgc

SEQ ID NO: 10468 - DNA, 368 bp, Zea mays
  Clone ID: LIB3150-054-Q1-N1-E9
tcaccaaccaaactccactgtctccaactctccatcgcgtctgctacgcctctcctgcaggacgaccaatggcttccaggaagttcttcgtgggtggcaactggaaatgcaacggtactggcgaggacgtgaagaagatcgtcaccgtgctcaaccaagccgaggtgccctctgaagacgtcgtcgaggtggtggtgagtccgcctttcgtttttctgcagcaggtcaaggggctgctgcggctggacttcgccgtcgcagcgcagaactgctgggtgcgcaagggcggcgccttcaccggcgagatcagtgctgagatgctggtaaacctgcaggtgccctgggtcattttgggacattctgagcgc

SEQ ID NO: 10469 - DNA, 371 bp, Zea mays
  Clone ID: LIB3150-054-Q1-N1-F1
acgggctgtttatacctgagacaccacatgagctgggaacctgacgcgctgaacgacagcatgacattccggagccactggacaagctcgacgccgtatgcaaggtatcctgacatgttgcatcaaagcctaatcccaatgatctcgtgcacacagcttaccttcatgtgcgctgagactccatcctgatcatggacaagaggagcgtgactattctaatatgcagcaatccggtgtggaaaatactgaagctgatctgctgactaatcttgtgcctggtcaatcttgtgaacactatcatgatgcatccctgcattctagtggtgctggtacagagcacacatcgctagatctcactcaacttgctagag

SEQ ID NO: 10470 - DNA, 336 bp, Zea mays
  Clone ID: LIB3150-054-Q1-N1-F10
tccattctcagccgccgccaatcccttcccgtgctccgcaaccgctgagtgagaagaagagatggccggcaagggcgatggcccggctatcggcatcgatctcggcacgacgtactcttgcgtcggcgtgtggcagcacgaccgcgtcgagatcattgccaacgaccagggtaaccgcaccacgccctcgtacgtcgccttcaccgactccgagcgcctcatcggagatgcggccaagaaccaggtcgccatgaaccccatcaacaccgtctttgatgccaagcgtctcatcggcaggaggttcagtgatgcgtctgtccagagtgatatcaagct

SEQ ID NO: 10471 - DNA, 351 bp, Zea mays
  Clone ID: LIB3150-054-Q1-N1-F12
caaaaaccctcgctccccacaacccgacggcgaccacgccgtcgcctgtaccagcggcgtcaagatgagtcggcaccctgaagtgaagtgggctcagaggatcgacaaggtttacatcactgtacagttacctgatgccaaggacgctaaggtcaatttggaaccagatggtgtcttcacattctctggcagtgttggtacaaacttatatgaattgaaactagatctgaatgacaaagtaaacgttgaggctagcaaaataagtgtgggtgtcaggtccatattctgtattgtagaaaaagctgaggccaaatggtggaagaaacttgttcgagatgatcaaagggcacc

SEQ ID NO: 10472 - DNA, 245 bp, Zea mays
  Clone ID: LIB3150-054-Q1-N1-F2
cttgtttaccattcctccccaaaacacatgctgcgatcctcgaagcctccgccgagcatcgatcatgtcggcctactgcggcaagtacgcggatgagctcatcaagaatgctgcctacatcggcacccctggcaagggtatccttgctgctgatgagtcaactggcaccattggcaagcgcctttccagcatcaatgtcgagaacgtggaggagaaccggcgggctctccgtgagctcctgttct

SEQ ID NO: 10473 - DNA, 360 bp, Zea mays
  Clone ID: LIB3150-054-Q1-N1-F4
gttgcagagtccagacgccagacgccctgtacttctctctagttagtgtacatttcaaactcttggccgccgcctcgctctctgttcgccgcgccccgccgcagaaatggcgctgccgaatcagcaggttgtggattaccccagcttcaagctcgtcatcgttggcgacggtggaactggtaaaaccacatttgtgaagaggcatcttactggcgagtttgagaagaaatatgagcccaccattggtgttgaagttcaccctctggattttagcactaactgtggcaaaattcgcttctattgctgggacactgctgggcaaaaaaagttcggtggcctcagggatggctactacattca

SEQ ID NO: 10474 - DNA, 374 bp, Zea mays
  Clone ID: LIB3150-054-Q1-N1-F5
cgttcttcgttgcattttctggtctgacagagcaaatcaagttagaccgttatcttcagcctcatttccgctactacatgagggaagtgcgcaccgtggtatactcacagttcttagagtcatacaagagtgtgacaatggaagcaatggccactgcgttcggtgtaactgttgatttcattgaccaggaactgtcacggttcattgcagctgggaagctgcactgcaagattgataaggttgctggtgttctggagactaaccgacctgatgagaggaatgctttctaccaggcgaccatcaagcaaggggacttcttgctgaaccgcatccagaagctttcacgggtcattgacctgtaaggactgtttgtg

SEQ ID NO: 10475 - DNA, 380 bp, Zea mays
  Clone ID: LIB3150-054-Q1-N1-F6
ctcgcccaccactacaccaccggcggcggcggcgacccagtcgagaacacgaaggcgatggcgacagcgctgaaccgcgggctccgctccgggctccgcctcctcgccgccggcgccgaggcgtccaagccagcttctcgtggattccatgccaccggcgtgaagagaatgggagggcatggccatgatgagccatactacatccatgccaagcacatgtataacttgcacaggatgaagcatcagggtttgaaggtgacactctccgtgctgggagcggttggcatcggtgttggagtccctgtgtatgcagtcatattccagcagaagaagactgcctctggctgagatgatgcctctcgctgcctgcatatggagac

SEQ ID NO: 10476 - DNA, 376 bp, Zea mays
  Clone ID: LIB3150-054-Q1-N1-F7
gcagcctccaaagccactcccaaacccccggttccagaaccttctcgaagctccccgccgcctcctccactcgcaccgatggcgaaggaaccaatgcgcgtgctcgtcactggcgccgcaggacaaattggatatgccctggttcccatgattgctaggggtgttatgcttggtgcagaccagcctgttattctgcacatgcttgacattccgccagcagctgaagcccttaatggtgttaagatggagttggttgatgctgcgtttcctcttctgaagggagttgttgctacaactgatgttgtggaagcctgcactggggtcaatgtggccgtcatggttggtggattccccaggaaggagggaatggaaagga

SEQ ID NO: 10477 - DNA, 322 bp, Zea mays
  Clone ID: LIB3150-054-Q1-N1-F8
gcgacgacgagcacaggcggtggcagggcggcagcggcgtgcgatcccaagccgctggtggtgtgcgatccggcgttcatggacggagcgaaacccgcggcagcatgctgctccaccctgcgtgcgcaggaggcatgcttgtgcgtgtacgccaaagaccccaagtttgcaaaatacatcaacaaccccaacaccgccaaaacctttacctcgtgcggcatagccatccccaaatgctaagcaagcgctctgcgtcgtcgcttcgcttgctcttgctcttgtgtgtaacatatccagcttatgaataaattatgtggatcag

SEQ ID NO: 10478 - DNA, 372 bp, Zea mays
  Clone ID: LIB3150-054-Q1-N1-F9
ccgacggccagttcgccctttccggctcctgggatggagagctccgcctctgggacctctccaccggcctcaccacccgccgcttcgtcggccacgagaaggatgtcctctccgttgccttctccgttgacaaccgccagatcgtctccgcgtcccgcgacaagaccattaagctctggaacaccctcggtgagtgcaagtacaccatcggaggtgacctcggtggcggcgagggccacaacgggtgggtctcctgcgtcaggttctccccaaacacatttcagcccaccattgtctccggttcctgggaccgcaccgtcaaggtctggaaccttacgaactgcaagctgcgctgcactctcgatggtcatg

SEQ ID NO: 10479 - DNA, 382 bp, Zea mays
  Clone ID: LIB3150-054-Q1-N1-G1
cgcatcctccgcgccgagaagaccggtcacagcggcgcgctcgaccccaaggtcacaggcaatctcatcgtctgcatcgaccgcgccacgcgcctcgtcaagtcgcagcagggcgccggcaaggagtacgtctgcgtcgcccgcttccacgccgccgtgccggacaccgcgcgagtggcccgagcgctagaggcgctcactggcgccgtgttccagcgcccaccgcttatctctgcagtcaagcgccagctcagggtgcgaacaatctacgagagcaagctcctggagcacgatcccgagcgtcaccttgccgtgttctggatctcctgcgaggcaggtacctacgtccggactctctgtgtgcaccttgggctgctccttg

SEQ ID NO: 10480 - DNA, 378 bp, Zea mays
  Clone ID: LIB3150-054-Q1-N1-G10
ggactcagcatataagaatactgtagagagcatcactggaatgatatcgaaaactatttcaaagaagggtatgcttgaagtgtataactctctgactgaagaaggaaagaagcagtttattgaggcctatagtgcagcatattacccatgcatggacatattgtatgagtgctatgaagacgtctcttctggaagtgagattagaagtgtggtgttggctgggaggagattttatgagaaggaagggctccctgctttccctatgggaaaaattgatcaaacacgtatgtggaaggtgggtgaaagggtccgttcaaccaagccacaaggtgatcttggcccactgcatcccttcactgccggagtgtatgttgcatt

SEQ ID NO: 10481 - DNA, 348 bp, Zea mays
  Clone ID: LIB3150-054-Q1-N1-G11
atatctcctcgcattttacttgcaaccgattgcctatccccctcccaaccaaagaccgatggcgcccaaggccgagaagaagcccgcggcgaagaatccggtggaggaggagcccgcggccgagaagacgaccgccgggaagaagcccatggcggagaagcgggtacccgctggcaagtccgccggcaaggagggctgcgagggcaagcgtggcaagaagaagggcaagaagagcgtggagacgtacaagatctacatcttcaaggtgctgaagcaggtgcacccggacattggcatctcctccaaggccatgtccatcatgaactacttgatcaacgacatcttcga

SEQ ID NO: 10482 - DNA, 370 bp, Zea mays
  Clone ID: LIB3150-054-Q1-N1-G12
gcagattcttcttcctgtggaaagtaacctgcagtactatgaaatttctgccaagagcaactacaactttgagaaacctttcctgtacctcgcaaggaagctggctggtgatccgaaccttcactttgttgaagctgttgctcttaagcctgcggaagttaccatcgacatggctatgcagcaccagcatgaagctgagcttgctgcagcagctgcacaacctcttcctgatgacgatgatgatctgattgagtagaaaggatcatgagtcttgaacttgagcaagagttgtgccttgcgtgttttaagttgttctaaggtgaactcttgagttctcattgtctggatcatctttttctactttgatgtg

SEQ ID NO: 10483 - DNA, 326 bp, Zea mays
  Clone ID: LIB3150-054-Q1-N1-G2
cttccagtgtccgccgtcgtgcgctcgctacccctctccctcgaggcctttgccggcgaagagcgcccagtcgcccaccaggatgaagtttgttgctgcctacctgcttgctgtcctcgctgggaactccagcccctctgccgaggacttgacagccattctggagtcagttggctgtgaagttgacaatgaaaagatggaactccttctgtcccaactgagcggtaaggacattaccgagctcattgccgccggcagggagaagtttgcttcagtcccatgtggcggtggcggtgtggctgtcgcggcagcttgccctgctgctg

SEQ ID NO: 10484 - DNA, 375 bp, Zea mays
  Clone ID: LIB3150-054-Q1-N1-G3
ggttcgccaaaaggttcgagacgcgcaccgccagccgatacgaatccgacgagctcgatcgctccacttccccgatcgcacgccaatcagcaccagccaccgtggcgatgacggaggaggcggaggcgaaggcgaagggcaacgcggcgttcgcggccggccgtttcgaggaggctgtccagcacttcagcgacgccatcgcgctcgcgcccgacaaccacgtcctctactacaaccgctcggcggcgtacgcgtcgctctggcgctacgcggaggcgctagatgacgccaagcggaccgtggcgctgaagccggactgggccaagggctactcccgcctcggcgccgcgcaccttggactcggtgacgcgccca

SEQ ID NO: 10485 - DNA, 378 bp, Zea mays
  Clone ID: LIB3150-054-Q1-N1-G4
ctcaactcccaaggtcccttttttttctcgatctggaagcgccgcagtagcagccatggacgtgagcggagcaggcgggaaggcgaagaagggcgcggccgggcgcaaggccggcgggccgacgaagaagtcggtgtcgcggtcctccagggccgggctgcagttccccgtcagccgcgtcgggcggtacctcaaaaagggccggtacgcgcagcgtgtaggcacgggtgcccccgtctacctcgccgccgtcctggagtacctcgcggccgaggtgctcgagctcgccggcaacgcggcaagggacaacaagaagacgcgcatcatcccgcgccacgtgctcctcgccatccgcaacgacgaggagctcggcaagct

SEQ ID NO: 10486 - DNA, 324 bp, Zea mays
  Clone ID: LIB3150-054-Q1-N1-G5
gaaggcttcaatgccataaccactgctttggttaaacatgccacgaacagacccattatcggggggcctttcttgatgcagcctgcacgcctgctccagttcatatagatttctatgcccgataagccttacaggctttacatgacaccagcctgcctcatgtagtacaccggagctaaggaccatccctcgcgcgcttttgtcatagacacccagtgcttgatgctaactgatatctcccagaactgacagcgtgcgtgcctgtatcacatctatgagaacatatgcaaggtcatctaacttgtgaagcacctgaaagacaac

SEQ ID NO: 10487 - DNA, 382 bp, Zea mays
  Clone ID: LIB3150-054-Q1-N1-G6
gcgagcagccgccgccgggcaagaaggcgggcggcgggggcggcggcagcgatagcggcggcggtggcagcacgagcaagtcgcgcgccattggcaagatgttcttcaagaccaagctctgctgcaagttccgggccgggacctgtccctacgtcaccaactgcaacttcgcgcatggcatggaggagctccggaagccaccgcccaactggcaggagatcgtggccgcccacgaggaggccacggagcagcgggaggagcaccagatccccatcatgacatctggaagtgttgtagctggagacggcggcggtggcagtggtggcggctcgcaagggggcagggcattcaagggccgtcactgcaagaagttctacactga

SEQ ID NO: 10488 - DNA, 377 bp, Zea mays
  Clone ID: LIB3150-054-Q1-N1-G7
gtgggctcgtccgagtctgccctgctcgcggagctgggtatccgccccttctcgtatggcctccaggtcaccagtgtctacgaggatgggtccgtgttcagccctgaggtgctcgacctttccgaggaggacctgattgagaagtttgccactggtgtctccatggttgcctccctgtcactggcgatctcatacccgacccttgctgctgtgccccacatgttcatcaatgggtacaagaatgtgcttgctgttgctgtcgagacagactactcatacccacatgctgacaagatcaaggagtacctcaaggacccaagcaagtttgctgttgccgccccggttgctgctggtgactctggcgctgcagctgctcc

SEQ ID NO: 10489 - DNA, 387 bp, Zea mays
  Clone ID: LIB3150-054-Q1-N1-G8
cttgctttcactctccagggccgcactccgacctcgccgccgcagccatggcgatcacagcgccaactcccgacatcctcggcgagcgccagtccggccaggacgtccgcacgcagaacgtgatggcttgcggggcggtggccaacatcgtcaaatcctcgctcggccccgttggtctcgacaagatgctagtggatgatattggtgatgttacaatcactaatgatggagcaaccatacttaagatgttggaagttgagcatccagccgccaaggttcttgttgagttggctgagctccaagatcgtgaggtaggagatggaactacttccgttgtcatcatagcggcagagttactcaagagaggcaatgatcttgtgaagaata

SEQ ID NO: 10490 - DNA, 374 bp, Zea mays
  Clone ID: LIB3150-054-Q1-N1-G9
cccaagccaacaagcaagaccgcttctgcttgtgatccgaaacctttcttcgaacgcaaaaagaaccccacccgacgtaccgcgagccggcgatggcgacggtggcgatggacatctcgaagcccacgccggcagcgtccggtgacgaggcagcggcggcggcgaaggggaggagcggcggcgggggcgaggggctgcggcagtactacctgcagcacatccatgacctgcagctccagatccggcagaagacccataacctcaaccgcctcgaggcccagcgcaacgacctcaactcccgagttagaatgctcagggaagagttgcagttgcttcaagagcctggctcatatgttggtgaggtggtgaaggtc

SEQ ID NO: 10491 - DNA, 318 bp, Zea mays
  Clone ID: LIB3150-054-Q1-N1-H10
tttgcttacacggtctacctctttctgtcagtaatacaatgagagtgtggcaaccagtgtgacacaaggagaaatggcgaacgtagcgcatgggagcgatgcacctgcggcggcctgcgaggtggaggacaacatggcggaataagtgcttgccaagaacaccctcaagatcatgcccttcaagctcccgcacgtcagcctttatgatgtcctcgtgcgcatgatcgcagtggagatctgcggtagcgatgtgcactacctaacggagatgcgcatcgcgcacttcacagtgaaggaaccgatggtgatcgggcacga

SEQ ID NO: 10492 - DNA, 372 bp, Zea mays
  Clone ID: LIB3150-054-Q1-N1-H11
agttaatatatgagacaataggttgcaccaaataaatagtggccaaatacaaattaatttgataacatagctcacaatcacagcatcctcgtactagcttggattgtgataacatagataataaactactcaggactagcaaattattggaagtttttttgccatcgtgcaccactccaatcgatccttcttccgttgtccctactaaacctgctgaactcataccagctgatccttctgcacctgcaccaagtagtgcaaacaacgttcgtacaccagacacaaacaataagaaagacaatatgccagcaaactatattagctcttacactctaaggaatgctgtgacaagacatgtgcaggcaaggggca

SEQ ID NO: 10493 - DNA, 362 bp, Zea mays
  Clone ID: LIB3150-054-Q1-N1-H12
cgccgacgtatgccagacgccgtgcccttgacgaaagcttgggcctcctccttgtatctccactccccccttcacagatccgttcctccagctagggttagcgttcctctgcagcgatggcgatcaagcggaccaaggcggagaagaagatcgcgtacgacaagaagctgtgcagcctgctcgatgagtacaccaaggtgctcatcgccctcgccgacaacgtcggttccaagcagctccaggacatccgccggggcctcaggggcgactcggtggtgctcatggggaagaacacgctcatcaggcgctgcatcaaggtgtacgccgagaagaccggtaaccacacctttgacccgctcatg

SEQ ID NO: 10494 - DNA, 244 bp, Zea mays
  Clone ID: LIB3150-054-Q1-N1-H2
ctggtacctcccaggctgactgtgctgtcgttatcattgactccaccactggtggttttgaggctggtatctccaaggatggccagacacgtgagcatgctctccttgcgttcacacttggagtgaagcagatgatttgctgctgcaacaagatggatgcaaccactcccaaatactccaaggcacgttatgatgagattgtgaaggaagtctcatcttacctcaagaaagttgggtacaaccc

SEQ ID NO: 10495 - DNA, 384 bp, Zea mays
  Clone ID: LIB3150-054-Q1-N1-H3
ctatactgctaccacatagagaaagtgtgaaaatacaagacttccagctctttgacaaccatattgctgtatatgagcgtgagaatggccttcccaaagtgatcgtatatcggctacctgctattggagagtcaattggacaactccagggaggtcgagcgattgattttattgatccaacatatgctgtggaccctgaggagtctcagtttcattcatctgttctacgatttcattatagctcaatgcggactccaccctctgtttatgactatgatatggattcaggggtgtctgtgctgaagaagatccatactattttaggcggattcaatgcatcaaattatgtaacagaaagaaaatgggctgctgctgctgatggca

SEQ ID NO: 10496 - DNA, 373 bp, Zea mays
  Clone ID: LIB3150-054-Q1-N1-H5
cagcaccgtcccgtccacctgaccacctggaccattttttcctcttcctcctcgcctccaccccttcccttccatctcttctcacctggccactcctctccctctctcccgcgccgatcgattggcccacccatcgatcgagcacgggaagaagattccagtccggagaggtctcaattcgatcgggctcgttctggtgtgggtgggcaccatggcggccacggaggcctcggcagacaagaacgccgtcttccgcaagcttcgcaccaaatcagacaacaagatgtgcttcgattgtaacgccaagaacccgacgtgggcgtccgtcacctacggtgtcttcctctgcatcgactgctcggcggtgcaccgc

SEQ ID NO: 10497 - DNA, 388 bp, Zea mays
  Clone ID: LIB3150-054-Q1-N1-H6
cgccgcgcttcgccctctcgctccagccggttcacagcgccgccgctcgcctctccgaccgccgcgagaatgccgttcaagaggttcgtggagatcgggcgcgtggccctggtgaactacggcaaagactatggccgcctcgtcgtcatcgtcgatgtggtcgaccagaacagggcacttgtggacgcccctgatatggtcaggtgccagattaacttcaaacggctctcacttactgacatcaagattgacatcaaacgcgttcccaagaagtcaaccctgatcaaggctatggaggaagctgatgtgaagacgaagtgggaaaacagctcatggggcaagaagctgattgtccagaagaggagggctgcgctcagtgactttgaca

SEQ ID NO: 10498 - DNA, 376 bp, Zea mays
  Clone ID: LIB3150-054-Q1-N1-H7
gcgtgggctcgcggatgcggcggtggcacgggcggcgcgtgggctcgcggctgcggctgcggctgcgcggccgtcggtgatggaggcagggcacagcgggcaggtgcagcaagctcggggcatcgtggtgcaggtgagggacgggaatctggagccggcgctgtcgatcatggagcgcaagatgcggtccagcggcacggagcgcctcatccgggcgcacacccttctcgacatcaaggactcggagaaccgcttgctcgcgcttaaggagcttatgcagcgtgtccgttcccaggagctcatgctccgcaagatcgtcatcaagcagatcagaaccatggaggaggataatgcagactggtgcgatgaaaatgtt

SEQ ID NO: 10499 - DNA, 374 bp, Zea mays
  Clone ID: LIB3150-054-Q1-N1-H9
ctggctcccccgaggcaatcgagtaatcgacgaaggccaccaccacctccacaccactttgcctcgagaaggttccaccaagcctctcggttagggtttggggactttgggggcgatcgcaatggagggccgcggcgcggaacaagcacccgaggcggcggcggaggtgaaaaatccgaggtgcttcatggacgtcaccatcggcggcgagatggaggggaggatcgttgtagagctctacgcttccgtggtaccgcggacggcggagaacttccgcgcgctctgcacaggggagaaaggcatcggcgccgccagcggcaagccgcttcactttaagggctcatgcttccaccgtgttattaaagggtttatga

SEQ ID NO: 10500 - DNA, 355 bp, Zea mays
  unsure at all n locations
  Clone ID: LIB3150-055-Q1-N1-G3
ctcatacagccgccccccctttttttttttttttttttttcattttttttcgggggttttnncgggaatgaacgaaataatataaccttgtttgcttttcaccgtcgccataaaaggcaaacaattccccaacttttttcttaaatcccccaccccccccagctttcaaattgaaaaaaaacctttttgccctcccccagggtggaattcgcaagacgttaaattaaaccccccccctttgggggcccctggtgctcccaaaaaaattaaaaccagcccaagtttctcgacccttttctcttttctatgggccaactagctttttaaccttcaaaggtctttcaagcttttccac

SEQ ID NO: 10501 - DNA, 249 bp, Zea mays
  Clone ID: LIB3150-056-Q1-N1-A1
cccgtcatcgatctcgtttcaaatccatccatcctcgtttcctccgtcccgcagcatctcaaccccatggccaagatcaagatcgggatcaatgggttcggcaggatcggaaggctggtggccagggtggccctgcagagtgacgatgtcaagctcgtcgccgtgaacgaccccttcatcagcaccgactacatgacctacatgttcaagtacgacactgtgcacggacagtggaagcaccatgaagtc

SEQ ID NO: 10502 - DNA, 233 bp, Zea mays
  Clone ID: LIB3150-056-Q1-N1-A10
atcgtttcgaatctagtatactttcgcgcttatcatcatgtacggtttccgcacgagcgtttgtatgaggcgtgtcctaacattgcgcccggatcctacccatgacgcacgacccaggcagccacaagaggaggcgcgacgcagcagacgcactataccaataccactggctattcattcattgccttgaactacacagttagaatgatcatcgcatgtgacactggatcctc

SEQ ID NO: 10503 - DNA, 275 bp, Zea mays
  Clone ID: LIB3150-056-Q1-N1-A11
cgcgggtgttgtcgggactccatgcctgatgccttccaccagaggtggtgctggtgggagcaagagcccaaatgatccaaccggctgaccttaaagactgaccaccgaccaagctggaccactggtaatgcaggccaaggactgaccctgctgactgggactgacatgacaactccctgagaccagagcaaggggacttaaccatgacttggttgacgccgctacaccacacatgtaactagcccatagcactagccaaagcgtaatgactcagc

SEQ ID NO: 10504 - DNA, 152 bp, Zea mays
  Clone ID: LIB3150-056-Q1-N1-A12
ctcaaaccgtcgcagccgccaaaccgatggttggtggatggattatgatgatacgcaataggtacggcatgcgttctacacacgcaggacgtagggagccgagctttaagcacgaatgcggacatgctactcacaagacacttgcctatcta

SEQ ID NO: 10505 - DNA, 301 bp, Zea mays
  Clone ID: LIB3150-056-Q1-N1-A2
cttctcgtcacccccttcactttactcttccctcacttctggccgcagctttgagctcagtagcaaacaagaagcagcaagatagtgatcctccatgggaaacaccctcggctttggcgtaggtgtcggcctcggcctcggcctcgccgtcggcgccgctgctctgatccaggcttttggtccgaaaattgacgaggaagtggtggtttctcagtatcaatgcaacaccgaggacattgacgagttgtctgccgaggagctgcgcgatgcgatgagctatgtgatgcacaatccgatgctg

SEQ ID NO: 10506 - DNA, 299 bp, Zea mays
  Clone ID: LIB3150-056-Q1-N1-A3
cgcgaggcgaaccaaaccaacccactctccccaatcccgcgcgcccaggccgccagccctaccaaccatcggcgtcggcaatggcggacatggcgaccaatgccgccgcgggcaccgtgtcgctggacctcgccgcgccgtcgcgccggcatgatggaacaaggtctgggcggctggacttccggtccgtccctcatggtctgcgggctgctgggcgcaccgtgatcgacgaggccactgatgatgccacagatgatgacgcctaacatgatgtcaccattgatgatgtcgagcatgat

SEQ ID NO: 10507 - DNA, 323 bp, Zea mays
  Clone ID: LIB3150-056-Q1-N1-A5
tcttttaaagtgaaccaacccgtccgacccagaaggcctgcctttatgttggcagggtcactaacccgccctgtcaagatgtcagcatttgtgggtctaagatcagtgcatagcttctcggtcacaccgacggtgtccaattccaggtcggcagttgcatcttacaggtcatcgcgacagacaagacgatctcgttttgtcactcgggcaatgtttgagaaggttcacggagaaagctattaaggtcatcatgcttgcgcaagaggaagcaaggcgcctgggccacaactttgttggaactgagcagatccctcttggtctga

SEQ ID NO: 10508 - DNA, 209 bp, Zea mays
  Clone ID: LIB3150-056-Q1-N1-A7
cagactcgtgggtggtggtctgatagtagttgtagagtatggacagcagtatggtatagaagacccagatcaagtcctgtatcatggctataggcgttacgacgctctacagatcccagtataggatggatcgaagaggaaactgtagacgctgtgcgccgcgagcatgaggtgcattaagttggcaatcatctaaccttgtactacta

SEQ ID NO: 10509 - DNA, 197 bp, Zea mays
  Clone ID: LIB3150-056-Q1-N1-A9
aaggacaccaccgccatggcagccaagatgcttgcattgttcgctctcctagctctttgtgcaagcgccactagtgcgacccatattccagggcacttgccaccagtcatgccattgggtaccatgaacccatgcatgcagtactgcatgatgcaacaggggcttgccagcttgatggcgtgtccgtccctgatgct

SEQ ID NO: 10510 - DNA, 340 bp, Zea mays
  unsure at all n locations
  Clone ID: LIB3150-056-Q1-N1-B1
cccacgcgtccgtccaggacttgcttgcgctcgtctacttcggctccctctttgacgtcaagcagcaaagcgacttcgtctctttggtttacacgcgcgaactcgagcggagcagctgcctcacttatgactacgtcggggatgatccggaggacagtctcgcggagaccgatctgaacgcggtttctgcccttgcctccctcgccgcgttgcgccctcctgctgcagccggagtctcgcaccgtgacgcccttcaggcttgtgctcatcacgcccgcctctggctctggccgggcggatgaacccatccatcctgactncaccatcacatatgcctggg

SEQ ID NO: 10511 - DNA, 270 bp, Zea mays
  unsure at all n locations
  Clone ID: LIB3150-056-Q1-N1-B10
gcccgccgtcctccccgacggccgccgcttcgtgccggactctggctgcgcatccacccgcctccggtcatcctccccgtccctctcctccgcggcgccgcccggctccccgccgccgccgtcctcgctcctcgcctccgctcgggtcttctcctgccgcgcgtcctacgacctcgatgtccgccgccgcgggcaccacatcctccgcctccatttctaccccttcgtccccgccctcgccgcgtnccgcttccacgtcggcgccggggg

SEQ ID NO: 10512 - DNA, 287 bp, Zea mays
  Clone ID: LIB3150-056-Q1-N1-B11
ccctcccccaccactgcagctccgtcccggcggccccaagagttgcggcgaggatgaacgtgaagggcggtagccggattccggtacccctgacgggggccagcgcgctggtcaaggtggccgtgttcggcggcgcccacgtgtacgccgccatgaacaggctatacaacgtccagggtgggcaccgcgccagtcccttcaaccgtatacagcggatcaaggacaaggtataccctgaatggactcactctatgattccatggtttgaacgaccaatcatttatgat

SEQ ID NO: 10513 - DNA, 310 bp, Zea mays
  Clone ID: LIB3150-056-Q1-N1-B12
gtcgcatcccatcccactaccacccatctcgtcgtccgccgattcgatccggttcttccaacccaggggcagtgatggcgacgaagaggagcgtgggcaccctcggcgaggcggatctgaaggggaagaaggtgttcgtgcgcgccgacctcaacgtcccgctcgacgatgcccagaagatcaccgacgacacccgcatccgcgccttcgtccccaccatcaagttcctcctcgagaagggcgccaaggtcatcctcgccagccacctgggtcgtccaaaaggtgtcaccccaaagtacagcttgaagcc

SEQ ID NO: 10514 - DNA, 341 bp, Zea mays
  Clone ID: LIB3150-056-Q1-N1-B5
tccttaaaagcgaaccaacccgtccgttagcattgacaaaccatgatagagaaggaaataatcaagatcaaaatcaaaaagccccaattgatgaccattcaagcagaggaactcatacgggcaaagctattatagaagaatccagacctaactgcgttgatgatcataagacccatagacctatgtctcctggaacactagcactgatgtgtgatgaagaagcatttgagaaaatgtgtgacgaacaagatacaatgtttacgacttctcaaaatgctgctcctcagcagacagtaattgtcaaccataaccaatctgcactgtatgcagaacaagaaaac

SEQ ID NO: 10515 - DNA, 366 bp, Zea mays
  Clone ID: LIB3150-056-Q1-N1-B6
cttccttagcttggattcttttaaagtgaaccaacgcgtccgcttttcttaattttggccgccgccgtttcccttgcgccccgagccaaaatgaatgttgaaaagctcaaaaagatggcaggtgctgtgcgcactggggggaagggtagcatgcgcaggaagaagaaggcagtccacaagactacgaccacagatgataaaaggcttcagagcaccctgaaaagaataggagtgaacaccattcctggtattgaagaggtcaacatctttaaggatgatgttgttattcagtttgtgaatcctaaagtgcaagcttcaattggtgctaatacatgggtggtcagtggaactccacagacaaagaag

SEQ ID NO: 10516 - DNA, 260 bp, Zea mays
  unsure at all n locations
  Clone ID: LIB3150-056-Q1-N1-B7
cggacgcgtgggtagctagctagttcgggcagcgagcggggtgagacggctatggcgtgctgctccgccgtcctgcaccatccgctgggcttctcactcaccccgtgctccgcctcccgagccccaccgcgcatccagcgcgtgggcgtggcaactncctcggccgcctccgcccgccctctttctcgcgccaggatctcaccgcgctgcacctactccggtggcgccagcgctgcccctggtcctggggagctacccgc

SEQ ID NO: 10517 - DNA, 316 bp, Zea mays
  Clone ID: LIB3150-056-Q1-N1-B8
ggaggttgacgagcagatgatcaacgtgcagaacaagaactcgtcctacttcgtggagtggatccccaacaacgtcaagtccagcgtgtgcgacatcccgcccaggggcctgtccatggcgtccaccttcatcggcaactcgacctccatccaggagatgttccggagggtgagcgagcagttcactgccatgttcaggaggaaggctttcttgcactggtacacgggcgagggcatggacgagatggagttcaccgaggccgagagcaacatgaacgacctcgtgtcggagtaccagcagtaccaggacgcgact

SEQ ID NO: 10518 - DNA, 312 bp, Zea mays
  Clone ID: LIB3150-056-Q1-N1-C1
ggataaggctgattaaccaagacaaaaccaggtccaatacacccaaatacagatttgttgtgcgatttaccaacagggacatcacagcacaaatcatctctgctagtatagcaggtgatatggttcttgcttctgcttactcgcatgagttgccacgatatggtcttgaagttggtctgaccaactatgcagctgcctactgcactggccttctgttggctcgccgtgtgctcaagacccgtggtttagataaggaatatgagggcaatgttgaggccactggtgaggatttctctgttgagccagctgatg

SEQ ID NO: 10519 - DNA, 340 bp, Zea mays
  Clone ID: LIB3150-056-Q1-N1-C10
aaaaccatcagatctagcagaactctctcgacctcatcggcgttggcggagcgcgtgttgaccggagatggcgccgagcgggtggaggaggagcgcggcggcgcgggtcgcctggcgcccggccacggtttgcctgtggctcgcgctcgccgccgccgcactgacgctcgcccaggctaagaaggacctgacggaggttacccacaaggtctacttcgacatcgagatcgacggcaagcccgcaggccggattgtcatggggctttttgggaagactgttcctaagacggcagagaacttccgagctctttgcacaggaaaaaaaggggttgggaagagt

SEQ ID NO: 10520 - DNA, 167 bp, Zea mays
  Clone ID: LIB3150-056-Q1-N1-C11
aacagggctaacctgattgcaccacctctgacagtacctcaaatgacgatgaataacctgcggcttgcctaacgaatcctgggggcgcctgtgtgcgaacaaacacccaagactctgattgctctgacactgattctgaagaggatgactcagatgatgatctttct

SEQ ID NO: 10521 - DNA, 320 bp, Zea mays
  unsure at all n locations
  Clone ID: LIB3150-056-Q1-N1-C3
atcgatctcgtttcaaatccatccatcctcgtttcctccgtcccgcagcatctcaaccccatggccaagatcaagatcgggatcaatgggttcggcaggatcggaaggctggtggccagggtggccctgcagagtgacgatgtcgagctcgtcgccgtgaacgaccccttcatcagcaccgactacatgacctacatgttcaagtacgacactgtgcacggacagtggaagcaccatgaagtcaaggtgaaggactccaaaacccttctctttggtgagaaggaggntgctgtgtttggctgcaggaaccctgaggagat

SEQ ID NO: 10522 - DNA, 311 bp, Zea mays
  Clone ID: LIB3150-056-Q1-N1-C5
ctggaatcctttaaagtgaaccaacccgtccgtttggttccatttccccatctcccaaatccagttcgcgagttcttcctcctctgccgccatggcgctctctgtggagaagacctcgtctggacgggagtacaagggcaaggatctctcgcaggcggacttcggtcgcctcgagattgagctggccgaagtcgaaatgcccggcctcatggcgtgccgcgccgagttcggcccgtccaagcccttcgccggcgctaggatctcggggtctcttcacatgaccatccagaccgccgttctcatcgagaccc

SEQ ID NO: 10523 - DNA, 294 bp, Zea mays
  Clone ID: LIB3150-056-Q1-N1-C6
tcttttaaagtcaaccaacccgtccggttgtggcagtggccataaatggtgggtggagtacaccggttcttcaagatgctgataaggttgacatttattcattgtcaaggaaatggaaggagttggttgataaggcgcgagcaaagcagctgcagccccatgagtacaactctggcacctttactctttcgaatcttggtatgtttggagttgataggttcgatgcaatactgccacctggaacttgcgcaatcatggccggcggtgcatcagaaccgacagttgttggtacaa

SEQ ID NO: 10524 - DNA, 342 bp, Zea mays
  unsure at all n locations
  Clone ID: LIB3150-056-Q1-N1-C7
ttcgtcctcatggcgccgccgcagccgaagtcgggcctcttcgtgggcatcaacaagggccatgtcgtcaccaagcgcgagctgcctctgcgcccgtcccaccgcaaggggaaagtaacgaagagggtgtccatggtcaggggccttatcagagaggttgctggctttgctccttatgagaagcgtatcaccgagcttctgaaggttggcaaggacaagcgcgctctgaagcttgccaagagaaagcttggaactcacaagagggcaaagaagaagagagaggagatgatgggcgtnctcaggaagatgagatcggctggtacgcacactgacaagaagaaa

SEQ ID NO: 10525 - DNA, 322 bp, Zea mays
  unsure at all n locations
  Clone ID: LIB3150-056-Q1-N1-C8
cggacgccgatgaggactacatgggagacctctcacgcttcctcccgccgagtccgtcctcctccccaccgaagaacctcgggcgccggaagcagccatccacgcaggcgcagccgagggcgaagcgcgggaagggtgtgccgtggcaggagcggcggaggcaggagcgcgagcggaagcagcgggaggaggacgcacgcacgatggccgggctcgcggaagctatccctgagagcaacgtagggttcaggatgttgaggcagatggggtacgatcccgacttcccgcgcggngccggcgccgaaccggtcgggatcgagat

SEQ ID NO: 10526 - DNA, 335 bp, Zea mays
  Clone ID: LIB3150-056-Q1-N1-C9
gcaaatacttactgtgttgcttcacagcatgaaggatgtcccaaatgtggctgaaaaggcctgtggagccctctattttcttgcacaaggctatgttgattctgggtctgcatcgccactatcccctttctttcaagatattgttcagaaccttcttatggtcactcacagggaggatgctggggaatctcggctacgaacagcagcatatgagaccctaaatgaagttgtcaggtgctccactgaggagacggctgctattgttatgcagttagtacctgtgatcatggtggaactccatcagacacttgaagctgaaaagttgtcaactgatg

SEQ ID NO: 10527 - DNA, 291 bp, Zea mays
  Clone ID: LIB3150-056-Q1-N1-D1
aagggctaaaaaactatggttgatccacataaaaacacgttttggacagtggactcactgagaaacgacaataacaagtctgaagcacatgatgatagtaatagggaaatcttaaatggagtcacactccagctggatcatagggctagcaatgagttgctgccgagaagcatggccaccaatgtaccatagctgcccactcagcaaaccgacgctatggacacagtcatgccatattcccccaatgatgtttgtgagggattatattcctgcatgccctggacatgaaca

SEQ ID NO: 10528 - DNA, 309 bp, Zea mays
  Clone ID: LIB3150-056-Q1-N1-D10
tcgagaacggctggaagaaccgagagcgctccggatatgtcggcgggtgagctgcggttggagctggacgagctgcggcggctggagagcctcgccaagcacccccgcgtccagatcctcctcgccaacgaaatccgcaacgttgaagcgaagttggcgaaggcaaccgaaccatcgcctgagccactggcggcggcttctgcgccagcgcccgcgcccgctgcgcgtcctgttttaagctacgtcactcttggggtcgtcagctgggagcaggacaacgagaagattagggaatatgttttcctttga

SEQ ID NO: 10529 - DNA, 268 bp, Zea mays
  Clone ID: LIB3150-056-Q1-N1-D11
gcaagacgaatgactcggctggtgatggaaccacaactgcctctgttctcgctagggagatcatcaaattgggcatgttgagcattacttcaggggcaaatccagtgtccgttaagaagggcattgataagactgttcagaaattggtggaggaacttgagaagaaatcaaggccggtcaagggtagtggggatattaaagctgttgctgccatatcagctggaaatgatgaatttgttgggactatgatcgccgaagctattgacaa

SEQ ID NO: 10530 - DNA, 287 bp, Zea mays
  Clone ID: LIB3150-056-Q1-N1-D12
cttttgcaaaccataattttgctcggagggtattgtaccaatctgaaaaacactcgcaaccagctaatggggtcctcaacctcaaatccacccataaaagttgacactctttctaatcaactatattatcctaaaaggcctcttttcaaaacagttatagccgactgtcttgccaggtcaaactgcactacttttggaagaaaagatgacttcacaagaccagaatatttcaatggacaaaatgcaattgtagcagtcaatgttcatcaggggtttaatcaaaagga

SEQ ID NO: 10531 - DNA, 341 bp, Zea mays
  Clone ID: LIB3150-056-Q1-N1-D3
accttagcttggaatcttttaaagtcaaccaacccttccggaaatggcggtaacaatcacgtgggtgaaggcgaggcagatcttcgacagccgcgggaaccccaccgtcgaggtggacgtgggccttagcgacggcagctacgcgaggggggccgtacccagcggcgcatccactggaatatatgaggccttggagttgagggatggaggatctgattatcttggcaagggtgttcttaaggctgtcagcaatgtaaataacattattggaccagcaattgttggaaaggaccccactgagcaggttgagaatgacaacttcatggtccaacagcttgatg

SEQ ID NO: 10532 - DNA, 144 bp, Zea mays
  Clone ID: LIB3150-056-Q1-N1-D4
ctggaccacggttgcttccaagatcccagagtgtgatcatttaagcctggggcgcgcaaagaacacgtcggtcttctgcggcccgaacctgtacgagttcctggagaacgttcacaacatgggtgcccatggtacgggcgtcct

SEQ ID NO: 10533 - DNA, 337 bp, Zea mays
  Clone ID: LIB3150-056-Q1-N1-D6
agtcctgcccaggcatgtgtttgaagacacaggagctgtatgcacttgtttttgcagcacggtacctggacctgtttgttcattttgtgtctctgtataacactgtcatgaagctggtcttcttggcaagttctttctcgatagtttggtacatgaagcggcataagattgtgcggaggacatatgacaaggatcatgacacctttcgccattacgttttagtgttgccttgtcttcttctggctctcctcattaatgagaagtttacttttagagaggtgatgtgggcattctccatttatttggaagctgtcgcgatatttcaccacttgtgttg

SEQ ID NO: 10534 - DNA, 239 bp, Zea mays
  Clone ID: LIB3150-056-Q1-N1-D7
gcaacccttgcagccccaatcccccacggggaccatggccggcgcgcaggagtccctctccctggtgggcacgatgcgcggccataacggcgaggtgacggcgatcgcgaccccgatcgacaactcgcctttcatcgtctcctcctcccgggacaagtccgtgctggtgtgggacctgaccaacccggtccactccaccccggaatccggcgtcaccgccgactacggcgttcccttcc

SEQ ID NO: 10535 - DNA, 294 bp, Zea mays
  Clone ID: LIB3150-056-Q1-N1-D8
gtgggttggcttctcctccccctccgggtcgggttcgggttcgtgaggttctccggggttcggtttcgtgggtgagcggatcgagatggcggcgtcggatgttgagtaccgctgcttcgtcggcggcctcgcctgggccacggacgaccactccctccacaacgccttcagcacctacggcgaggtccttgagtccaagatcatcctcgatcgggagacgcagaggtcccgcggcttcggcttcgtcaccttctccacggaggaagcgatgcggaacgccatcgatggcatgaa

SEQ ID NO: 10536 - DNA, 302 bp, Zea mays
  unsure at all n locations
  Clone ID: LIB3150-056-Q1-N1-D9
tcgttttagtaacgcgctaggtttcttcccgcagagccttgggtgcgccccgtgcccctatacaaaagcccaccaaatcctaacccttgttgcagtgacactaccggacgattgccccgtattcggagaggaagccgannnaacaagatccaccgccttgctcgctactacaagcgcaccaagaagctcccacccacctggaagtacgagtcaaccacggccagcactttggtggcctaaggaaaatcctctgatggcttggtctttagcacctatgagcttgttctagaatatgaatttat

SEQ ID NO: 10537 - DNA, 319 bp, Zea mays
  Clone ID: LIB3150-056-Q1-N1-E1
gcatcctcaaggcccatgggttggcgccggagatcccggaggatctctacttcctcattaagaaggcggtggcgattaggaagcatttggagaggaacaggaaggacaaggactccaaattcagactcattcttgttgagagcaggatccaccgccttgctcgctactacaagcgcaccaagaagctcccacccacctggaagtacgagtcaaccacggcgagcactctggtggcctaagtgatatcctctgatggcttggtctttagcacctatgagcttgttctagatatgaaattatgtaatttctggtatgtctg

SEQ ID NO: 10538 - DNA, 258 bp, Zea mays
  unsure at all n locations
  Clone ID: LIB3150-056-Q1-N1-E10
tcgacctcctccgaccgcgacgagctcgaagaccacctccgcgccgccgcggngagcttcgcggcagccaccaccaccaaggatccttccggttacaccactccgtctccagtccttggcccgcagacctctaataccctgctccaatttctccacccgaagaccggcgccgcgccatccaagtcccaacgcatcggcatcgggctcttcaccccgccggcttcgggcccgaacccgtgaccaccccattcaccccat

SEQ ID NO: 10539 - DNA, 323 bp, Zea mays
  Clone ID: LIB3150-056-Q1-N1-E11
tcgggattctgaatctgggaccttttcagctcctgttgggtctggtggtcccggtggccttacagttccttacctaataattgccaacaaagaggatattgctccaagagatggtagaagagtgagcagtggtaatcttgctgatgttgctcgtcaatgggttgaaaaacaaggtctgcttccatccagtgaagtgcttacacttgcagataactttcctggcaattctggtttgctcacggctgccaaagaggcaagatatgataaagaagctctaatcaagttcttccgcatgttgataaggagaaggtatttttcgaatg

SEQ ID NO: 10540 - DNA, 301 bp, Zea mays
  unsure at all n locations
  Clone ID: LIB3150-056-Q1-N1-E2
tgacaactgaaaacatggaagatttttgcaacgagatatacatcctgagccggttgcgacatccaaacgttatattgtttcttggtgcatgcattacacctccacacttgtcaatggttactgaatatatggaaatgggatcactgtattatctcatccatatgagtggtcagaaaaagaaacttagttggcgtaggaggttgaaaattattcgtgatatatgcaggnggttgatgtgcatacaccgcatgaagatagttcacagggatctcaaaagtgcaaactgcctggtgaacaaaca

SEQ ID NO: 10541 - DNA, 291 bp, Zea mays
  Clone ID: LIB3150-056-Q1-N1-E3
gccagccgcacactgtgccctgcaaggtcaccggcaagtgcgggtccgtcaccgtgcgcatggtgccggcgcccagggggtccgggattgtcgctgcccgcgtgcccaagaaggtcctccagttcgccggcattgaagatgtctttacctcgtcccgtggctccaccaagacactcggtaacttcgtcaaggcaacctttgattgtctgatgaagacctacggcttcctcactcctgagttctgggccgagaccaagtatgccaagaccccgttccaggagttcaccgacc

SEQ ID NO: 10542 - DNA, 235 bp, Zea mays
  unsure at all n locations
  Clone ID: LIB3150-056-Q1-N1-E7
ctcgatttgagttccaaaatgcaattgagaaacttccaagcaacatattcgagaagagctatcctttgagagagtttgatctaccaaaacgaatcaccgcattcttttataacgctgatgagctcactcttgtcgggatagcggnatgcatctgctagcgcgctactgccacagtattgattgttagaaaagaaaggaggttatcggtgactattccctctatcagcaccaatgc

SEQ ID NO: 10543 - DNA, 280 bp, Zea mays
  Clone ID: LIB3150-056-Q1-N1-E8
cccatccagccgccaccaggtgcagagtgtttcgtcatctcttctccggcgaagaacccccagtcgcccaccagatcacttgttaaactttgttgaggggtgatggcggtttctttcgtaaacctcaacaccgaggcagggcttaaaaagcttgatgagtaccttctcactcgcagatacatcactggctaccaagcttccaaagatgacttggctgtctacacttcgttttcgtctgctccctcgtccaagaatatcaacgtagcaaggtggattaaat

SEQ ID NO: 10544 - DNA, 332 bp, Zea mays
  Clone ID: LIB3150-056-Q1-N1-F1
agacgcaggaccacctcacaagcctcctcgtccccgatctcctcccacccgcatccaagggtttccttctcgaccgtgcggaacgagccagagaacaggtatggcggcggcgcggcacctcagatccggcctccccctcctccgcgcccacctcgcatcctccgaatccgcggccgtcgctcaggtttcgaggggcttcgcgtcgcaggccgctaagcccaccgggaaggagatcaaggttccaaaggctctgtttggcggcacaggcaactatgccagtgcactgttcctcacagcagctaaatctaatgcattgaacaaagttgaatctg

SEQ ID NO: 10545 - DNA, 290 bp, Zea mays
  Clone ID: LIB3150-056-Q1-N1-F10
ccctacgcccgtttctctctcgtcgcgcagcatcagagcacaagcgaggaacccagtccagtcccgggaatggagtgcgtattgggcgtggttggccgcgacttcgcgctggtggcggccgacacttccgccgtgcagagtattctcgtccacaagaccgacgaggacaaggtgatggtgctcgactcgcaaaagctgatgggcgcttcaggggagcctggtgatcgggtgcaatttacggagttcatacagaagaaccttcacctgtaccagtttcggaacaccattcc

SEQ ID NO: 10546 - DNA, 332 bp, Zea mays
  Clone ID: LIB3150-056-Q1-N1-F11
cagaccgggagtagtcgacgcgccgtcactgaatcctcagatcacggctagccgtaatcacgccactctgctgactcccggcgagcagtgtaacattttccttcagccatgggcaaggagaagactcacatcaacattgtggtcattggacatgtcgactctggcaagtcgaccaccactggccacctgatctacaagctcggcggtattgacaagcgtgtgattgagaggttcgagaaagaggccgcggagatgaacaagcggtcattcaagtatgcctgggtgcttgacaagctcaaggccgagcgtgagagaagtatcacaattgatat

SEQ ID NO: 10547 - DNA, 409 bp, Zea mays
  unsure at all n locations
  Clone ID: LIB3150-056-Q1-N1-F12
ggataaacaaattgtgcgagtacttgggaaggcaccaacaatagcagctgctgcctacttgagattagcaggaagacctcccgtccttcctttaaatactctatcttattcagagaacttcttgtacatgctggactctttgggtgacagaacatataaaccaaatcctcgacttgctcgagctctagatattctttttattctgcatgctgaacatgaaatgaactgctccactgctgctgttaggcaccttgcttcaagtggtgtggatgtatttactgctctttctggtggtgttggagctctatatggtcctctgcatggcggcgcaaacgaggcagtacttanaatgttaaatgagattggaagcatggaaaatattccagatttcattgtaggagtgaagaac

SEQ ID NO: 10548 - DNA, 293 bp, Zea mays
  Clone ID: LIB3150-056-Q1-N1-F3
gtcatggcgctcactacacggggcggcgccggcggcggggatcccgcgaaggcgccgtccgcctccgaccccagcctcggcttcctcaccaagcgcgataccgaggtcaagctaccccgcgcaacgcgggtcaagaacaagacccccgcgccgatccagattacggccgagcagatcctccgggaggccagggagaggcaggagcctgagatccgcccgcccaaacagaagatcacagacccccacgagctctccgattaccgcctccgtaagcgggaggagttcgaggacgt

SEQ ID NO: 10549 - DNA, 378 bp, Zea mays
  Clone ID: LIB3150-056-Q1-N1-F5
gttagaggctaatccgaaaatgacccttttgactgggagttcacgggtagcagagaaattggctgctgatttgaaaggccgagttaaattggaggatgctggttttgattggaaaattcttggtccagatgttcaagaggttgattatgttgcatgggtttgcgatcaggatgcttatgcttgtagcggtcagaaatgctctgctcagtctgttctattcatgcacaagaattggtcttctagtggtctgcttgagaaaatgaagaaactttctgaaagaaggaagcttgaagatttaacaattggtccagtccttacagttactacagaagccatgatagagcacatgaacaacctttttaaaataagaggatcaaa

SEQ ID NO: 10550 - DNA, 288 bp, Zea mays
  unsure at all n locations
  Clone ID: LIB3150-056-Q1-N1-F6
tgtcaagccggaggtcgccnncggtgctccggagaagaggactttccgcaagtacagctaccgcggcatctacctagatgcgctgtttgacatgtccaccgacgacctcgttcagctcttcccagcgcgcgccaggagaaggttccagaggggtttgaagaggaagaccatggcgcttatcaagaagcttcgcaagtgtaaaaaggatgctttttgttgttagaagccatagccagtgatgactcattttcgcaacatgatcattgtctccctagatgattgggagca

SEQ ID NO: 10551 - DNA, 323 bp, Zea mays
  Clone ID: LIB3150-056-Q1-N1-F7
ggcgtagagagcgagagtattttgcaactacaccagaatataagcacatggcttctaggatgggatctgaatatttaggaaagatgctttcaaagcatttggaacaagttatcaaatcaaggatcccggggatccaatctcttataacaaagacaattgcagagctggaaactgaacttaatcgacttggaaaacccattgctaatgatgctggggggaagctgtacacgatcatggaaatttgtcgtatgtttgacagtatctacaaagagcatctggacggagtgcgccctggcggaaaaaaaagtttaccacgtctttcg

SEQ ID NO: 10552 - DNA, 295 bp, Zea mays
  Clone ID: LIB3150-056-Q1-N1-F8
gatcccctcactgcattccctctgagcgccgccactccctgacatcgagaccggctgcccgaccccggtccggcgatccctctgcacccctttctttgcgctgccagccccaatctctcgcatccctgtcaaccatggcggcgtcagcaggcggaggcgcggtgcgcgcgctgtcccagaaggagcaggacatacagatgatgctcgcggccgacgtccacctcggcaccaagaactgcgatttccagatggagcggtatgtcttttagcgtcggaccgacggcatctacatcat

SEQ ID NO: 10553 - DNA, 328 bp, Zea mays
  unsure at all n locations
  Clone ID: LIB3150-056-Q1-N1-F9
cctaaccgcaccgtccctgtgtctgcgcaggtggtgacggacacgtccggagggtgtggcgcgagctacgagatcgaggtggtgtcggagaagttcgaggggaagcggctgctggagaggcaccggatggtgaacaccgcgctggcgtctcacatggcggagatccacgccgtctccattaagaaggcgctcaccccggctcaagcccagccccaggcccagtcggagccggccgncgataagccccaggcttaagtgcttaacaccccccaaaacggtttgatcccatttgccgatgcccgattacattggattatctgtttgatta

SEQ ID NO: 10554 - DNA, 305 bp, Zea mays
  unsure at all n locations
  Clone ID: LIB3150-056-Q1-N1-G1
ggcagtgcgtagagaggatcgtcgaacagaacagcatgaagatggtcatcgttctcgtcgtgtgcctggctctgtcagctgccagcgcctctgcaatgcagatgccctgcccctgcgcggngctgcagggcttgtacggcgctggcgccggcctgacgacgatgatgggcgccggcgggctgtacccctacgcggagtacctgaggcagccgcagtgcagcccgctggcggcggcgccctactacgccgggtgtgggcagacgagcgccatgtaccagccgctccggcaacagtgctgccagcag

SEQ ID NO: 10555 - DNA, 187 bp, Zea mays
  Clone ID: LIB3150-056-Q1-N1-G10
cgtccagcccgtacgccgcgcagccaacccagcggacacgatgcaggcccacggcatcgccatccgcgcccgcgggccggtggcggcgacgcaggcccccgcgcgccgacggcaatgccgcgtgtctgcggcggcggtcggcgcgcccgccgcgcgagcccgcgtgacgcactcgatgccgccggag

SEQ ID NO: 10556 - DNA, 346 bp, Zea mays
  unsure at all n locations
  Clone ID: LIB3150-056-Q1-N1-G11
cggagccgacgggccgtccgcctccctgtcggcctcccgtccccaaggccaatagttctcaagaggcaatggcggaccaggctaaccaacccactgtccttcataagctcggtggccagttccacctgcgctcgatcatctctgaaggtgtacgggcccgtaacatatgcccatctgtctcatcttatgaaaggagatttgccacacggaactacatgacccagagcctntggggcccttcaatgtctgttagcggtggcatcaatgtgccagtgatgcagaccccgctctgtgctaatgctcctgctgagaaaggaggcaagaacttcatgattgatttcatgat

SEQ ID NO: 10557 - DNA, 402 bp, Zea mays
  Clone ID: LIB3150-056-Q1-N1-G12
cagccgtcgtctgctgcggactccgcctccagtttggtctgtttcttgcaagttgctcttgcggtagttcccccaactgtcaccatgcagaacgaggagggtaagactgtggacctctatgttcccaggaagtgctcggccacaaacaggatcatcactgccaaggaccatgcctctgtccagatcaacattggccacttggatgcgaatggcctgtatgatggtcacttcacaacatttgctctctctgggtttgtccgtgctcagggcgatgcagacagctccttggacaggctgtggcagaagaagaaggctgatatcaagcagtagattttacatctagtttaccaagaattggacactgccttagctatgttttgaattcatgtcactatatgcaat

SEQ ID NO: 10558 - DNA, 299 bp, Zea mays
  Clone ID: LIB3150-056-Q1-N1-G2
ctgattgcatgctcagtaccactgctacattccccaaaatcagctgctcctggcctctaaggtttaagcgcaatgatgttgttgtaagagcaatatcggaagagtgtggcccgcaggggcttcccattgatctcagaggtaaaagggcattcattgctggagttgctgatgataatggctatggatgggcaattgcgaaggcacttgctgcggctggtgctgaaattcttgtgggtacatgggtgccggcacttaacatatttgagacaagtctgaggcgtggaaagtttgatgaatca

SEQ ID NO: 10559 - DNA, 281 bp, Zea mays
  Clone ID: LIB3150-056-Q1-N1-G3
cggcaagtatcacccccttcccctcttctcctgccacacctccgccagcgctagggttttatttttgcattgctgttgctggtggtggttaccttcttctctctctcagtcgtctccctcgcagctgcagtcgtcgtagcagatcttatctcaaaccctaccgaccaacagctgcttgctcggaacgggaaccggagttggattgcgatggcgctgcagtacgtggaggcgcagcggcaggcgcgcccggacctcgccgactggtatgcttccctcgccga

SEQ ID NO: 10560 - DNA, 157 bp, Zea mays
  Clone ID: LIB3150-056-Q1-N1-G5
ggcacagtcacagatgacaaaaggatccaggaggttccagcaatgaaggttactgccctgaggttcacggagacagcaagggccaggattgtcaatgctggtggcgagtgcctcacatttgaccagcttgctcttcgtgctccacttggcgagaaca

SEQ ID NO: 10561 - DNA, 351 bp, Zea mays
  Clone ID: LIB3150-056-Q1-N1-G6
cccgaccccgccgttgggatgaggccggggctgttcaagtccacggccgagttcctccgccgaagccggctacgcctcctcggccaacccggagcggaaggtggccatcctgggcgctgcgggcggcatcgggcagccgctctccctcctcatgaagctcaacccgctcgtctcctccctctccctctatgatatcgccgggacccccggcgtcgcgggcgacgtctcccacatcaactcccccgccctggtgaaggggttcatgggggacgaccaagcttggggaggcgctcgagggctccgacgtcgtcatcatccccggcggggtgcccaggaagcccggcatgacta

SEQ ID NO: 10562 - DNA, 267 bp, Zea mays
  Clone ID: LIB3150-056-Q1-N1-G7
gatgaccactgtccatgccatcactgctacccagaagactgttgatgggccctcgtctaaggactggaggggtggaagggctgctagtttcaacatcattcccagcagcactggagctgctaaggctgttggcaaagtgcttcctgtccttaacggaaagttgactggaatgtctttccgtgtcccaaccgtcgatgtttctgttgttgatttgactgttaggcttgagaagtcagcaacctatgatgagatcaaaggctgcggtca

SEQ ID NO: 10563 - DNA, 340 bp, Zea mays
  Clone ID: LIB3150-056-Q1-N1-G8
gaagaatgtcgcatcatttccgtgagatgaaagttggtgattatatgtctgtgaagggacctaagggccgtttcaagtacctacctggacaagtgagagcatttggaatggtagctggaggatcaggcattactccaatgttccaagtcacaagggcaattcttgagaacccaaaggacaacacgaaagtacacttaatctatgcaaatgtcacgtatgaggatattcttctgaaggaagaacttgacggcatggccaaaaactatcccgatcgtttcaagatctactatgtcttgaatcagcctcctgaagtctgggacgggtggcgtcgggttcgtgt

SEQ ID NO: 10564 - DNA, 299 bp, Zea mays
  Clone ID: LIB3150-056-Q1-N1-G9
cccatctctccccctctccctctccctcgggtggccacgactgccgctgccgccctacgccaggtgtccaggtcatctccggcccattcgccggcgacgagcaccccactagatcgaccgagctatggacggcctgtggcatctgggggacgagctccgcgggcagcccaaggtggtggaggaccgccagtggtcgctcatgacgtccaagctggcagagatcaccaggtccaggggcgagaggatgaacgatttcgactacgccaggatgaacgccgcccccaacgccaagcaggggg

SEQ ID NO: 10565 - DNA, 332 bp, Zea mays
  Clone ID: LIB3150-056-Q1-N1-H10
gggaaacagagaagatggcgacgaagcgcgacaccgagtcggacggcgaaggctccaaccccgtcggtggtggcgcgactccgccgcccctagccgccgcccctgtcgtatgcctcctccgctccgccggggacttcggtggcggcgccttcgttggatccatcttcggatatggacaaggcttgatcaccaagaagggttttaagggctcattcagcaatgcaggggcctctgccaagacttttgcagttctctctggcgttcagagtttggttttgtgcttgttgcgaaggctacgtggcaaggatgacattgtcaatgctggtatagct

SEQ ID NO: 10566 - DNA, 378 bp, Zea mays
  Clone ID: LIB3150-056-Q1-N1-H11
cggacgcgtgggtccgtacccaatctaatcgacacccggccgagatgggccgcaagttcttcgttggtggcaactggaaatgcaatggaaccgcagatcaggttgagaagattgtcaaaaccctgaatgaaggaaatgttccctcttcagatgttgttgaggtcgttgtcagtcctccttatgtgttccttccggtggtcaagagccagctgcgccaagagttccaagttgctgctcagaactgctgggtgaagaagggaggtgcattcactggtgaaattagtgctgaaatgctcgtcaaccttggcgttccctgtgtcattcttggacactctgaaaggagagctctgctgggagaatcaaatgagtttgttggag

SEQ ID NO: 10567 - DNA, 365 bp, Zea mays
  unsure at all n locations
  Clone ID: LIB3150-056-Q1-N1-H12
gagatcgcacgcgccctctgccgcttgttcgttcctcgcgctcgccaccaggcaccaccacacacatcccaatctcgcgagggcaagcagcaggggtctgcggcggcggcggcggcngcngcagcgcttccggctccccttcccattgccctccacgatggcgctccgcctcaacgacgtcgcgctctgcctctccccgccgctcgccgcccgccgccgncgncgcagcagcggcagggtcgttgccggcgccttcatgacttccgccgtcttcaccaacgtctagaataagaagccatttgctcctccaaggggaggacatgttcaggttacacattcaatgccacctcacaagattgaaaatt

SEQ ID NO: 10568 - DNA, 380 bp, Zea mays
  Clone ID: LIB3150-056-Q1-N1-H2
gtctttctcactgaaaccaccaagccctctgcatctttaaccctccccgtcgtcacgctgacctaaccatgatttgcctcaaagccatctcatcccctctccacctcccgaccctccgccgcctcacccccacctcctccctccgcgccgccgccgccatgtcctcctcctcgtccgctgtggccgccccgatcgagcacttcgtgctcttcaaggcccgcccggaggcggtggcctcgggcgccgcggcggcgatggtctcctcgctgcaggcgctggccacgctcgtcccgggcctgcctacatccacgccggaaccgtggctccgcttccggtcccgggccgcgaagcgcttgggcccaagcaacttcttcacaacc

SEQ ID NO: 10569 - DNA, 228 bp, Zea mays
  Clone ID: LIB3150-056-Q1-N1-H4
ggtcccttgccggcttccgcggcaggatggcggaatctacggcaaggacggtgaaggatgtcaacccgcacgagttcgtcaggcctactccgcccacctcaagcgctccggcaagatggagctccctgagtgggttgacattggaagactgcgagttcaggagcttcctccttatgatcctgactggtactacatcaaggctgcatccattgcaaggaaagatctacc

SEQ ID NO: 10570 - DNA, 359 bp, Zea mays
  Clone ID: LIB3150-056-Q1-N1-H5
ccttccggtgaatcaaggggttgtccccccccctggcggaagtcctcaaggaatgccctgggcagtactacaggtaccatgctgattggaggactgagacacatatggtagtgtcgatgcttgcattcatgcactggctggagacaggtggcctactcatgcatgctgaagcccaggagaagctagggttgtgctctggggagtttggccttgatgttgaggactacctgacaggactgtgcttcatgtccaatgaatttcctagatttgtagtaaatcgcgtcactgctggcgactatgactgtcctaaaagggttttgggcttcttgaccgatcttcatgcttcgtttaggatgctg

SEQ ID NO: 10571 - DNA, 253 bp, Zea mays
  Clone ID: LIB3150-056-Q1-N1-H6
gggcaaggggggcggccccgacctaatcgtggacaacggcggcaacgccacgctgctcatccacgagggtgtcaaggccgaggaggactacgagaagaccggcaagatccccgatccggagtccaccgacaacgctgagttcaagatcgtgctcaccatcatccgcgacgggctcaaggctgaccccaagaagtaccgcaagatgaaggagaggcttgtcggcgtctctgaggagaccaccacgggtgtcaag

SEQ ID NO: 10572 - DNA, 278 bp, Zea mays
  Clone ID: LIB3150-056-Q1-N1-H7
ggccgccctttttttttttttttgatccaaggaaaaaagtaaataaatctggagaccggtcaggctcgaaggatgtgtgacaagtctgtcaacagccatcagccaggcaaacagaacacgacacccctcagctgagcttagcaaaaccatgcaatcacgagcacaccagtacataacatcagaaaatgttggatacacataatccggaaagcaagcttgggagcaacaacactaggactgactgacgcactccgcaaaagtgacacaatcttgagcga

SEQ ID NO: 10573 - DNA, 305 bp, Zea mays
  Clone ID: LIB3150-056-Q1-N1-H9
cgagagcacccggaccagacgcccaagtggatcgccatggcgatgaagccggcggcggcggctccccctaccccggtcgtggcgcacagcgtgttcgtctacggcagcctgatggcggacgaggtggtccgcaccatgctgaagcgcgtcccggccgccgccccggccctcctgccaaactaccaccggttcaacatcaagggccgcatttacccggcgatcctgcccgttgagagcaagagagttgctgggagggttatcatgggtgttactgatgaagagctccagcttcttgacgcgttttg

SEQ ID NO: 10574 - DNA, 280 bp, Zea mays
  Clone ID: LIB3150-057-Q1-N1-A10
ccgtcatcgatctcgtttcaaatccatccatcctcgtttcctccgtcccgcagcatctcaaccccatggccaagatcaagatcgggatcaatgggttcggcaggatcggaaggctggtggccagggtggccctgcagagtgacgatgtcgagctcgtcgccgtgaacgaccccttcatcagcaccgactacatgacctacatgttcaagtacgacactgtgcacggacagtggaagcaccatgaaagtcaaggtgaaggactccaaaacccttctctttt

SEQ ID NO: 10575 - DNA, 427 bp, Zea mays
  Clone ID: LIB3150-057-Q1-N1-A11
cacaattgttggagccgtctctcctccaggtggtgatttttcagaccctgttacctctgcaaccctcagtattgttcaggtcttctggggtttagataaaaagctcgctcaaaggaagcatttcccatctgtgaattggctcatttcctattcgaaatactccaaggcccttgagtccttttatgagaagtttgatccagatttcattgatattaggacaaaagcacgtgaggtgttgcagagggaggacgatctaaatgaaattgtgcagcttgttggtaaagatgcgctggcagaatctgacaagattacactggagacagcaaagctactgagagaagattatttggcacaaaatggctttaccccatatgataagttctgcccattctacaaatccgtttggatgatgcgcaatattattcac

SEQ ID NO: 10576 - DNA, 332 bp, Zea mays
  unsure at all n locations
  Clone ID: LIB3150-057-Q1-N1-A12
gcaaaggacaaatatcctcctcgctcgcagtcgcagctagtacgccgccgcaccttcgcccgccaccttctttccggctccagcgatgtcgggggcgatcgggggcgccgaggtccacggcttccggggcgcagcggcgcagctcccgcggtcgcgggtgctcgggaggccgatccgggtggcgccacccgccgcggcccggccgggcggcgcgtncgcgggtagcatacgcgccgtctccgcgcctgcgaagaaggatgcttctgaagttaagcgaagcaaggttgagataatcaaggaaaagagcaacttcctccggtaccctttgaacg

SEQ ID NO: 10577 - DNA, 294 bp, Zea mays
  Clone ID: LIB3150-057-Q1-N1-A2
gtgaagacacttactggcaagacgatcacccttgaggtggagtcctcagacaccattgacaacgtcaaggccaagatccaggacaaggagggcattccaccggaccagcagcggctgatcttcgccggcaagcagctggaggatggtcgcaccttggctgactacaacatccagaaggagagcaccctccacctggtgctccgcctcaggggtggtatgcagatttttgtgaagacattgactggcaagaccatcaccttggaggtggagtcgtctgacacaatcgataatgtc

SEQ ID NO: 10578 - DNA, 279 bp, Zea mays
  Clone ID: LIB3150-057-Q1-N1-A7
cgctaactgtcatcaatggcggccgagcccaagatcctagagctctccaacggcaagatcaccgcgaggatctccaactggggcgccaccatcacctccctcctcgtccccgacgcccaggggagtgtcgctgatgtggtgctcggattcgatggcttggatccgtacgtgaaaggcatgtcaccttattttggctgcatagttggccgtgtcgcgaataggatcaaggatgggaagtttacactaaacggacttgagtattcattacctgtcaacaat

SEQ ID NO: 10579 - DNA, 310 bp, Zea mays
  unsure at all n locations
  Clone ID: LIB3150-057-Q1-N1-A8
ggcgcatgcgtcggcacttgcggtggctcacccgcacgatccggcgggcggggacgcgccgccgaagcaggtggctcaggcgatggagcggctgggccgtgcgggccggctcatcgcagacatccggctcggcgcggaccgcctcctcgaggccctcttcgtctccggcgacgcgcccccgtacagcgtgcgccagcacgtcgacaggatggagcacattatcgtcaaggaggatgccgccatgcgcctccacttncaggacctacgcgcnctcggcaggcaattagaggagtctggagttcttaaatgg

SEQ ID NO: 10580 - DNA, 340 bp, Zea mays
  Clone ID: LIB3150-057-Q1-N1-A9
gcagcccaagaagaccgccggcggcatcctcctcccggaaacatccaagcagctgaatgctgctaaagtggtggctgttggccctggtgagcgcgacaaggcaggcaatctgatcccagttgctctgaaggaaggtgacactggtctcctgccagagtatggtggaactgaagttaagcttgcagctgataaagagtacctactcttcagagagcacgacattttgggcacacttgtggactgattcagagcatcagcaagcctgtcactagtcggtggttctagacttctagtgtgagatgcgtaatatcagattctgcgatcaaaatgcctgagaaag

SEQ ID NO: 10581 - DNA, 123 bp, Zea mays
  Clone ID: LIB3150-057-Q1-N1-B10
aaaaaaaaaaaaaaaaaaaaaaaaaaaaaaagagggaaaaaaaaaaaaaaattaaaaaaaaaggggcggtaggcctagaaatttcgaaccggaacaggcgggttacccaattgttccttttat

SEQ ID NO: 10582 - DNA, 354 bp, Zea mays
  unsure at all n locations
  Clone ID: LIB3150-057-Q1-N1-B12
cttcctgtcagtagtagagtgagagtgaggcagcgagtgggagacaaggggaaatggggaagggagcgcaagggagcgatgcggcggcggcgggcggcgaggtggaggagaacatggcggcgtggctggttgccaagaacaccctcaagatcatgcccttcaagctcccgcccgtcggcccttatgatgtccgcgtgcgcatgaaggcagtggggatttgcggcagcgatgtgcactacctaagggagatgcgcatcgcgcacttcgtggtgaaggagccgatggtgatcgggcacgagtgcgcnggcgtggtcnaggaggtgggcgccggcgtgacgcacctgtccgtgggcg

SEQ ID NO: 10583 - DNA, 101 bp, Zea mays
  Clone ID: LIB3150-057-Q1-N1-B3
cgtcgagtttcgcacacacaaagttatctacaggagatatgctggactgtttttttcaatatgtgtggacataactgataatgaattggcatacttggaat

SEQ ID NO: 10584 - DNA, 347 bp, Zea mays
  Clone ID: LIB3150-057-Q1-N1-B4
ttgagtccttgctggcgaaggtcgatatcctcatccttggtggtggtatgatctacacattttacaaggcacaaggatattctgttggaaaatctctcgtggaagaggataaacttgagctcgcaacttctcttattgagaaggcgaaggcaaagggggtttctcttttgcttcccactgatattgtagtagcggacaagtttgcagctgatgctgagagcaagattgtccctgccactgctatccctgatgactggatgggtcttgatgttggccctgatgccaccaaaacattcaacgaagcattggacaccaccaagactgttatttggaacggccccatggga

SEQ ID NO: 10585 - DNA, 351 bp, Zea mays
  Clone ID: LIB3150-057-Q1-N1-B6
cttgattgcaaaactaggtggaattctacatataagatgcttagtgtagctttaccttatatggctgtttttaaccgggcagcacgtgtagagaagctatatgattgtgctccaagtaaggaagagtgggcctttgctagagaggtgattgataggctaaagatgtttgatgacattactgttttattttctggaaccaaatatgtgactgccaatgtgcaacttctcaaaatttgaggctaagacaaaaatgaggcagtggggtacatgtgggatccatattatagaagagatgacagctagaatgattgagaaatttgataagtactggaaggctattcaaggaccaat

SEQ ID NO: 10586 - DNA, 335 bp, Zea mays
  Clone ID: LIB3150-057-Q1-N1-B8
cacgtcagtggctacctttttttttggtggttggccttcggttctggacgcgaccatgggaccccgcggcgtcgccctagcgctccttgccgcggcgctgctccaggccctcgcccccgcgtcggcggcggcggcggcggggggcctggtgcgggtcgcgctgaagaagcagcccgtcgaccagaacgcccgcgtcgccgcgcgcctctccgccgaggagaggcagcgccttcttcttcgcggcgccaacgccctgtgctcggccggcggcgacgacgactccgacgtcatcgcgctcaagaactacatgaacgcgcagtactttggggagatcg

SEQ ID NO: 10587 - DNA, 270 bp, Zea mays
  Clone ID: LIB3150-057-Q1-N1-B9
gcacaatatacctccctagttgatgcggggatgtcgacagatatatgcgttagaatatttacggttgcacatcttgaatagatatggaaggataattggggtggtgaaatggtaccttgggctgttctgctgtgaacattgaacgggtgttggtattagatcagtgctgttggggatggtaaatcgttgacgtgtctactgaatgcaagtacaggtgaactgaatgatagaaagaatgttacactcgaaagacaacaccatcatcttcgt

SEQ ID NO: 10588 - DNA, 343 bp, Zea mays
  Clone ID: LIB3150-057-Q1-N1-C10
ctcgtttcaaatccatccatcctcgtttcctccgtcccgcagcatctcaaccccatggccaagatcaagatcgggatcaatgggttcggcaggatcggaaggctggtggccagggtggccctgcagagtgacgatgtcgagctcgtcgccgtgaacgaccccttcatcagcaccgactacatgacctacatgttcaagtacgacactgtgcacggacagtggaagcaccatgaagtcaaggtgaaggactccaaaacccttctctttggtgaagaggaggttgctgtgtttggctgcaggaaccctgaggagatcccgtgggggtcgggtggtgctgaatatg

SEQ ID NO: 10589 - DNA, 395 bp, Zea mays
  Clone ID: LIB3150-057-Q1-N1-C11
ggcacgggcaccttcggttggattaaatgtatcactgaatcgctatgatttgttccatgggcatcttttacttgcatcggagacaggacggcttggaattctgttccatgctaaagaatacccagcatttaacaaggaattgtttccttataatttgggatattgccaggcaggatctaatgtaccatatgatgattcgatgaatttgcgcaatgtactttggttagcacctttgccatcaaatgagacaaaagcttggttagcaccaggattactagttgtcttggacgcacatcctgatggaattatctatcaagagatgatacgtgactatgttcaaattgtagaacagtattccaagatgatcttggggagaacgcagttgatgtcaatta

SEQ ID NO: 10590 - DNA, 371 bp, Zea mays
  Clone ID: LIB3150-057-Q1-N1-C12
ggaattctacaatgttgatgaactagagacaatggcaacaggagagcattttatggcaacagatatcatgtgggatccaactgggagatatctcgcgactgcagttacctcagttcatgaaatggagaatggctttcaaatatggtccttcagtggcaagcatctttacaaggtgtcaaaggatcatttctatcagtttatatggcgcccgagaccgccctcactactgacggccgagaaggaagaagagatctcaaggaacctgaagaagtatagcaagaagtacgaacaagaagaccaggatgcattcaatcagttgagcgagcaggaccgcaagaggcggacacagcttcaggaagaatgggactcat

SEQ ID NO: 10591 - DNA, 367 bp, Zea mays
  Clone ID: LIB3150-057-Q1-N1-C2
gcggattacagcggcatcaaggttgagttggtaaaagactttcaaatgggggtttccaacaaaacaccagagttcctcaagatgaaccctattgggaaggttcctgtcctggagacacctgatggtcctgtctttgagagcaatgcaattgcaagatatgttactcgcttgaaggctaacaacccactttacggatcttcactgattgattatgcccatattgagcagtggatggactttgctgcgacagaggttgatgccagcattggaaagtggttgtacccacgtatggggttttatccctatgctgctgtgacagaagaatcagccattgctgctttgaagagagcattcggttccctgaaca

SEQ ID NO: 10592 - DNA, 332 bp, Zea mays
  Clone ID: LIB3150-057-Q1-N1-C3
cgatcgcttcctccatcgaggcggtaaagcgccgcccagatcgccggaagcaagcggcgacctcaccagctccgagcagcagcagggaggctcgtggaaccattagtccgtttctggcaacggcatggaagggctgagctggagaacggtgtgttgtttatcggtgctctgtgccgtgctgttcttgcgcccggccgagggcatccgcttcgtgatcgatagggaagagtgcttctcgcataacgtggaatacgagggggatactgtccatgtatccttcgtcgtcatcaaggctgacaccccgtggcattacagcgaggagggcgtcgatc

SEQ ID NO: 10593 - DNA, 315 bp, Zea mays
  unsure at all n locations
  Clone ID: LIB3150-057-Q1-N1-C4
agcctttgacccacacccaccccccgccgggcggcgctgcagaccatggagcacgcgttcgcctttctcgcgcgcgcgctcaccactccgctcccggcacccgccgtcctcccgcggcgccgcccggctcgcgtggccgtcgccgacgcggcgccggagcgcangccgccgggcgcggtggcgttcaccaccaactacgtcgtgccggtcgacgcggcgctcgccgggatcacgcgcccgctcgtcgagattctccgggacctccacaagcgcgttccggacgccatcttgcgggtcttcctcccggcgcgcctt

SEQ ID NO: 10594 - DNA, 338 bp, Zea mays
  Clone ID: LIB3150-057-Q1-N1-C5
gatcaatgggaaaatgcctgaggaggtctgcaggaccaacatcaaaaacgacttgaccatcccttccacgtcggccttggccaccacaatgccctcctccgagcgaaagcagatggaggccaggtttatcgcctatatgcaagaaactgctgaggagaggatgactgggtttgctgttcgtggtgaaaaatacagaaagcatggtgaacgtccgccacaaccaccattggagatagttaaatacccagctcttttggaagagcttggggatgggattcgatactgccgtactgtcctgtgaattctttgccccctatacaagactttacctcaagaat

SEQ ID NO: 10595 - DNA, 294 bp, Zea mays
  unsure at all n locations
  Clone ID: LIB3150-057-Q1-N1-C6
cgaggtcttcattgatctcaagggaggaaactgcaaaatttanggtttgtttggccctattcgcacacacccacgccgtcggatcctcctgccctccccacgtccacctctctccgccgaagaatcggcggcggcggcggcggcggcgagcgccttcccttgtcaaaatccacccggcggcagagcagagcctcgttgctgaggaggggagatggcaggcatgaccgatatgccgatgaggccggcgcggccgggcccgccgatgcagcaccggggccctccgccgatggcgcg

SEQ ID NO: 10596 - DNA, 324 bp, Zea mays
  Clone ID: LIB3150-057-Q1-N1-C7
tcgaagcgccggaggccgcagcagaaggctcgcgacatcagctcgagccagctgcgatcgatttccagaccgagacaagcgctcgagcccgcagcagaaggctcgcgacatcagctcgagccagctgacgggatccacacggcgccatgtcttcccggcggccgtcgcatgcgtcccaccggaatccacggcaattcccgtacgcctgctatcttctagtacttacccttgcccttctcgtcgtgtatgccggtgccaagtcctgccgtcgtcccatctccgacaaccagatccggccgaagaaggaagcctgctacaccgacg

SEQ ID NO: 10597 - DNA, 316 bp, Zea mays
  Clone ID: LIB3150-057-Q1-N1-C8
gccacacacgctgccgccgtgagccgccgcccacaaggctaagcaccaaccatggccttcggagctctcgtcacgtcgaggctggccaggtccggccgcacccttgcatctgccgttgcccagggtcccgttgcccagcggatagcacctcctctgttctccaggtttggagcagtagctcgtcttctcagcacaaagccagccgcaacagatgtcataggtatcgatctaggcacaacgaattcctgcgtctccgtcatggaaggaaagacaccacgggtgattgaaaacgcagaaaggcgcgaggacaacaccc

SEQ ID NO: 10598 - DNA, 348 bp, Zea mays
  Clone ID: LIB3150-057-Q1-N1-C9
ggaggatgcagccaacaacttcgcccgtggtcactacaccattggcaaggagattgttgacctgtgccttgatcgcatcaggaagcttgccgacaactgcactggtctccagggcttcctcgtcttcaacgctgttggtggaggaacaggctctggccttggttccctcctcctggagcgtctgtctgttgactacggcaagaagtctaagcttggtttcactgtgtacccatccccccaagtttcgacctcagtggttgagccatacaacagtgtcctgtccacccactccctcctcgagcacactgatgtggctatcctgctggacaacgaggccatctatgacat

SEQ ID NO: 10599 - DNA, 317 bp, Zea mays
  Clone ID: LIB3150-057-Q1-N1-D10
agaattccctcccctagccgccgccgccgctcgtctccctgagaggtgccgggaccgaggatttggccgagttctaggtagagaatcggttttacttgtctcagcccggggtctgctgcgtctggtggtggtgaaggggagaaattcgtgagatctgttccggatcaggcgtgcgagctcgggaatcaggggtttcacacatagcttcgtcgatttgaatttgatgtactaatggagtctaagggtggcaaaaagtctagcagtagtcgttctatgatgtatgaagctccccttggctacagcattgaggacgttcg

SEQ ID NO: 10600 - DNA, 240 bp, Zea mays
  Clone ID: LIB3150-057-Q1-N1-D11
tgaagaacagagccgccactgaggaaaccctagcgacggcggcgtgctaccggtgaccttgtctcgaataggggctggtttcctgaaggctgggcccgatgcggcaggaagtcaggctcttttgtggacattgctgggcttgggtggatttcatagattaaagctcagcacaggggggagaagatacagggcacaaacacgaagatcacatcgatgttaatattaatgatgactgggatc

SEQ ID NO: 10601 - DNA, 159 bp, Zea mays
  Clone ID: LIB3150-057-Q1-N1-D12
gaggaggactaccataagaccggtccgattcccgagcccgagttcacctaccaccctggggttaagatcgggctaaacatcatccgggacgggcttcaaggtgaacgctataattaccgcaagattaaagaaacgcttgattgagtcttttaagagacc

SEQ ID NO: 10602 - DNA, 284 bp, Zea mays
  Clone ID: LIB3150-057-Q1-N1-D4
attggccaacaaagctgcagcactttctcccatggatgctgcccctccatctccaacacctcaggtttatcttggtgagcaatacgtgaatagttcaacactttcagacgttactttcttggtagaaggaaagcgattttatgcacacagaattgctttgcttgcttcttctgatgcatttcgtgcaatgtttgatggcgggtacagggaaaaggatgcaagggacattgaaattcctaatatcagatgggacgtctttgaactcatgatgagatttatctata

SEQ ID NO: 10603 - DNA, 372 bp, Zea mays
  Clone ID: LIB3150-057-Q1-N1-D7
cgcggctctataaagccgcacgcgcgcggagcggaggtcgcgagagcaaaattcactgctccctgcccgtcgaaccagccgagcaagccgcaaacccagcgagccgcggcgcctcgtcgcgcgcgccttgcttgtccgcttcttcgtccgaccgtccgccggtccggtccgagccgagccccccgaaggatggcggagcccgcggcggcggggaggaagacgcgggtggggccgtacgaggtcggcaagaccatcggggagggcagcttcgccaaggtgaagcacgcccacgactcccgcacgggcgccgtccgcgccatcaaggtgctcgaccgcaaccacgttctccgccacaagatggtcgagcagatc

SEQ ID NO: 10604 - DNA, 353 bp, Zea mays
  Clone ID: LIB3150-057-Q1-N1-D8
ctgcggcggagcacggaggcgaaggaggaggagcagcagcagcaggcggcgccgaggagcggcatcccactcagtgcttgcaaccatggctaggggattgaagaagcacttgaagaggctcaatgcgcccaagcattggatgctcgacaagcttggcggagcttttgctcccaagccatcttctggacctcacaagtccagggagtgccttcctctgatcctcatcatcaggaacaggctcaagtatgctctgaactaccgtgaggtcatttctatcctgatgcaacgccatgtacttgttgatggcaaggtcaggactgacaagacctaccctgctgggttcatggatgtca

SEQ ID NO: 10605 - DNA, 336 bp, Zea mays
  Clone ID: LIB3150-057-Q1-N1-D9
cgacctggggggttcagatcggatcggaagcttccataagtttccatcgggcttcgccgctcgccggtatggcgatccgcaaggggtcttcgtacgccgtcgcggcacttctcgcgctcgcctctgtcgccgccgtcgcaggggaggtcttcttccaggagaagttcgaagatggctgggaaagtcggtgggtcaagtccgagtggaagaaggatgagaacatggctggtgaatggaaccacacttcgggaaaatggaatggagatgccgaggacaaaggtattcaaacctccgaggattacaggttctatgcccttttcagccgaataccctgag

SEQ ID NO: 10606 - DNA, 140 bp, Zea mays
  Clone ID: LIB3150-057-Q1-N1-E1
ggccaagggaaacttcaagatagtatggcgaagaactattgagagcgccgcttaaagagggtgatgaaaatagatgaaggagaggacgacttttaagcttattacccaacattctcttaaaaataccatgagaaaggtga

SEQ ID NO: 10607 - DNA, 397 bp, Zea mays
  Clone ID: LIB3150-057-Q1-N1-E11
cacaggccggcagatcgctcgccatggaggtgaaggtgatgagctctagacttgtcaagccgtcctatccacctggtgtgccgcaaccagacaccacccagcatgtgccttgctcggtgttcgacaagatcacataccacatacagatggccatcatctacgccttctcacctccggtgccctccatcgcggacattgagcacggcctcgccgccgtgttgggcgtgtaccgggcattcgccggccaggtccgtccgggcccggacggcgagctcggcgtgctgctcaacgaccacggcgcgcagctcatcgaggcgttcgtggacgcccaccttactgttgtcgcaccagcgaggccgtcgcctgagctgcagcagctgcaccctgggctacatgt

SEQ ID NO: 10608 - DNA, 394 bp, Zea mays
  Clone ID: LIB3150-057-Q1-N1-E12
gcaaattgcaccaagaaatccatcgagaggccgtcgacaggggaattaatggcgtcgtcgtctagcagcagccaccgccgcctcatcctcgcagccgccgtcctgctctccgtgctcgcggctgccagcgccagcgccgggacctcctgcgtgccggggtgggccatcccgcacaacccgctcccgagctgccgctggtacgtgaccagccggacctgcggcatcgggccgcgcctcccgtggccggagctgaagaggagatgctgccgggagctggcggacatcccggcgtactgccggtgcacggcgctgagcatcctcatggacggcgcgatcccgccgggcccggacgcgcagctggagggccgcctagaggacctgccgggctgcccgc

SEQ ID NO: 10609 - DNA, 339 bp, Zea mays
  unsure at all n locations
  Clone ID: LIB3150-057-Q1-N1-E2
ctcgcgcccacagccaaatttttctccactcaatcgcggcataagctgcactgcagccatggacgccagcggagccggtagcaaggcgaagaagggggcggctgggcgcaaggctggcggccccaggaagaagtcggtgtcgcggtccgtcaaggccgggctgcagttccccgtcggccggatcgggcgctacctcaagaaggggcggtacgcgcagcgcgtgggcaccggcgccccctctatctcgccgccgtgcttgagtacctcgccgccgaggtgctggagctggccgggaacgcggcgaaggacaacaagaagacgcgcatcgtnccgcgacac

SEQ ID NO: 10610 - DNA, 317 bp, Zea mays
  Clone ID: LIB3150-057-Q1-N1-E3
cgcaaattgcaccaagaaatccatcgagaggccgtcgacaggggaattaatggcgtcgtcgtctagcagcagccaccgccgcctcatcctcgcagccgccgtcctgctctccgtgctcgcggctgccagcgccagcgccgggacctcctgcgtgccggggtgggccatcccgcacaacccgctcccgagctgccgctggtacgtgaccagccggacctgcggcatcgggccgcgcctcccgtggccggagctgaaaaggagatgctgccgggagctggcggacatcccggcgtactgccggtgcacggcgctgagca

SEQ ID NO: 10611 - DNA, 73 bp, Zea mays
  Clone ID: LIB3150-057-Q1-N1-E4
gcatgagaatcatctgacgaactgcctgaggcgcggctctctgtagactgtcataaaacataggactatgctt

SEQ ID NO: 10612 - DNA, 320 bp, Zea mays
  Clone ID: LIB3150-057-Q1-N1-E5
ggccccagccccccgcggcgtgggcgtgatcccccacggtgcggcgctgcagccccggacgcgcggccggccccgatccgggctcctccggcggacgcgggcgcggcacggtggcgatgtggggcgcagtccctggcgcggcgggtccggctatggcgcgcgcgggcgcggtggcgaagcaccagcggcccctcccggcgcgagcagtgccagccctcccggcggcgcgggtgtcagccaaagcacgggggctcgggtgtggcggcggtggcccggtcgcaagccttcgcgcacgggctcgggtgcggggcaagccccag

SEQ ID NO: 10613 - DNA, 346 bp, Zea mays
  Clone ID: LIB3150-057-Q1-N1-E6
aaagcattgagatgatttcatatagattcagattcagattatatttagacccatcaaacctttgagtaatataaccaataccccctaaatatactggttggtttaacctttaagtaggttcgagctgctaaatgatgcaattttaaacttgaaatatgttatgttttctatatgtcacggataaagcgttgaggtgtttccatgtgagtgactcgaatttgcaatcggtatgagtttgtaactaaaatcaatccacaaattcaggtttcacatactatgtagctatgtgtgctgaattattttaaaaaaaaacactaagttattcctgtttcgtgatgtctgtgcg

SEQ ID NO: 10614 - DNA, 340 bp, Zea mays
  Clone ID: LIB3150-057-Q1-N1-E7
cactcctaccccacacagaagcggcggcggcggagcaaacgcaggcgaaggcgagggtgtgagggaaggagcaccagccatggtgcacgtcaacttctaccgcaactatggtaagacgttcaagaaaccaaggcgtccttatgagaaggagcgtcttgatgctgaactgaagctggttggtgagtatgggctgaggtgcaagcgtgagctttggagggtccagtatgcactgagcaggatccgtaatgctgcaaggcacttgctcacccttgacgagaagaacccccgtcgtatctttgagggtgaggcacttcttcgccgcatgaacccgctatgggct

SEQ ID NO: 10615 - DNA, 264 bp, Zea mays
  Clone ID: LIB3150-057-Q1-N1-E8
agacagaataccaattttttttaggggaaaatgttattgagacctcactcgacaatatacaggtcattcaattattaatgagaactgcaagcactgaagcatacggtcagtacttattggatgcttggaaatcaccaagctgtacttataatgtgtatgtggcttatgctacaacggcattgtgtactgacaaggatacaaaagctggataaagcgttattagaatctggatgaaggaggattatgcataaaccacgatatatc

SEQ ID NO: 10616 - DNA, 326 bp, Zea mays
  Clone ID: LIB3150-057-Q1-N1-E9
agtcttcctcgctctccaaatctcgcgacgagaaagcccatctaggaccacaggggcgcgccagccggcaggaacgacgggagaggagggcatggagccggctgagcggatcgagtcggccgggacggcgctggggaagcgtccgaggagcagggtgctgccgcgcacggccagcatggtgacggtgccgtcggcggcgaagcaggggcgccaggagcggggcgccggcgtgccgtcgtcctgctcactgccggctgcctgcgccgggatggtggccgtgccggggggttactactactgtggcacctcgttcgcggcggtggaga

SEQ ID NO: 10617 - DNA, 115 bp, Zea mays
  Clone ID: LIB3150-057-Q1-N1-F1
ccggacgcgtgggtggagaggacaaaaatggggcagtacatcactctcactaaaaagatatttttgattgattggcccggggttgtatatcaaaacaatgattcagaaactgata

SEQ ID NO: 10618 - DNA, 125 bp, Zea mays
  Clone ID: LIB3150-057-Q1-N1-F10
ctgcctccttccctcgatctattctccatcttgtcctccctttgctaaaaataacgggcagagcatcttcgattgacgtgccttctttctcgtcgttcgcgaggatgtgtgtaaaccggtatgga

SEQ ID NO: 10619 - DNA, 335 bp, Zea mays
  Clone ID: LIB3150-057-Q1-N1-F11
ggcggcgcgggcggacaaggagcaggcggaggaggagctgtgccaagccacaatgggtatctcgcgtgactcgatgcacaagcgccgggccaccggtggaaagcagaaggcctggaggaagaagcgaaagtatgagcttggtcgccagccagccaacaccaagttgtcaagcaataagacagtgaggagggtccgtgttcgtggaggtaatgtgaaatggagggctcttcgccttgatactggtaactactcatggggaagtgaagctgttacccgcaagacccgtattctcgacgtggtctacaatgcatcaaacaatgagcttgtgaggacac

SEQ ID NO: 10620 - DNA, 421 bp, Zea mays
  Clone ID: LIB3150-057-Q1-N1-F12
ttaaaaactagtccccttgcgaaaaaattggtccgtccctgcctcagtctgcactctacgatggcggcgcctccggccacggctcccgcgaccgcccggtgtctgtccgtcgccaagtcgtgctgggctgccgagcggagctccagctcgtttgtcctctcggctcctgcgactggcctccggcaaagtgggagccgcgtcctcagcatccgtgccaaggttgccactggcctgcagagggcctgcattgcggatgatggagcggaaaggccgtggaagctcagtgatgctcgtcttgtcctggaagatggatcagtgtggacggccaagtcttttggtgcttcaggaacacaaggtggtgaagttgttttcaacacatcactgacaggctatcaggagattttgaccgatccaagtatgc

SEQ ID NO: 10621 - DNA, 332 bp, Zea mays
  Clone ID: LIB3150-057-Q1-N1-F2
ctcctcaacgcgtcctaccagcgtttccgcatcgtcccttctgcgtactactcccgaagcttcggcccccagcatcaggaaggcgagccagagatcgagcggcccgagaaaaggaggaaacgcaagcgtaatcagaagccgaagcccagggagctcaatccaatggagcggatcgctgaagcccggcaccaggaagcgaagcctttactattgaacgcacatgaatcactcgttaaggctaaacatctactggagtacatttccaagacaatcaaaggcaatgaacacacacttgatgcgggtagtggtctgagaataaattcgttgagctt

SEQ ID NO: 10622 - DNA, 261 bp, Zea mays
  unsure at all n locations
  Clone ID: LIB3150-057-Q1-N1-F3
cgttcttcacctcactaacaccagctagcaactctttctctcctgcaataatggccgctcgctcctcctcctcccagccgcagctggtcgcgggggcggcggtcctggcaagcgcgctgctgctgctggcggcgggggccgggacggcgtcngcggcggtgaactgcggcgaagtgacgtcgtcggtggcgccgtgcctcgggtacgcgatgggcaacgcggcgtcgccctccgcggcgtgctgcaacggggtgcgctcgc

SEQ ID NO: 10623 - DNA, 322 bp, Zea mays
  Clone ID: LIB3150-057-Q1-N1-F5
cagctctcggcttctctctctcatcggcacacccgagctcgcgccctccttccacgtcgaggtccgagtcctgctttgatggcgaccgacgtgactgagactcccgcgccgttggtggatgcggccccagaggcgcccgccgacgccccggcggcgcctgctgccgacgcgaagccggccaaagccaagaaggccaccgcgccgaagaagcgcgccagcccgacccacccgccgtacgccgagatggtctcggaggcgatcacgtcgctcaaggagaggacggggtccagcagctacgcgatttgccaagttcgtggaggac

SEQ ID NO: 10624 - DNA, 345 bp, Zea mays
  Clone ID: LIB3150-057-Q1-N1-F6
ggacattagcaacatgaacctggccgactccatgaccagggccaaggtgctggatattgacctgcagaagcagctcaagccctacatggagtccatggtgccacttcccggtatctatgatccggacttcatcgcggctaaccagggctctcgcgccaacagtgtcatcaagggcaccaagaaagaacaggtggagcagatcatcaaggatatcagggagtttaaggagaagaacaaagtggacaagatagttgtgttgtggactgcaaacactgaaaggtatagcaatgtgtgcgctggtctcaacgacacgatggagaatctactggcatctgtggacaagaa

SEQ ID NO: 10625 - DNA, 307 bp, Zea mays
  Clone ID: LIB3150-057-Q1-N1-F7
gggcctgcggcggcagcaacagagagcagagatgctgcaattcccggcgctgatgcggcagtggccatcgccgccgatgatcccggcgtccacgctgctccccgtgccggccacctcccaggaggacgaggtcctcctcgccatggccgagtccgacctcgaggacaagtggaatgagatccggaagaccaacagccacctgattatcatcgggaagcccacaggcgacaccaaggaggagtatgacgctgaggtggaggacgacgatgcacacaacgtcgaggagtctgatggcgatgacttcgac

SEQ ID NO: 10626 - DNA, 300 bp, Zea mays
  Clone ID: LIB3150-057-Q1-N1-F8
cgataccctctatgtgtcacacattcaagtgaaccaggctcagaagcagcggcgcaggacctaccgcgctcatgggcgcatcaacccttacatgtcctccccgtgccacatcgaactcatcttgtcagagaaggaagagcccgtgaagaaagaggctgagtctcagatcgcaaccaggaatgcttagagaatgggaacataccttctatgattggctgagtgaagattttggctgattatttgtcgtcccatattgtttacctgagtattgtttgcaagtgctttatcacatggatcaca

SEQ ID NO: 10627 - DNA, 314 bp, Zea mays
  unsure at all n locations
  Clone ID: LIB3150-057-Q1-N1-F9
cgcatagacaggcgtcttcgtactcgcctatctccgcgacccaaagcgttcccccttctcccattcttctctcatttctcaccaccgccgccgctaccccctttcgacaacaccatgagggagtgcatctcgatccacatcggccaggccggtatccaggtcggaaacgcgtgctgggagctgtactgcctcgagcatggcattcaggctgatggtcagatgcccggtgacaagaccattgggggaggtgatgatgctttcaacaccttcttcagtgagactggcgctgggaagcacgtnccccgggcctgttt

SEQ ID NO: 10628 - DNA, 266 bp, Zea mays
  Clone ID: LIB3150-057-Q1-N1-G1
tgccatacgaccccttggctttccactccactgaagcaaggcgagagggagagagaggaaagaggaggagaaaccatggcgaacgacagcgaccggaaaggccgcgtctcgacagcgccaggggcagggtaccggtacgcggcgtacggaggctaccaaggggcggaagagccgaaatggtggccgcggctcgtgcccaccgtcatcgtcgcctgcatcgccgtgttcgtcgtccagatgtacgagaacaacttgcccaaacacgg

SEQ ID NO: 10629 - DNA, 289 bp, Zea mays
  unsure at all n locations
  Clone ID: LIB3150-057-Q1-N1-G10
cccacgcgtacgcccacgcgtncgcccacgcgtacgcccacgcgtccggtcgcttccagccgccgtcgagttcgcctcggcaagcgcagcagccgccgcagcacatcgctctcttgatctcagccatggcggaggtggagcagcaacaggacacgccgaagctcttcaaccgctggaccttcgatgatgtccaggtgaacgacatctcgctgaacgactacctcgctgtgaacgcgacgaagcacgcgatgtacctgccgcacaccgcggggcgctactacaagaagcg

SEQ ID NO: 10630 - DNA, 297 bp, Zea mays
  Clone ID: LIB3150-057-Q1-N1-G11
ttccccggtcccgcctccgtctctgtccagcgggcctccgctctcctcgccgcccgcccgcctgtccctccctcctcgccgccatgaacaacctcctcacggattcctttgagctccctcggcgggactcctcaagagacgcagatattgaaatgggaatgcatcaggctgatgcttcagacaacttgaaagatttcttgaagaaggtcgatgcaattgagagtataattgcaaagctgacaaatctattgaataagctccagactgcaaatgaggaatccaaagcagttacaaaaa

SEQ ID NO: 10631 - DNA, 385 bp, Zea mays
  Clone ID: LIB3150-057-Q1-N1-G12
ccgacaactctctctaccgtccgagaccccaagcaccaccgcggcggcggcgaccatggctgtcggaaagaacaagaggatctccaagggaaagaagggcggcaagaaaaagaccgtcgaccctttctctaagaaggattggtatgacatcaaggcaccgtcggtgttcagtgtgcgcaacatcgggaagactctcgtatccaggacacagggtaccaggattgcttctgagggtctgaagcacagagtctttgaggtttgcctagctgatcttcaaggcgacgaggatcaagcttacaggaaaatcaggctccgtgctgaagatgtgcaaggcaagaatgtgctcacaaacttttggggtatgaattttaccactgacaaactc

SEQ ID NO: 10632 - DNA, 345 bp, Zea mays
  Clone ID: LIB3150-057-Q1-N1-G2
cgcaacgcctagggtttcttgcacgagcagatgaagcggcagccaccacaccctcgcagcggcgacgactcgccggccggcgagagaggaagcgacggagggttgaagaaggggaaggggagagggaggtggggcggcgggagtcggaggcggaacgatcagcggctgggcggcggcggcggcggggcgctctccctcgccgccttcgccagcgccaagtcccggaccagcggctacaacccggccctcatcagatggtggtgacactgcccgatatgtgccaaaaccgcatcacaaagggaagaagcacactgtgcatagtttgaaagaagaagtttgagaaaa

SEQ ID NO: 10633 - DNA, 337 bp, Zea mays
  unsure at all n locations
  Clone ID: LIB3150-057-Q1-N1-G3
ggaggttntcaagaaggctggtacttatgatgcgaagaagctgtttggtgtgactactcttgatgttgttcgtgctaaaactttttatgctggaaaagcgggtgtgccagttactgaggtgaacgtacctgttgttggaggccatgcgggtattactattctgccactcttctcgcaggccactcctgcaagcaattcgttgtcccaagaagacattgaggccctcaccaagaggacacaagatggtgggacagaggtggttgaagcaaaggcgggaaaaggctctgcaacgttgtccatggcatatgctggggcctgttttgcagatgcatgtttg

SEQ ID NO: 10634 - DNA, 259 bp, Zea mays
  Clone ID: LIB3150-057-Q1-N1-G4
cctctctctcgctctcggcgacgactgggcgaccgccgccgccgctgccgctgccgctgcgccgcccttgtccaggtgcccaggtcttcgcaggcgccttcgccaggtcttcgacggtaacgagcaccaaccggattcaaggaatataagtaaaatgaggccagttttttgtgggaaccttgactatgatgttcgcatctcagaggttgagcgccttttttggaagtatggaaggggggaacgagtggatctaaagaca

SEQ ID NO: 10635 - DNA, 266 bp, Zea mays
  unsure at all n locations
  Clone ID: LIB3150-057-Q1-N1-G5
taatgattccacgaggccagctggcgacaacaactaccaggcatttatcctggaggcggcgtcaccgtcgccgatccctcctctcaactggcaacaatgggtgcacaggatgcaactgccctgaatgttcagcanggccgagcgaggacagctgatgaaagcctcgtccacgtncctgccgcccaggtttcacttccaggtgccctagccctagggaactttgagcaagagctcggagaagacgcgctgctgccgccggtgctgag

SEQ ID NO: 10636 - DNA, 239 bp, Zea mays
  Clone ID: LIB3150-057-Q1-N1-G6
gctagtatgatgccaccgatgatgatgccaaacatgggttcaccaatgatgatgccgagtatgatgcctttgacgatgacgccgagtatgatgccaccgataatgatgccaagtatgataccaccgatgatgatgccgagcatggcgtcatcaatgataatgccaaacatgatgacagtgccacaatgttactctgattccatctcgcacattatacaacaacaacaattaccattgat

SEQ ID NO: 10637 - DNA, 334 bp, Zea mays
  Clone ID: LIB3150-057-Q1-N1-G9
ggatttgtcgtctatgggaactggtagcaatggcagtgggaatgggaatggtaacacagccgctggagcagcagcagagggcggtcttgatcccattttggcatatacagcaggggcagagattgagcagttgcagtggtcggcgacccagcctgactgggttgcaatcgcattcgccaataagcttcagattctcagggtctgatttcctagttccaccctgtttcagtgaggagtaaaaaatgctaaacttggataatgagctgatgcccggaggataatcttgcaattgctttactggtgcttatttatgttgtggacaactgatattcat

SEQ ID NO: 10638 - DNA, 260 bp, Zea mays
  Clone ID: LIB3150-057-Q1-N1-H1
cctacattcaggtcaagatcaaggatggggagaacaaagtcttcagccctgaggagatcagtgccatgattcttggcaagatgaaggatactgctgaggcataccttggcaagaagatcaatgatgctgtcgtcactgtccctgcgtacttcaatgatgcgcagaagcaggcaaccaaggatgctggtgtcattgctggcctcaatgttgctaggatcatcaatgagccaactgctgctgctattgcctatggtttggac

SEQ ID NO: 10639 - DNA, 264 bp, Zea mays
  Clone ID: LIB3150-057-Q1-N1-H10
gcagctacccgtgaatctcctattttgaaaaggtcactgcttttttatttcattctatattctatattatatttttgtaatattcagtctcgtttaattgctttcagacttaatgttagataattgtttacattttctacaattcagtctggactaattgctttgggactaatgttggagatatccatatgtatctgcgtctaagcatttttcatttgtatttatcatgttttgtcaatagggatacttgtttcttgtaagtct

SEQ ID NO: 10640 - DNA, 355 bp, Zea mays
  Clone ID: LIB3150-057-Q1-N1-H11
ggtgaagccgccgccgctgcagtgtccatagccaccgcaggagactgagatggggggttttgtcaagacccacaagagcaatgcgtacttcaagcgtttccaggtgaagttcaagagaaggcgcgctggcaagacagactacagggccaggataaggctgattaaccaagacaaaaacaagtacaatacacccaaatacagatttgttgtgcgatttaccaacaaggacatcacagcacaaatcatctctgctagtatagcaggtgatatggttcttgcttctgcttactcgcatgaagtgccacgatatggtcttgaagttggtctgaccaactatgcagctgcctactgcact

SEQ ID NO: 10641 - DNA, 350 bp, Zea mays
  Clone ID: LIB3150-057-Q1-N1-H12
ctgactcgggaggcagtttatcatcctacatactgccagcagcagcagttggagcaatgggttattgctacatgtggtggaaggggttgtctctctcagatgtcatgtttgtcacaaaacacaacatggcaaatgctgttcagagcatgtcaaagcagttggagcaagtttcatcagcactagctgcaacaaaaagacatctaactcaacggcttgagaatttggatggcaaaatggatgaacaagtagaagtctccaaagctattagaaatgaagtcaatgatgttaaagatgacctgtctcaaattggatttgatgtcgaatcaattcaaaaaatggttgctggattg

SEQ ID NO: 10642 - DNA, 299 bp, Zea mays
  Clone ID: LIB3150-057-Q1-N1-H4
gcggatggcacttatgccacacagagcgccgctaccgagaccatttcagccccatcagttgctcatgggtcattagcatctaccctgaacctcagatcactcattttgtcaggtgatttcttcctggctgctgttgttgcatgtaccctgaccaagcttgtgttgaggctggaagaagtgcagccatccaaggttgaatcaaacaaagcttgcactggagcattgctgatcatgacatcgattctgcagctgggccagtcttcttaccttccccacccgattgataatgattcatatga

SEQ ID NO: 10643 - DNA, 293 bp, Zea mays
  Clone ID: LIB3150-057-Q1-N1-H6
atacgcactcaccagcagggtggatatggcacaaatcttgccccagcaaaactagttgggaagaattttacctcgcttgataaatctatatcccgcatgatgggtacaccatctgcaccacttccaccattgccacatggatctgttagcgatagagagagccactctatgcctgaagcagcaaaatttataaatagccaatcagtaatggccatgtcatcgctaatgccatctgcttcaatgcagtccatgactgagatagcagagaataatgatggcactggcaggaaaat

SEQ ID NO: 10644 - DNA, 337 bp, Zea mays
  unsure at all n locations
  Clone ID: LIB3150-057-Q1-N1-H7
ctcatctgcgtacacggtctccctcttcctgtcagtagtagagtgagagtgaggcagcgagtgggagacaaggggaaatggggaagggagcgcaagggagcgatgcggcggcggcgggcggcgaggtggaggagaacatggcggcgtggctggttgccaagaacaccctcaagatcatgcccttcaagctcccgcccgtcggcccttatgatgtccgcgtgcgcatgaaggcagntgggatttgcggcagcgatgtgcactacctaagggagatgcgcatcgcgcacttcgtggtgaaggagccgatggtgatcgggcacgagtgcgcgggcgtggt

SEQ ID NO: 10645 - DNA, 239 bp, Zea mays
  unsure at all n locations
  Clone ID: LIB3150-057-Q1-N1-H8
ttgtcctccgcaccttccaaatcatctctcacagaacactgtccaaactggatttgataggaccgttgctttttgtaatcaagagaagcaaagaaatgaagagagcttgccgtgcacatcccactggagaagcatcaaacagcatgtgctctctcagggttcttcaaggcctttcttccgaaagcattcctcaaacacctncttgagtgattcaagggaggcatcaacaagtgtgcttg

SEQ ID NO: 10646 - DNA, 220 bp, Zea mays
  Clone ID: LIB3150-057-Q1-N1-H9
cttagatatatatacagaaaatagcttcactatctagattccatggcatcaaggatgggaatggtggctattgtgtcactatttgtttgtgctcttgctgcttcaacatcagttaatgctaatgtgtggcagactgatgatataccagttgttaatagcaacatggtgaggcatagcaacatggagaggcaacaacaacaaggtggatttattggccatc

SEQ ID NO: 10647 - DNA, 331 bp, Zea mays
  Clone ID: LIB3150-058-Q1-N1-A1
aaaaatatccccaaaccctagctcccgatctcgatggcgaaccctcgcgtcttcttcgacatgaccgtcggcggcgccccggcgggccggatcgtgatggagctgtacgccaacgaggtgcccaagaccgcggagaacttccgcgcgctgtgcacgggcgagaagggcgtgggcaagtccgggaagccgctccactacaagggctccaccttccaccgcgtcatccccgagttcatgtgccagggcggcgacttcacccgcggcaacggcaccggcggcgagtccatctacggcgagaagttccccgacgagaagttcgtgcgcaagcaca

SEQ ID NO: 10648 - DNA, 400 bp, Zea mays
  Clone ID: LIB3150-058-Q1-N1-A2
cagcactgttttatgatcaatctttggcgggtgaagatatttatgaaccgttcttaaggttgttatggaaaggcaactggtttgtacaagaaaaaagttgtaagatattgactgttataattagtgcacgaccaaagcttcagaatggcacacttccaaatggagatgcttcgaattcgaagagcaagcttacttcaacacacgatgtattgagaggtttggttgattggctctgttcacagctgaggaatcctacacacccgagctgctctattcctacttctatccattgcctctccactttgctaagagaaccatatgttaggacattatttgttcaagctgatggcatcaagctgctcattcccttaatttccccagcttccacacaacagtcaat

SEQ ID NO: 10649 - DNA, 405 bp, Zea mays
  unsure at all n locations
  Clone ID: LIB3150-058-Q1-N1-A3
gccaacagaagtcacgtcgacaccaggcagccggccggactgcagctcgtcgtcttcgatgacggccgggaccatgcgtgtgctaggcggggaggtcagcccgttcacggcgcgggcgcgtctggcgctggatctgcgcggcgtggcgtacgagctcctcgacgagccgctggggcccaagaaaagcgacagactcctcgctgccaaccccgtctacgggaagatccccgtgctgctcctccccgacggccgcgccatatgcgagtccgcagtcatcatccagtacatcgaggacgtggcgcgtggaagcggcggcgccgaggctagcagcctgctgctgccggacgacccctacgagcgcgccatgcaccgnttctggaccgtcttcatcgacgacaagtttgg

SEQ ID NO: 10650 - DNA, 397 bp, Zea mays
  Clone ID: LIB3150-058-Q1-N1-A4
gttggcttctcctccccctccggttcgggttcgggttcgtgaggttctccggggttcggtttcgtgggtgagcggatcgagatggcggcgtcggatgttgagtaccgctgcttcgtcggcggcctcgcctgggccacggacgaccactccctccacaacgccttcagcacctacggcgaggtcctcgagtccaagatcatcctcgatcgggagacgcagaggtcccgcggcttcggcttcgtcaccttctccacggaggaggcgatgcggaacgccatcgagggcatgaacggcaaggagctggacggccgcaacatcaccgtcaacgaggcccagtcccgcggcggccgtggaggcggcggcggcggcgggtacggtggtggccgtggaggcggcg

SEQ ID NO: 10651 - DNA, 351 bp, Zea mays
  unsure at all n locations
  Clone ID: LIB3150-058-Q1-N1-A5
caacaccgcaccacactacccagcgggatccggccacccgcacccggagcagaggagatatgtcgcaggggaagggaggagcgtcgaggaaggaggaggtggtcaccagggagtacaccatcaacctccacaagcgcctccacggctgcacattcaagaagaaggcacccaacgccatcaaggagatcaggaagtttgcacagaaggccatgggcaccacggacgtcaggatcgatgtgaagctcaacaagcacatctggagcagcgggatcaggagcgtgccgcggagggttcgtgtgaggatcgcccgcangaggaacgatgacgacgatgccaaggaggaactctact

SEQ ID NO: 10652 - DNA, 276 bp, Zea mays
  unsure at all n locations
  Clone ID: LIB3150-058-Q1-N1-A6
cctttcctcgtcctcgtcctcatcgcggcaggggagcaaacaagcaagcaagtaaacgggcgaggagctggatagaggccggcgactcgaagcaaccgccgatcggagccgcggctgaagaggaggagcaagctcgagatggtgggtctcgtcngcggcagcacggggcgggcggagcacgtcgtggtcaacgccggaagaaagacggagtacgtgcgccgnctgcaccgtcacgcgccggccgagcaccagtgtacttgcaacctcggtaagcac

SEQ ID NO: 10653 - DNA, 402 bp, Zea mays
  Clone ID: LIB3150-058-Q1-N1-A7
gagatcggctgcctcgatttctgttggagtgccaagcagtactgctagttctacttctgtacttcagcagtagtaggccgctgttgctacaattttgactgactgagatgggaatcctctgcctcggtgcttcctccacactgctctgcggggaggacaggaacaacgtactcggcctcggctgcggcaacgagctggtggaggtggggagcggccatgacggcttggactccgtcgtcggcgccgtgttcctcgtggacacagatgaggccgtgcgggcgttgttggagaaggagacggaccacaagcctcaagacggctatgcgcagaggctggagcgcggctgataggagtactcctggaggagagacgccatggattggatttgcaacgtccattcgt

SEQ ID NO: 10654 - DNA, 363 bp, Zea mays
  Clone ID: LIB3150-058-Q1-N1-A8
gcggcggcggcggcggagagaagatggtctacgacgtgaactcccccctcttccgttccttcctcagccagaagggcggcgccgacaagaggaaaatggaggagcataaaccaaaggagcagaggcccaaggccaacgagaacaagcctgtgatgaacgaatgagtatctccagaagctttgttcaatgtgcaaccaagtccgatgtccgtttgctctggttagcttaaaaccaacgcttccaataatcctattggtgtcttagtttccccttatagtgttatttgctcggcttgaacatggcaaacggaaatgaaacttgaactacctatggtactgtcatcaatttgagacccccatgatt

SEQ ID NO: 10655 - DNA, 389 bp, Zea mays
  Clone ID: LIB3150-058-Q1-N1-A9
ctccagtagtagtagacatcagcactgagctctcttcctcacggggcatcagcatcacgatgatgatcgagcggtctgcagccatggctctgctcctcgctctcttactcgtgctactcttggccaccggtggtcaagccgacgccgatgagccggcaacgtcacagcagcgcgctgttccggcggagcaggcgccggcgccggcgccgaagggctacgaaaccctgagggaggaaccggcaccaaccggcggtcaccgtcaccgggagatcaagatcggcgcatgcttccccatcagcgacggcggcagcagcgctttctcctgctaccagcggtgcacgagcaaaggctacgccggcgggcgctgcgacaccctgcccagcggcttt

SEQ ID NO: 10656 - DNA, 362 bp, Zea mays
  Clone ID: LIB3150-058-Q1-N1-B10
ttctccgtggaagccggcgggccgccggctcctttgtccctgtcgtcgtgctcttccgtaccgccattccctagcactgtccacgggcgaggtaaagaaaccatctttccaccttctcccaccccctccggacccataggtgccaccggcatttgtcttgcgattgcttggcccagatctgcgtgcattcggcatttctcgtgcgtagatctcgcgtgtacggtgtacctcgtttccctcggcgggtggatcagtgacggcttggtcgagatggacgatgtggttgatgacatcatctgtggaacggatgcggcggttgccgtcgaggatggggccagtgggacgcccgcaatgcctagctt

SEQ ID NO: 10657 - DNA, 376 bp, Zea mays
  Clone ID: LIB3150-058-Q1-N1-B11
ctatatctgtagccaacacacacataggtactcttcattccattccattccatctcaaaggatagaataatgtgcggcctctccaccaagctgttcgtggaccatcttctgctcgtttgttacaccgtgacgcacggtgggcccgagactattgtgtctgggaagaagtgcgagtagaacagcttgcacttcaagggaccttggtcgagggacgccaactgcgcagacccttgtctgaccgaaggtttcacccacggactgtgcaatggcctacgccaccgctgcttatgaaccaatgactggtaacactgcctcgcctcgcgttctgcgttggcatatatagcacccacggatcacctaaacatgcatgcctgcg

SEQ ID NO: 10658 - DNA, 367 bp, Zea mays
  unsure at all n locations
  Clone ID: LIB3150-058-Q1-N1-B2
ggtatccgtgtctggcaaacttattttgaggcttgctaaatatgtaccttttgtctctgaagttgttaaataaagcaaattaacttccagtttctaaaaaaaaaaaaaaaaaaaaaaaaaaaaaaaaaaaaaaaaaaaaaaaaaaaaaaaaaaaaaaaaaaaaaacaaaaaagaagcagaaacaaaaatactattgaaagaacttaacacaagatgtgcttgtgattcccgcgtataaaagaattgcaacaatcatacaggcgtacgctatgttcagtagatcgtgcctttgcctcagtataaaaatactgcgttcgcctcgtntaatagaaaccactctccctaatgaactccctttttttttaat

SEQ ID NO: 10659 - DNA, 386 bp, Zea mays
  Clone ID: LIB3150-058-Q1-N1-B3
gttctagatcgcgagcggccgcccttgggggttttttctttttttttttttcagaactaagatttcgttttgctccattcccatttcagttcggcatagtagcctgagtacagccgcttcttataaacgacaggtggataacaaaaccaaactacagatgtatcgcaacaacaaaacggtgtattgcagcataggcaacacaaggaaaatccagaaaccactacagtaaatagtagacaaaaaataccaaattccagttacggtcccacaacaagaccaaaaaaacacaatttcattggatccttttgccgcatcctccgcgttcatcatcaatcatcaccaaaagtagtcttctttcctgcactgggagtgccagcgctgtgctt

SEQ ID NO: 10660 - DNA, 397 bp, Zea mays
  Clone ID: LIB3150-058-Q1-N1-B4
gcgaggcaaaagcattgcgaccacagacagcgcgcgcttcaaggccttttttttttgagataacaaggaggagaggaggagatggcggtcacgatcacgtgggtgaaggcgaggcagatcttcgacagccgcggcaaccccaccgtcgaggtggacgtgggccttagcgacggcagctacgcgaggggggccgtacccagcggcgcatccactggaatatatgaggccttggagttgagggatggaggatctgattatcttggcaagggtgttcttaaggctgtcagcaatgtaaataacattattggaccagcaattgttggaaaggaccccactgagcaggttgagattgacaacttcatggtccaacagcttgatggaacctccaatgagtggg

SEQ ID NO: 10661 - DNA, 396 bp, Zea mays
  Clone ID: LIB3150-058-Q1-N1-B5
cggacgcgtgggcaccatcacccaaggtgttattttctgcaatactaagagaaaggtggattggctcactgaaaaaatgcgtacaaataacttcaccgtatcagctatgcacggtgacatgccccaacaagaaagggatgccattatgggtgagttcaggtctggcgcaactcgtgtgctaataactacagatgtttgggctcgaggactggacgttcagcaggtttcacttgtcataaattatgatctcccaaataatcgtgagctttacatccatcgcattggtcgttctggtcgttttgggcgcaagggtgtggcgatcaatttcgtgcgcaaggatgacatccgtatactgagagatatagagcagtactacagcacacaaattgacgagat

SEQ ID NO: 10662 - DNA, 376 bp, Zea mays
  unsure at all n locations
  Clone ID: LIB3150-058-Q1-N1-B6
gtatgctttgcatggtggctggagggatatgactatatgagtttacctatatattatggactatccttgttggcgtattgttttattaacgattatatttagccagttataatccgttaggtgagcagattgtttgcttgggttaccagatctcggtagccagtgggtgcggttccaggtcttctgttgatgacttatcacaagatgtgcttgtgattaccgtgtatgaggaattgcgacatcatacaggcgtatgctatgttcagtagatcgtgccttgcctcgtgtataataatactgttttgtatcgttngttggaaaagaccacactgaacaagttgagaatgacaacttcattgtccaacaacttgatgga

SEQ ID NO: 10663 - DNA, 396 bp, Zea mays
  Clone ID: LIB3150-058-Q1-N1-B8
ggagacatgggtgctcaccgaggagggcaagggctacgccgccaagggctcccccgaggcacagctcgtcgccgcaatttcaccggagggtgcctctaaggacgcactcaaggcaatattgggagatgctttcgatgttggcatgaaggcagccgcgaggaacaagtggatagggttcgagaaggggaataaggacttagtccttaggaaggttgagagcgtaaaggatgagttgcaagagcagcttagaagactagagaatggggaggttgtttctgataaagcgatcgatgatttgaagagaaggaaacttattacgaaagagaaatcaatttggtactctctaaagaaggggtctgagtttgttgtaaagagaaaaacgttagctactgatgt

SEQ ID NO: 10664 - DNA, 376 bp, Zea mays
  Clone ID: LIB3150-058-Q1-N1-B9
gcgacgccgccagccagacccgatccgctccctcgctagggttttcgtccccgcgccgccgcgctcccggatcccaccgaaacaaccatggccggcggtcccgcggcggtgtcgttcctgaccaacatcgcgaaggtggctgcggggctcggagccgcggcctcgctcgcctccgcgtcgctctacaccgtcgacggcggcgagcgcgccgtcatcttcgaccgtttccgcggggtgctcccggagaccgtcggcgagggcacccatttcctcgtgccctggctgcagaagcccttcatcttcgacatccgcacgcgcccgcacaacttctcctccaactcggggaccaaggacctgcagatggtcaacctcacgc

SEQ ID NO: 10665 - DNA, 393 bp, Zea mays
  Clone ID: LIB3150-058-Q1-N1-C1
agagcagccggcagcgtcgccgtcgcgccgcccccgcactgctcccttgccccggccgtcggcgtcgtcgtccgcccgctcacagctgaccgcccgctctggcgctcggccccgtttctgccctcgcccctcagccgcctcggcgcctgtccgagaccgacgtcctcgctccatccagtcagttgaccagctcgactgctctagctcgtgctctccgtccccgatttgatttcttcctttcagcccaacccagcccaaagccgtcagatcgcggcactccgtccaaccctcggcgccaccgatccccttctccgccccctctcctcctcgtcgtcggtgaagatgattccccagagccagagcagctccctgcagcgccttcaacacgtcgag

SEQ ID NO: 10666 - DNA, 338 bp, Zea mays
  Clone ID: LIB3150-058-Q1-N1-C10
ccctacgctcacttcattgcggaaaaggccgctgcgatgaaagaaacccttgagaacgacacaaactacattactgacctcatctgcacgcgaccaggatcttggatacaactgatagtggtataccttataccaccaaggcgcggcttgatgatcataccacaggctcataaactcatcgctgcattgaatgaaattgtagcacatgatgctgttgatgaggcagccgcctgtaaaatcaagcttgcggcttaatcaagggagctgctcgaacttttgcccaaaactatataggagcaacttatgcttgaaagagatccccatggcaatgatcaagc

SEQ ID NO: 10667 - DNA, 108 bp, Zea mays
  Clone ID: LIB3150-058-Q1-N1-C11
gcttgctcgcgtccacgtctttcacatgaattggttactgtggtagttgtagttctggatacggtaccaaaacaaaagtattgctgtcaacaatctgcaacagccggg

SEQ ID NO: 10668 - DNA, 378 bp, Zea mays
  Clone ID: LIB3150-058-Q1-N1-C12
gccttctgcgcctccatttcggcctctgtcccttgcaagttcaatctcacctccaaccatgggtaaagagaagtcccacatcaacattgtggttattggccatgtcgactctggcaagtcgaccaccacaggacaccttatctacaagcttggaggcattgacaagcgtgtgatcgagaggttcgagaaggaggctgctgaaatgaacaagcggtccttcaagtacgcgtgggtgctcgacaagctcaaggctgagcgtgagagaggtatcaccattgatatcgctctgtggaagtttgagaccaccaagtactactgcacggtcattgatgcccctggacaccgtgacttcatcaagaacatgatcactgggtacct

SEQ ID NO: 10669 - DNA, 343 bp, Zea mays
  Clone ID: LIB3150-058-Q1-N1-C2
ctcacggcggcgtccatgacggtaccgagatcgtgctctggaagttgaggtatatgttgttgaccatgccgacgcagcaattagaccttgccgaccttttagctattcactcaaagcactatcttgagctgttattcctgtttgcatgaaagcaacatcgacgaacaagttgatttcattcgataaagcaaataaagacttattccttatgaatgttgaaagcgtaaaggattatttctttcagcccattacaagactagacaatcgggaggttgtttttgataaaatgatcgatgatttcaatacaatgatacttattacgaaaataaaatcaattttgtac

SEQ ID NO: 10670 - DNA, 369 bp, Zea mays
  unsure at all n locations
  Clone ID: LIB3150-058-Q1-N1-C3
ggggcttccgtcctgttctcgtcgcacctgtttacctccgccgccgccgctattgtcccattccaatctagaacccatagtcttcttcgtgattgtgcggttctttggtgagagcatgagctcgtctacttccggaacacgagagatgtcatctccaaattctacagcaacatctattggccaagttcaaaaggtgcctggttttgccaagcttcagggtgaaaactttgtgtacttcatgcaaacttattcaatcatgttgggacgcaccagcagaagttatactgcagactttgatctctctaaatatgaatgtgggagccaatgtgtttcccgatgccatgcatgtatattctatgactntgaact

SEQ ID NO: 10671 - DNA, 389 bp, Zea mays
  Clone ID: LIB3150-058-Q1-N1-C4
gacgccttccaggagacgcccatcggggaggtcacccgctccatcaccaagcacaactacctggtcgtcgacgtcgacgacatcccccgcgtcgtgcaggaggctttcttcctcgcctcctctggtcgaccggggccggtgcttgtcgacatccccaaggacatccagcagcagatggcggtgcctgtctgggacaagcccatgagtctgcctgggtacattgcgcgccttcccaagccccctgcgactgagttgcttgagcaggtgctgcgtcttgttggtgaatcccggcgccctgttctttatgttggcggtggctgcgcagcatctggtgaggagttgcgacgctttgtggagctgactggaatcccggtcacaactactcttat

SEQ ID NO: 10672 - DNA, 331 bp, Zea mays
  Clone ID: LIB3150-058-Q1-N1-C5
gttcgagaccaccaagtactactgcactgttattgatgccccgggacaccgtgacttcatcaaaaatatgatcactggcacttcccaagctgactgtgctgttcttatcattgactcaaccactggtggttttgaggctggtatctccaaggatggccagacccgtgagcatgctctccttgctttcacacttggtgtgaagcagatgatttgctgctgcaacaagatggatgctactacacccaagtattcaaaggcccgttatgatgagattgtgaaggaagtctcttcctacctgaagaaggttgaatacaaccctgataaaatctac

SEQ ID NO: 10673 - DNA, 399 bp, Zea mays
  Clone ID: LIB3150-058-Q1-N1-C6
agcacaggcagttcgagagagagagagagagagagagagataaagatgtcgtggttcgggcaccaccaccacaaccagccggctcccccggcgtcgggccccaaccaggtgttcaagatcttctgccgcgccaacgagaactactgcctggccgtccgcgacggcgccgtcgtgctggccccggtcaaccccaaggacgaccaccagcactggtacaaggacatgcgcttcagcacccgggtcaaggacgaggaaggcatgccggcgttcgcgctcgtcaacaaggccacggggctcgccatcaagcactccctcggccagtcccacccggtcaagctcgcgcctttcagcccggaccaggaggacgcgtcggtgctgtggacggagagcaaggacgtg

SEQ ID NO: 10674 - DNA, 340 bp, Zea mays
  Clone ID: LIB3150-058-Q1-N1-C7
cttcgctcggcgatctatcaaggagggtgagggggagatggcggagaatccgcagctgtttgggaacgggatgccggtgccgttctacggcgagatgttcgtcctcgtccgcgacagcgtcgagttccacgtagacaagatcccgtcagctcctggaggtcatgtgaaaacaaaaggcacaatttacctgtccaatataaggatggtgtttgttgccagcaagcctgttggcaacttctttgcttttgatatgccactgttgtttgtgcatggtgagaagatcaatcagcccatatttcactgcaacaacatctgtggattcgttgaaccagtcgttcca

SEQ ID NO: 10675 - DNA, 382 bp, Zea mays
  Clone ID: LIB3150-058-Q1-N1-C9
ctccaaagccactcccaaacccccgcttccagaaccttctcgaagctccccgccgcctcctccactcgcaccgatggcgaaggaaccaatgcgcgtgctcgtcactggcgccgcaggacaaattggatatgccctggttcccatgattgctaggggtgttatgcttggtgcagaccagcctgttattctgcacatgcttgacattccgccagcagctgaagcccttaatggtgttaagatggagttggttgatgctgcgtttcctcttctgaagggagttgttgctacaactgatgttgtggaagcctgcactggggtcaatgtggccgtcatggttggtggattccccaggaaggagggaatggaaaggaaagatgttatg

SEQ ID NO: 10676 - DNA, 387 bp, Zea mays
  Clone ID: LIB3150-058-Q1-N1-D1
ccccattcgaacgccggagctcgacgaggacgaccgacgacgcacgcagagatccggcgtactgcaaattttgaaaactgaactgtaagatggcatcagcagagctttcccgtgaggaaaatgtgtacatggcgaagctcgccgagcaggcggagaggtacgaggagatggttgagttcatggagaaggtagccaagactgttgactcggaggagctcactgtggaggagcgaaacctcctgtctgttgcatacaagaacgtcattggagcccgccgcgcctcatggcgcatcatctcctccatcgagcagaaggaggagggccgaggcaatgaggaccgagtaacactcatcaaggattatcgtggcaagaatgagactgagctga

SEQ ID NO: 10677 - DNA, 336 bp, Zea mays
  Clone ID: LIB3150-058-Q1-N1-D10
cgcagtcccaacgcgatgttgtcaaacggcgccccttgtcgtcgtcacgcctcgcgcatcgctcgtcggcaaagagcccaaactaatggcatgcatgcgcgacacgagtcggccaggaccgagagatgacgatcgtgcaagtgatgtggtgccaaccacaaggtgtcgttggtggacgacctgaagaatggacataactagtggatgctcgccaagcgaatacctcccccaacaaacactgtctaagtgttaaattaaaggtacctccttgctttggttgttggtgtgacttggccttcattcctgccaccgggatagatggtcgagagggttatt

SEQ ID NO: 10678 - DNA, 383 bp, Zea mays
  Clone ID: LIB3150-058-Q1-N1-D11
cttgtttaccattcctccccaaaacacatcctgcgatcctcgaagcctccgccgagcatcgatcatgtcggcctactgcggcaagtacgcggatgagctcatcaagaatgctgcctacatcggcacccctggcaagggtatccttgctgctgatgagtcaactggcaccattggcaagcgcctttccagcatcaatgtcgagaacgtggaggagaaccggcgggctctccgtgagctcctgttctgctgccctggtgccctccagtacatcagcggtgtgatcctcttcgaggagaccctctaccagaagaccaaggatggcaagccttttgtcgatgtcctcaaggagggaggcgtcctccctggcatcaaggtcgacaagg

SEQ ID NO: 10679 - DNA, 378 bp, Zea mays
  Clone ID: LIB3150-058-Q1-N1-D12
ctcgggtcaaaccctaagcagggagtggatttatccgctgcagccatgagtaagttgcagtctgagtctgtcaaggatgccatctcccagattgttggggatgccaaggagaagaataggaagttcactgagactgtggaacttcagattggtctgaagaattatgatccacagaaggacaagcgtttcagtggctctgttaagttgccccatatccctcgtcccaagatgaaggtgtgcatgcttggtgatgcccagcatgttgaggaggccgagaagatgggacttgactacatggatgttgaggctctcaagaaaatgaacaagaacaagaagcttgttaagaggcttgccaagaagtaccatgctttcttggca

SEQ ID NO: 10680 - DNA, 395 bp, Zea mays
  Clone ID: LIB3150-058-Q1-N1-D2
gattgacccagcgaaatacaagagtatgtgatctggatttggtatcctgttaaaggagcaaggggccaggggtttcttcaggggatgggtgcctactttgcttggttacagtgctcagggggcttgcaagtttggcttctatgagttctttaagaagtattactcggacatcgcagggcctgagtatgcccaaaagtacaagactctaatctacctcgcaggatctgcatctgctgaggtaattgctgatgtggctctctgcccttttgaagctgtgaaggtacgtgtgcagacacaacctggatttgctcgtggattgagtgatgggctccccaaatttgtccgatctgaaggtgttcttgggctctacaagggaattgttcctctctggggtc

SEQ ID NO: 10681 - DNA, 389 bp, Zea mays
  unsure at all n locations
  Clone ID: LIB3150-058-Q1-N1-D4
ggcagccaaatgcccagatccagttcgtgtgcgtcctcctcctcctcctcctcctccattccggccctctcgcccgtccgtctcctgcccccgtccctggtcggaccacgagagccccggactgcgttcacctctgccttttgttcacccctgcacgcattctctgccgctcttgtctcgtgcgtgcgacaacaactgggcgaccgtcgncgccgccgccgccgncctacgccaggtgcgcaggtcttcgtcagatccttcgcctgcgaggcgacgagcacccaccaggtgatgcccccggcttaattgaatgggctctcttctcaccaggactggcgtcctgccatggctacaggccaagatcgttgatcccgtgctgcangtcatca

SEQ ID NO: 10682 - DNA, 381 bp, Zea mays
  unsure at all n locations
  Clone ID: LIB3150-058-Q1-N1-D5
tatttttttcccttctcactccgtgcgtcggtccttcgccttcctcatgtccccgactctccgatactagtcgagtagtccggtacatcacaccgcctcgcaccgcggccatgttgataccgcgcgtcctcaaggcttcgctgctccgctgcttgcgcgctaccgccgagctgcctccgttgcggcgaccccggatcctacctgtgcgggtttaccattccagaggctattctagtgggggaagctccaagtatgataggccaatgagacagttttctgaacagaatgagtcaacctctcagccattaatatattacattgctccatctgctctgcttgcttttgctgggatagccacattngttcattacaatgatgaga

SEQ ID NO: 10683 - DNA, 396 bp, Zea mays
  Clone ID: LIB3150-058-Q1-N1-D6
gcttcgccgtggtcgccgccatcgtggccctcctcgccgtcgtcgcggcggcgcaggccccgaccacagctcccaaggccgcgcccaggatggccccgctgccgcctccccctgcgcggtccccggccacagccccggcgccggccgccaagccgccggccgccaagccgccgaccgccgcggcgccgtcaccgctggcctctcctccggccccgcccaccgagggccccgccgcctctgcgccgtccgcgaaggctccgacctcgtccgtctccaccaccccggccggcgcccccaccgtcgcgccctccggctacggcggtggcgggcgccgtgatggcggcggcggctacggcggtggcggcggctacggtggtggcggcggcggctacggtg

SEQ ID NO: 10684 - DNA, 375 bp, Zea mays
  Clone ID: LIB3150-058-Q1-N1-D7
ccctaatcccacctccagtctctgggcaccaaatttccggcggcgatggcggcggctgtggcgaggtcagggttccggcgcatgttctccgtctctgccttcgcgccgccgaaggcgcccgccgcgcgccccaaggccgacccatcccccaacctcttcgtctccggcttaagcaagcgtaccacaagtgaaggacttagagaagcctttgcggagtttggtgaagttttgcatgctcgagttgtgaccgatcgtgtcagtgggttttctaagggatttggctttgtaaggtatgctacgaccgaagaggcagccaagggaatagagggaaaggatggaaagttccttgatggatgggttatttttgcggaatac

SEQ ID NO: 10685 - DNA, 427 bp, Zea mays
  unsure at all n locations
  Clone ID: LIB3150-058-Q1-N1-D8
agaagagctanntgacgtcgcatcgcaccgnccgtacgtaannngcttgnngatcctcttttagagtcgnnnacccacgcccgtccgnnacctgcgttanntggttaccaanncgaaggaggtggcgannggatggaaggannngattattanntaacagagggggcgcgnnnggagagggggcggctttacgtnnggacgagagtgagtgagaagggcnngtgtgtggctttactacgnnngaggtgggacgggcgtgcgtaggcttaccgggttattgaaattatggcgtactgccnnncccagacggcngnnggtacctantngaangnnagcgaagacnngaatacctanntgatgnnagcccgaaggggaatatgctttcctttccccctgggggccgcggacccgtggcangaagtggaga

SEQ ID NO: 10686 - DNA, 382 bp, Zea mays
  Clone ID: LIB3150-058-Q1-N1-D9
gcagattcctcctatatcagggaagggggttgatcctgttgaatatattggagcttcgaatgcatcatttcaagggaaactgggtcttccaaacttcagtctggaagacaacactccacttaagcatattaagcctatacctgatatatttccttacctgtcactgggtgctcataaggattatattcgtagttctgtcccagagttgccagatagttcattattaccaaacttcatggcagatattgctggtacttcaaagcaaaaatcattcatgtctggtccacctcctgggctgggtcttagcccaggacaaccaatccatttgactatgcctgataatcacaagaaagtcttggacaacataatgatgcgtgctcag

SEQ ID NO: 10687 - DNA, 401 bp, Zea mays
  Clone ID: LIB3150-058-Q1-N1-E1
ctagggttttgctgctctccgaccccgagctccgaaggccgcagcatcaggcgcggcccccctcgcgtgtgaccgagatggcgctgccgaatcaggggaccgttgattaccccagcttcaagctcgtcatcgtcggcgatggtggaactggtaaaactacatttgtgaagaggcatctcactggagagtttgagaagaaatatgaaccaaccattggtgtggaagttcatccgttggatttcaccactaactgtggtaagatcaggttctactgctgggataccgcagggcaagagaagtttggtggcctcagggatggatactatatccatggccagtgtgcgatcatcatgtttgatgtaacctcaaggcttacttacaagaatgttcctacgtggcat

SEQ ID NO: 10688 - DNA, 364 bp, Zea mays
  Clone ID: LIB3150-058-Q1-N1-E10
ggaaaaatatccccaaaccctagctcccgatctcgatggcgaaccctcgcgtcttcttcgacatgaccgtcggcggcgccccggcgggccggatcgtgatggagctgtacgccaacgaggtgcccaagaccgcggagaacttccgcgcgctgtgcacgggcgagaagggcgtgggcaagtccgggaagccgctccactacaagggctccaccttccaccgcgtcatccccgagttcatgtgccagggcggcgacttcacccgcggcaacggcaccggcggcgagtccatctacggcgagaagttccccgacgagaagttcgtgcgcaagcacaccgcccccggtgtgctctccatggccaacgc

SEQ ID NO: 10689 - DNA, 274 bp, Zea mays
  Clone ID: LIB3150-058-Q1-N1-E11
gtgcttcctgtccttaaccgaaagtggagtggaatgtgtttaacagtcccaaccttggatgtttctgcagttgatttgactggcaggcttgagaagtcagcaacctatgatgagaccaagggtggagcaaatgccgatgcataaggtagcctcaagggcatatctgtgttacgatgaggaggaccttgcttccaccgattcacatggtgacagatggtctagcatctcttatgctaaggctggcattgacttgaacagcaacttgatgaagctc

SEQ ID NO: 10690 - DNA, 216 bp, Zea mays
  Clone ID: LIB3150-058-Q1-N1-E12
ctctcgcgtgcccaaaccctgcccctggcccgggcccggctctctttcccgacccttcgccacctccgcgccctcgccgcgccgctccgcgcgctcgtctcgtccccgccactagggttcacgtccgcggcgcgaggccccgctccgctccgcgcggcggtgttcgagtccgatcgcgagcaaccggaggctggtgtggaggcgggggaacaaggg

SEQ ID NO: 10691 - DNA, 400 bp, Zea mays
  unsure at all n locations
  Clone ID: LIB3150-058-Q1-N1-E2
ctttccccaactcgatctcgcacctagggtttcgtctcgccgctctcgtcctccgcgaagatgccgaagaacaagggtaagggaggcaagaaccggaagcgaggaaagaacgaggctgacgacgacaagcgcgagctcgtcttcaaggaagacgggcaggagtacgcgcaggtgacccggatgctcggcaacgggcggtgcgaggccatctgcgtcgatggcacgcgccgcctctgccatatccggggtaagatgcacaagaaggtctggatcgcggctggggacatcgtcctcgtcggcctccgcgactaccaggacgacaaggccgacgttatcctcaagtacatgaacgacgaggcgcgcctgctcaaggcctacggngagcttcctgacacgctca

SEQ ID NO: 10692 - DNA, 371 bp, Zea mays
  Clone ID: LIB3150-058-Q1-N1-E3
ctgcctcgtgtggccgtcgtctcccggtgggaacgccaagccccccctccggcgaaatggcccccaagcgaggtggcagggcgccggtgccggccaagaagaagacggataaagtgacgaaccctctattcgagaagaggccgaagcagttcggcatcggcggcgcgttgccgcccaagaaggacctgcaccggttcgtcaagtggcccaaggtcgtgcgtatccagcggcagcgccgcatcctcaagcagcgcctcaaggtaccaccggcgctcaaccagttcacccgcaccctcgacaagaacctcgctacgaacctttttaagatgcttctcaagtaccggcctgaagacaaggctgccaagaaggag

SEQ ID NO: 10693 - DNA, 400 bp, Zea mays
  Clone ID: LIB3150-058-Q1-N1-E4
ttttcatatcctcactcgccgccgccggcgctcgtccctcgccccatcgcgatggcccggatcaaggtgcacgagctgcgggggaagagcaaggcggatctgcaagcgcagcttaaggagtttaagtcggagctctccctgctacgcgtagccaaggtcaccggcggggctcccaacaagctctccaagatcaaggttgtgcgcacctccatcgcgcgcgtgctgaccgtcatctcgcagaagcagaagtcggcgctgcgtgaggcgtacaagaagaagaagctgctcccgctcgacctccgccccaagaagacccgcgccatccgcaggcgcctcaccaagcaccagctctccttgaagaccgagagggaaaagaagcgtgagaagtatttccccatga

SEQ ID NO: 10694 - DNA, 398 bp, Zea mays
  unsure at all n locations
  Clone ID: LIB3150-058-Q1-N1-E5
agaagatggaggctctcgggagtttggattcaagcctcatctcaattctcaatcgtcggctactgcagtcaacaatcaaaatcatcatgacattcctatgcaaaatcatggctcaaatcatgcctcaccatctagcaatttgatgactgaaaataaacctctatgctcacgggaatcgagtcacacagcaaatgtttcaagtgctccaaaccaacctgtttcaatagtttgtccatctgacaacatgcctgctgaagttggtacatcagagatgcacctgatcaatagctctgaaaatgctgcccaggagacacaaactgaaaatgtagctganaaatcagcagaggatggctataattggcgcaaatatggacagaagcatgtcaagggaagtgaaa

SEQ ID NO: 10695 - DNA, 363 bp, Zea mays
  unsure at all n locations
  Clone ID: LIB3150-058-Q1-N1-E6
agcctggccacatggccagggactgcgtgcagcggcggcggcggctacggcggtggcggcggcggtggtggtggcggctgctacaactgcggccaggccggccacatggccagggactgcccaagcggtggcggcggtggcggagggaggttcggcggcggcgggggtggaggcgaccgctcctgctacaactgcggcgaggccggccacatcgnccgcgactgtcccacgtgaggtgtgtacgcgtccgtgcagccagacagatcggatcggatcgctccaccacctgctggtctgatggcgccgacccctcctagatctcgcttaaaaaaacatacacctctcactgtgtgtctgagtacc

SEQ ID NO: 10696 - DNA, 395 bp, Zea mays
  Clone ID: LIB3150-058-Q1-N1-E7
gcgtacacggtctccctcttcctgtgagtagtagagtgagagtgaggcaccgagtgggagacaaggggaaatggggaagggagcgcaagggagcgatgcggcggcggcgggcggcgaggtggaggagaacatggcggcgtggctggttgccaagaacaccctcaagatcatgcccttcaagctcccgcccgtcggcccttatgatgtccgcgtgcgcatgaaggcagtggggatttgcggcagcgatgtgcactacctaagggagatgcgcatcgcgcacttcgtggtgaaggagccgatggtgatcgggcacgagtgcgcgggcgtggtcgaggaagtgggcgccggcgtgacgcacctgtccgtgggcgaccgcatggcgctggagccgggcg

SEQ ID NO: 10697 - DNA, 388 bp, Zea mays
  Clone ID: LIB3150-058-Q1-N1-E8
gcggcaagtacgcggatgagctcatgaagaatgctgcctacatcggcacccctggcaagggtatccttgctgctgatgagtcaactggcaccattggcaagcgcctttccagcatcaatgtcgagaacgtggaggagaaccggcgggctctccgtgagctcctgttctgctgccctggtgccctccagtacatcagcggtgtgatcctcttcgaggagaccctctaccagaagaccaaggatggcaagccttttgtcgatgtcctcaaggagggaggcgtcctccctggcatcaaggtcgacaagggcaccattgaggttgttggcaccgacaaggagaccaccacccagggccacgatgacctcggcaagcgctgcgctaagtacta

SEQ ID NO: 10698 - DNA, 386 bp, Zea mays
  Clone ID: LIB3150-058-Q1-N1-E9
gtcgcttccagccgccgccgcgtccgcctcgccaagcgcagcagccgccgcagcacatcgctctcttgatctcagccatggcggaggtggagcagcaacaggacacgccgaagctcttcaaccgctggaccttcgatgatgtccaggtgaacgacatctcgctgaacgactacctcgctgtgaacgcgacgaagcacgcgatgtacctgccgcacaccgcggggcgctactccaagaagcggttccgcaaggcgcagtgcccgatcgttgagcgccttacaaactccctcatgatgcacgggcgcaacaacggcaagaaggtcatggctgtccgcatcatcaagcataccctggagatcattcacctgctcaccgatgccaacccc

SEQ ID NO: 10699 - DNA, 401 bp, Zea mays
  Clone ID: LIB3150-058-Q1-N1-F1
cgacaacttcgtcttcggccagtctggtgcagggaacaactgggccaagggccactacacagagggcgctgagctcatcgactctgtgcttgacgtcgtgaggaaagaggcggagaactgcgactgccttcaaggattccaagtttgccattcccttggaggaggcacaggatctggaatgggcacccttctcatctcaaagatcagggaggagtaccctgatcggatgatgctcactttttctgtctttccctcacccaaggtttcagacactgttgttgagccatacaatgcaacactgtcagtccatcagttggttgagaatgctgatgaatgcatggttcttgacaatgaggcactttacgacatttgcttccgaactctgaagcttacgacgccta

SEQ ID NO: 10700 - DNA, 375 bp, Zea mays
  Clone ID: LIB3150-058-Q1-N1-F10
atctgccacccttcacccgctcttcttgtgccggcggttccctccacccgctcttctgccggtggttgcgagagtgtgttaagacaagatggtggcgaatggcgacgcacctgctagagggagtgcggcggcagctgcaagcctgcgcaggcgtaggaccacaagcggtgctgctgctggcggaggtggtgccagctcgatgctccagttttacaccgatgaggctgcgggccgcaaaatgtcaccaaacaccgttctgatcatgagcattgggttcatcgctgttgtcgctatgctccatgtttttgggaagctgtaccgcacctccaactaggttggtactaccataaccaagaaaacagaggccaccaagag

SEQ ID NO: 10701 - DNA, 380 bp, Zea mays
  Clone ID: LIB3150-058-Q1-N1-F11
ggttttcagaatggcgcggaaaacatggtgactggaggatcaaaagtgagaaggatagctagatgctcttcagatgttggccagagccacttgtacaacacaaaaatagcagacttgatcagaagaaacaccacgctcgaagaccagcttgcgaccgcactggcaagcaaagatcagctagacaagagcttagcatcggtcattcacagcagaggacagctggagaagatgcttgccaacaaagataaggaggctgagatgctgaaagagaagatagcatgcttagagctggcgcaagaagagtcgaacagcctctcgaacacagtgcacgctgataatgtgcgcctggagcgtgaagtggcgttcctgaaggccgtcac

SEQ ID NO: 10702 - DNA, 384 bp, Zea mays
  Clone ID: LIB3150-058-Q1-N1-F12
gggacggcgagctccgcctttgggacctctccaccggcctcaccacccgccgcttcgtcggccacgagaaggacgtcatctccgtcgccttctccgtcgacaaccgccagatcgtctccgcgtcccgcgacaagaccatcaagctctggaacactctcggcgagtgcaagtacaccatcggcggcgacctcggcggcggcgagggccacaacgggtgggtctcctgcgttaggttctccccaaacaccttccagcccaccattgtctccggatcctgggaccgcaccgtcaaggtctggaaccttaccaactgcaagctgcgctgcactctggatgggcacggtggctatgttaacgccgtcgctgtgagccccgacgggtcgc

SEQ ID NO: 10703 - DNA, 397 bp, Zea mays
  Clone ID: LIB3150-058-Q1-N1-F2
gtttgaccacgacgcgaccagcctccgctgctctcctactcccttgccgaagcaccccacagcagaagcgaaaacggcaggaagccagccggcgggctaggcaggcatgcttgcccgctgacgcagctgaagcgaggcgacccgcagccgccatggatccggcgtccgaggaactcgagcgccgcagccgctatctcagctcgctcatccgccgcactaagcttagcgccgtcccggctccttctcagccggagcccgagcccggggtgacgcaaccgactccggagccggagccggagtccgcggtggagaagcgcggggaggccaaggcggagccagtggtcgatgaggaggagaagcgggaggccaaacaggccggtgacgggaaggggaaaga

SEQ ID NO: 10704 - DNA, 396 bp, Zea mays
  Clone ID: LIB3150-058-Q1-N1-F3
tcttcatcaatatccccgtgtagcattgatcatgaatactgaaaggtatccttcctgatcactatttgaccttccaaactaacatcctcttcctcatgcgtagtagtgctgaagtctcatctcatatagctattggtctactaaatctaaaacctttgtactttagcgtctcctgccacaactccagttttctatttactccttcctgactttgatcaactagcactacatcatccgcaaaaaaatacaccaagggatatctcctatatgtcccttatgacctcatccatcaccaaggcaaaaaggtaagggctcagagcttattcttgctgtagtactattctaatcaggaagttatctgtgtctccatcacttgttcgaacactagttataata

SEQ ID NO: 10705 - DNA, 387 bp, Zea mays
  Clone ID: LIB3150-058-Q1-N1-F4
cggagcggaaggcgaaagagtagcaggagcaggcggcgccgagtagcggctccccacctcgagcttgccaccatggctagaggattgaagaagcatttgaagaggctcaatgcgcccaagcattggatgctggacaagcttggcggagcttttgctcccaagccatcttctggacctcacaagtctagggagtgcctgccactgatcctcatcatcaggaacaggctcaagtatgctcttacataccgtgaggtcatttccatcctgatgcaacgccatgtacttgttgatggcaaggtcaggacagacaagacctaccctgctgggttcatggatgtcatttccatccccaagaccaatgagaactacaggctgctgtacgatacc

SEQ ID NO: 10706 - DNA, 391 bp, Zea mays
  Clone ID: LIB3150-058-Q1-N1-F5
ggtttaaccactcgcagcagccggcgggactcgagaatcatgtcagcgccgccgtcgctcaagaccccggcaaccgccgtagcggtctctcggcgctcggtcgccaccccgagagccaccgggcttcgcggggcctgtgctcccccgactcggcgcctccggtgctcagcctccgccgccgtggccggggcttccaccgagatggctgatgctccgctggactgggcagagaggtcgctggaggagttacgcagcttgccggaccacgacacgttctgcttgatggcgctctcgccgctggacgggcggtacgatcgcttcgtcaaggagctgatgccctttttcagcgagttcggcctaatcagataccgcgttctcatcgagatcaagt

SEQ ID NO: 10707 - DNA, 393 bp, Zea mays
  Clone ID: LIB3150-058-Q1-N1-F6
ccggaacagagcgaggcgacgccgaggcacctcatctccggcgaagggaaatggcgaccgttccaggggatctgatctggcagattgtgaggaagaacaactccttcctggtgaagcagtttggtaacggcaatgccaaggtgcagttcaccaaggagcccaacaacctctacaatttacactcctacaagtactctggcttagcaaacaagaaaactgtaacgatccagccagctgctggaaaggactcggctgtggtcctctctactaccaagaccaataagcagaacacacccgcgaagctcagccacaagtctgtgatgcgcaatgagttccgcatgatggccaaggctgtgaaaaaccatgttggcgacaactattacaggcctgatc

SEQ ID NO: 10708 - DNA, 399 bp, Zea mays
  Clone ID: LIB3150-058-Q1-N1-F7
ccctcccgtgcatgtcactcctgccggcgccgggcgtcctatggtagagactcgccgctcagcgcggaggagcggcagcggttcgctcccggccgacggagcgccgtccgagccggcatccagctcccctgcaacctccctccccccgcgggagaataatggcctggttatctctaatgacaacacattgaagcagaccgtggaggtagaaaaacaggggaggcaaggtaaggaggtcttagtggttcatgaattggatgagtcgaatgacgattctgggtcattggatgagccgccgggatggcttcctgacggctggactatggaggtttgtcaagaagacaatggctgcatctacaagtactacacttgctcaatgtccggatacatgttcacatc

SEQ ID NO: 10709 - DNA, 302 bp, Zea mays
  Clone ID: LIB3150-058-Q1-N1-F8
atcggtttctcaactgatgagggacggggggtctctaagtggattgatacgggatctatgtcgattgatcgggcagaggctcaatgtacgaccattacgaaggagatcacatgcagaattaggatgacatgggaggaccgtaaaccgctgaaggacctggagatgaaggtagcaactacgcagatcatggtggtgcccttatagatcctgtggacctcgatctggcacaccgacatactcttctggaacgccaaagagcaaactacatgactaactacgatctttcgcccatactgtggacg

SEQ ID NO: 10710 - DNA, 317 bp, Zea mays
  Clone ID: LIB3150-058-Q1-N1-G1
catgatttcgctctcttcttcccgtcgagacccaaccataccagcggcgccgcaggctgacgaggaggcggagtagagtggccggactacctcgacacctccactgcaaccatgggtatctcacgtgattcgatgcacaagcgccgggccaccggtggaaagcagaagacgtggcgcaagaagcgaaagtatgagcttggccgccagcctgctaacaccaaactgtctagcaataagacagtgaagaaggtccgtgtacgtggaggcaacgtgaagtggagggctctccgattggatacaggtaactactcgtgggg

SEQ ID NO: 10711 - DNA, 366 bp, Zea mays
  Clone ID: LIB3150-058-Q1-N1-G10
ggagcaggtagaacgctgcacaatccgcttcgccgccgccaagatggtgaacgttcctaagaccaagaagacgtactgcaagaacaaagagtgcaagaagcacacactccacaaggtgactcagtataagaagggcaaggatagcctgtctgcccagggaaagcgccgttatgaccgcaagcagtcaggatatggtggtcagaccaagcctgtcttccacaagaaggccaagaccaccaagaagattgttctgaagctgcagtgccagagctgcaagcactactcacagcacgccatcaagagatgcaagcattttgagattggtggagacaagaagggcaagggcacatctcttttctaagcttc

SEQ ID NO: 10712 - DNA, 124 bp, Zea mays
  Clone ID: LIB3150-058-Q1-N1-G11
aaaaaaaaaaaaaaaaaaaaaaaaaaggaaaaaaaaaaagggaggacgacaaaaaaataaaaaaaccaaaacataaaagcatacaaaaatataaataaaaaaaaaaagattagaccttcacgga

SEQ ID NO: 10713 - DNA, 384 bp, Zea mays
  Clone ID: LIB3150-058-Q1-N1-G12
gaaaaataacttgattaaaagaagctgtgtctttgacattttggttgatgctctttgaaggtgccaagatctctcagtggaggtccctgtttctgcttgcctttggacaaaggaagctggggagggagcaaaggggtgactgactcagttcctttgacacaattgacaataaacaataaaggcagccgccctatgaacttcaacttctcccaggaaaagggcctcaaggcattcacattccacaaggaaaatcgctccgatatgatctgaatcgccacggtgtgatctgactactctgattgcgtacacaaagtctctgctatgaagacttcaggcttttcaggaattcaggcaccacctgaccgcagtctgcaagaagctgag

SEQ ID NO: 10714 - DNA, 302 bp, Zea mays
  Clone ID: LIB3150-058-Q1-N1-G2
ggaaagtgttcgctctcatggcgccggcggagccgaagtcgggcctattcgtgggcatcaacaagggccatgtcgtcaccaagcgcgagctgcctctgcgcccgtgccaccgaaaggggaaagcaacgaagagggtgtacatggtcaggggccttatcaaagaggttgatggctctgctccttatgagaagcgtatcaccgagcttatgaaggttggcaaggacaagcgcgctctgaagcttgccaagagaaagcttggaactcacaagagggcaaagaagaacacagaggacatgatcggc

SEQ ID NO: 10715 - DNA, 344 bp, Zea mays
  Clone ID: LIB3150-058-Q1-N1-G3
caacacccccggacagacgggcgcgaactcaaaccctagaaacggtagccatggattcgggaggcggaggagggagcggcgcgcacaaggcggcctcgggctccgcgccctcgccggcgcctaaccccacggcgatgctttcggcgctcatgagcaagcgcgccaagctccaggaggagctccgctccatcgagcgccaggtttatgatatggagaccacctacctacaggagactaatcaatttggaagtgtgctgaagggtttcgaatcttttttgtcatcctcaaaaaacacctctaaccttaagcgctctcggaaatttcacgctgacgagaggttattc

SEQ ID NO: 10716 - DNA, 343 bp, Zea mays
  Clone ID: LIB3150-058-Q1-N1-G4
cccacgcgtccgcccacgcgtccgcacggaaccctacccgagcatcagccatggcaatcgcggcgcgcgccctgcgccgcctcccgcttcacctctccccctcgatctcccgctccttctgcgcggtttccccggccgccgcctcggctacctcggcccccgccgccgcgtccgccaaggtcgctgaccgcatcgtgcgcgtcctcgccatcgatcccgacggggcgcgccgcgatgtggtcggcctctcggggcagacactccttcgcgctctggccaacgcggggctcatcgagccggcctcccaccgcctcgaggatatcgacgcgtgctccgccgagtg

SEQ ID NO: 10717 - DNA, 173 bp, Zea mays
  Clone ID: LIB3150-058-Q1-N1-G5
cgaatcagacggcgccatggccggcacgtgcgcccacgtcgagttcctccgcgcgcagccggcgtgggcgctggcgctggccgccgtgggcctgctcgtggccgtccgcgccgccgcccgcttcgcgctctgggtctacgccgcgttcctccgcccagggaagcccctgcgcc

SEQ ID NO: 10718 - DNA, 311 bp, Zea mays
  Clone ID: LIB3150-058-Q1-N1-G6
ggacttgtacagactggtgtcagggagcctcgcatggttgttacttttgggcctactggtcttactactgatgctaattccgttgaaatgcaccatgaggctctccaggacgtccttcccggtgacaatgttggcttcaacgtgaagaatgttgctgtgaaggatctgaaccgtgggtatgtggccttcaactccaaggatgaccctgccaacgaggctgctcgcttcaccttccacgtcatcatcatgaaccaccctggtcagattggtaatggctatgccccagttatagactgccacacctcacacat

SEQ ID NO: 10719 - DNA, 388 bp, Zea mays
  Clone ID: LIB3150-058-Q1-N1-G7
ggcacacacaccacaccacacctgctcgcttccactccgctcgtctgacatctcgtcccgtcctttcgtttcgaagcctcgcgagccccgacgatggccaccgccgcggtgtcggtcgacgagaagctcgacaagcttcgcgccgaggtcgccaagctcgaccagatcagcgagaacgagaagtccgggttcatcagcctcgtgtcacgctacctcagtggggaagcggagcagatcgagtggagcaagatccagacccctacggatgaggtggtggtgccctacgataccgtcgcgtcgcctcccgaagatctcgaggagacgaagaagctgctggataagctcgttgtgctcaagcttaacagagggctcgggacgaccatgggct

SEQ ID NO: 10720 - DNA, 377 bp, Zea mays
  Clone ID: LIB3150-058-Q1-N1-G8
cgcctgttggccaaccaatgacggcaaactcagcctcatatcttccaggcacacctggtggtcaaccaatgaccccaggcaatgctggaatggatatgatgtcgccgataataggtggtgagggtgaagctacatggctgctgccggatgttttggtcaatgtgttgagcggaggtgatgacggtcctggtgtggctagggaggcactctgtgatggatcttgcccagctgcacttgggtcttcaggcaacggtgacatggtgacggtccttccgaacgaggtcgaagtcatcaggccgaataacagtgacaggatcaagatactgaatgcgtagttccgtgggcacacacgaaaacttataggtatagatggttct

SEQ ID NO: 10721 - DNA, 378 bp, Zea mays
  Clone ID: LIB3150-058-Q1-N1-G9
gggttttgctgctctccgaccccgagcgtgcgaaggccgcagcatcaggcgcggcccccctcgcgtgtgaccgagatggcgctgccgaatcaggggaccgttgattaccccagcttcaagctcgtcatcgtcggcgatggtggaactggtaaaactacatttgtgaagaggcatctcactggagagtttgagaagaaatatgaaccaaccattggtgtggaagttcatccgttggatttcaccactaactgtggtaagatcaggttctactgctgggataccgcaaggcaagagaagtttggtggcctcagggatggatactatatccatggccagtgtgcgatcatcatgtttgatgtaacctcaaggcttacttac

SEQ ID NO: 10722 - DNA, 290 bp, Zea mays
  Clone ID: LIB3150-058-Q1-N1-H1
agtacttgcagcctaaaagcttggaacgcagctggggttccgaaatctgatcgagagcttattgcgacaaattccttcataagttatttttgctgtgctgctaggaatgaatcctggtacccaggcggtgattggcgctctgcttgtggtgtggcggtatatgtggtgatgatgaaatctgatgcataaaagtactctttcctgcaagtgtagtgccccatgcacgtttttgtttatatattgtgatgtatgagtgctatcattccatatcaatgtacttcctcttctag

SEQ ID NO: 10723 - DNA, 376 bp, Zea mays
  Clone ID: LIB3150-058-Q1-N1-H11
cttgtattgtttcttgaggtttggttggccgtcaacaatctatgtcctttgaagtgccacaagacactatgcagccaaattgatacaaaaggacactgaacacgggaatccaatattacatgtatataaatagtgagccatatacatgagggctttttaacttcaatgaatctcgagaccaaatccaggactggcgtcactataatccagagtttgggctaccggtacacctacaaaaatctcaagaggaatttcagtattgctgcctaggtggcttcgactctgctaccgtaacacggatctgtctgccgtccaagtcagcgccatcgagattagatattgcattctcaacctcttcggcggaaccgtacgtgac

SEQ ID NO: 10724 - DNA, 383 bp, Zea mays
  Clone ID: LIB3150-058-Q1-N1-H2
ccgagatcatcgtgcacggcgtgtctggctaccacatcgacccttaccagggcgacaaggcgtcggccctgctcgtggacttcttcgacaagtgccaggcggacccgagccactggagcaagatctcccagggcgggctccagcgtatcgaggagaagtacacctggaagctctactcggagaggctgatgaccctcaccggcgtgtacgggttctggaagtacgtgtccaacctggagaggcgcgagacccggcggtacctggagatgctgtacgcgctcaagtaccgcaccatggcgagcaccgtgccgctggccgtggagggagagccctccaacaagtgatgcgcgacggcggccacagacctgatcgatcgatgagcg

SEQ ID NO: 10725 - DNA, 161 bp, Zea mays
  Clone ID: LIB3150-058-Q1-N1-H3
aaaaaaaaaaaaataaaaacaaaaactggcggcgcaattaaccaaaaaaacacccaacaccatacctaaacaaattccaacaattcttatagccgctccactcagtactatgcgtattcgtccccaagcgctattactgtctcaaattgttatcccttcac

SEQ ID NO: 10726 - DNA, 308 bp, Zea mays
  Clone ID: LIB3150-058-Q1-N1-H4
tcccttcttcggttattcctcgttgcgtgccctcgccgcagacctctgccatggcggaccagctcaccgacgagcagatcgcggagttcaaggaggccttcagcctcttcgataaggatggcgacggctgcatcactaccaaggagcttggaacggtgatgcgctcccttggccagaaccctaccgaggcagagctgcaggacatgatcaacgaggtcgatgcggatggcaatgggaccatcgacttcccggagttcctgaacctgatggcgaggaagatgaaggacacggactcagaggaggagctc

SEQ ID NO: 10727 - DNA, 347 bp, Zea mays
  unsure at all n locations
  Clone ID: LIB3150-058-Q1-N1-H5
tcaaaagtgaaaatgtacaagaggatggggtctatttattggaaaacggtgaggatggtctagtctacgtaggaaatatggtaaatccggctaccctggaacaaatattcggtgtctcttctttggctgcattaccagcccagttagcattggagcagtttgacaacgaactctcgaggaagattaacgaagttgtaaatgaaattaggcgccagaggtgctcatacttgaggttaagactatgcagaaggggcgaaccatctggtgattttttccggtcatttctaatagaggacaaggcacctggcgtcttctcctacgaggagtttctcgtgcatgtncacagg

SEQ ID NO: 10728 - DNA, 363 bp, Zea mays
  Clone ID: LIB3150-058-Q1-N1-H7
ctcgcctcattgccccccgtgctgccgacgcttttgccagcgcgcgccccaccaccaccggaaaagaaattccccaattctactccacccggcgcgctctccccacgcgcatccggatccgtccgctctgatcgagtgagttgatctggactctgtgcctgcctgtgagggcgaggagggcatggacgagttcgagctggaggacaacctcgagttcatcctccagagcatccaggagctgatggaggacccgggggacaacaacgccttcggagacgccaaccagaacgagctcttcgccagcatcgttaactacgaccaggagaacatgctgcccgacgtgtctgcagcggacgttgctgc

SEQ ID NO: 10729 - DNA, 287 bp, Zea mays
  Clone ID: LIB3150-058-Q1-N1-H8
accgccgccgtcctacgccaggtgctgaggtcttcgtcgatctcgagctcccacacgggaagctgtccaggatgggatacaaccgccacaggcgtggccggggatcatcctcatcgtcttcgcgccgcaccaagcaagaagcctcgtgtgatgatggccttgggacatcacttacaaggcaagaagaaggcacagaagacgaactcaaaggttcaagaattcagctagcaatgtgggactctggtcagtgtgatgttaacagatgcactggtcgtaaactttcaaga

SEQ ID NO: 10730 - DNA, 369 bp, Zea mays
  Clone ID: LIB3150-058-Q1-N1-H9
cgcgtgcaccttactccggccggccggacgccggccgccacgttcctctcgggctccaaccccagacccgcccacctcaccttcttcccgaagcttacccctacctccctctccgccgccgcagctgcgaatgcgccgccgccccacatcgtcgtcgtgggctccgccaacgccgacatctacgtcgaggtcgaccgtctcccgctcatcggcgagaccgtggcggcccgcgcgggacgcagcctcgcgggcggcaagggcgccaaccaggccgcctgcggtggccgcctcgcgctgggccctacctacctcgtggcgcgcgtgggggatgacgccaacggccgactcctagagggcgccctagccgac

SEQ ID NO: 10731 - DNA, 373 bp, Zea mays
  Clone ID: LIB3150-059-Q1-N1-A1
ctggcggccagcacagcagagcgccactcgactcatcctttcggactcgctgccctctccgcgtttcacagccctcgagaagcttgcacccttccctgctgcgacgccggcagagccgcggaaaccctacccaccccggccgctcacgcaccgggcgcccggatgcgactgtcgcgtgcctggcgccgacaccggccaaagcgattggatctcgagatcgtcaggagccacgatggaggactgggattctgaagaattccagccagttgtgcctgttgcgaaagccgagccacttaaaaagttatgggctgatgaagatcgtgaagaagatgatggcaaagaatcatgggaagaagaggaggaggaggagaaa

SEQ ID NO: 10732 - DNA, 244 bp, Zea mays
  unsure at all n locations
  Clone ID: LIB3150-059-Q1-N1-A10
aggaggatgatttggagaccgnccactcaccgncttccgtcgctcccaagagcgttgctccgctgccgcagaaggtccaggaacccgaagcgtccgacgaggatgagtatgacgatgaagatgacgagccgcagaaggtccaggaacccgaagcgtccgatgaggatgaagacgacgaagaggaggatatcgaagaggacgagaaggccaaccacgtggtcccttcttccgccaccaagaaccc

SEQ ID NO: 10733 - DNA, 303 bp, Zea mays
  Clone ID: LIB3150-059-Q1-N1-A12
catcgatctcgtttcaaatccatccatcctcgtttcctccgtcccgcagcatctcaaccccatggccaagatcaagatcgggatcaatgggttcggcaggatcggaaggctggtggccagggtggccctgcaaagtgactatgtcgagctcgtcgccgtgaacgaccccttcatcagcaccgactacatgacctacatgttcaagtgcgacactgtgcaccgacagtggaagcaccatgaagtcaaggtgaaggactccaaaacccttctcttttgtgaaaacgaggttgctgtgtttggctg

SEQ ID NO: 10734 - DNA, 287 bp, Zea mays
  Clone ID: LIB3150-059-Q1-N1-A3
cgcattttccttgcaaccgattgcctatccccctcccaaccaaagaccgatggcgcccaaggccgagaagaagcccgcggcgaagaagccggtggaggaggagcccgcggccgagaagacgaccgccgggaagaagcccaaggcggagaagcgggtccccgctggcaagtccgccggcaaggagggcggcgagggcaagcgtggcaagaagaagggcaagaagagcgtggagacgtacaagatctacatcttcaaggtgctgaagcaggtgcacccggacatcggca

SEQ ID NO: 10735 - DNA, 398 bp, Zea mays
  Clone ID: LIB3150-059-Q1-N1-A4
cacgacagcacgccagcggccagcatgtggcaccgggcaggtgggcagcagcaggggacaggctgcaagcagaaatggacattaaaggtcttgaggcagataaactggagtgcaggctctatgtagggaacctagacttcaggatgtcagagtccgatgtaatcaagatgttttccccttttggaaagattacagccgaggattttctgtggcacacacgcggtccaaagagaggcgaaccccggggctatgcctttgttcagtacaccactaaagaggaagctcagttagcaaaggagaagatgaatggaaagttaatctgcggacgcccaatggtagttcaccttgctagtgagagaagttctctaggctcttcaagttcacatagagcagtcaaa

SEQ ID NO: 10736 - DNA, 397 bp, Zea mays
  Clone ID: LIB3150-059-Q1-N1-A5
gatcaagcggaccaaggcggagaagatgatcgcgtacgacaagaagctgtgcagcctgctcgatgagtacaccaaggtgctcatcgccctcgccgacaacgtcggttccaagcagctccaggacatccgccggggcctcaggggcgactcggtggtgctcatggggaagaacacgctcatcaggcgctgcatcaaggtgtacgccgagaagaccggtaaccacacctttgacccgctcatggacctcctggtcggcaacgtaggcctcatcttcaccaagggagacctcaaggaggtgcgcgaggaggtcgccaagtacaaggtgggggctccggctcgtgttggtctggttgctccaattgatgttgttgtgccccctggcaacactggtctggat

SEQ ID NO: 10737 - DNA, 220 bp, Zea mays
  unsure at all n locations
  Clone ID: LIB3150-059-Q1-N1-A6
cgcgctcccttncgncgncagtccgccggctcaactncagccggcgcgtgcccctcctctccccacccgatgcgggccctcgcgcgcgccgcgtggctgntccgccgcgccggggggtccgcgcctactacggcgtcgctgtaccatccgccgcggaacgtangcccttgcctcgtgaagaatctgccaggtttctttttcaatgggtattctactcttt

SEQ ID NO: 10738 - DNA, 293 bp, Zea mays
  Clone ID: LIB3150-059-Q1-N1-A7
cagccgccgttgatgctgccgcgtccacagaatggggggtttcgggaagactcataagaccaatgcgtatttcaaacgtttccaagtgaaattcaagagaaggcgggctggccagacagactacagggccaggataaggctgattaaccaagacaaaaacaagtacaacacacccaaatacagatttgtggtgcgatttaccaacaaggacatcactggccaaatcatatgtgctagtatagcgggtgatatggggtctgcttctgcctactcgcatgagttgccacgatatg

SEQ ID NO: 10739 - DNA, 321 bp, Zea mays
  Clone ID: LIB3150-059-Q1-N1-A9
gcgaacgctagcacggatccgctcgcgtacacccacgcgttcgtctcgatctcgcgctaggttttcgccttaccgttctagtcctccgcgaagatgccgaataacaagggtaagggaggcaagaaccggaagcgtggaaagaacgaggctgacgacgacaagcgcgagctcgtcttcaaggaagacggccaggagtatgcgcaggtgacccggatgctcggcaacgggcggtgcgaggccacctgcgtggacaggacacgctcgctgtgccatatccggggcaagatgcacaaaaacgtgtggatcgcggccggggacatc

SEQ ID NO: 10740 - DNA, 309 bp, Zea mays
  Clone ID: LIB3150-059-Q1-N1-B1
aagaaaccagcataaaaactctagatctgtgaaggatttgaggaagaaaccaaaccgaaaccctagtgacgatgctagagttcggacctcgctctgagtcgaaacgaccagagaccgctgccttccctccccattttcctttcccatgaaccaagcagcgtatgagctttccatccctcctcatttacctatcccacctctcatatcccgttatccaaacggcacctcagggtactgcaatccagaagcaggggccctggcctcagcgcacctggatggcagggctggaggagttgaagaagaagctac

SEQ ID NO: 10741 - DNA, 373 bp, Zea mays
  Clone ID: LIB3150-059-Q1-N1-B10
acggaaaaatatcctcaaaccctagcttttgatcttgatggcgaaccctcgagtgttcttcgacatgactcgtcggcggctgctccggcgcggcaggatcgtgatggagcgtgtacgccaacgaagagcctaagaccgcggagaacttgcgcgcgctgtgcacgggcaagaagggcgtgggcaagtacagtaagccggtgcactacaagggcttcatcttacaccgagtcatccgcgagttcatgtgccatggcggagacttcacccgcgcgaacggcaccggcggcgagttcatctacggcgagaagtttcctcacgagaagttcgagcgcaagcacaccgtcccccgtgtgctcttcatggtcaacgacgg

SEQ ID NO: 10742 - DNA, 372 bp, Zea mays
  Clone ID: LIB3150-059-Q1-N1-B11
cgaaatcctccaataccccaccctacgaatcttccaacccctccgacgatgccttccgcgccggcgctcgtccccgcgtgcgacatgcaggagccgttgctggcggagtcgtccgaccgcttctccatgttcccgatccggtacccgcagatttgggagttctacaagaaggcggtggcgtccttctggactgccgaggaggtggacctctccgcggacgcgcgccactgggacgcggccctctcccccgacgagcgccacttcatctcccacgtgctcgccttcttcgccgcctccgacggcatcgtgctcgagaacctcgcctcccgcttcatgtccgatgtccaggtcgccgaggcgcgcgccttttac

SEQ ID NO: 10743 - DNA, 375 bp, Zea mays
  Clone ID: LIB3150-059-Q1-N1-B12
cattaattaaagcaaacatgttcatagctcagaatgacagaaatcacaggacgcgccgatcgaacgctcgatttctgtctcctggaatctataacatttaacaaaccttatgcagtttaatataagtaaataaatactagagaagatactgctggcactgctgggatgattactcctgatgcagtgcggctgcggcctcgccttcatgagcatcctccagtactgggaaaacaggaggcttgacgagcatgaacggacgaacactgatgaagtggtcgtcgtctggctgcctctggtacacctgcttcacctctctggtcttgacgtgcatgtacgcaacgacgccagtcacaccgagctccaagaacacgaact

SEQ ID NO: 10744 - DNA, 167 bp, Zea mays
  Clone ID: LIB3150-059-Q1-N1-B2
tcgcaccacctcgcctgcgatctccgtagcctccgtcgcgtcgagcatcgatcatgtcggcctactgcggaaagtacaaagatgagctcatcaagaatgctgcctacattggcacccctggcaagggtattcttgctgctgatgagtccactggcaccattggcaag

SEQ ID NO: 10745 - DNA, 130 bp, Zea mays
  Clone ID: LIB3150-059-Q1-N1-B3
gtgttaactgagtactggaactgatattcagtgggcaaactaagagatgcatagcgagcaacgacggagctgtcacaacacgaggactctgacccaataattgctgacgacgaacgagaaaaagcgcatg

SEQ ID NO: 10746 - DNA, 378 bp, Zea mays
  Clone ID: LIB3150-059-Q1-N1-B5
ctcggcgtcttcacaaacgccggcgcaaactctcgcccgagcccgacagatcttcaattccccattccgcccaccgatcgaccttcacgccagtctcggtctcttccgaaggcgtcgcgcgcggttgtttgagaggagaggaggaagatgagggagtgcatctccgtccacatcgggcaggccggcatccaagtcggcaacgcgtgctgggaactttactgcctcgagcacggcatccagcctgatggccaagtgcctggagataagaccgcgggacatcacgatgatgccttcagcaccttcttcagccagactggtgctgggaagcacgttccccgtgcaatcttcgttgatctagaacccactgtgatcgatgag

SEQ ID NO: 10747 - DNA, 312 bp, Zea mays
  Clone ID: LIB3150-059-Q1-N1-B7
aaatcaaccacgccttcggcactgggtaactggcgggggttccttctgcagcaatactgtaagccgttagcaagcacaacgaggagtttaagaagtttggaaatgcaatgagaaagatgttgtggtaatggagaattggtggatttgcatataactgcgagtttcagagacacctttgttccttgtaccttgtaggtgcctattagtagtccaatactccatttaaatgttatagaatatgcatattccctgcgcatcattaaccacgagccacagactccatatcataaaacctgtgatgtagatcatatc

SEQ ID NO: 10748 - DNA, 374 bp, Zea mays
  Clone ID: LIB3150-059-Q1-N1-B9
ggatgatccgtacatttatgcatttgacagcctgaaatacattggcattgagctgtggcaggttaaatcaggcactttgtttgacaacatcatcatcactgatgatcctgcgttggccaagacttttgcagaggagacatggggcaagcacaaggaggcagagaagactgctttcgatgaggctgagaaaaagaaggaagaagaggaagccgccaagggtggcgatgatgacgatgatgacctagaggatgaggcagacgatgacaaggcagacgatgacaaggccgactctgatgccgaggatgacaaggactctgaggagcacgacgagctctagatgatgagtatgatagaggtggccactgacattggtg

SEQ ID NO: 10749 - DNA, 376 bp, Zea mays
  Clone ID: LIB3150-059-Q1-N1-C1
gcgtagcacatcgcgaaatacattggcatggaccgggggcaggttaaatcaggcactttgtatgacaacatggtcatcgctgaggatcctgcgttggccaatactttggcagaacagacatggggcaagaacaaggagagcagacaagactgctttcgatgatgctgatgaaaaagaatgaagaagaggaagccgccaagggaggcgatgatgacgatgatgacctataggatgaggcatacgatgacgaggcatactatgacaaggcctactctgatgccgaggatgacatggactctgaggagcacgacgagctgtagatgatgagtatgatataggtggccactgacattggagtcgcaggcctggatttatc

SEQ ID NO: 10750 - DNA, 379 bp, Zea mays
  Clone ID: LIB3150-059-Q1-N1-C10
tcccatttgaaatcaacccatcctcgtttcctccgtctagcagcctctcaccctcatggccaagatcaagatcgggatcaatgggttcggcaggatcggaaggctggtggccagggtggccctgcagagcgacgacgtcgagctcgtcgccgtgaacgaccccttcatcagcaccgattacatgacctacatgttcaagtatgacactgtgcacggacagtggaagcaccatgaggtcaaggtgaaggactccaagacccttctctttggtgagaaggaggttgctgtgtttggctgcaggaaccctgaggagatcccatggggttccgttggcgctgaatatgttgttgagtctactggtgttttcactgaccaagag

SEQ ID NO: 10751 - DNA, 312 bp, Zea mays
  Clone ID: LIB3150-059-Q1-N1-C11
gggtaggaggggggggaagcggcggaagggggggggtgagagcaagggggggggcgcgaagacggcgaggggagcaatcgaagggacctacagggacaagaaaggccgcaggagtggaactgtttgtatcggaggcggagtgatcgcggggacatgcgacagcgggaagatgaagagaacgatcatggttggcaggaactaggtgcgcgctgtggagaggtaccagagggatgagaagaggcacaccaacattgctggtcacatcgcccaatgcttcggggtgaaggaaggtgagcatgtcatcattgggca

SEQ ID NO: 10752 - DNA, 334 bp, Zea mays
  Clone ID: LIB3150-059-Q1-N1-C3
gagaggtgagcctcccggtggagcgtgggtggtgctgggtgccggggatgagctgcaacgggtgccgcgtgcttcgcaaggggtgcagcgacgcgtgcgtgctgcggccgtgcctgcagtggatcgacggcgccgaggcgcagggccacgccaccgtcttcgtcgccaagttcttcggccgcgccggcctcatgtccttcctcaccgccgtccccgagccgcagcgcccagcggtgttccagtcgttgatgtacgaggcggccgggcggacgatcaaccctgtgagcggcgccgtggggctgctcggggcgggcagctggcagctgtgccatgc

SEQ ID NO: 10753 - DNA, 51 bp, Zea mays
  Clone ID: LIB3150-059-Q1-N1-C4
atgatgacaggaaacctggaacgccttgtgcatacacgaatcaggcaacac

SEQ ID NO: 10754 - DNA, 129 bp, Zea mays
  Clone ID: LIB3150-059-Q1-N1-C6
gcgatctaggcttggatgggaataaaaccttcatggaacaccacttggccaactttatcctctattaatgaaaaagggcttctttcagggttggcttgggagcacggggcttaaaggggattgaaggaa

SEQ ID NO: 10755 - DNA, 350 bp, Zea mays
  Clone ID: LIB3150-059-Q1-N1-C7
gatcacactcgtagagagaaggaaaaatatccccaaaccctagctcccgatctcgatggcgaaccctcgcgtcttcttcgacatgaccgtcggcggcgccccggcgggccggatcgtgatggagctgtacgccaacgaggtgcccaagaccgcggagaacttccgcgcgctgtgcacgggcgagaagggcgtgggcaagtccgggaagccgctccactacaagggctccaccttccaccgcgtcatccccgagttcatgtgccagggcggcgacttcacccgcggcaacggcaccggcggcgagtccatctacggcgagaagttccccgacgagaagttcgtgcgcaagc

SEQ ID NO: 10756 - DNA, 369 bp, Zea mays
  Clone ID: LIB3150-059-Q1-N1-C9
gcttaaatgtgaatctatgcccatgggtgaacaaagtgaaaatcaagagcaaaggtatgtttctaagtcttagtacattggttttgtgtactaatatatttgtctaagtgttagaaacagagagaagaagaaaaggagaaggttagctgtgtacagccaacaggctggttcggtctggggcaccggactgtccggtggtgcaccggacagtgtccggtggtgcaccggacagtgtccggtgcgccaggctgactcggccgaagaggccgctcttgggaattcgccgacggcgtacggctaaaattcaccggactgtccggtgtgcaccggactgtacggtgagccaacggtcgggcagggccaacggtc

SEQ ID NO: 10757 - DNA, 337 bp, Zea mays
  Clone ID: LIB3150-059-Q1-N1-D1
ctcaaccaaattcaaagtcacagcggcgaaactctcggcgatgtctggccgcggcaagggcgggaagggtctgggcaagggcggcgccaagcgccaccgcaaggtgctgcgtgacaacatccagggcatcaccaagccggcgatccgcaagttggcgaggaggggcggcgtcaagcgcatctccgggctcatctacgaggagacccgcggcgtgctcaagatcttcctcgagaacgtcatccgcgacgccgtcacctacaccgagcacgcccgccgcaagactgtgaccgccatggacgttgtctacgctctcaagcgccagggccgcaccctctac

SEQ ID NO: 10758 - DNA, 320 bp, Zea mays
  Clone ID: LIB3150-059-Q1-N1-D10
cgattcgaggcggttctttcaacccaggggcagtgatggtgacgaaaaggaacgttggcaaccctttgtaaggcggattttgaaggtaaaaaagtgtttgtgcgcgccgacctcaacgtcccgctcgacgatgcccagaagatcaccgacgacacccgcattcgcgccttcgtccccaccatcaagttcctcctcgagaagggcgccaaggtcattctcgcgacaccaccaacggctgcatgtcgactgggccacactttaatcctgttggcaaagagcatggtgcaccggaagatgaggaccgccatgcccgtgatctg

SEQ ID NO: 10759 - DNA, 433 bp, Zea mays
  Clone ID: LIB3150-059-Q1-N1-D11
tgacggcgcatgcatacagacggacgcacgcgtccggaggaactaccgagctcgaggagatcgggacgatgatgggagggcgcgctctgctgctgctcctggtctaggcgctgctcgctcacatccgcacctatgaccacctacaggaccatccgccgatgaggacgcggatcgtagatggatcaacgccaacaaggacgaataccaaggcgtatggatgcatgccaagagagaaggacatgaggactatggactcgttgctagtgacacagcatggagatactccataagaaaggagcttgaggagtcctttacagtaaatgatgggacagtggtcctgcagtttgaagtgagacttcagaatggccttgaatgtggggtgcctacattaagtacatccgccctcaagatgctggatgggatgccaaggagt

SEQ ID NO: 10760 - DNA, 376 bp, Zea mays
  Clone ID: LIB3150-059-Q1-N1-D12
atcaagatgataatgcttggaatatttctatgagtggtggaacatgccttggactcatttctagaactgttggtgatgcagttgtccctcttgtgatgccatttgtcgagaccaacatcacaaagcctgattggcattgtcgtgaggcagctacctttgcatttggttctatccttgaaagcccctctgttgggaaacttgctccacttgtccaggctggtcttgatttcttgctcaacacgatgaatgatgcaaatagccaggtaaaagatactactgcttggactcttgggagagtatttgagctcttgcattctccagctggtataaactcaatcataaatggttcaaacctttcccgtatcatgtctgtatt

SEQ ID NO: 10761 - DNA, 402 bp, Zea mays
  Clone ID: LIB3150-059-Q1-N1-D2
gttctagatcgcgagcggcgccctttttttttttttttttttcacttctagtctctcattatcagcaattcagcatcttgttactcatacggaagaaagaatagacgctacaaactagaacttgtgaacacacgctattgacctctaaaccaccttaacaaaatctcaaaattcacgcctgggctttgattctgcaaccgtgactcggatctgtctaccatccaagtcgatgccatcaaggtttgatatggcattgttgacctcctcggcagagccataggtgacgaaaccaaacccccttgacctgccgctatccctgtcgtagatgaccttagcatccagcacctgtccttgctcactgaataggttctccagagtcgagttgtcaacgccccatgcaag

SEQ ID NO: 10762 - DNA, 401 bp, Zea mays
  Clone ID: LIB3150-059-Q1-N1-D3
tgttaagaagcttggtctctggggtctcttcactagaggacttcctcttcgtatcgtcatgattggtacccttactggtgctcagtggggaatttacgatgcattcaaagtgatggttggactcccaacaacgggaggtgttacacctgccccagcagcagaggctggattgaaagccagtgcttgatttttttttctgtgttccctgagatcatatttggtagagtggaattgtatcagccagtcgagagcttagttcccgaatctttttttaatcgtaacggaaaatttgtccgtcatccttctgatgagaggaactcattaaacaagcgaaataggtcttttttgcgctgggaaaagtttgcgcttgatgcataataatttttaggacggcaacgctc

SEQ ID NO: 10763 - DNA, 376 bp, Zea mays
  Clone ID: LIB3150-059-Q1-N1-D5
tcccgtcgcatcccatcccactaccacccatctcgtcgtccgccgattcgatccggttcttccaacccaggggcagtgatggcgacgaagaggagcgtgggcaccctcggcgaggcggatctgaaggggaagaaggtgttcgtgcgcgccgacctcaacgtcccgctcgacgatgcccagaagatcaccgacgacacccgcatccgcgcctccgtccccaccatcaagttcctcctcgagaagggcgccaaggtcatcctcgccagccacctgggtcgtccaaaaggtgtcaccccaaagtacagcttgaagcctcttgttccacgcttgtctgagctccttggagttgaagtcgtgatggccaatgattgcattg

SEQ ID NO: 10764 - DNA, 153 bp, Zea mays
  Clone ID: LIB3150-059-Q1-N1-D6
acccagctcttaactgcgtgcagaaggggccccccaactctatatacagaatgagagcactcttcaccatgctctccgcctgagggctggcatgcacatctttgtcaagaccctcactggaaagactatcacccttgaggggggattcttctg

SEQ ID NO: 10765 - DNA, 145 bp, Zea mays
  Clone ID: LIB3150-059-Q1-N1-D7
gtttcagtgctaggccgatgtcgcactggcggtagcgatctgagatcgagcgaagctaaggtttttcatctagatggcgcttaatacagcggggtcagcgctgaaatgttataagacagtcagaagggtggctacaacaaaactg

SEQ ID NO: 10766 - DNA, 386 bp, Zea mays
  Clone ID: LIB3150-059-Q1-N1-D8
gcacgccaccgcccaccagcgccgccgaggggcaaggccgaaccctcctccgttcgccgaggcggagcacgcccttccaggccagcttccaccggagcaagagctaagtcgcctcgaattcttcccagctagtagcgtgtgccgtaccccgtcgctcaaccgggatggcgtcgagtggggatccgcccggatctgctgatgagaagaaaactccaatatccgaagggtcttccgacgaacgtcaagggcttcctccagcaggcttttcaaatccttttgattttggttctatgcaaagtttgctcaatgatccatctattaaggagatggcagatcaaattgcaagggatcctgcattcaaccggatggctgagcagctacagaaa

SEQ ID NO: 10767 - DNA, 87 bp, Zea mays
  Clone ID: LIB3150-059-Q1-N1-D9
tcgggagatcttttatgattaaaattaaggggataaaaaaggttaagggggttaagttgaagattttgattattaaaaagaagaaaa

SEQ ID NO: 10768 - DNA, 402 bp, Zea mays
  Clone ID: LIB3150-059-Q1-N1-E1
atccaggacaaggagggcatccccccagaccagcagcggctcatcttcgctggcaaacagcttgaggacgggcgcacgcttgctgactacaacatccagaaggagagcaccctccaccttgtgctccgcctcaggggaggcatgcagatctttgtgaaaaccctgaccggcaagactatcaccctcgaggtggagtcctctgacaccattgacaacgtcaaggccaagatccaggacaaggagggcatccctccagaccagcagcggctcatctttgctgggaagcagcttgaggacgggcgcacgcttgccgactacaacatccagaaggagagcaccctccacttggtgctgcgcctcaagggaagcatgcagatcttcgtgaagaccctgaccggcaaa

SEQ ID NO: 10769 - DNA, 380 bp, Zea mays
  Clone ID: LIB3150-059-Q1-N1-E10
caagtctgaatcgaaaaaggtgcacctgaaacaggttgatattattggactgggttctggtgcggaggtggatcagaaacttaagtatgctaatgatctttcgtcgggtgtgatattcggaagagagcttgtgaactctcctgcaaatgtccttacccctgctgtgcttgcggaggaggcgtcaaagatcgcttctacttacagtgatgtgttcactgccacagtactagatgtagagaaatgcaaagaactaaagatgggttcctacttgggagttgctgcagcttctgctaaccctcctcacttcatccatttgtgctacaaacccactgatgggaacgtcaagagaaagctggctattgttgggaagggtttaactt

SEQ ID NO: 10770 - DNA, 383 bp, Zea mays
  Clone ID: LIB3150-059-Q1-N1-E11
caatgaccaaccagggtgttcaagtgttcccagagataatggttcctcttgttggaacaccacaggaactggggcatcaagtgactcttatccgccaagttgctgagaaagtgttcgccaatgtgggcaagactatcgggtacaaagttggaacaatgattgagatccccagggcagctctggtggctgatgagatagcggagcaggctgaattcttctccttcggaacgaacgacctgacgcagatgacctttgggtacagcagggatgatgtgggaaagttcattcccgtctatcttgctcagggcattctccaacatgaccccttcgaggtcctggaccagaggggagtgggcgagctggtgaagcttgctacagagagg

SEQ ID NO: 10771 - DNA, 372 bp, Zea mays
  Clone ID: LIB3150-059-Q1-N1-E12
ccagcgtccactcgcccaccgtttccgctccatccccggcccccacttccccgttcgagagacgaaaaccgaccattcattccttcttccatggcgaggagggcgacggtgatggtgctcgcggcggcgctcgcggtcctcctgctggcgtcgtcgtcgtcgaagacggcccccgtggccagcgccgcccgggacgacccctcggcagcggcggcggcggccgtcacttcttctcgtgacctgcagaaggatggatcggcggcggcggcggaagggaaggggaaggagaaggagtgcgagggcgccaacgacgaggacgagtgcatgatgaggcgcacgctggccgcgcacaccgactacatctacacccag

SEQ ID NO: 10772 - DNA, 399 bp, Zea mays
  Clone ID: LIB3150-059-Q1-N1-E4
tgctgagcttgccagcagcgatggtgtcaagggcaccatctttttcacccaagagggagatggctgtcccggtctcaccggaagagtctctggcctcaagcctggcctccatgggttccatgtacatgcacttgcagacaccacccatggatgcatgtcaactggaccacactacaatcctgcgagcaaggagcatggggcaccagaagatgagaaccgccatgctggtgatcttggaaacgtgacagctggagcagatggtgttgctaatatcaatgtcaccgacagccagatcccactgactgggccaaactcaatcattggcagagctgttgttgctcacgctgatcctgatgatcttggaaagggtgggcacgagctcagcaagagcactggaaa

SEQ ID NO: 10773 - DNA, 401 bp, Zea mays
  Clone ID: LIB3150-059-Q1-N1-E5
gcactcactaacattgcatcaggcacatcagagaacactaaggtggtggttgagagtggtgctgtgcccatctttgtcaagctactcaactccctcagcgaggatgttcgtgaacaggctgtatgggctttaggtaatgttgctggcgactccccaatgtgccgtgatctggtacttggtcatggtgggctataccctttgctgcagcagcttaatgagcatgctaagctttcgatgcttaggaatgctacatggactctctccaacttctgtcgggggaagccacaaccaaactttgatcaggtcaaaccagcattgccagcactacagcaccttattcactctcaggatgaggaggtcctaactgatgcctgctgggcgctctcatacttgtctgatgg

SEQ ID NO: 10774 - DNA, 385 bp, Zea mays
  unsure at all n locations
  Clone ID: LIB3150-059-Q1-N1-E6
atctacattgttggtatcttcgctgaattcagcggcaccgaatttacaaacttcatggaggtcgcagagaagctgaggtctgactacgactntggccacactntgcatgccaaccacctcccacgtggtgatgcagcagtggaacggccattggtcaggctgctgaagccatttgatgagcttgttgttgacagcaaggattttgatgtcgctgcactgatgaagtttattgatgctagcaccatccctagagttgtcacttttgacaagaaccctgacaaccacccatacctcatgaaattcttccaaagctcagcccccaaagctatgctgtttttgaacttctccacccgaccttttgattctttcaagtctgcctactctg

SEQ ID NO: 10775 - DNA, 361 bp, Zea mays
  Clone ID: LIB3150-059-Q1-N1-E8
gtgagcatgacgcaaccctgggcctgggccagggccatcaggtgggccaatagtttgggccacaatttcggctgaattgattagcgcagcgtacgatccgtgatgaagaggaaccccaatgtttatctgtttaagttaaatatcttttgaggggttgtggatgtgagagtgctggctggtgtctaaagctccgccattatagaaggtttgagggactgtcactgtcagataacaataaactggagttgttacatgcagagtcatcgtgaaaacgatagtgtctagtaagaagctgagtttgttttttctttacatgatttcattataactacaccaaattattgacggggaaaggaatcat

SEQ ID NO: 10776 - DNA, 384 bp, Zea mays
  Clone ID: LIB3150-059-Q1-N1-E9
ctcctgtccaccctgccaccgccgacgccgcgccgccgcagcaactgtcaccgtcgctatggcccgtatcaaggtgcacgagctccgggggaagagcaagacggacctgcaggcgcagctcaaggagctgaagtctgagctctccctcctccgcgtagccaaggtcaccggcggcgcacccaacaagctctccaagatcaaggtggtgcgcacctctatcgcgcgcgtgctcacagtgatctcgcagaagcagaagtcggcgttgcgggaggcgtacaagaagaagaacctgctccccctcgacctccgccctaagaagacccgtgccatccgccgccgtctgaccaagcaccagctttctctgaagacggagagggaaaagaa

SEQ ID NO: 10777 - DNA, 386 bp, Zea mays
  Clone ID: LIB3150-059-Q1-N1-F1
ggccgtctgctccgggctgctgttctgcgcctccaaaggctttggcctctgtgtgaagttttaagcttcacctccagccatgggtaaagagaaagcccacatcaacattgtggttattggccatgtcgactctggcaagtcaaccaccactggccacctgatctacaagcttggaggcattgacaagcgtgtgattgagaagttcgagaaagaagccgctgaaatgaacaaacggtccttcaagtacgcctgggtgcttgacaagctcaaggctgagcgtgagagaggtatcaccattgatattgctctgtggaagtttgagaccaccaagtactactgcactgtcattgatgcccctggacatcgcgacttcatcaagaacatga

SEQ ID NO: 10778 - DNA, 385 bp, Zea mays
  Clone ID: LIB3150-059-Q1-N1-F10
ccgtgttgctcgccgcacccccacgccccgccgtgttgctcgccgccaccgccccgccggcagccaaaatgccgttcaagaggttcgtggagatcgggcgagtggcccttgtgaactacggcaaggagtatggccgcctcgtcgtcatcgtcgacgtcgtcgaccagaacagggctcttgtggatgcccccgacatggttcgttgccaaatgaacttcaagcggctttccctgactgacatcaagattgacattaaacgtgtcccaaagaagactacactgatcaaggcaatggaggaagctgatgtgaaaagcaagtgggagaatagctcatggggcaagaagctgattgttcagaagaggagagcatcactcaatgactttga

SEQ ID NO: 10779 - DNA, 381 bp, Zea mays
  Clone ID: LIB3150-059-Q1-N1-F11
ctgaattcaggatttacatcatcattggtaaatcctaaccaatccactattgtccgggcttcaaggggcaattcaaacattggaatatcttcaaataatcagcctacttcatcgcttcaccaaacgtcaaggatttctacacattcacaaagtcatggaccagtgatgcaccagaagtcaatgcaagtgcagaatcagtctgcagcaagaattccaactcagcaattgagccatcggactaacaattcattaccagcagctcagcatctatctgttaaatcaacagaaagtggcgagaatgggtcataccctagtctgaacaattcaaagacagcttctgcagtggtaaaagccaatagccaggaaactggaatggattca

SEQ ID NO: 10780 - DNA, 289 bp, Zea mays
  Clone ID: LIB3150-059-Q1-N1-F12
ctccactgtctccaactctccatcgcgtctgctacgcctctcctgcaggacgaccaatggcttacaggaagttcttcgtgggtggcaactggaaatgcaacggtactggcgaggacgtgaagaagatcgtcaccgtgctcaaccaagccgaggtgccctctgaagacgtcatccaggtggtcgcgagtctcactttcctttttatgcagcaggtcaaggggctgctgcggctggacttctccgtcgcagcccacaactgctgggtgcgcaaggacgcgacggtccccgt

SEQ ID NO: 10781 - DNA, 150 bp, Zea mays
  Clone ID: LIB3150-059-Q1-N1-F2
cagactgcagacatgatcacgaggtgagctgatggcatggaccatgacttccagattctgacctatgcaaggaaagaagacacgactcagaggactaagaggcttcggtttcacaagacagatggttattcgctgtgactcgctgtatga

SEQ ID NO: 10782 - DNA, 396 bp, Zea mays
  Clone ID: LIB3150-059-Q1-N1-F4
gtggacctggacgcggcctacgatcctgcgacagacgcaggatagatgtgcgcgctgcgaatgcgaccgacaactcgaataataaacacctgtgacgcaccagacgaacggcttggagatgagacgagagcaacacatagcggctctctagtgacgaagaggactgctttataagctccacaccgtacacaaatgccggatctgctatggcgagcgagggtgttagaaaaccaaagctacctgcacacaccatcctacaacgtgaggagaaaaaaacggctcttggcctccgtcatgaccaacggctactaccaacaatacgtcctcgcgctgaacgatgagccaccgctgatgctgatcgaccagaaacactggatggcagacagcgagctgatc

SEQ ID NO: 10783 - DNA, 403 bp, Zea mays
  Clone ID: LIB3150-059-Q1-N1-F5
acgaaatctgacccgggccacactccgctgctccgccatggcgatccgctccaaggcctggatctcgctgctgctcgcgctgaccgtcgctctctccgcccgggcggaggaggagcccgccgccgcggcggagggcgaggccgtgctcaccctcgacgtcgacagcttcgacgaggccgtcgccaagcaccccttcatggtcgtcgagttctacgccccctggtgtgggcactgcaagaaacttgctccagagtatgagaatgcggccaaggcacttagcaagcatgacccaccgattgttctcgctaaggttgatgctaacgaggagaagaacaggccgcttgctaccaagtacgagatccaagggttcccaaccatcaagatcttcagggaccaggggaag

SEQ ID NO: 10784 - DNA, 377 bp, Zea mays
  Clone ID: LIB3150-059-Q1-N1-F9
gcaaaacccgcatcagagaagaggagaggagtcgccgcgaccgagagctccagagcacgcccccggcacagcctccgacgatggatccaaagatgacagaggtgacccatatgttcgcccgcttcaaggcggcctacgcccggaacgacctcaacacctgcgtcaccctcctctcgcagctcaaggtccatctcacccaattccccagccttccgcccttgtttcagcagacaccgaacattgtggaggagctcaaacttgcaagggacatttatgagcatgctgttgttttgagtgtgaaacttgaggaccaagatgcgtttgaacgcgatttctgccagctgaagccttattacatggatacatgtggcataatt

SEQ ID NO: 10785 - DNA, 386 bp, Zea mays
  Clone ID: LIB3150-059-Q1-N1-G11
ctccccaattctaagcgagacggggcacaggaagaggagagcctaaaaccctaaccccccgaatcggatccggccgccggagcgcggaaccccaccccggccgccatggagatgggagggatgagcgacgctgagcggctgttcttcttcgagatggcctgcaagaactccgaggtcgcgtacgagcagaaccccaacgacgccgacaacctgacgcggtggggcggcgcgctgctggagctgtcgcaggtccgaaccggccccgacagcctcaagcttcttgaagatgcggaagccaaactggaggaggcacttcaaattgatcccaacaagtccgatgcactctggtgcttgggaaatgctcagacctctcatggattcttcac

SEQ ID NO: 10786 - DNA, 344 bp, Zea mays
  Clone ID: LIB3150-059-Q1-N1-G12
cagccacatcaattagatcccaagccgctggaaatgttttctgattcgcagaagaggaatgggctggaactcgtctcgggtttcggcggtgctggtatccttgttagcaacgtctcagaccatgtggctgctctcaaggctcggtatggtcccggttctaagataatgggcagtgacgcggatccttggaaagacataggaagcaggtagcaccgatagcggtagccagttctagtgcttgttttgttgctcgctgtatcatatttagttctttttttttttctgtaacttgaatgaaatcgtcaaatgaaggaaagtgaatggctttcctgcccatactattt

SEQ ID NO: 10787 - DNA, 296 bp, Zea mays
  Clone ID: LIB3150-059-Q1-N1-G4
caaccacctcggcagctatgagtgcaagctgtgcctgacgctgcacaacaacgaggggaactacctagcccacacgcaagggaagaggcaccagaccaacctcgccaagcgcgccggccgagaggccaaggatgcgcccgcgcagccccagcccaacaagcgcaagcttgccccccgcaagtctgttaagattggcagacccgggtataaagtaaccaaacaatatgatcctgagacgaagcaacactcgtttctctttgagattggttaccctgaaattgaagataattgcaagc

SEQ ID NO: 10788 - DNA, 334 bp, Zea mays
  Clone ID: LIB3150-059-Q1-N1-G6
gtgaactgggactttcctgcaaagcctaagttatttgttcatagagttggtcgagtggctagacaaggtagaagtggaacagcttatacatgtgtcacttcagaggacatgccatatttactggacctacatcttttcctttcaaggcctcttagacctgctccaacagaggaggaactcctaaaagacatggacggtataactatgaaaatcgatgaagctattgcaaatggggaatcaggttatggacgatttcctcaaactgtccttgatcttgcctctgatggactaaaagaagttattactggatgtacggagttgatagcattagaaa

SEQ ID NO: 10789 - DNA, 210 bp, Zea mays
  Clone ID: LIB3150-059-Q1-N1-H10
gcttcttatgtgatttctggccgggttgcctgcttggtctctttggctgtgctcgctgcaccgccggggagagtagcagatgatgaccgcgtcgcggacacctttctgatcaatcaagcagggcggcagctaagtactggtatatggagtgagcagccgccgagtagcctcaatcagtgatttacagctgtagaccagccacggtgatat

SEQ ID NO: 10790 - DNA, 237 bp, Zea mays
  unsure at all n locations
  Clone ID: LIB3150-059-Q1-N1-H11
tcccatttgaaatcaacccatcctcgttttcttcggctagcagcctctcaccctcatggccaagatcaagatcgggatcaatgggttcggcaggatcggaaggctggtggccagggtggccctgcagagcgacgacgtcnagctcgtcgccgtgaacgaccccttcatcagcaccgattacatgacctacatgttctaagtatgacactgtgcacggacagtgggaagcaccatgag

SEQ ID NO: 10791 - DNA, 332 bp, Zea mays
  Clone ID: LIB3150-059-Q1-N1-H12
cgccggttcgaccccttcgaccttcccgacgcgccgcccgaaaccctagctccaccgatctatctctatccagcccaggcagggggaggagatggcggcggcgccagcggccggagggcagggaggcaggggtatggacgccgtgctcctcgacgacatcatacgccgcctgctcgaggtgcggaccgcgcgccccgggaagcaagtgcagctctgcgagtcggagatccgtcagctctgcaccgactgccgcgagatctttctcaaccaaccaaaccttctcgagctcgaggcgcccatcaagatctgcggagacatccatggtcaataca

SEQ ID NO: 10792 - DNA, 294 bp, Zea mays
  Clone ID: LIB3150-059-Q1-N1-H5
ctttttctccctgtcttcttctcccacacagcagcagcccatgccgtccttcctctggttctgcacggcgaccagcagggagctcagctccttcttgccatggcgctaggcacccatgtagcagggacagcgcccttcctccctgctcctcccttgcgcaggcctgcttcagccgagtccccttcttcatggcgttcggcagcagggagactttcttcccacggctgcagcaagcagctctgcgcgctccccccatggcgagcagcaagccggcgcccctctccattttcccct

SEQ ID NO: 10793 - DNA, 372 bp, Zea mays
  Clone ID: LIB3150-059-Q1-N1-H6
gctctggccgccgcggccctcgtcgcgacgctcgcgctgagcgtcggcgccaccccggagacgacgtgcgcggcggcggcggcccacgaccggcgcgtggactacggcttctgcgtgtcgaggctgagccaccaccacgacagccccgacgcggacacctggggcctggccaaggtggccgccgacgtgggcgtcgccaccgccggggacgccgtctacgacatcaaggccctgctggccaataagccgccggccgacgcccaagcgcgggcggcgctggagcagtgccagaggctgtacgacgcggcggagatggcgttcgcggaggcgtacgacgggatcaaccgccgcgactacgcggcaggcaagggc

SEQ ID NO: 10794 - DNA, 374 bp, Zea mays
  Clone ID: LIB3150-059-Q1-N1-H7
cgcttggtgaacgaaactccggagggtgggcctggaagaaacatattaagtcaactggcagctgctatgccgcaatcggtggcagttaccccaaaagaacgagaggccatccaacggcttgagggaatgggcttcaaccgtgagcttgtgctaaaagttttctttgcatgcaacaaggacgaagagcttgcagccaactacctccttgatcatggccacgagtttgacgagcagcagcaatagtgggtggatatggtgtgtggatgcaagaaaccgacgcagtagcagaacagcatagtgtcgatctgatgacctccgcctgatgagagatacttgcgtgttatgctatgctgctgaccatcttttattttcat

SEQ ID NO: 10795 - DNA, 373 bp, Zea mays
  Clone ID: LIB3150-059-Q1-N1-H8
ggaggatgccgctaacaatttcgcccgtggccactacacaattggcaaggagattgttgatctgtgccttgaccgtatccgcaagcttgctgacaactgcaccggcctccagggcttcctggtcttcaatgccgttggtggtggcaccggctctggccttggttctctcctccttgagcgcctgtctgtggagtacggcaagaaatccaagctgggcttcactgtgtacccatctccccaggtgtcaacctctgttgtggagccttacaacagcgtcctctccactcactcactcctggagcacactgatgtctctatcctgctcgacaacgaggccatctatgacatctgcaggcgctccctcgacattgag

SEQ ID NO: 10796 - DNA, 322 bp, Zea mays
  Clone ID: LIB3150-059-Q1-N1-H9
tcgtggacaagcacccaaaaaatgcacgatagaatgagacggcagggccaatatggggaaacggatattaactccatgggtgctgcccagttgcattacttccaggcacagcaaaaggtacagaaacaccctgagaatagcttcactggaagagatcctgcacaagcttttgcggagcattagtacactttcccttaagcaagacagagtcaatgggatcgagggggaccaaatgcgccaagccaggttccatcatatgcatattacgaaacccaaagtgctggaggtgcgcaattcttttatgatgggcagagatctgata

SEQ ID NO: 10797 - DNA, 328 bp, Zea mays
  Clone ID: LIB3150-060-Q1-N1-A1
ccccgagacctccagccgtccgcccctgaaccctcagccttctccgtcccgcctcggcactcgacggccgccggcacacaccgcgcagtctcgagacaggaaccggaggaacgaggatggaggatgactcgccgctgacgaagacgatgaaaggtgcggtgacaggactcgccgcggggaccatctggggcaccgtcgtcgccacctggtacgacgtgccccgtgtggagcgccacgtcgcgctccctggccttatccggacgctcaagatgtgcggcacctacggggccaccttcgccaccatcgggggcctctacatcggcgtcga

SEQ ID NO: 10798 - DNA, 318 bp, Zea mays
  Clone ID: LIB3150-060-Q1-N1-A10
cggacgcgtgggcggacgcgtgggctaccaccaaacatgagcagagcttgcatggaaatgttaagccgttgcaattggcggcaaatgaatcctctcgtttggcttacagaagtccagcacttaaaaaccagtggaatcttcctgctagttcttcctccactaatgtggttaccacctttgatgataacgaacacgtgtcttccagtgttattgaagaaaaagttggagtactgttattaaaccttggtggtccagagacacttgacgatgttcaaccatttttattcaacctatttgctgatccagatatcattcgac

SEQ ID NO: 10799 - DNA, 327 bp, Zea mays
  Clone ID: LIB3150-060-Q1-N1-A12
tcggagcttcaggagactgttcaatatcctgtggagcatccacagaagttcgagaagtttggcatgtctccatccaaaggagttctgttttatggtcctcctggttggggtaaaaccttgttggcaaaagcaattgccaatgagtgccaagctaacttcatcagtgtcaagggtcctgaattgcttaccatgtggtttggtgagagtgaagccaacgtccgcgaaatttttgataaagctcgccaatctgctccttgtgtcctcttctttgatgagcttgactcaattgcaactcaaaaaagaagtaatgtgggtgatgctgggggc

SEQ ID NO: 10800 - DNA, 248 bp, Zea mays
  Clone ID: LIB3150-060-Q1-N1-A2
ccgtcatcgatctcgtttcaaatccatccatcctcgtttcctccgtcccgcagcatctcaaccccatggccaagatcaagatcgggatcaatgggttcggcaggatcggaaggctggtggccagggtggccctgcagagtgacgatgtcgagctcgtcgccgtgaacgaccccttcatcagcaccgactacatgacctacatgttcaagtacgacactgtgcacggacagtggaagcaccatgaagtc

SEQ ID NO: 10801 - DNA, 305 bp, Zea mays
  Clone ID: LIB3150-060-Q1-N1-A3
cgagattggaacgagtaactaacctgttccagcccaaacacagccacgagcacctacatcccccgctggcacctatccttacatcgacacaggcggtccttctccgcggaagccggctggccgacgactcccttaccactatcgccgtgctcctccgcaccgtcattccctagcattccccacgggcgaggcaaagaaacattctcccaccctatccagccgcataggtggcaccgggatttctcttgcggtggcttggaccagatctgcggcgcattcggcggatctgatctcgcgtgcacctc

SEQ ID NO: 10802 - DNA, 266 bp, Zea mays
  Clone ID: LIB3150-060-Q1-N1-A4
cccacgcgtccgcccacgcgtccgccaaaactggctgctttctacgtgcttctagcaagagcacgaacgagggccaagcgctccaaaaccagcgacgtggaagcgcctgcgccgcgagcatccttcctgagcgcggggccaagcagagcagtgcaagcagcatatggcgcgccgtgccagcctgctcctcgccgcggcgctgctcgtcgccgtcgctgccgcggcggtgccgccgacgtgcgagcgcatcgagtgcccggcgtacg

SEQ ID NO: 10803 - DNA, 242 bp, Zea mays
  Clone ID: LIB3150-060-Q1-N1-A5
tcgactcgatccatcgcctcgccgcagcacacacgaggccggcggcgccatggccatgaagctggacatgtccgcgctcgagaccaactttgccaacctgaccgcctccgccggcgacgacacgtacttctccgccgaggcccccgacgtgccgtccatggtgctccccatctgcgacgacttcgacggcttccaggcggccaccaaagatatggtgaagaataagaaggggacgaccacgc

SEQ ID NO: 10804 - DNA, 312 bp, Zea mays
  Clone ID: LIB3150-060-Q1-N1-A6
tgaaggtactcgacgccttgcccagcagacctttatccacagagacttgaagccatcaaacatacttcttggtgatgacatgaaggccaaggtggcggactttggattggtccggcttgcaccagctgatgggaagtgtgtctccgtaaagacaagacttgctggcacttttgggtaccttgcaccagagtatgcagtcactggacgagtgaccacaaaagctgatgtcttcagctttggtgtcatcttgatggaactgattacaggacgcaaggcacttgatgagactccacccgaggatagcatgcattt

SEQ ID NO: 10805 - DNA, 238 bp, Zea mays
  Clone ID: LIB3150-060-Q1-N1-A7
ggaagcacaagctcgatgacgagccggccgacgacacagccgccgacgccgctgaggacagcggcaaccccaagaagaagggcgcgaacaccaaaaagcagcagccggtggcaaagtatggcgccgaggcgaagtcgaaggcggttcgcgagagggagacgggtgcggaagtggtccgcggggacttcgaccggccgtccaagttcctggtggtctgtctcaacgctatccgggatgc

SEQ ID NO: 10806 - DNA, 374 bp, Zea mays
  unsure at all n locations
  Clone ID: LIB3150-060-Q1-N1-A8
tttcgaaagtgcttgcgtcacactcgccgatcgatcgagtctctccggattccagagaggcccaactgccgaagccatcgatcgccgccacctcttcgagcagaatagttgagaatggctgacgaggatatccagcctatcgtatgtgacaatggcactggaatggtcaaggccggtttcgctggtgatgatgcgccaagagctgtcttccccagcattgtgggaagaccacgccacaccggtgtcatggtcgggatgggccaaaaggatgcctacgtaagtgatgaggctcangccaagagaggcatcctgacactgaagtacccgattgagcatggcattgtcaacaactgggatgacatggagaaaatctg

SEQ ID NO: 10807 - DNA, 361 bp, Zea mays
  Clone ID: LIB3150-060-Q1-N1-A9
gtgcgtcaaagtttttgaaatttcaggaggtaaagcttcaagagttagcagagcacgtaccaaagggccacattcctcgtgctctgactgttcatctaagaggagagctgactagaaaggttgcacctggagatgtggttgagatgtcgggtatttttctccctatgccatactacgggtttagagcgatgcgcgcaggattagttgctgatacttacttggaagcaatgtctgtcacccacttcaagaaaaaatatgaggagtatgatctaaaaggtgatgaacaagaacaaattgaccgattggctgaggacggtgatatctacagtaagctggcaaggtccttggcacctgaaatatt

SEQ ID NO: 10808 - DNA, 359 bp, Zea mays
  Clone ID: LIB3150-060-Q1-N1-B10
tcggtgcaggctaaggaacatattatggctggggatatcttccagattgttttaagccagaggttcgagagacgaacatatgccaacccatttgaggtttatcgagcattacggattgtgaatcctagcccatacatggcgtatgtacaggcaagaggctgggtattggttgcgtctagtcctgaaattcttacacgagtcagtaaggggaagattattaatcgaccacttgctggaactgttcgaaggggcaagacagagaatgaagatcaaatgcaagaacagcaactggttaagtgatgaaaaacagtgtgccgagcacataatgcttgtggacttgggaaagaatgatgttggca

SEQ ID NO: 10809 - DNA, 386 bp, Zea mays
  Clone ID: LIB3150-060-Q1-N1-B12
tcggatggcttgacctctgatggagaggaagtaaggtgagaaatcacgattgtttgttgactttgtgaggccgtaaaaattgagatgtatttttaatatttttgtaatactaaccatgtcaaatatgtctacacggttggatgaagttgtactgctgtaccaattcactgtatttgtagactacactacgccatgctttgctaatgaaccagccatcatgttctacaaaattggaggatgaactagccatgatactttgccagtgaaccatgtcaaccgggtatgggatccccgcggggagaaaaccccgctcggggacggggacaggaaaaatctttccacgttactcttcgcggggacggggacagggatttttctcttcgtgg

SEQ ID NO: 10810 - DNA, 329 bp, Zea mays
  Clone ID: LIB3150-060-Q1-N1-B3
ctacgatacgctgtttcttttctttcttccttctctccacctcttcccccctccccaaattcgcgtcgaacgaattcgttaaataatctcagaaaacacacgattgactggatcgaagggattaaaacgagaacgttcagatcctgtgatcaggtctcggggctaatcgtgtgatacttcggcgtgctttggcttgtgattcagtgatatagggtttcggatctggagaattagttctcccgacttccgagtcagaccatgaatgagcagatgatgcgacctacggcgccgctgccgttccaccagatgtgggcggcggtgccggcgat

SEQ ID NO: 10811 - DNA, 273 bp, Zea mays
  unsure at all n locations
  Clone ID: LIB3150-060-Q1-N1-B4
ccgcctccgccgccgacaacagcgtagtgtagtgtagttccggagagggttggggagagtagtagtgatccgcaatgtcgacggaggaggctgttgtggctgaggtcccggtgaccgaggtgccagcggaggtcccggcggcccangtggccgaggcgcccaatgcgaagaaggcgcccaaagagaagaaggcgcctaaggagaagaagctttccgcggcgaagaagccggcggcgcaccctccctacgctgagatgattgtagaggcgatcg

SEQ ID NO: 10812 - DNA, 257 bp, Zea mays
  Clone ID: LIB3150-060-Q1-N1-B5
ctgcattttaatgaccagctatgcagcattgaacaagatagatgacattgaagaacttctaaaagaaatggtagaaaaagatgtgactcttgggtggtctgcatacagcacacttgcttctatctatgtaaatgctggacaatttggaaaagcagaatctgctctgaagaaacttgagggccttatcagtgctcatgatgacagacagccttttgatttccttctgagcctatacgcttcactaggaaatttgagcg

SEQ ID NO: 10813 - DNA, 322 bp, Zea mays
  Clone ID: LIB3150-060-Q1-N1-B6
tcgcactcccatccagccgccaccaggtgcagagtctttcgtcatctcttctccggcgaagaacccccagtcgcccaccagatcacttgttaaactttgttgaggggtgatggcggtttctttcgcaaacctcaacaccgaggcagggcttaaaaagcttgatgagtaccttctcactcgcagctacatcactggctaccaagcttccaaggatgacttggctgtctacacttcgttttcgtctgctccctcgtccaagtatatcaacgtagcaaggtggtttaatcacattgatgcgctcgtgaggctgagcggaattact

SEQ ID NO: 10814 - DNA, 338 bp, Zea mays
  Clone ID: LIB3150-060-Q1-N1-B7
cccaatctcccctacaccagaaaaattcccagttctttggtccgcgtcagagaggcggcggcgatgtctgggcgcggcaagggcggcaagggtctgggcaagggcggcgcgaagcgccaccggaaggtgctccgcgacaacatccagggcatcaccaagccggcgatccggaggctggctaggaggggtggcgtgaagcgcatctcggggctcatctacgaggagacccgcggcgtgctcaagatctttctcgagaacgtcatccgcgacgccgtcacctacaccgagcacgcgcgccgcaagaccgtgaccgccatggacgtcgtctacgcgctcaa

SEQ ID NO: 10815 - DNA, 344 bp, Zea mays
  Clone ID: LIB3150-060-Q1-N1-B8
ctcgcccaaaaccgtagcgccctcgcctgctcgccgccgccgtcgttgcgagctccccatcttcctccgttaaccatggcgacccagatcagcaagaagaagaagttcgtcagcgacggcgtgttctacgccgagctcaatgagatgctgacgcgggagctcgcggaggacggctactccggcgtggaggtgcgtgtcacaccgatgcgcacggagatcatcatccgcgcaacgcgcacgcagaacgtgctcggcgagaaaggccgcaagatcagggagctcacgtctgtggtccagaagaggttcaacttccccgagaacggcgtcgagctctacgccgagaa

SEQ ID NO: 10816 - DNA, 352 bp, Zea mays
  Clone ID: LIB3150-060-Q1-N1-B9
ctgcaggctaaggaacatattatggctggggatatcttccagattgttttaagccagaggttcgagagacgaacatatgccaacccatttgaggtttatcgagcattacggattgtgaatcctagcccatacatggcgtatgtacaggcaagaggctgtgtattggttgcgtctagtcctgaaattcttacacgagtcagtaaggggaagattattaatcgaccacttgctggaactgttcgaaggggcaagacagagaaggaagatcaaatgcaagagcagcaactgttaagtgatgaaaaacagtgtgccgagcacataatgcttgtggacttgggaaggaatgatgttg

SEQ ID NO: 10817 - DNA, 223 bp, Zea mays
  Clone ID: LIB3150-060-Q1-N1-C1
tgatcctcaccggcgtcgccatcgtaatcgccttggacagcggcaccagaacctctgcctccgcaaggtgcttgctggtatcattacaatctggtagttttagtggttgggcttgacttcctactattcaaaaacacagtaccgagaagtctttaagtggggtcaaagatggtgtcgctgaagttgcaaaagcgccttgccgcgagctacctcaagtgtggga

SEQ ID NO: 10818 - DNA, 360 bp, Zea mays
  Clone ID: LIB3150-060-Q1-N1-C10
tcgcccgtcatcgatctcgtttcaaatccatccatcctcgtttcctccgtcccgcagcatctcaaccccatggccaagatcaagatcgggatcaatgggttcggcaggatcggaaggctggtggccagggtggccctgcagagtgacgatgtcgagctcgtcgccgtgaacgaccccttcatcagcaccgactacatgacctacatgttcaagtacgacactgtgcacggacagtggaagcaccatgaagtcaaggtgaaggactccaaaacccttctctttggtgagaacgaggttgctgtgtttggctgcaggaaccctgaggagatcccgtgggggttcggtggtgctgaaatatgt

SEQ ID NO: 10819 - DNA, 351 bp, Zea mays
  unsure at all n locations
  Clone ID: LIB3150-060-Q1-N1-C12
ggaccctacctcacgtcccggatcccatccggcggccaaggggagttacacgctagccggcggtcggncagccgccgccaaccgcctcagccccaacagtcgcaccgccgccgccgaggcaaactcgaagccacccccgccgccgcagccacagccgcgccgagcttgagccgtcgttgctccgctgaatcgcccccatcgtctctcctgaagagagaggacatttattgagacagcatgcctaagataaagacaagtcgtgtcaagtatcctgaaggatgggagcttattgaaccaaccatccgtgagttggatgccaaaatgagagaagctgaaaatgatccacatgat

SEQ ID NO: 10820 - DNA, 361 bp, Zea mays
  unsure at all n locations
  Clone ID: LIB3150-060-Q1-N1-C3
gtggtgcctatatctgcccagctgaaatacaacattgatgttatttgcgaatacattgtgaagaaaatccccatccccgaaaggaactttacctcgcctcccaacatgattgttattcgttcctttgatgttaacaagcctggttcagaggttgacgaaattagaggtggtgtagctggtggcagtatcctcaggggagttcttagggtgaaccagaagattgaagttcgccctggcattgttatgaaagatgagaatggaaacattaagtgcacgccaatctactcaaggattgtctcactctatgctgagcagaatgagctccaatttgctgtcccanngaggcttattggtgtgggaa

SEQ ID NO: 10821 - DNA, 351 bp, Zea mays
  Clone ID: LIB3150-060-Q1-N1-C4
cctgaacaacgctctgaagctggttgtgtctgagtgcaagccaaaagcaaagattgttgacctttgtgagaagggtgactctttcataagagagcaaactgggaatgtctacaagaatgcaaagaggaagattgaaaggggcattgctttcccaacctgtgtttcggtgaacaacacagtctgccacttctccccgcttaccacagatgatgcagttctggaagaaaatgacatggttaaaattgacatggggtgtcatattgatggctttattgctgtggtggcacatacacatgtaattgcaaatgggcctgtcacaagaagagcactgatgttcttgctgtgcaacac

SEQ ID NO: 10822 - DNA, 295 bp, Zea mays
  Clone ID: LIB3150-060-Q1-N1-C5
ctctcctcccctcgtccgtctcccttccacccttccacgctcccgccgtttcccaggggccagggccgacccacgccgcgccgggatccttagatgcggccggggcggcgccgcgagccgtgagcgcggttcctgccgtggcgatgggtttccgcgccgccgccgcggtggccgtgtttgcggcggcgggactggcggtcgccgccgccgcttccggggactcgctcggcgacctcggaggcgcggcgagggagatcgaaagcgcaccagaggtcaagaacctgggaccatgggc

SEQ ID NO: 10823 - DNA, 177 bp, Zea mays
  Clone ID: LIB3150-060-Q1-N1-C6
aacaatatgtgccaatgcaatcatgcatgcgggaactactgtagatacctttctaagaaagaacctggagtggttaagcaaggcaaccaattgggcaaaattcaatgcaactgctggactaagtgtcattcatagaagtcatcttcaacaaaggcgggctttgatggccccctacct

SEQ ID NO: 10824 - DNA, 381 bp, Zea mays
  Clone ID: LIB3150-060-Q1-N1-C7
gtgaatttaaggaccttttcaactggaggcacttcattgagtcactgaaagaagacattgatattgttgaaacacttccccctgaatacagtgacattgaacctttggctaaagctccggtatcttggtcgaaggtgcattattacagagatgaaatcctcccccttctgaagaaacacaaagtcatttactttacacatacagattctcgccttgctaacaatggccttcctagttacattcagaaattaagatgccgagttaactacagatctttgaagtattctcatacaattgaagatcttggtaataccctagtttcaagaatgtgtcaagaccgaagcccatatcttgctctccatctaaggtacgagaaggaca

SEQ ID NO: 10825 - DNA, 347 bp, Zea mays
  Clone ID: LIB3150-060-Q1-N1-C8
gttccggacagctcttgcactgatggagttgtatggtcctgcacttgtgacaacaaaagatgctggggatgcagtaacccttttgcagtctttagctggttccacttttgacagtagccagcttgttttaacagcttgcatgggatatcaagctgtaggtgaagcaagactgcaagaattgagaaataaacaccgaccatctgttatctcctcaatggaacagagagcaaaaggtcttcgtgtctggagggatacgaacaggcttgcatctaagctatataattttaagcgtgacactgaaccattggtgtcgttatcagaagaacagtcaaatgacttgacagatg

SEQ ID NO: 10826 - DNA, 326 bp, Zea mays
  Clone ID: LIB3150-060-Q1-N1-C9
aaattttgtcattttgttacacctggttgcactacattctgtttctctgctgtagtgaggtatctagtgtgaacattttattctagatattcctgaaattcgcattttgcagtgctatttctgtgactttgagatgcatctatcactgttattaaggcgtcgcctatgcgtgcaggcggaggtccaacgcctaggcgttcaagcggtggtccaacgccttgtctcgacttaccggtttaaaaaccatggcatctatatacaagtttttcattatcacgcttgattttgccaaatctttagtttctttgtcgtgtccttaaatttat

SEQ ID NO: 10827 - DNA, 263 bp, Zea mays
  Clone ID: LIB3150-060-Q1-N1-D10
gccggcatcgatctcgcttgaaaatcatccatcctcgtttgctgcgtgccgcaccatctgaacctcatggcgcaagatcaagatcgggatcaatgggttctgctggatccgatggctggtggccagggtggccctacagagcgacgatgtctagctcgtctgcgtgaacgaccgattcatcagcaccgactacatgacctacatgttgaagtacggacactgtgcacggacagtggaagcaccatgaagtcaaggtgaacgac

SEQ ID NO: 10828 - DNA, 235 bp, Zea mays
  Clone ID: LIB3150-060-Q1-N1-D12
caccccggacgaggaggtcgactaaactgggttgtactccaccgacgctccactgttaatgacttcatcctctgtaacaacgccgatggcgagacaggtcctttaaacttctattggagacataaggtccgccattatggaactgattacatagtgatagttttgctaaccaacgatgtgtttttagcatacatggtatgccatgtagatagagcggatatttgtggacaacata

SEQ ID NO: 10829 - DNA, 373 bp, Zea mays
  unsure at all n locations
  Clone ID: LIB3150-060-Q1-N1-D3
ccacgttcgaggatctgaagctgtcgcccgagctgcttaaggggctgcacgacgagatggggttcagccgcccgagcaagatccaggcgatcaccctgcccatgatcctcacgccgccctacaaggacctcgtcgcgcaggcgcacaacggctctggcaagaccacctgtttcgtcctcggcatgctcagccgcgtcgacccgcaacacaagataccccangctatctgcatttgccccaccaaggagcttgcgcagcagaataaggcagttctcatgaggatgggcaagtttactggcattacatgcgcctgtgcaatcccgccagctcaaaaagactacatgccgatctcaaaaatggctccgatcactga

SEQ ID NO: 10830 - DNA, 321 bp, Zea mays
  Clone ID: LIB3150-060-Q1-N1-D4
gcggcagtgcgtatagaggatcgttgaacagaacagcatgaagatggtcatcgttctcgtcgtgtgcctggctctgtcagctgccaacgcctctgcaatgcagatgccctgcccctgcgcggggctgcaaggcttgtacggcgctggcgccggcctgacgacgatgatgggcgccggcgggctgtacccctacgcggagtacctgaggcagccgcagtgcagcccgctggcggcggcgccctactaacccgggtgtgggcagacgagcgccatgtaccagaccgctccgcaacagtgctgccagcagcagatgaagatgat

SEQ ID NO: 10831 - DNA, 297 bp, Zea mays
  unsure at all n locations
  Clone ID: LIB3150-060-Q1-N1-D5
cgaaaccgaaagagaggcagagcttggcaatggagctcccgtggggaatgctgctgccgctgctgctggtcctctccgtctcgtcctcgtcatcgtcgtcggctgctgccacgctcgccgtcagcgctccgcccccactgcctgttcctcctcctcgtcatgctcaagacgccgaaggcatgctcatcaacggcaacttcgagacggcgccgcggaagctgaacaagaccctgatcgtggggcgccactcgctgccggggtggacggtgcanggccacgtggagtacgtctcgggcg

SEQ ID NO: 10832 - DNA, 309 bp, Zea mays
  Clone ID: LIB3150-060-Q1-N1-D6
tcgcccacgcgtacgaccaggcgctccagcagaacagcactcggagctcgcctgcccgacggcccaccatgatcatccccaagaagaaccgcaatgagatctgcaagtacctcttcaaggagggcgtgctgtatgccaagaaagactacaacctggcgaagcacccacagattgatgtgcccaacctccaggtgatcaagctcatgcagagcttcaagtccaaagagtatgtcagagagaccttctcctggcagtactactactggtacctcaccaacgatggcattgagcacctacgcaactacctga

SEQ ID NO: 10833 - DNA, 370 bp, Zea mays
  Clone ID: LIB3150-060-Q1-N1-D7
gtttcgctgctcgcccgatctcgcgctgccggcagcgatctgagatcgagcgaagctaagctttttcatcgagatggtgcttgtactgcatgctaacagtggtaacaaaaatgcattcaaaacactaattgccgcagaatacagcggtgtcaaggttgagttggtgaaggactttcaaatgggtgtctccaacaaaactccagaggtcctcaagatgaaccctattgggaagattcctgtcctggagactcctgatggtcctgtttttgagagcaatgcaattgcaagatatgttactcgcttgaaggctgataacccactttatggatcttcactgattgattatgcccatattgagcaatggattgac

SEQ ID NO: 10834 - DNA, 342 bp, Zea mays
  unsure at all n locations
  Clone ID: LIB3150-060-Q1-N1-D8
gtcgccatgacggcgtcctacctcagcttccagtccttcgtcgacacctcctccaagtacttcgccgcctcctggggcggcctgcactgggagaggcagatccgcgcgtccgccgtgccgaggcggccccccgggtcagccgccggggccgggatgtcggtgctcgtcacgggcgccgcgggcttcgtgggcacccactgctgcctcgccctccgcaagcgcggcgacggcgtggtcggcgtcgacaacttcaacgcctactacgacccgtcgctgaagaatgcgcgcagggcgctgctcgcctcccacggngtgttcgtcgtcgagggcgacattaacgac

SEQ ID NO: 10835 - DNA, 300 bp, Zea mays
  Clone ID: LIB3150-060-Q1-N1-E10
tggacatggctttggcgtataaagcctcccctccgacatggaatgccaccgccgtcgagcagccaatgtcaaagcgtgacaaagccgctgcaaatgattcaacatacctgaattctcaagctcatgatagtgatcttggaatcattctgggaggcggtgctgcgactagaatgtaccccttgacaaataagcgtgccaagcctgcactgccattgggtgccaactatacactgattgatattgctgtcatacaattgggtgaacagcgacatatgcaagatctatgtgcttacgcaattt

SEQ ID NO: 10836 - DNA, 293 bp, Zea mays
  Clone ID: LIB3150-060-Q1-N1-E11
gcaggggagagaaaaaaaaaaaatctaaccctagcatccgcagcgctagggttcgggggttgcgatggcggcggcggcgagacagcgggggacggtgaagtggttcaacgacaccaagggcttcgggttcatctcccccgaggacggcagcgaagatctcttcgtgcaccagtcgtcgatcaagtcggagggcttccgctcgctcgcggaaggcgaggaggtggagttttccgtctcggagggtgacgacggccgcactaaggccgtcgacgtgaccgggcccgacggatcct

SEQ ID NO: 10837 - DNA, 319 bp, Zea mays
  Clone ID: LIB3150-060-Q1-N1-E2
cctccttcctgtgacatgtggcgctaactcgcgaggcgcgtcccgcaggcgtccgagaagaagcagtccaacccgatgcgggagatcaaggtgcagaagctggtcctcaacatatccgtaggggagagcggcgaccgcctcacccgcgccgccaaggtgctggagcagctcagcggccagacccccgtcttctccaaggcgaggtacacggtgcgctcgttcggcatccggcgtaacgagaagatcgcctgctacgtcacggtcaggggcgacaaggccatgcagctgcttgagagcggcctcaaggtcaaggagtacg

SEQ ID NO: 10838 - DNA, 295 bp, Zea mays
  Clone ID: LIB3150-060-Q1-N1-E3
gttctagattgcgagctgccgccctttttttttttttttttttttttttttttttttttttgcaaaacttttgaaataaaatgaccgttaaaagtttaacgataacaaccactacgatacacccgttataggttttagacaatcagataagaaaaatttattctcggaagcacttccggggaaaaaacacaactctctttgcatgctttcatcactctttgcatgctttcatcagtttgttcatttacttggggctgttcatgtggcggatcaggtcgaccactcgggtgctgta

SEQ ID NO: 10839 - DNA, 110 bp, Zea mays
  unsure at all n locations
  Clone ID: LIB3150-060-Q1-N1-E4
attagctttatctactccagagcgcagaagaacccgatcgacaccatgagggtgttgctcgttgccctcgctctcctggctctcgctgcgagcgccacctncacgcatac

SEQ ID NO: 10840 - DNA, 317 bp, Zea mays
  unsure at all n locations
  Clone ID: LIB3150-060-Q1-N1-E7
tcgaatatgcttncnctctcgctcctcaagaccgcccaggggcaccccatgctcgtggagctgaagaatggtgagacatacaacgggcatctggtcaattgcgacacgtggatgaacatccatcttaaggaggttatttgcacctcaaaagacggtgacaagttttggaggatgccagagtgttacattcgcgggaacaccattaagtatcttcgagttcctgatgaagtgattgacaaggttcaggaggaaacttctaaaagccgatcagataggaagccaccaagtgttggccgtggaaaaagaaggggggacgt

SEQ ID NO: 10841 - DNA, 378 bp, Zea mays
  Clone ID: LIB3150-060-Q1-N1-E9
gtcctctccactcactcactcctggagcacactgatgtctctatcctgctcgacaacgaggccatctatgacatctgcaggcgctccctcgacattgagaggcccaactactccaacctgaatcgccttgtgtctcacgtgatctcatctctgactgcttccctgaggttcgatggtgccctcaatgtggatgtgaacgagttccagaccaacctggttccttacccgaggatccacttcatgctctcctcctacgcaccggtgatctcttctgcgaacgccttccacgagcagctgtctgtggcggagatcaccagcagcgcgttcgagccggcttccatgatggtcaagtgcgacccacggcacggcaagtacatg

SEQ ID NO: 10842 - DNA, 222 bp, Zea mays
  Clone ID: LIB3150-060-Q1-N1-F10
tcgcgatccccacgccaatcggagaagcgagccgtcgccgatcgattcaccaccggacccaagcacaagtaaacctgcgccgggaaaccaaatgcttctcaattacttcgcgacgcggaccgcaagccgaaggcgcgacgatgtccggagcggccgactaccaagagatggtggcgtcggtgccgccctcgctgaaggccatcacgctgacgcacgttcgct

SEQ ID NO: 10843 - DNA, 369 bp, Zea mays
  Clone ID: LIB3150-060-Q1-N1-F12
gcgacgcatggtccctcccgccaccagccacaatcgtcgccagcgaccttttccccgattgtacctgcactggttagagttggagaagaccaacccccaccgtcttgggacccggtaccatccccgagagttaacatgtttggaaggggttctccaagaatcagcatgctcttatcaaaaagtgcaacaaagaagccttctcctaaagctggtgatccaaaaaaacatggaggttctccaaaagagaaattaagagcaactctagagaagactcttgtggacctcttgcatgagcacaagacaactgattataggggtcaaaatggatggacaacagaagcatggaacaaaattgtcaagggaatttca

SEQ ID NO: 10844 - DNA, 289 bp, Zea mays
  Clone ID: LIB3150-060-Q1-N1-F2
gaaatccccaaggcgaggcgttgaaacccttaaccctcttccacctcgaagcggcgcgaggagggagagtgtgagtggactcaagaggcggcgggcgaaatgaagcttaacgtcaagaccctcaagggcaccaacttcgagatcgaggcgagccccgatgcgtcggttgctgaagtgaagaggatcatcgaaactactcaaggtcagagtacctacccagcagaccagcaaatgctcatataccaagggaaaattctgaaggatgagaccactttggaaagcaacggag

SEQ ID NO: 10845 - DNA, 239 bp, Zea mays
  Clone ID: LIB3150-060-Q1-N1-F3
ctcggccggcacctacctcccccacttcgccgccggcgggtggagtcgggccggagcagccgctacctcgcctatgttacaccccccccccccccccccaaaaaaagacaaaaaaaagaacgagtaccaatcaagccgccagcagctcggccagccatggggcacggcgtaagctgcgctcgcacggacgacaagcacaactacttccgcgcggcacaagtcggagacctcgacgccct

SEQ ID NO: 10846 - DNA, 353 bp, Zea mays
  Clone ID: LIB3150-060-Q1-N1-F4
attagctttatctactccagagcgcagaagaacccgatcgacaccatgagggtgttgctcgttgccctcgctctcctggctctcgctgcgagcgccacctccacgcatacaagcggcggctgcggctgccagccaccgccgccggttcatctaccgccgccggtgcatctgccacctccggttcacctgccacctccggtgcatctcccaccgccggtccacctgccgccgccggtccacctgccaccgccggtccatgtgccgccgccggttcatctgccgccgccaccatgccactaccctactcaaccgccccggcctcagcctcatccccagccacacccatgcccgtg

SEQ ID NO: 10847 - DNA, 69 bp, Zea mays
  Clone ID: LIB3150-060-Q1-N1-F5
gggagatgagatggcaagcaagggtgatgggccggcgatcggcatggatatcggcacgacgtactcttg

SEQ ID NO: 10848 - DNA, 332 bp, Zea mays
  Clone ID: LIB3150-060-Q1-N1-F7
tcggcagaattgagtgacaggctcaaacacaagctagaagataggtgcttagtgagttaaccagtgggatgtcgctggaagatagtttgaagaagaaggtggccaagtgccgcaaggagtatgacattatttacaagcagctaccggtgctgctagagaagatggaaattctatttcctacggggaagaagatggagagctccgagccggagaacaaatccgaagcaaaaggggagccggtcgacccgctgcgagccatgacgccggcagaaataagggagcgctacaaggatctggcggacaccgtcaaaggattcctcaaggatctggac

SEQ ID NO: 10849 - DNA, 256 bp, Zea mays
  unsure at all n locations
  Clone ID: LIB3150-060-Q1-N1-F8
tcgggactcttgtnctaccacccgcgaccgcagggagagaaaggggaagcccggcgtcgacccgggccccagcaaccagcaaatcgggacctatgatctgggcaatccatccatggcggaggaatcaagccgacccttgccaaagtttggtgaatgggatgtaaacgatccggcttccgtagacggatttactgtgatattccacaaacgcccgagatgagaagaaaggtgggaatggtcaagacacacacttacc

SEQ ID NO: 10850 - DNA, 341 bp, Zea mays
  Clone ID: LIB3150-060-Q1-N1-F9
ctccctctcgtcgccgtcctctcccgttcgcaacgccacgctccccaccgccgaaatggccccgaagcgaggtggcagggcaccggtgccggccaagaagaagacggataaagtgacgaaccctctgttcgagaaaaggccgaagcagttcggcatcggcggcgcgttgcctcccaagaaggacctgcaccgattcgtcaagtggcccaaggtcgtgcgcatccagcgccagcgtcgcatcctcaagcagcgcctcaaggtgcctccggcgctcaaccagttcacccgcaccctcgacaagaacctcgctaccaacctgttcaagatgcttcttaagtacc

SEQ ID NO: 10851 - DNA, 328 bp, Zea mays
  unsure at all n locations
  Clone ID: LIB3150-060-Q1-N1-G1
cctagtcaaaaccctcgccctcccaaaaactactcacgtctcgccgccccgccgtatcaccctttctcggcggccggcctcttctcttcacggactcgcaggtcatcgagatgtcgtcggcggaggcgaaggccgcggcgaaggcggtcccggagtctgtgctgcgcaagcgcaagcgggaggagcagtgggcagcggacaagaaggagaaggccctcgcagacaggaaggaggcgcttgacagccgcaagatcatatntgctcgcgccaagcaagacgcccaggagtacgacgcccacgagaaagagcttgtgcagctcaagcgtga

SEQ ID NO: 10852 - DNA, 311 bp, Zea mays
  Clone ID: LIB3150-060-Q1-N1-G10
cctgtacatactcagatgccagcagataggcggggttgtgtactgtgtaactgtgttatttttgtcgagcgtccaaagtggtagcagcggtccattgtgctaggtattcatttgctgtagggtttttgtttcttgtccctcatgttgcagagtatggaagtgataaaaatgggtcgttctgtcaggtcgtgtataatagcgttgtcgcttgtttatgggtagtagcagcgagtcagctgtcagcacgccttacacctccctcgccgtgttgtaattcccgtcaccggtgctgagagtgtgcacaatatatc

SEQ ID NO: 10853 - DNA, 158 bp, Zea mays
  unsure at all n locations
  Clone ID: LIB3150-060-Q1-N1-G11
tcggccgccgcgagagagagaaggtgagtactgaggaggagggttttcgatggagaacggcgaggatacgttcgncttccccaccgccgccgncgnggactttttcaccaacggcggggacgggacgcccaagcttcacgacgcggcggacgagatcg

SEQ ID NO: 10854 - DNA, 184 bp, Zea mays
  unsure at all n locations
  Clone ID: LIB3150-060-Q1-N1-G12
gacaaaggcttagtattaccaccaaaggtggcgccaatccaagtaattgtgattccagtgccttataaagatgctgacacaactgccataaagggagcctgcgaatcaactgtttcacactcgacaatctggattgagcggatangacacccggaaattacttcaggtggagattccatgggaa

SEQ ID NO: 10855 - DNA, 119 bp, Zea mays
  Clone ID: LIB3150-060-Q1-N1-G2
gtggaggtccacaacctccaacattgcttcgagctcctctaacatagaatttttcgcggtcctcaccatgtaatcaggtccctcgagcgcatctacggtgatgaacaacacgatgatct

SEQ ID NO: 10856 - DNA, 101 bp, Zea mays
  Clone ID: LIB3150-060-Q1-N1-G4
tcggccttctgcgccttcattttggcctctgtccctttggaggtcaatctcgccttccaccatgggtgaagagaaggcccacatcaacattgtgggtattg

SEQ ID NO: 10857 - DNA, 257 bp, Zea mays
  Clone ID: LIB3150-060-Q1-N1-G5
tcggagagttatgctggctattggggaccacctcaacgtccaagtgcacgcttgcattggtggaaagaagtattggtgaggacatcaagaggctcgagaatggggtgcatgtctgctctgggactccaagcagagtctgtgatatgatcaagatgaggacactgccgaccagagccatcaagcttctagatatggatgaagctgatgagatgttgagtagaagctttaacgatcagatttacgatgtgctacaaata

SEQ ID NO: 10858 - DNA, 384 bp, Zea mays
  Clone ID: LIB3150-060-Q1-N1-G7
ctgggtttaacattaaggcgctgttccgtaaaattgctgctgcacttcctggaatggagacgctctcatcagcgaagcaggaagacatggttgatgtgaacttgaggtccggcaatgcaaactcgtcccagtctcaggctcaggctgggggatgcagttgttagttgcagtctctgacacttgcttgctcatgatctttgagactctgagcatcagaaggcgttatcactgatgcttctctcgggaagaagagttgattgcctctcgccagtgaacacaccatagtctttacccggtgaatggaccgtttgcattggaacgatacgttttatgagttttctgttatttcctcagtggcctaagctagcaacagtgtatagttgg

SEQ ID NO: 10859 - DNA, 364 bp, Zea mays
  unsure at all n locations
  Clone ID: LIB3150-060-Q1-N1-G8
cccacgcgtccgcccacgcgtccggcgagctctgcctccttccgcttctcttcgacagaaaactagggttttgctcttggaatctctctctccgccgccgccgccgccggacagtgcaccgacgatacgacctcctccttcctccgatctggcctttttaatccgcggatcccgtacaagatgcttcccctctcgctcctcaagaccgcccaggggcacccaatgctcgtggagctgaagaatggtgagacgtacaacgggcatctggtcaattgcgacacgtggatgaatatccaccttanggaggttatttgcacctcaaaggatggtgataagttttggaggatgccagagtgctacattc

SEQ ID NO: 10860 - DNA, 376 bp, Zea mays
  Clone ID: LIB3150-060-Q1-N1-G9
cctcctcctcctccctgttcctggacgccggctccggcgccggctcctcatcgtccgcgggagactgaagtggtgaacacggaagaaggttgccattttactaagttaaagttagatcattggagcaatgccgccccataagatcgagactgggcaccaagatgtggtgcatgatgtcgccatggattactatggcaagcgcctagctacatcctcctctgataatacaataaagatcattggcgtaagtggaacctcacaccagcagcttgcaactttgagtggacaccagggcccagtatggcaagtcgcatgggctcatcccaagtttggttccatgcttgcatcctgcagctacgacggccgagtgatcatc

SEQ ID NO: 10861 - DNA, 351 bp, Zea mays
  unsure at all n locations
  Clone ID: LIB3150-060-Q1-N1-H1
ctcatctcctcccgctcaggatccggcggcgaaggtaaggcaagatgtacaccgcgaggaagaagatccagaaggataagggccttgagccctccgagttcgaggactccgtcgcccaggctttcttcgacctggagaacggtaaccaggagctcaagagcgacctcaaggacctttacatcaacggtgctatccagctggatgttgccgggagcaggaaagctgttgtgatccacgtcccataccgcttgcgcaaggccttcatgaagatccatgtcaggatcgtcagggagctggagaaaaaatttagcggcnaggatgtggtaattgttgccacaaggaggatcgtga

SEQ ID NO: 10862 - DNA, 269 bp, Zea mays
  Clone ID: LIB3150-060-Q1-N1-H10
tcgggacaggggacacacgcgcgaagggcgattggaacccacaggcgaagcacccatcccaatagcgtgcgagtagcaagcttgaccctcacgggcacgagcaaggatcgggagcgacgggggcggccggataggaatgcaggcggccaaggcggccgaggggagcgacggcatgcaggggggggctaagaacgaaccctacatgaacacagatgacatgagctacatgtacgagtttgagactgagaacgggcagtggaagcaccatg

SEQ ID NO: 10863 - DNA, 358 bp, Zea mays
  Clone ID: LIB3150-060-Q1-N1-H12
caaaaaattaagtcgaagggggttacaatgacagcactgttggctaaggcgacagcaatggcgctggttcagcatcctgtggtgaactccagctgcagggatgggaagagcttcacctacagcagtagtatcaatattgccgtggcagtggccatagatggtgggttgattacaccagttcttcaagatgcggataagcttgacatttattcattgtcaaggaaatggaaagagttagttgataaggcgcgagcaaagcagttgcagccccatgagtacaactctggcacgtttactctctcgaatcttggtatgtttggagttgataagtttgacgcaatactgccacctggaactg

SEQ ID NO: 10864 - DNA, 313 bp, Zea mays
  unsure at all n locations
  Clone ID: LIB3150-060-Q1-N1-H2
gcgcttgcccatctacctgtagccaggacgccatggcttcccttaagccggcgccatccccatggccgtgcacaaccctagtgctgcccctgtttggagctcgcccatggccgcccctttcttggtgagctcgccccctccctcattccctgctgtagctcatccctgccctatgtccagccacccttccctgcttactatgctggacgccagtcccctccctcccgggagctcacggatacggctgcagcacatcagtgaagaaggcaaaccagcgcggngctccttangtgttctatgaaatgcttgaact

SEQ ID NO: 10865 - DNA, 91 bp, Zea mays
  Clone ID: LIB3150-060-Q1-N1-H3
ggtcaatgtgaatcgacgcgccatcatggggatccagccactctttctattggatgcgctcgtacaggacaccaattcctcctctatgaga

SEQ ID NO: 10866 - DNA, 212 bp, Zea mays
  Clone ID: LIB3150-060-Q1-N1-H4
tcgggtgaacggtaatggtggcccgtggtgcgcgattcagtgaaacctcgaagtgaagacgcttgacaaggacatcaaagcatcacgcacgaaaggcagggattggttactatcggacttggcacacgccggaacgattgcggacgacaattacctatatggcaagtacgctcacacgatgaaggacaaatttgattagacggagcaagata

SEQ ID NO: 10867 - DNA, 269 bp, Zea mays
  unsure at all n locations
  Clone ID: LIB3150-060-Q1-N1-H5
tcggaggcggttggcgctgcggcgcggcccgatccggcagcgccggcctcggttgccgcccgggcgccacctggggaacgcggtgccgtctcgggggacccctcatctgaggtgaaccgtgtcggcggcggtatttctaacggccacggcgacgaccgggcggctgccgcggctgagaaggctgagaaagcacggaaacgcanggtgaggagtgagttgcggcgccgactggcgggggagctcgaccaggtccgcgtgctctccaagcg

SEQ ID NO: 10868 - DNA, 93 bp, Zea mays
  Clone ID: LIB3150-060-Q1-N1-H6
tgtcactcttgccgcagtattacctcttctgccgccgtgccgagaacgataaaccatgcaagccgccagccatggctgacgaggactacttga

SEQ ID NO: 10869 - DNA, 383 bp, Zea mays
  Clone ID: LIB3150-060-Q1-N1-H7
gctatgttgtaatgagcctgcagagacatttgtacgcgccgacggggcattcatcccatttgctcacgacttcgacatctccacagtcacaactacagttaggggtgttggtgacattggggatgttaaggttatagatctgcagagtccacttaatagcctcatagggaggcaagtatgcaaaatcggcagaagttctggtcacacaactggaactgtggtggcttatgcccttgagtacaatgacgagaaaggaataagcttcttcactgacctccttgttgtcggcgaaaaccgccaaacttttgatctagaaggtgatagtggaagccttattatcctgactggccaggataatgagaagccgtgtcccattgggataa

SEQ ID NO: 10870 - DNA, 380 bp, Zea mays
  Clone ID: LIB3150-060-Q1-N1-H9
tcgacacatcacacacactcgcgaactccatttcgatcccatttgaaatcaacccatcctcgtttcctccgtctagcagcctctcaccctcatggccaagatcaagatcgggatcaatgggttcggcaggatcggaaggctggtggccagggtggccctgcagagcgacgacgtcgagctcgtcgccgtgaacgaccccttcatcagcaccgattacatgacctacatgttcaagtatgacactgtgcacggacagtggaagcaccatgaggtcaaggtgaaggactccaagacccttctctttggtgagaaggaggttgctgtgtttggctgcaagaaccctgaggagatcccatggggttccgttggcgctgaatatg

SEQ ID NO: 10871 - DNA, 252 bp, Zea mays
  Clone ID: LIB3150-061-Q1-N1-A1
gaaatggggaagggagcgcaagggagcgatgcggcggcggcgggcggcgaggtggaggagaacatggcggcgtggctggttgccaagaacaccctcaagatcatgcccttcaagctcccgcccgtcggcccttatgatgtccgcgtgcgcatgaaggcagtggggatttgcggcagcgatgtgcactacctaagggagatgcgcatcgcgcacttcgtggtgaagggacccatggtgatcgggcacgagtgc

SEQ ID NO: 10872 - DNA, 308 bp, Zea mays
  Clone ID: LIB3150-061-Q1-N1-A10
tcgctctctttctttctttccttcccaaccaacaacggggccgggcgcacaacaaccaattttaccttcccttcccaacaacaattagaaccaaccgtcccggggcggaaacggtttccttccttccgcttccgaaaccttttccggcttggccggcgcttccttcaattggtccgcggttcccctccctcccgatctaaaccacccgccacccggtttcctctcccccttctttctccctaaaaccagacgctcgccccccttttctacacatatcttcttcacacgaccagcgggaggtacgagca

SEQ ID NO: 10873 - DNA, 401 bp, Zea mays
  Clone ID: LIB3150-061-Q1-N1-A11
actcaatcacgaggccaggatggcccgctacgatcgcgcgatcaccgtgttctcacccgacggccacctcttccaggtcgagtacgccctcgaggccgtccgcaagggcaacgccgctgtcggcgtccgcggcgtcgacaccgtcgtcctcggcgtcgagaagaagtccacccccaagctccaggactccaggtccgtgcgcaagatcgcgagcctggacacccacatcgcgctggcgtgcgcggggctcaaggccgacgcgcgcgtgctcatcaaccgcgctcgcgtggagtgccagagccaccgcctcacagtcgaggaccccgtcaccgtcgagtacatcacgcgctacatcgccggcctgcagcagaagtacacgcagagcggaggggtgcgcccct

SEQ ID NO: 10874 - DNA, 360 bp, Zea mays
  Clone ID: LIB3150-061-Q1-N1-A12
cacccgcagcgaaggagggagcttgcacgggccaacgcacacacaacacaagctcgtcgtcgatggcgcggtgggctgcggtgctggcgctggccgcggccacggccatcgccgtggcgtccgtggcgggcggcgacatgaacgcggacaagacggagtgcgcggaccagctggtgggcctggcgccgtgcctgcagtacgtgcaggggcaggcccgcgcgccgccgcccgactgctgcggcggcctgcgccaggtgctggggaagagccccaagtgcctgtgcgtgctcgtcaaggacaaggacgaccccaacctgggcatcaagatcaacgccaccctcgcgctcgcgctccccaacg

SEQ ID NO: 10875 - DNA, 370 bp, Zea mays
  Clone ID: LIB3150-061-Q1-N1-A2
cggacgcgtgggcggacgcgtgggctaataccctcaagaagtcttccaagcccccgtctcgccccttcggctctggcccacctggtgaccgccccaggggccctcctcgttatgaaggtgacaggcctaggtttggtgatagggatggttacagaggaggtccacgtggcgctccaggtgactttggtggtgataagggtggtgctcctgcagatttccaaccatcttttaggggtagcagacctggctttggccgcggtggcggcggtgctttcggtgctggtggatcttccatggagtgatgtgtcaacatgagctagcataacattcgtctttgaactatgagaacaatgagaattttgtttggttt

SEQ ID NO: 10876 - DNA, 245 bp, Zea mays
  Clone ID: LIB3150-061-Q1-N1-A3
tcgcagttcccctccccttcgcttccttccctagcgccgacgcccaccagacgagatggccccgaagaaggacaaggccccgccgccgtcgtcgaagccggccaagtccggtggtggcaagcaaaagaagaagaagtggagcaagggaaagctaaaggagaaggtaaacaacgcggtgctgttcgaccaggctacctactacaagctgctctcggaggtgccccaagtacaaactaaatcacccc

SEQ ID NO: 10877 - DNA, 379 bp, Zea mays
  Clone ID: LIB3150-061-Q1-N1-A5
tcgattgcgagttgcgcctctcgccctcacccccacccccagtcccccgcaggcgcaccaccgaaactgctccgcctccacgcccgctcgccctgaccacggcgatggccgccgccgccctccgctcttccgcgcgccggctcctgcgcctcgccccggcagcctcgtcggctctgtccgctggttcccggcccagcgccggggctgcgccgctcacgcgccccatcgccgcgttctcaggtggcaacaatcctatctcatggaaactgaggcggttctacagttcaattgaaaaacacttgcccgcaatatctgatccagagatagaatctgcatttaaggatttgttggctgctagttggaatgaacttccagattc

SEQ ID NO: 10878 - DNA, 141 bp, Zea mays
  Clone ID: LIB3150-061-Q1-N1-A6
tcgaaaaaaaaaaaaaaaaaaaaaaaaaaaaaaaaggaggaaaaaaaaaaaaagaaaagaaagaaaaataaaagaaaacaaaaaaaaaaataaaaagagacaaataaaatgatagaaggaaaaatggacataagatagatg

SEQ ID NO: 10879 - DNA, 326 bp, Zea mays
  Clone ID: LIB3150-061-Q1-N1-A7
tcggccagagcagaagagacggcaacccactccaggtctccaccccagccagagagccctggagcctggaggggcggggtcgcagcaaggctgaattccaggaagaagccatcgcagccgcgtgtcgcctccttccacacctcagtcacccgttctataaatacgcgccaccgcgtaaaccgcgaagaaaaagtaaaagggaggaaaagggtccggtgtggcgaccatggaaaagggcggcggcggcggaaactagatgatgatgacctcgggcgcgacgggccggatcgtgccggtgttccgctccgtgctgtcgcggcgcgctc

SEQ ID NO: 10880 - DNA, 362 bp, Zea mays
  Clone ID: LIB3150-061-Q1-N1-A8
acagaaaaccctagccgccgccaccgaagcggcctcccaggtaagcaggatcgtccagcccgccgccgccatgaagcgcaatccccgcgtcacgagctcccgccggaagtgccgcaaggcgcactttacggccccgtcctccgtccgccgcgttctcatgtccgcggggctgtcgacggagctccgccacaagtacaacgtgcgctccatcccgatccgcaaggacgacgaggtgcaagtcgtgcgcggcacctacaaaggccgtgaggggaaagtggtgcaagtgtaccgccgccgctgggtcatccacgtcgagcggatcacccgcgagaaggtgaacggcttcaccgggaacgtgggca

SEQ ID NO: 10881 - DNA, 373 bp, Zea mays
  Clone ID: LIB3150-061-Q1-N1-A9
ctctgcttcagacagaccagtgcgcgctcaattaccccccgacccctaccgcgtccaccacaccaaaccgtttcacccggacctgcccccaacaccctgctctatcctcatagcaaaccaccgcctgaattgggcggcaattgggagaggattcgcggcaggtagggcgctgatccgttggcgagatgattgcggctgtcaaccgagtgccggcaggctggggcgaggatgagatgtccgtgctgccgcggcacaccaaggtggtggtcaccggcaacaaccgcaccaagtcggtgctcgtgggcttgcacggagtcgtgaaaaaggccgtcggtctcggaggatggcattggcttgtacttactaatggaat

SEQ ID NO: 10882 - DNA, 404 bp, Zea mays
  Clone ID: LIB3150-061-Q1-N1-B10
ggcgttggcagcaccccgatcctgggccagtgcgtcgagttcctgaggcatcagtgcagcccgacggcgacgccctactgctcgcctcagtgccagtcgttgcggcagcagtgttgccagcagctcaggcaggtggagccgcagcaccggtaccaggcgatcttcggcttggtcctccagtccatcctgcagcagcagccgcaaagcggccaggtcgcggggctgttggcggcgcagatagcgcagcaactgacggcgatgtgcggcctgcagcagccgactccatgcccctacgctgctgccggcggtgtcccccactgaagaaactatgtgctgtagtatagccgctggctagctagctagttgagtcatttagcggcgatgattgagtaataatgtgtcac

SEQ ID NO: 10883 - DNA, 363 bp, Zea mays
  Clone ID: LIB3150-061-Q1-N1-B11
ctcaaccactggtggttttgaggctggtatctccaaggatggccagacccgtgagcatgctctccttgctttcacacttggtgtgaagcagatgatttgctgctgcaacaagatggatgctactacacccaagtattcaaaggcccgttatgatgagattgtgaaggaagtctcttcctacctgaagaaggttggatacaaccctgataagatctacttcgttccaatctctggttttgaaggtgacaacatgattgagaggtccaccaaccttgactggtacaagggcccaaccctacttgaggctctggacttgatcaatgagccaaagaggccttcagacaagcccctgcgtctccccct

SEQ ID NO: 10884 - DNA, 382 bp, Zea mays
  Clone ID: LIB3150-061-Q1-N1-B12
gcgccactcgccgcacgtcgtccacgtccgcctccaccccaatccgatggggtatgaagagagcaaaaaacatctcctcagtctcagctaccctgagctgcaatgtttgtgcaaaaggtataaccttcctgctaagaagacccactctcagttagcaagttcgctcgcctcgctgcttgaggcatctccatctcctgctcctcctcctgtccaattagcaaatatgaaagaagcatccacatgcaatcatgctaacaacaaaagaggcccatacaatggcagggatgatggtaaaccacttgtgcatgcgaaacatcaaaaaggagatcagacacctgttgatgaaacatctaaaaaggggattgacactggtacgagtata

SEQ ID NO: 10885 - DNA, 347 bp, Zea mays
  Clone ID: LIB3150-061-Q1-N1-B2
cgcagtcggctgccgcagactggtagtagccggcgcgccgtcaccgtatcctcagatcagcggcgagcagataccacaccactctactgacgcccgacgagcagtgtaacattttccttcagccatgggtaaggagaagactcacatcaacattgtggtcattggccatgtcgactctggcaagtcgaccaccactggccacctgatctacaagcttggaggtattgacaagcgagtgattgagaggttcgagaaagaggctgccgagatgaacaagcggtcattcaagtatgcgtgggtgcttgacaagctcaaggctgagcgtgagagaggtattacaattgata

SEQ ID NO: 10886 - DNA, 314 bp, Zea mays
  Clone ID: LIB3150-061-Q1-N1-B4
gccgaatcgtggtggcagacctcaaggctaaggaccgagtcatgaaactcatgaatcatgagaacactgaagtgaggaaaaatgcattgatctgtgtgcagaggctcttccttggcgcaaagtatgccagtttcctgcaggcttgagaaaagctgagtcttgtatttagatccagagaaacccctggtcatttttcagaatggctgttgagaaagaaaaaccttgaaaattcttgttcagtgtatcctattgttatttgatttctgaagccgatgtataataaataatcagagtcatagaatgctcgatgtaat

SEQ ID NO: 10887 - DNA, 385 bp, Zea mays
  Clone ID: LIB3150-061-Q1-N1-B5
tgtaattccagtggacaaagaaaatgaatgcagcagctccagctttttgttaccattgtggattttgatagcttaatgatttcgaggtgattttactgtctactattgtcaagtccaaagtatgtttcgtgattctgttgcctctattatcttcaggtattaacgcatggccaacctggtgaggaagtaagcttggagttgatcttaagggtagttgctgatgttggccttgtggtatgacgttttactaatccacacatctcgagttttagggagaaagaaattgttttcaccattttgttaaatgtttcatgttcatgtatcatataccagagtcaaccctgtttccttttaggatgcagatgtttgattatccaaattttga

SEQ ID NO: 10888 - DNA, 357 bp, Zea mays
  Clone ID: LIB3150-061-Q1-N1-B6
gaagcggcggcggcggagcaaacgcaggcgaaggcgagggtgtgagggaaggagcaccagccatggtgcacgtcaacttctaccgcaactatggtaagacgttcaagaaaccaaggcgtccttatgagaaggagcgtcttgatgctgaactgaagctggttggtgagtatgggctgaggtgcaagcgtgagctttggagggtccagtatgcactgagcaggatccgtaatgctgcaaggcacttgctcacccttgacgagaagaacccccgtcgtatctttgagggtgaggcacttcttcgccgcatgaaccgctatgggctgcttgctgagggtcagaacaagcttgattatgttc

SEQ ID NO: 10889 - DNA, 308 bp, Zea mays
  Clone ID: LIB3150-061-Q1-N1-B7
cggacgcgtgggcacgagcgcaacaccatccacccaccagttcgaagcggaggcgaccggcaacctgcggcggagatgtcaggcaggggcaagggcggcaaggggctcgggaagggcggcgcgaagcgtcaccggaaggtgctgcgcgacaacatccaggggatcacgaagccggcgatccggaggctggcgaagaggggtggcgtgaagcgcatctccgggctgatctacgaggagacccgcggcgtgctcaagatctttctcgagaatgtcatccgcgacgctgtgacctacacggagcacgcccg

SEQ ID NO: 10890 - DNA, 388 bp, Zea mays
  Clone ID: LIB3150-061-Q1-N1-B8
gtcaccggcgaggcgctcaagcactccacggggcagggccaccccgtcaagctcgtgccctacaacccggactaccaggacgagtccgtgctctggaccgagagccgcgacgtcggcaacggcttccgctgcgtccgcatggtcaacaacatctacctcaacttcgacgccttccacggcgacaaggctcacggcggcgtccatgacggtaccgagatcgtgctctggaagtggtgcgagggcgacaaccagcgctggaagatcctcccttggtgaacgaacgaaagaaactactagctggtaccctaataataattctgctggctgcggcgatccccaaataaaagaggcagggtgcgatgcatcgcggtcttctcgactctcgagt

SEQ ID NO: 10891 - DNA, 415 bp, Zea mays
  unsure at all n locations
  Clone ID: LIB3150-061-Q1-N1-B9
gaaccctcctcgacgtgcgtgtgcagaccgccttcaccaccaagaaggactacgggcgggaggagagggaggcgcantgggccaccgcgcagaggacgctgcacgggctccagccgccggaggccgccaccagcacgctgttccacgacaagaacagctaccgcgagctgtccgagatcgcggagcaggccaagaggcgcgccgagatcgcgaggctgcgggagctcaacaccctcaagggccacgtggagtcggtggtcaagctcaagggcctggacatcgacaccatccagcagaactacacggtgtgagatgtgtgctgtgatgtcaacaaaaacacctttgccatgccacccttgttgttctttgcacgacggagtcatgtgattgttacagaaaaaaaaaaggaaaattt

SEQ ID NO: 10892 - DNA, 327 bp, Zea mays
  Clone ID: LIB3150-061-Q1-N1-C1
agaaaaccctagccgccgccaccgaagcggcctcccaggtaagcaggatcgtccagcccgccgccgccatgaagcgcaatccccgcgtcacgagctcccgccggaagtgccgcaaggcgcactttacggccccgtcctccgtccgccgcgttctcatgtccgcggggctgtcgacggagctccgccacaagtacaacgtgcgctccatcccgatccgcagggacgacgaggtgcaggtcgtgcgcggcacctacaagggccgtgaggggaaggtggtgcaggtgtacccccgccgctgggtcatccacgtcgagcggatcacccgcg

SEQ ID NO: 10893 - DNA, 376 bp, Zea mays
  Clone ID: LIB3150-061-Q1-N1-C10
gccttccttgctgtcaggccgtgtgtatgtcgtcgacacagcgacagatccaagggcgccatccttgcataaggtggttgagtctgaggacattgctgagaatactgggcttgggtttcctcacacgtctcattgccttgcgtctggcgacataatgatttcttgccttggggacaaggaggggaatgcagctggcaatggcttcctgctgttggattcagagtttaatgtcaaaggacgttgggaaaagccaggtcacagtcccttgtttggatatgacttctggtaccagcctcgccacaaaacgatgatcagttcgtcatggggagcccctgcagcgtttaggacaagtttcgatcttcaacatgtccaggat

SEQ ID NO: 10894 - DNA, 364 bp, Zea mays
  Clone ID: LIB3150-061-Q1-N1-C11
gatcgatctggagaccaacaaaattgtggacttcatcaagtttgatgttggcaacgttgtcatggtgactggcggaaggaacactggccgtgtgggtgttatcaagaacagggagaagcacaagggcagctttgagaccattcacgtggaggactccctgggccaccagttcgccacccgtatgggcaacgtgttcaccatcggcaagggtaataagccgtgggtgagcctgcccaagggcaagggaatcaagctgagcatcatagaagagcaaaggaagcgggatgccgctgcccaggctgctgccaacgcataaatcctctgaatgtgctgtgttgagagttttttcttagtgctctgcaag

SEQ ID NO: 10895 - DNA, 388 bp, Zea mays
  Clone ID: LIB3150-061-Q1-N1-C12
ttaacctgcgtgctacaacatatcggaaggatacgtcacggctagttgataaatgtatgtggctgctggtatcgacctttttgactccacatacatttaccaacttactatgggtggtttcgcactgatcttccctgttgacatggttgaaagagaaatgcagaatggtgtactcaacactactgatggcgattcaacaaagattaacctgcgtgctacaacatatcggaaggatacgtcacggctagttgatagctgtaattgcttcacatgccaaaatcacacccgtgcgtacctcaatcatttgctcaatgtccatgagatgttggctcaaattcttctggagatacacaatacccatcattatcttcgtttcttccattccata

SEQ ID NO: 10896 - DNA, 384 bp, Zea mays
  Clone ID: LIB3150-061-Q1-N1-C2
ctttcgcccacaccacagcaccgctgccgaaggtgggaaagaaggcggcggcggaggcaccggcaccggcaccgcctaggaaaggaaaccgaggaaactacagccatggtggtacggatccgtctggcgcggttcgggtgccggaatcggcccttctaccgggtgatggccgccgatagccgctcccctcgagacggcaagcacctcgaggtcctcggctactataacccgctcccagggaaggatggaggcaagaggatgggcctgaaattcgaccgggtgaagtattggctgtcagttggggcacagccatcagatcctgtgcagagtattctctttcgtgccggacttctgccaccacctccattgctagctatggcacgg

SEQ ID NO: 10897 - DNA, 411 bp, Zea mays
  Clone ID: LIB3150-061-Q1-N1-C3
gcactattaaagtggaaaagaggatcaatgagattgtgaaccgcttgaataagacaaaggtggaacggaaacctgatttaaagggtatgtcacatttatttgaaagcatttctgtcgtcatttttatgtcagcaactcagcattctataatgaacatggttaagtatttttctttttgtttttgggattcataatgtgagtatttatctcacaaagaaagtgaggatgtaatgtctaggctctgtttggtggagctgtagcttttccaaaagcacctcctgaagaagctttcgggaaaagcttgggaagctgctccttgaaagcttctctgcttttagtacaacaaagtgctgcttttatcagcttgaagaaactgcttgcctgtttgggggagcctctagctttttgagc

SEQ ID NO: 10898 - DNA, 375 bp, Zea mays
  Clone ID: LIB3150-061-Q1-N1-C5
ggccaaccctagtcgagtgtgaaacatacaggttccggggtcactcccttgcagacccagatgagctcaggaagcctgatgagaaaacacactacgccgcaagggattctatcacggccttgaagaagtacatcatagagcagaacctcgcaaccgaatccgagctgaagagcatcgagaagaagatcgacgatgtcgttgaggaggctgtcgagtttgctgacgcgagcccgcatccgccgcgcagccagctgttggagaacgtgtttgccgaccccaaaggctttggtatcggccccgatgggaagtacaggtgcgaggatcccaagttcacccaaggcactgcccaagtttaaggaggttaatctgcgctct

SEQ ID NO: 10899 - DNA, 412 bp, Zea mays
  Clone ID: LIB3150-061-Q1-N1-C6
acgagggaatcacatcgccatggcagccaagatgtttgcattgtttgcgctcctagctctttgtgcaaccgccactagtgctacccatatcccagggcacttgtcaccactactgatgccattggctaccatgaacccatggatgcagtactgcatgaagcaacagggggttgccaacttgctagcgtggccgaccctgatgctgcagcaactgttggccttaccgcttcagccgtgccagatgccaatgatgatgccaggtatgatgccaccgatgacaatgatgccgatgccgaatatgatgccatcgatgatggtgccgactatgatgtcaccaataacgatagctagtatgatgccaccgatgatgatgccaaacatggtttcaccaatgatgatgccgaatatgatg

SEQ ID NO: 10900 - DNA, 327 bp, Zea mays
  Clone ID: LIB3150-061-Q1-N1-C7
ctctgccccaacgagccccaggggagccaggaaaaggagccgtcaaaagccgccgcccaggagagcgcgcaagtcaagcatggcatcaaccgttaccttcaacccagtgagcgcccaagctgcgctgatccaaaagccaaggaaccttggagccataagctatgctggcttaaagatgccggcatctgttagctctggctcagagtcgtcattcctgggctggaatgcatcccttcgggcagctgttactccaaggattgtgcccaaggcaaagtctggatctcagatatctccacaggcatcttacaaggtggcagtgctgggtgc

SEQ ID NO: 10901 - DNA, 410 bp, Zea mays
  Clone ID: LIB3150-061-Q1-N1-C8
cccacgcgtccggccagttgcacaggtcttcgtcggccgctttccggcgaagagcattcgcgcgagggaggggatggggaagaagcagaagaagcctgggaaggggaaggagaagacggagcggaagacagccaagggcgaggagaagcgtgcccgccgggattcccgcaaggtcggcgaggaggacgacatcgaagccatccttaggagcatacagaaggaagaagcgaacaagaaggaggttcatgtggaggagaatgttcccgcaccatctcctcggtccaattgctcgcttactgttaacccagtgaaagagacagaattgatcctgtatgggggagagttctacaatggtagcaagacctttgattatggtgatctttatcggtatgatgtagagaaaaatgaat

SEQ ID NO: 10902 - DNA, 385 bp, Zea mays
  Clone ID: LIB3150-061-Q1-N1-C9
ctcccaacaccacctcgcctgcgatctccgtagcctccgtcgcgtcgagcatcgatcatgtcggcctactgcggaaagtacaaggatgagctcatcaagaatgctgcctacattggcacccctggcaagggtatccttgctgctgatgagtccactggcaccattggcaagcgcctttccagcatcaatgtcgagaacgttgaggagaaccgccgtgccctccgtgagctcctattctgctgccctggtgctctccagtacatcagcggtgtgatcctcttcgaggagaccctgtaccagaagaccaaggatggcaagccttttgttgatgtcctcaaagagggaggcgtcctccctggcatcaaggttgacaagggcaccattg

SEQ ID NO: 10903 - DNA, 371 bp, Zea mays
  Clone ID: LIB3150-061-Q1-N1-D1
gcgggttcgtactcgcctacctgcgcgggtcaaacctttcgcggttctcccaatttccgccgccggtccatcccgtaacgcgacaccatgagggagtgcatttacatccacattggccaggccgctatccaggtccaaaacccatgctgggagctagactgccttgagcatggacattcaagctgacggacagatgcccagtgacaagaccattgacggaggtgatgatgctttcaacaccttcatcagtgagactggtgctgggaagcacgtaccccatgctggcattgacgaccttggacccactggcatcgatgatgagagaactggcgcctaccgccagctcttccaccctgagcagctcatcagtg

SEQ ID NO: 10904 - DNA, 371 bp, Zea mays
  Clone ID: LIB3150-061-Q1-N1-D10
cggacgcgtgggtcccgcagcatctcaaccccatggccaagatcaagatcgggatcaatgggttcggcaggatcggaaggctggtggccagggtggccctgcagagtgacgatgtcgagctcgtcgccgtgaacgaccccttcatcagcaccgactacatgacctacatgttcaagtacgacactgtgcacggacagtggaagcaccatgaagtcaaggtgaaggactccaaaacccttctctttggtgagaaggaggttgctgtgtttggctgcaggaaccctgaggagatcccgtggggttcggttggtgctgaatatgttgttgagtctactggtgttttcactgaccaggagaaggctgcagctcac

SEQ ID NO: 10905 - DNA, 257 bp, Zea mays
  Clone ID: LIB3150-061-Q1-N1-D11
gaaggacaggtgagctcattgcacgcagtgtgattggttcatacactggacaggggctcgtgcaaagaaagatcatactctttctttgagcgcttgccatagcccaactagcatctgatatgagttgactataactgctgaacgaagtacaagccccgaaagtaatcatctaacactgctaccacaaggggcaacactttatggtgataaagtgctgagatcatagctgatgagatgtatcatgaattatacgagcg

SEQ ID NO: 10906 - DNA, 391 bp, Zea mays
  Clone ID: LIB3150-061-Q1-N1-D12
ggctcggtgcccattctgccaagggccctgttcgcccgcttcgccgtgcccttcagggcctggatccgctgacggcggcaagcatgtttgctcgtgcgcggtgcatcggcgagaggaaggtgaacggggaggattgcttcatcctgaagctgagcacggaccctgagaccctcaaggcacgcagcgagggccatgcagagattatcaggcacgtcacgttcgggtacttcagccagaggactggtcttcttgtccacattgaggattcacatctgacccgaattcagtcggccgcgggaggggacgcggtctactgggagaccaccatcagctcgtccatggaggactaccgcccagtggacggtatagtggtggcgcattctgggcgctc

SEQ ID NO: 10907 - DNA, 320 bp, Zea mays
  unsure at all n locations
  Clone ID: LIB3150-061-Q1-N1-D2
gctaattctacttctacttcggaatcgccgccgctcccggcgcctcggattgtcaactaccgcaggaggtcgcggcggcaggatcggtggtccagcgtgcgatggcggcggcgcctaccgtgcggggctacgggccagcgacgccgtcgtcgtcgtcggtggcgctgcctcggccgcgatcgcgggtgcccgcgccgctcgtgcccgtgacgacgcggcggggggcgccgtcggtgcgcctgcgcgcggngggcgcgcacacgccttcccgcggggggctgcagctccagcggcgggaggaggacgaggggctgtcgggg

SEQ ID NO: 10908 - DNA, 375 bp, Zea mays
  Clone ID: LIB3150-061-Q1-N1-D3
cgttctcgtttcaaatccatccatcctcgtttcctccgtcccgcagcatctcaaccccatggccaagatcaagatcgggatcaatgggttcggcaggatcggaaggctggtggccagggtggccctgcagagtgacgatgtcgagctcgtcgccgtgaacgaccccttcatcagcaccgactacatgacctacatgttcaagtacgacactgtgcacggacagtggaagcaccatgaagtcaaggtgaaggactccaaaacccttctctttggtgagaaggaggttgctgtgtttggctgcaggaaccctgaggagatcccgtggggttcggttggtgctgaatatgttgttgagtctactggtgttttcactga

SEQ ID NO: 10909 - DNA, 398 bp, Zea mays
  Clone ID: LIB3150-061-Q1-N1-D4
gtccgcgtccagtgtgtccgctactccgctccccctcagtcctcagttcctcacctagcggtagcgtgcgcgcgggagacgtagatggcggcttcggaggcggcagcggcggcggcaacaccggtgacgccgacagaggggacggtgatcgcgatccacagcctggaggagtggagcatccagatcgaggaggccaacagcgccaagaagctggtggtgattgacttcactgcaacatggtgtcctccgtgccgcgccatggctccaatttttgctgatatggccaagaagtccccaaatgttgttttcctgaaagttgatgtcgatgaaatgaagaccattgctgagcaattcagcgtagaggccatgccaacattcctgttcatgagggagggcga

SEQ ID NO: 10910 - DNA, 335 bp, Zea mays
  unsure at all n locations
  Clone ID: LIB3150-061-Q1-N1-D5
tcggctggttgatgacctgaacctacacagccattaaaaggcttactggttgtggttgtgggtggctggctctggtgcagtgcacaggaacttccaacggagtatgtgcaagtcgtcagaagttgttcaaggcagcttgtcatcatcaccagggatacaagacatgcttcctcagtaaggtgttatcggaatttttcagttcctgtaaactgataaatcgatggtggcactgtactgataatcttccgtatggtgttattggaatttgtgtgacagttccagcggggctcctgcctcctaaatcactccctcccacattgtggggtttttgtnaa

SEQ ID NO: 10911 - DNA, 396 bp, Zea mays
  Clone ID: LIB3150-061-Q1-N1-D6
cacacacactcgcgaactccatttcgatcccatttgaaatcaacccatcctcgtttcctccgtctagcagcctctcaccctcatggccaagatcaagatcgggatcaatgggttcggcaggatcggaaggctggtggccagggtggccctgcagagcgacgacgtcgagctcgtcgccgtgaacgaccccttcatcagcaccgattacatgacctacatgttcaagtatgacactgtgcacggacagtggaagcaccatgaggtcaaggtgaaggactccaagacccttctctttggtgagaaggaggttgctgtgtttggctgcaggaaccctgaggagatcccatggggttcccgtggcgctgaatatgttgttgagtctactggtgttttcac

SEQ ID NO: 10912 - DNA, 356 bp, Zea mays
  Clone ID: LIB3150-061-Q1-N1-D7
ctcagcggcctcctctctgtggaccgcctcaaggtgttgcacatggacaggaatgactactacggcggagactccacatcgctcaatctcaatcagctctggaaacggttcaagggtgaagaaacaccgcctgcgcacataggagctagcagagactacaacgttgatatggttccaaagtttatgatggcaaatggtaccttggttcgtgtgctcattcatactggtgtcaccaagtacatgtccttcaaagctgtggatggaagctatgttttcaacaagggaaagatccacaaggttccttctactgacatggaagctctcaagtctcccctgatgggattgtttgagaagcg

SEQ ID NO: 10913 - DNA, 399 bp, Zea mays
  Clone ID: LIB3150-061-Q1-N1-D8
ggataaagttttgcagcgattttactgcaagtgatgggaaacagcatgcattgcttgataatcttaatcaggaattgtcccagaagtctgtactattgggtgatggttttaaactgtcagctgctgataatgatgtgtttgcaactgttcatccttttgtgatccgtgttagtgacagcgagttgcagaaatatccacatgtactgcggtggatggactacattcagaacactgttggtgctggtacaactttgcaaaagataaatgtgaccaagtctgactttgatccaccttctcatccaaggaaagctgataaaaaagatgctgaatcaagttcaaagaaagccatttccgtacagaagactgctgacaagtcaaatggaagtgctgactcaaaga

SEQ ID NO: 10914 - DNA, 396 bp, Zea mays
  Clone ID: LIB3150-061-Q1-N1-D9
ggttttgctgctctccgaccccgagctccgaaggccgcagcatcaggcgcggcccccctcgcgtgtgaccgagatggcgctgccgaatcaggggaccgttgattaccccagcttcaagctcgtcatcgtcggcgatggtggaactggtaaaactacatttgtgaagaggcatctcactggagagtttgagaagaaatatgaaccaaccattggtgtggaagttcatccgttggatttcaccactaactgtggtaagatcaggttctactgctgggataccgcagggcaagagaagtttggtggcctcagggatggatactatatccatggccagtgtgcgatcatcatgtttgatgtaacctcaaagcttacttacaagaatgtcctacgtggcat

SEQ ID NO: 10915 - DNA, 410 bp, Zea mays
  Clone ID: LIB3150-061-Q1-N1-E1
ctcgacgccgcccccattcattcttggagggcaagaagaacgcgcagtccaaaagcgaaacaaggggaaggggcgaggcagccaaacgaatcccagcacctgcctctcctttgcttgcgcagatctagcgatggcggcgggcggtgagttggcgtggggggaggagcccgtggcgcggcgccggcctaagaccaagatcgtctgcacgctcggcccggcgtcgcgatccgtcgagatgatctcgcgcctgctgcgcgccgggatgtgcgtcgcgcgcttcaacttctcccatggctcccacgagtaccaccaggagacgctcgacaacctgcacgccgccatggagctcaccgggatcctctgcgccgttatgctcgacaccaagggtccagagattcgaactggatttt

SEQ ID NO: 10916 - DNA, 396 bp, Zea mays
  Clone ID: LIB3150-061-Q1-N1-E10
gcaatgtcggagatgaaggaggttttgctcctaatgttcaagacaacagagagggtcttgtcttgcttatggatgccattgagaaggcaggctacactggaatgatcaaaattggaatggatgttgcggcatcagagttccttacaaaggatgggaactatgatctaaactttaagaatcagcctaatgatggagtccatgttctttcagcccagcatctgggtgatctgtacagagattttgtcaaggatttccctattgtatcaattgaggacccttttgatcaggatgactggagttcatgggcatcattgcagtcctcagttggtatccaaattgtgggtgatgatttacttgtcacaaacccaaaacgaatagcagacgctattgacagga

SEQ ID NO: 10917 - DNA, 337 bp, Zea mays
  Clone ID: LIB3150-061-Q1-N1-E5
ctcatctgcgtacacggtctccctcttcctgtcagtagtagagtgagagtgaggcagcgagtgggagacaaggggaaatggggaagggagcgcaagggagcgatgcggcggcggcgggcggcgaggtggaggagaacatggcggcgtggctggttgccaagaacaccctcaagatcatgcccttcaagctcccgcccgtcggcccttatgatgtccgcgtgcgcatgaaggcagtggggatttgcggcagcgatgtgcactacctaagggagatgcgcatcgcgcacttcgtggtgaaggagccgatggtgatcgggcacgagtgcgcgggcgtggt

SEQ ID NO: 10918 - DNA, 400 bp, Zea mays
  Clone ID: LIB3150-061-Q1-N1-E7
tcggcagtacttgcggttgcagatttggagaggaaggatgttaacttggatctaattaaagtagaaggcaaggttggtgggaagctggaggacactgaacttgtatatggaattattgttgacaaagatatgagccatccacaaatgccaaagagaattgaggatgctaagattgccatcttgacatgcccatttgagcctccgaagccaaagacaaagcataaggttgacattgacactgtcgagaaattccagacactgcgtgagcaagagcagaaatactttgatgaaatggttcagaagtgcaaggatgctggtgcaaccctggttatttgccagtggggttttgatgatgaagccaatcatttattgatgcacagaaatctgccagcagttagat

SEQ ID NO: 10919 - DNA, 378 bp, Zea mays
  Clone ID: LIB3150-061-Q1-N1-E8
gcgggaggtaggcagctccttgccccggggctccggcggctcggtctgggcaccggcgccgccggtgaggtgggcccggccgccgcggcggcggggatgagggcgtaccacgagcgggtggtggaccactacaacaacccgcggaacgtcggttccttcgacaaggaggaccccaacgtcggtactgggctggtcggcgcgccggcctgcggcgacgtcatgaagttgcagatccgcgtcgacgaggactccggtaaaatcgtcgacgcctgcttcaagacctttggctgcggctccgccatagcgtcctcgtccgtcgctactgaatgggtgaagggaaaaccaatggatgaagtcttgacaatcaagaatactgag

SEQ ID NO: 10920 - DNA, 387 bp, Zea mays
  Clone ID: LIB3150-061-Q1-N1-E9
gtctaaagtctgaacattttcgaagaatttgaatatctgaacatttgacaaaaagtaactctaatatagcagcttcacacacgcacaggggacaactccgaaactgagtgggcagaagacttaacacggtcgaaaagctaaagcctatgggcgagcagcaaccggtgctggagatggagctgtagcagcagcaccaggaccagggcgggggcctccttgtccaccagcaggcctatcctccctgcgcctgaagcgctccggcggcttgcggtccctgcgcttctcacgggatcggacgcggacgatgtgagcgtggatcgcgcacgagacgcagtggtgcaccttggcgtacagcttcgggaggacgtagccatcatagacgcatgc

SEQ ID NO: 10921 - DNA, 389 bp, Zea mays
  Clone ID: LIB3150-061-Q1-N1-F1
agcacatcctcctccatcaccaaattgacgattatatcgaaaatctggacggcggcggactcgattgtagcagcagccgccgggaacaagatggcggcggcgttgtcgcagctggacgacgagatcgtccgcggcatggccatcggcgctgtcttcaccgactatgccgggaagataaactgcctcgacttccaccgcaaggaagatctcctcgtcacttccagcgaggacgactccatccgcatgtacaacatcaccagcgcgacgttgttaaagactacatatcacaggaaacatggtgctgaccgtgtctgttttagtcatcatccaagttctatcttatgctcttcacgatacaacctagagtctgcagaatcacttcggtatct

SEQ ID NO: 10922 - DNA, 396 bp, Zea mays
  Clone ID: LIB3150-061-Q1-N1-F2
ggcttgtggcaaccgttcaccgcccttcttggggatgctcctagtgttgacgtcaagaagaatgtgattgtggccattacctctgataagggactctgtggtggtattaattcaacatcagtgaaagttagcagggcccttcacaaattgacatctggtccagaaaaagaaaccaagtatgttatattaggagaaaagggcaaagttcagctgttgcgtgactcaaaggacagcattgaaatgactgcaactgaactgcagaagaaccctatcaactacacacaggttgccgtgctcgcggatgacatattgaaaaatgtggaatatgatgctctgagggttatttcaacaagttccaatctgtcatatcgtttaagcccacaatggtaacaatac

SEQ ID NO: 10923 - DNA, 322 bp, Zea mays
  Clone ID: LIB3150-061-Q1-N1-F3
ggagcagatggcggagctggtgatggcgcagtgcggggtgccgagcggcggcgaggggggcgcgtggccgccgggattcgcgtgggacggcggcgccgcggacgcgtcgcgtgggatgtacggcgatgcggtgccgccgtcgctcagcctgttcgacgccgccggcagcgtcgcggcggacccgttccaggcggtgcagcaggcgccgggcgccggtggtggtggggtggacgacgtcgccgggtggcagtatgctgctgcggctgggagcgagctggaggcggtgcagctgcagcaggagcagcaaccgcgcgatgcggac

SEQ ID NO: 10924 - DNA, 363 bp, Zea mays
  Clone ID: LIB3150-061-Q1-N1-F7
gcttgagctccgaccaaatctcgcagcggctgcaattccgagcccgaagagcggatcaggcgaggacgacgccttcgattctgatctgcggtcggcgcgacccagagagaaccggagatgcagcagggcgacggcacggaggcgcaggtgacgtgggaggaccagcagaacatcaaccgcttcggtcgcctcaacaaccgcctccacgagctccaggaagagatcaagctcgcaaaggagacgaatgagaaccttgatgatgctgggaatgaactcatcttgtccgatgaagacgttgtacgcttccaaattggggaagtgtttgctcacatgccaagggatgacgtcgagactaggctggag

SEQ ID NO: 10925 - DNA, 411 bp, Zea mays
  Clone ID: LIB3150-061-Q1-N1-F8
cttctgaagagccaggtggcaaagagatcacattcaagcgtgtgatattgaacaattgtcaggaagcctttgaaggtgctagcaacttaagagctgagatttctaaattaactggccctgaccaagggatggaaagaagagacaaagaacggttggtcaaacttagaacacttggaaatattcggctaattggtgagctactcaagcaaaaaatggttcctgagaagatagttcatcacattgttatggagctattggggtctgggactgataaaaaaaccatgccctgaagaggaagatgttgaggctatctgtcatttcttcaatacgattggtaaacagcttgacgagaacacaaagtctcggcggatcaatgacacatacttcatccagatgaaggagcttacaatg

SEQ ID NO: 10926 - DNA, 368 bp, Zea mays
  unsure at all n locations
  Clone ID: LIB3150-061-Q1-N1-F9
cgatttctaattctcctcgcgagcccaaaccctaaacctaaacctttcacccgccgccgccgccaccaccagcactgccactccgccaccaccgtcccgaagccccctcccagcgccatcgacttcatctcggattgaagcaatgtcgtcggacgatgaggtcagggaggagaaggagctcgacctctcctccaacgacgttgtcaccaagtacaaggctgccgccgaaatcctcaacaacgctctgaagattgttgtgtctcagtgcaagccaaaagtcaagattgttgacctttgcgagaagggcgactctntcataagagagcaaactgggaatgtttacaagaacgcaaagaggaagatttgaa

SEQ ID NO: 10927 - DNA, 400 bp, Zea mays
  Clone ID: LIB3150-061-Q1-N1-G1
ccaagttgttccaggacaaggagagtttgtaccccttgctgaacttcctcaaggctcataactacaagggcacgacgatgatgttgaatgacagaatccaaagccttcgtggtctccaatcatccctgagaaaggcagaggagtatctactgagtgttcctcaagacactccctactcggagttcaaccataggttccaagagcttggcttggagaagggttggggtgacactgcgaagcgtgtactcgacacactccacttgcttctcgaccttcttgaggcccctgatcctgccaacttggagaagttccttggaactataccaatgatgttcaacgttgttatcctttctcctcatggctacttcgctcagtccaatgtgctttgataccctgacac

SEQ ID NO: 10928 - DNA, 401 bp, Zea mays
  Clone ID: LIB3150-061-Q1-N1-G2
cgcacgcaagcgtgaagcgtcctcgactcgcctttcggttcggttcggttcctcgccgtcgcgggcggcctcgtcgggcgaccgctctctcggcatttctttctatctggttgctgtgtgtggattggaggccttgtgagctcgcggaggcggcgcggttcatggccgtggcggagcggttcggaactcggtggccgccgtctcgcttcttcgttgcagtgctcctcgtcctgctcacagatggcggagcggcgtggaagagagcagaaggcctgtcgatgggcatcaactacgggcagatcgcggacaacctgccgtcgccggcgagggtgtcgtacctggtccggtcgatgcaggtgagcaaggtgaagctgtacgacgcggacccgtacgtgctgagc

SEQ ID NO: 10929 - DNA, 401 bp, Zea mays
  Clone ID: LIB3150-061-Q1-N1-G3
gtaatgtggctctgtatggtgctaccatgggagaggcatatttcaatggtatggcagcagaaagattttgtgttcgcaactcaggtgctcaagcagtggttgaaggaattggagatcacgggtgtgagtacatgactggaggcactgttgttatcctcggaaaaacagggcggaactttgctgctggcatgagtggaggcattgcctatgtttatgatgttgatgggaaattcagtgctcgctgcaacaatgagttagttgatctatatcatgtggaggaagaggatgacatcatcacattgaaaatgatgattgagcaacatcgtcgcaacactgagagtgttttggctagagatatactctccgattttgataaccttcttccaaaatttgtaaaagta

SEQ ID NO: 10930 - DNA, 388 bp, Zea mays
  Clone ID: LIB3150-061-Q1-N1-G7
gccgagcgactaagcgaagactcccttttccccgagcacaagagaaccatggcggcggcggcagtttacggcggcttcaaagggaagcttggcgtcgaggatgcccccgagctgcagctcaaccgcatccgcatcacactctcatccaagaacgtcaagaacttggagaaagtttgtgcggatttggtaaagggagccaaggacaagcatttgagggttaagggacctgtccggatccctactaaggttctccacatcaccactcgcaagtccccttgcggtgaaggaacaaacacatgggatcggtttgagttccgcattcacaagagggtgattgacctaatcagctcccctgatgtggtgaagcagatcacctccatcacaattg

SEQ ID NO: 10931 - DNA, 369 bp, Zea mays
  Clone ID: LIB3150-061-Q1-N1-G8
ctttaggtcaaggaacatgaaaacccgtgttattggttgcccaaagactatcgatggggatctgaaatgtaaggaggttccgacaagctttggatttgatacagcttgcaagatatactctgaaatgattggcaatgttatgactgatgcgagatccactggaaaatactaccactttgtgaggcttatgggtcgtgctgcttctcacattacgctggaatgcgctttgcaaacacaccccaatgctgcactcattggggaagaggttgctgcaaagaagcaaacccttaagaatgtcacaaactacattactgatatcatctgcaagcgtgcagatcttggttacaactatggtgttatccttatacc

SEQ ID NO: 10932 - DNA, 367 bp, Zea mays
  Clone ID: LIB3150-061-Q1-N1-G9
tcgcctccccctccggttcgggttcgggttcgtgaggttctccggggttcggtttcgtgggtgagcggatcgagatggcggcgtcggatgttgagtaccgctgcttcgtcggcggcctcgcctgggccacggacgaccactccctccacaacgccttcagcacctacggcgaggtcctcgagtccaagatcatcctcgatcgggagacgcagaggtcccgcggcttcggcttcgtcaccttctccacggaggaggcgatgcggaacgccatcgagggcatgaacggcaaggagctggacggccgcaacatcaccgtcaacgaggcccagtcccgcggcggccgtggaggcggcggcggcggcgggta

SEQ ID NO: 10933 - DNA, 356 bp, Zea mays
  Clone ID: LIB3150-061-Q1-N1-H1
acggatttataagagtctgcctgggaaggcgtgcaagtttgccgcggagaacctggcttcccccggttccaccacgaaagatctgttccatgctgtccggatcagtggcgcgcttggatgcgctgttgatgccagcgtgtacgacggtgttgaggcgaggctcaaggcagagagtcaggatactaattccctgttggaattatactatcctgtgggagggttgcttggcatcaaggaacaaggccataatgttgttctggctgaagcaaaaggtacattccatgccaataaggcacttatccaaagtgacgggagatggcgttatgacactgacagtgctgagtctagcaacattt

SEQ ID NO: 10934 - DNA, 382 bp, Zea mays
  Clone ID: LIB3150-061-Q1-N1-H2
gcaaaaccctagccgccttcccgtccttttcctttcataaaccccaagccgcgccgcaatagctcgccccctcgttcgccgcctctcctgctcctaccgcagctctccctcaggtttagtgttcgcaatggcggccttcaacaagcttggtggccttctaaggcacagtgctctggtgagcggtatcactggtggctcttctcctgcagtgttcaatgctgcacggctcatgtctaccaagctatttattggtggtcttgactggggtgttgatgacgtgaaactaagagaagcatttagcagctttggagaggttactgaagcgagggtgatcacagacagggagactgggaggtcaagaggctttggctttgtgaactac

SEQ ID NO: 10935 - DNA, 378 bp, Zea mays
  Clone ID: LIB3150-061-Q1-N1-H3
tcggtctcgctgccccgattcgccacgaagccgcactgtgagagagggacgcggcccgttgtccccggcttgtacgcaatccttccgtcgctgcgaagttgatccctcgtgttcgccatggcccccagcgtcgccgtggaaaacctcaaccccaaggtcttgaaatgtgagtatgcagtccgtggcgagattgtcatccatgctcagcgcttgcagcaacaactacaaacacaaccagggtctcttccttttgatgagatcctgttctgcaacattgggaatcctcaatcccttggtcagcaacctgtgacgttcttcagggaggttcttgctctttgtgatcatccatgcctcttggaaaaagaggaaaccaaatca

SEQ ID NO: 10936 - DNA, 396 bp, Zea mays
  Clone ID: LIB3150-061-Q1-N1-H7
ccagcctcggccagccacctccccgtcgctctcacgctcttcgtgcccgccgcctcccctcttcccctccacctcactcctcccgtctgacgcacatggcctccatcgccggatcttccgctctctccttcgccatgcctgtcaaggcaatcaactcaaattctctagccttctccccggtgaggaagggtaacacattcctccgcctgcaaccagtgcctatgagatctgtttcctgcgctgccaagaaggatacggtggacaaggtttgtgaaattgtgaagaagcagcttgctcttcctgaccacactgaagtttgtggtgaatcgaaattctctgaacttggtgcggattcgctggacacggttgagattgtgatgggccttgaggaacact

SEQ ID NO: 10937 - DNA, 357 bp, Zea mays
  Clone ID: LIB3150-061-Q1-N1-H8
ccccactccctctcgtcgccgtcctctcccgttcgcaacgccacgctccccaccgccgaaatggccccgaagcgaggtggcagggcaccggtgccggccaagaagaagacggataaagtgacgaaccctctgttcgagaaaaggccgaagcagttcggcatcggcggcgcgttgcctcccaagaaggacctgcaccgattcgtcaagtggcccaaggtcgtgcgcatccagcgccagcgtcgcatcctcaagcagcgcctcaaggtgcctccggcgctcaaccagttcacccgcaccctcgacaagaacctcgctaccaacctgttcaagatgcttcttaagtaccggcccgaagac

SEQ ID NO: 10938 - DNA, 410 bp, Zea mays
  Clone ID: LIB3150-061-Q1-N1-H9
ggaatatggaatttatttactgttggtttacctagtacttgcctaccagccaggcgccccaggggacgacggcaaagatacagtctcgggtattaggatggcaaaggcagcgatagataaattctactccaagtatatgttgggatcacgtaagctggtgcttgacccacattcaacgatctttggcaaaaggatgcttgtcaaaagtgcgatcatgtgctattccaataacacaagatagatcagtcctcgaggaaggtctacaggggccctggctttttgaaggaagagggtacttcaagcccgccctagcaataggattgggttgcgcgtccacaccacacggctagtctgttgactttttgtgccaggtgagaacagactatcgggcgttagctagagctgaagcg

SEQ ID NO: 10939 - DNA, 275 bp, Zea mays
  unsure at all n locations
  Clone ID: LIB3150-063-P2-K1-A1
attcttcaacaacaacaatgatatataatagctgttgaatctctgacngtgtatcttggacgggtgaactctcaaacgctgctgcttagacctanntgttgaccaaanttacactggagacattgaaagggaactcagcatctcttaagtctacacgttacaagcttacactattgaccaagacggtacttgtctctttgcatgtgttttaacatagatggttggtggaaggcggatggctgctataaatcatatgagagtgctggttgcatata

SEQ ID NO: 10940 - DNA, 263 bp, Zea mays
  Clone ID: LIB3150-063-P2-K1-A12
gggcgggcggcctttttttttttttttaaaacgctagagcaaccactgacatgcttctcaaatccagtgaataataccagggacacggacttaatgccaacgggcggcaacacaaagcaatggggaactaattcgaacactaccagcctactaatataaaaaaagaagtgagggaacaggaaatcagctacaataatagcacggcacagcttcagcttcgacagcatagagcatctaaaacaatgggctcgaacaatatgcgc

SEQ ID NO: 10941 - DNA, 137 bp, Zea mays
  unsure at all n locations
  Clone ID: LIB3150-063-P2-K1-A2
annnacaacacacacaaaaattctttatacntaanaaaaaccatacctatgtttgtttttttacaaaaaaggggccgccctaaaaaacccaaaaataccccctcccacccccctatttttttttttcaaacaatacc

SEQ ID NO: 10942 - DNA, 259 bp, Zea mays
  unsure at all n locations
  Clone ID: LIB3150-063-P2-K1-A6
cggggcgggcgcgccttttttttttttttttttttaaaacactacaataacaatttcctttcagaaccttgaaactncatatgggaggggtattccaaatgaacggccgtgtccaatatacaacaccttttcaaaatatttgcaaaattttccacattctaactttaactaactaccaaaaaaaacttttgatctttcatttagattctatttcccaacaaattttcatattgattgttaaagctatatttttcctaat

SEQ ID NO: 10943 - DNA, 334 bp, Zea mays
  Clone ID: LIB3150-063-P2-K1-A7
ggatcattaaacaacaaaacaattgaaatctaggtgggatgattggggcattaagcaagcaaaatagcacaaaacatatacactacagttctgaagcatggaacgatccatataagaccggaccatgctcctaaaccatccggctacaaaacttggtacagcaaggttacaaacaaaagtatcacagtttgatgattttgagaaatgggacttcgcttcaccccaacaccttacgcctttagcttgccaaaaaacctttgcttttcattcgtaagttggaagcgaccgggcccaaattttgaccatttttccaataaacttaactttgatcttc

SEQ ID NO: 10944 - DNA, 270 bp, Zea mays
  Clone ID: LIB3150-063-P2-K1-A8
gggcgggcggccttttttttttttttttttttttttttttttaaaaattcttcttcttttttcacataaaattcgagtcgggatccttaacaaccagggggggggaaaaaaaaaattacaaacaaacagtttttacgctcaacacggctattggcagagcaccaccaaaattagtaataagaattgtccgccgctaaacacccatacaaaatttggcttggctcccgacacttcacgttaccaccaccatcgtccatttacaaccatcta

SEQ ID NO: 10945 - DNA, 189 bp, Zea mays
  unsure at all n locations
  Clone ID: LIB3150-063-P2-K1-A9
aggggcggggcggccggcctttttttttttttttttttattatgatgcatatattatttttcataccacacatgataatgtgtntcgtcttactgcattatgacatagatagatagaaagggatggatagaggagatttcccaaatatcatgaatcagtactagggcggaatggcagcggtgacaccac

SEQ ID NO: 10946 - DNA, 378 bp, Zea mays
  Clone ID: LIB3150-063-P2-K1-B1
tccttaaaaacgaattttaaagagtgaaaggggggttttatacataaattggcggggtagcttccaaagttcatcataatttctaaaccataccgtggggtaacacagcacccttttggcaaacaaaatttatggttacccaactcgaaaaatgaaaaaaaaacttcttaaaaacatgtttaacacttattccttacaactactaaactccttggaaaaaaatatgattaagccttgaaacttaaaacactataaagattctaggggggctataattaccatgggttatttagatatgtcatagaaaccaaatttttctcttttttttttttctcaaccgtaccaattttaaattattttaacaataatttttctttt

SEQ ID NO: 10947 - DNA, 365 bp, Zea mays
  unsure at all n locations
  Clone ID: LIB3150-063-P2-K1-B12
ttcccggtcggccgcccttttttttttttttttttnnnnnaaaaattataaaagttattattcagaactccagctccaaactaacagaaacaactttgttcgcatgggcaaacttaaacaaaaatgcatgttgcacgactacaggtagcgataaatgccatagcacaaatactgatcgccgcataagatagcactacttcgatgggaccaaactttactcgtcatccttatcgtggtcatctgcgccgcccgaggagttgagttggttgagccttttaatgagactggccttcctctgttcgtatgttagattcttggggtagaacctaatgggctcctttggtggctgcttggttgacttgacc

SEQ ID NO: 10948 - DNA, 266 bp, Zea mays
  Clone ID: LIB3150-063-P2-K1-B2
gggccggccgcgccttttttttttttttttttcctatataacaaccaaactttttttttctaacaaacttcaacaaaacatagggagatcttatacataatctgggggcgtactcaacaaaacacacctctttaataatcaaaaccctatcataacccaacttattcttctcacataaaaatctctctaccccatcataaataaaaacaaatataccattacaaaattctctatccaacatattcttcaatctaaaatactacttc

SEQ ID NO: 10949 - DNA, 463 bp, Zea mays
  Clone ID: LIB3150-063-P2-K1-B4
ggcgggctttttttttttttttttgcgacaaataaacatcataatttattttttctcagccaacatccaactttcattgtggctgaacggctgagcaggccgtgcctatataattttgagaaaccatatactgtattcactatccagcttccattgtttctcacaaaggtgcccacagatggagctgcattgtttccactagatcaggaatctaacatgctctttgctgatgacattaatagatcttgatcagagcacttatagcaccaaattagatgctgtggtttgtctgaatagcaacaggcatgtccacctaaactacagttttttggcaccagtttaattcaatatcaaaaatttattccccttgacctattattttgaattactcctcaattttcaaagtcttctacaccatttgactcttttttaagaaactctttttttctctaactacattatc

SEQ ID NO: 10950 - DNA, 273 bp, Zea mays
  unsure at all n locations
  Clone ID: LIB3150-063-P2-K1-B5
tcccgggcgggcggccttnntttnnannnnnnnnnncagaataaagcatcgggttttttctcattcaaagccgataaacattaaagtggtgccctcaagaaggtgcgcggggataaaaaaaaacttcatggaaaaccacggaaactagtttcggcagagccagtccagaacaagataccttcacaatgcgggaacagactctgaagagttgcataatttaccaaccagaagccgttactttatgttttgatggatccgagttacacatgtcac

SEQ ID NO: 10951 - DNA, 72 bp, Zea mays
  Clone ID: LIB3150-063-P2-K1-B7
ccgtccggattcccgggccgccgccctttttttttttttttttataacataaaaccacaaattttttttttt

SEQ ID NO: 10952 - DNA, 432 bp, Zea mays
  unsure at all n locations
  Clone ID: LIB3150-063-P2-K1-C12
cggggcgggcgcccttttttttttttttttttaaggtaaaaatacttcatttgtttctcagcacccagctagcccaggagcggggcgtatcctactcgctgcagagaattccnaaacgttgcatacgacaaaataaacttaaaacccatccttcgccacaatacgaacagaccccggaccttaccactcatccaaagcagagaaaagttggcgtattttaacaaaaacaaactcctttatccagaaaccttagcagccatactatctagagaaggtcggcgacattggccggcagctcctcaacggtcacgttgtagaacctttggatgtcaaacagcattcgctcgtcgtcccgggtgacgaagattatggcaacaccctttctttcaaaccgaccactactgccgatgcggtggaggtagttcttttgct

SEQ ID NO: 10953 - DNA, 57 bp, Zea mays
  unsure at all n locations
  Clone ID: LIB3150-063-P2-K1-C6
tttttttttttnttttttnataaaangctcacgncaaactttttctttgcattgcac

SEQ ID NO: 10954 - DNA, 373 bp, Zea mays
  Clone ID: LIB3150-063-P2-K1-D1
ttcccgggcggccgcgccttttttttttttttttttttttttttttaataatttttgggagaaaaagcaattaatctccttcctcagggtggtggaacaaaccagcgggggggaaaagaaaagcagattggacttccccttgggaacacaggaccaaatcatctcttaaaaccttaacgacgacgactaacgacggacgactaccaagcacacaccatgataacttaacttaacttgagagttcttttacgaaccgaacgaaatctgaaaacggcggacgggatcctcttacgaaagaggcagcgggcacttgtgcccggatcggcaaaactaaagcggtactgcgacacacatcgagagggctatgtttttt

SEQ ID NO: 10955 - DNA, 437 bp, Zea mays
  unsure at all n locations
  Clone ID: LIB3150-063-P2-K1-D11
gaanncccggggcgggcggttcctctgcggtgacgcgatcctccgccgtctcgcaaccttttatggctccacttggtgcacggtctatttgaactcaaatcgtgagggagccggatgaagagtgtcaggaatatccagaagatcacaaaggctatgaagatggttgcagcatcaaagctccgggcagttcagacaaggactgaaaattcacgtggcttgtggcaaccgttcaccgcccttcttggggatgctcctagtgttgacgtcaagaagaatgtgattgtggccattacctctgataagggactctgtggtggtattaattcaacatcagtgaaagttagcagggcccttcacaaattgacatctggtccagaaaaagaaaccaagtatgttatattaggagaaaagggcaaagttcaactgttgcgtgactt

SEQ ID NO: 10956 - DNA, 241 bp, Zea mays
  Clone ID: LIB3150-063-P2-K1-D12
ccggggcggccgcgcctttttttttttactctatcctccgccgtctcgcaatcttttatggctccacttggtgcacagactatttgaacttaaatcgtgagggaccgtattaatattgtcattaatatccatatgatcacaaatgctatgaagatggttgcatcattaaagcttctggctgtttatactaggtctgaaaatatatgtgtcttgttgcaacctattcaccgccctttctttt

SEQ ID NO: 10957 - DNA, 162 bp, Zea mays
  unsure at all n locations
  Clone ID: LIB3150-063-P2-K1-D2
cacaagctcgagtttatattttttaagnctataatataaaacancgggggggagcgtttacatgctctggggaggataaccaccataccttaaaataatattatttgacctttacccaaatacttaacccatataccaccaaatcatatctctttagagaat

SEQ ID NO: 10958 - DNA, 111 bp, Zea mays
  Clone ID: LIB3150-063-P2-K1-E10
aaccaaacacttccatttttatatttcacacctctcaatataattgtcgacttaataaaaaaaaacggcggcccttcaaacaaaattccataaatcttaaaattaacatcc

SEQ ID NO: 10959 - DNA, 276 bp, Zea mays
  Clone ID: LIB3150-063-P2-K1-E2
aagaaatgaaccatcttttttctgggaagccacaaacatcacacaagggggctctattattgaactacgagcgatcagaaatctaacagagggcaccaccaaacatgggttgctggttgagcaaacaccaaaattaaacccctgaaggatcaaccaaaaccacacccccaacaaattgggaaacataactgcccaaacaaaacccccccctaaaaccaattcctccccccccctaatttctctcccggatagaaaatcacgcctttttttactttt

SEQ ID NO: 10960 - DNA, 335 bp, Zea mays
  unsure at all n locations
  Clone ID: LIB3150-063-P2-K1-E5
attcccgggcggccgcgctttttttttttttttttttnnnnntnttaaacgggaattttatttttcatagcattatcatgaatctgagggcgtaacaggtgaaacacgagaggaagcataggcgccatggggttcacagatccacacctaaaccgctaaattaaactgcgagcgatacatgataaactaagaccaccactcagatcaccaccatcttattcagatccaaaggaacggacgcagggggagtcgacgatgacggagggagggcggccgaacagaccagttcagagagatctaggagagctgtccgtagtcagcgacctttaccacct

SEQ ID NO: 10961 - DNA, 222 bp, Zea mays
  Clone ID: LIB3150-063-P2-K1-F10
ggccgcgcctttttttttttttttttaccaaaagcaaggatctatatttcaaggaaacacaagcatcaacatcggcgggcgtattattgggccacggggggggtattctatcgctatattataacatggctacatcacgaaaggggacatcaaatctcatcgttgtccttataaccaccatgcttcacatttaactatctccctcacattccattatcttgc

SEQ ID NO: 10962 - DNA, 175 bp, Zea mays
  Clone ID: LIB3150-063-P2-K1-F11
cttcggccgcccttttttttttttatttttacaaaaataaccaccatttttttttaaactaatcaaaatttcaaaccaacgggctttatactaagaaccggggcgtctttacacaaaaatctcaaacaaaaaacaaaataacacacttaaccaaaattttaccaaaccaattaca

SEQ ID NO: 10963 - DNA, 268 bp, Zea mays
  Clone ID: LIB3150-063-P2-K1-F2
aaaccaaagaagagcttttttagactaataacatattctcaagcaacgagggagatatggtaagggcacggaggataattcatatagtgattatagctctgctagtagactaaaagtcgggccagaggatacaactcaaacaaaaaccttggaaggtgatcttgcgttcacatggagatgaagcgagagctgttttgtccccacaggtgaggtttataatgtgctgtactgagccttgatgaggataacacctttatacttgtcctgg

SEQ ID NO: 10964 - DNA, 197 bp, Zea mays
  Clone ID: LIB3150-063-P2-K1-F5
aaaccaaatgataagatcatattcaacactttggtgacattctagggggggcatttacatcacaaacgggggaatagaaactagcagcatgagaaggggacaacattagcctggacgacatcccacaccacatgggatattttgtttaatcctctctgatacaattcataacggaactatgtatgaggttgtaacac

SEQ ID NO: 10965 - DNA, 262 bp, Zea mays
  Clone ID: LIB3150-063-P2-K1-G1
aataaacacaggcggaaccagtgtgcactccacataatactctgctgttactcaggcggctacattaacaggaccagtgagttagatgatgatatctgcctgtttaagcagcggcaatacgaaagagcaactaactattcaactacggcgtgctttcagactcgtttgtagaagaggacatatgcttggtcatgcaagacatccttctcgccaacgggcacaaacgggtcgtcgtcgaaacgaattcattgcccgttgccat

SEQ ID NO: 10966 - DNA, 157 bp, Zea mays
  Clone ID: LIB3150-063-P2-K1-G2
cctttttttttttttttttaataaacacaagcaggcaaaattttttacccacataataaaaagcttcaacggggcgcatacatccagacagagggggggccaataatgctcaaccaaccactaagacacacccaaaataattacaaacaattcttat

SEQ ID NO: 10967 - DNA, 405 bp, Zea mays
  unsure at all n locations
  Clone ID: LIB3150-063-P2-K1-G4
tngggccacatcgcgagctagcaatgtattagtaccgtaatctaggtgatctgataaagccaatcgggtttgcaacaacacactacagacgttataaggaaaactttaaacataagcatgcgcggcgcaacttgagataacattgtccagagcatgccgttacgccattccactgctttggtaaaagatatggatatgaaggcactgccactagcttcgggaagggttgtgaaaggtaggcacgagcctcacttccagagcttgcgcaaggacatgttcttctccgngtctttcttcatcaccttggccactgccatctcgaagtcctcctgggtaacgggcacccttctttcacgaagagcaaacattccagcctctgtgcagacggccttgagctcagcttct

SEQ ID NO: 10968 - DNA, 161 bp, Zea mays
  unsure at all n locations
  Clone ID: LIB3150-063-P2-K1-G6
caccggaacggaaggnccggccgcccttttttttttttttttttttttttttactcacatacttttttttttatacacaaataccctaaaataggtccgctaatataatccataaaagggggccccaacacaatacatactttttaatattaattctaaat

SEQ ID NO: 10969 - DNA, 263 bp, Zea mays
  Clone ID: LIB3150-063-P2-K1-G8
aattaaaatgtgggtatatataaaaaaataggggggaaaaaaaaacataaaaaaaaatttaaaaacttaaaccattatctaaaaatacaaaactattctcaaataaacacataataaaaaaatatttaaaaaaattaaaaaatatccaaacaaaaataatatattattctcaatttataacatatttctcaaaatataacaataaatatattaaaaaatccaaaaaataaaacctacatcctccttaaaaaatttatttaaat

SEQ ID NO: 10970 - DNA, 310 bp, Zea mays
  Clone ID: LIB3150-063-P2-K1-G9
tcggccgcccttttttttttttttttttttttttttttttttttttttttttttttttttttttggaatctcaaggaaggataataatctggactggaaggacattatataactcccctttttaaccccacaagttataatacttcaaattttataaaatacaatctaatataatttttttcatttttcaacaactaaatcaatattttttccaaaattcaatatttaaacctttactttccaaaaatattttatttaaaaccttattctaaataaatattatattaccttaacaattattttttaaata

SEQ ID NO: 10971 - DNA, 456 bp, Zea mays
  unsure at all n locations
  Clone ID: LIB3150-063-P2-K1-H1
gcgcccttttttttttttttttttttttttgagtatccaagctttttttttcgngcatgcgacgttatantttttggagggtttcaaaaaaaaaggggggcgtcgttactcaaaacaacggcgggtctgacatacctttttctaaccgagaggcaatttacaaaacctcctggcttcatcccaaagttttcttgtttcacaagccccagtcctccttttgcattttaaaaaacttaaccaaaagttttgggaaactcacattcttttaaaatttccacccttttcaccaagatgttttgctttttttcccccccataacttaagacgattgtgggggacctttttctaggtttaaatccccccccattttttttataaattccatatcaccttttgtttatagggtgtgaatcccccagctttttgtatccctattttgaacttcaaaaatttttt

SEQ ID NO: 10972 - DNA, 81 bp, Zea mays
  Clone ID: LIB3150-063-P2-K1-H10
atctcccatttttttttaaaacaagaaaaacaaataaacgagcgctttttttaaaaaaagggcccgccaaaaaaaacaata

SEQ ID NO: 10973 - DNA, 113 bp, Zea mays
  unsure at all n locations
  Clone ID: LIB3150-063-P2-K1-H2
ggtctttaattcccgggtccggcggcctttttttttttttttttttttttttttttttttttttttttttttttnntnnccaaaaaaattttgattttttgaaatttcaaaaa

SEQ ID NO: 10974 - DNA, 360 bp, Zea mays
  Clone ID: LIB3150-063-P2-K1-H5
cggggcggcctttttttttttttttaattttttttggaacaatacttttttcttttcatttcaattgttcattcaggtgattgctcacactgacactgccacccatggtgatgcgtgacacattattactcaatcatcgccgctaaatgactcaactagctagctagccagcggctatactacagcacatagtttcttcagtgggggacaccgccggcagcagcgtaggggcatggagtcggctgctgcaggccgcacatcgccgtcagttgctgcgctatctgcgccgccaacagccccgcgacctggccgctttgcggctgctgctgcaggatggactggaggaccaagccgaagatc

SEQ ID NO: 10975 - DNA, 192 bp, Zea mays
  Clone ID: LIB3150-063-P2-K1-H6
ggaacaatactttttttttttcaatccaaaacttcatacaaaggattgcttacactgacactggggcccatgtttatccactacacattattactcaatcatagccgataaatgactcaactacctagctagccagcgactatactacaccacatattttcttcattcccgtacaccaacaccaccaacctt

SEQ ID NO: 10976 - DNA, 381 bp, Zea mays
  Clone ID: LIB3150-064-P1-N1-A1
tatcctatctgccggacttacccgccacggagggggtgtcaatctcctaggccatgcgttccctaatcccgcagaaattctcgacgcgctagtcactaaacatgtatcaagcccaagccctggctccaccccaagcacatctacaccatctagaccggcctctcgggcgagaacattcgcatgctgctgaacgacttattcataatcaacaagccccacaagctcctctcaaggtacccgccaaggacgacccacgacgccaagcaccacgtgcggcacataggtctcttgaagctcaaccgtaccagcgacgctttgctccacaccataatccttcggatccgcacgctgcgtgtccttatgcgtgtggtgtgcaagtac

SEQ ID NO: 10977 - DNA, 305 bp, Zea mays
  Clone ID: LIB3150-064-P1-N1-A11
ccctcattatgttttttaccacttatacataatttactcacatcctttttattctatctaccattctgaccatatttttctttatatccacaataatataaattttaaataacatattactcctatttcttaatattaatacaaactctaatcttttatttatttatactataactttttttaatttatactcactatcctaaaactatttatatccaattctcttttaattttcaatttcatatatctaaacattattcttcatactatactatccataaactatttaaacaattttttatatt

SEQ ID NO: 10978 - DNA, 415 bp, Zea mays
  Clone ID: LIB3150-064-P1-N1-A12
ttccgccgccgctgccaacgccgcctggtggcgcagccgccatgggggcgtacaagtatgtgtcggaactatggaggaggaagcagtcggacgtgatgcgcttcgtgcagcgcgtgcgctgctgggagtacaggcagcagccgtccatcgtccgcctcaccaggcccacccgccccgacaaggcccgtcgtctcggctacaaggccaagcagggatatgttgtctaccgtgtccgtgtgaagcgtggtggcaggaagaggcctgtgcccaagggtattgtctatggcaagcccaagcatcagggtatcacccagctcaagttccagaggaacaagaggtctgtcgctgaggagagagctggacgtaagcttggtggactgagggttcttaactcctactgggtgaatgaggatag

SEQ ID NO: 10979 - DNA, 404 bp, Zea mays
  Clone ID: LIB3150-064-P1-N1-A2
ctcgtctcgggtcaaaccctaagcagggaggtgggttatccgctgcagccatgagtgagttgcagtctgagtctgtcaaggatgccatctcccagattgttggggatgccaaggagaagaataggaagttcactgagactgtggaacttcagattggtctgaagaattatgatccacagaaggacaagcgtttcagtggctctgttaagttgccccatatccctcgtcccaagatgaaggtgtgcatgcttggtgatgcccagcatgttgaggaggccgagaagatgggacttgactacatggatgttgaggctctcaagaaaatgaacaagaacaagaagcttgttaagaggcttgccaagaagtaccatgctttcttggcatcagaggccatcatcaagcag

SEQ ID NO: 10980 - DNA, 418 bp, Zea mays
  Clone ID: LIB3150-064-P1-N1-A3
tgctctcgcactctaacctgcccgcgccgggtgggaccgccaccaagatgaacagggagaggctcatgaagatggccggcgccgtccgcaccggcggcaagggcaccatgcgcaggaagaagaaggctgtacacaagacggtcaccacggacgacaagaggctgcagggcactctcaagagagtaggggtcaacaccatccctgcaatcgaggaggtgaacatattcaaggacgatctcgtcatccagttcttgaaccccaaagtgcaagcttccatcgcggcaaacacatgggtggtcagtggatctccacagacgaaaaagctacaggatgttctccctggtatcattaaccagcttggccctgacaacatggagcacctgaagaggattgccgaggagatgcagaaacaggtggc

SEQ ID NO: 10981 - DNA, 413 bp, Zea mays
  Clone ID: LIB3150-064-P1-N1-A4
tagctactttcagctaagccagttgtctatggggtgaatatgagtgagaaggatttccagagaaaaaagaacaagtttctacccaagatacatgcttgggtgcaggaacatggtggtgaaaccatacttcctttcagctgtgcttttgaacagaaactagtggatatgccagaagatgaagccgccaaatattgtgctgaaaaccagataacaagcatgatcccaaaaattatcaagactggttttgcagcaattcatctgatatactttttcactgctggtcctgatgaggtaaaatgttggcagatcagacgccagactaaagctcctcaagctgctggtgcaattcacactgattttgaaaggggtttcatatgcgctgaggtaatgaagtttgaagatctgaaagaact

SEQ ID NO: 10982 - DNA, 407 bp, Zea mays
  Clone ID: LIB3150-064-P1-N1-A7
ttgacaaacaatctgtccacagagtgcattgtctctcgcaaatatcggcttgtgggaaagcaagaggctcatgagaatgcaaaaacgattgaagaactttgctttgccttggctgatgagcatttcagagaggagccagatggtgatgggagttctgctgtccagctatatgcaaaggaaacgagcaagatgatgttggaagttctgaaaaaaggcccaaggactactgcagaactggaggcacctgtagctgacacacctcttgtgtctgctgatactgtactagatatatctggtggcaagcgtgcttttattgaggcagatgaagcaaaggaactgctgagtccacttaccaaaccaggaaattcatataaaagaatttgctttagcaacaggagctttggtat

SEQ ID NO: 10983 - DNA, 406 bp, Zea mays
  Clone ID: LIB3150-064-P1-N1-A8
ttctcctctctcgcatccgcagcctgtcgagctctactccatcccctcgagctcgaagcgcagcagcagcagtcaggcggccatggacgccagcgcagcaggagccggcgggaaggcgaagaagggcgcggccgggcgcaaggccggcgggccgaggaagaagtcggtgacgaggtccgtcaaggccgggctgcagttccccgtcggccgcatcgggcggtatctgaagaagggccggtacgcgcagcgcgtcggcacgggcgcccccgtctacctggccgccgtcctcgagtacctggccgccgaggtgctggagctggccggcaacgctgccaaagacaacaagaagacccgcatcatcccgcgccacgtgctcctggccatccgcaacgacgaggagctcggc

SEQ ID NO: 10984 - DNA, 395 bp, Zea mays
  Clone ID: LIB3150-064-P1-N1-A9
tgcggcgcctattggtctttctagtgcatagagaattttaagtgaagaagaggttgaagcgagagattccaagaggcaaaagatgggaaagtggtacttcccacacctgaagcttgacagactcatatgtacctatccttggaacaattctgaactggcagagacagagaaaacagatcgtttgggattagttgatttcttgaagggactccttgaatttgatccaaataagcgatggtcaccattgcaggctctacaccatccattcataacaggagaatcgtttactggtccatatgagccaatacccgagactgcaagaattcctgttgctcgtgcagcagcaattgatcacaatcctggaggggggcactggctacattcatgtctttccc

SEQ ID NO: 10985 - DNA, 359 bp, Zea mays
  Clone ID: LIB3150-064-P1-N1-B1
ctcgtctaaggactggaggggtggaagggcgtggagtttcaacatcattccgaggagcactggagctgctaaggctgttggcaaagtgcttcctgtccttaacggaaagttgactggaatgtctttccgtgtcccaaccgtcgatgtttctgttgttgatttgactgttaggcttgagaagtcagcaacctatgatgagatcaaggctgcggtcaaggccgaggcagaaggtagcctcaagggcatcctgggttacgttgaggaggaccttgtttccaccgatttccagggtgacagcaggtctagcatctttgatgctaaagctggcattgccttgaacggcaactttgtgaagctcg

SEQ ID NO: 10986 - DNA, 414 bp, Zea mays
  Clone ID: LIB3150-064-P1-N1-B10
tgttgctgctgccgcgtccacagaatggggggtttcgtgaagactcataagaccaatgcgtatttcaaacgtttccaagtgaaattcaagagaaggcgggctggcaagacagactacagggccaggataaggctgattaaccaagacaaaaacaagtacatcacacccaaatacagatttgttgtgcgatttaccaacatggacatcactgcccaaatcatatctgctagtatagcgggtgatatggttcttgcttctgcctactcgcatgagttgccacgatatggtcttgaagttggtctgaccaactatgcagctgcctactgcactggccttctgttggctcgccgtgtgctcaagatccgtggtttggatcaggagtacgagggcaatgttgaggccactggtgaggac

SEQ ID NO: 10987 - DNA, 415 bp, Zea mays
  Clone ID: LIB3150-064-P1-N1-B11
tttagcagaagttgcggttgaacttttgtgggtccgccgtcggatcagatctgtgcgtgcggactagcgatggcgtcattctcggaggctcccccagggaacccgaaggcgggcgagaagatcttcaagaccaagtgcgcgcagtgccacacagtcgagaagggcgccggccacaagcaaggtccaaacttgaatggtctttttgggaggcagtcgggtaccaccacaggctactcctattccgcgggaaacaaaaacaaggctgtgatctgggaggagaacactctgtatgactacctgcttaaccctaagaagtacattcctggaaccaagatggtcttccctgggctgaagaagccgcaggaacgtgctgatctcattgcgtacctgaaggaagcaactgcgtagtataatg

SEQ ID NO: 10988 - DNA, 349 bp, Zea mays
  Clone ID: LIB3150-064-P1-N1-B2
gtccccgtccgcgccggccgacgccgcctgttggtccccgcgtcagcgtcgcgggtccactgagcgtgcgtgtcaccggcgggaggcaagggcaggcggtggtggcgatggcgtccgctgacgcgcgcttggcggagatcgccttctccatccgcgtaatgcccgacttacccaagccagggatcatgttccaggacatcacgacgttgctgctcgatcccaaggcgttccgtgacaccatcgacctctttgtcgagcggtacaaggaccaagggatcaccgtggttgctggtgttgaagctagagggttcatttttggtcctcctatcgctttaaccattggcgcaaa

SEQ ID NO: 10989 - DNA, 410 bp, Zea mays
  Clone ID: LIB3150-064-P1-N1-B3
ttgttatcccccgtgcactgagccgcctgggcacggtgttcgagcgctccaagcgcactctgtcatctactgcccatacgaccattgagatcgactccctgttcgagggcatcgatttctactccacgatcaccagggctcgcttcgaggagctcaatatggacttgttccggaagtgcatggaacctgtggagaagtgcttgcgcgacgccaagatggacaagagcagcgtgcacgacgtcgtgctcgtcggtggctccacccgcatcctcaaagtgcagcaactgcttcaggacttcttcaacggaaaggaactgtgcaagagcattaaccccgaccaggcttttgcgtacggcgcgggtgtccataccgccattctcatcggcgagggcaacgaaaaggtgcaagat

SEQ ID NO: 10990 - DNA, 419 bp, Zea mays
  Clone ID: LIB3150-064-P1-N1-B4
tcaactcgccgccgccgctgccaacgccggctgctgccgcagccgccatgggggcgtacaagtatgtgtcggaactatggaggaggaagcagtcggacgtgatgcgcttcgtgcagcgcgtgcgctgctgggagtacaggcagcagccgtccatcgtccgcctcaccaggcccacccgccccgacaaggcccgtcgtctcggctacaaggccaagcagggatatgttgtctaccgtgtccgtgtgaagcgtggtggcaggaagaggcctgtgcccaagggtattgtctatggcaagcccaagcaccagggtatcacccagctcaagttccagaggaacaagaggtctgtcgctgaggagagagctggacgtaagcttggtggactgagggttcttaactcctactgggtgaatgaggat

SEQ ID NO: 10991 - DNA, 216 bp, Zea mays
  Clone ID: LIB3150-064-P1-N1-B5
tgtttatgttgccatatagtcaagtcgagacgagaccgtcctacggccgagtgtcgctcgctagctaggggtttcaccaatggaggggcccaccaccttccgtcgaggaccctattgtgcgcgcaacatggacgacgtgaaccttaccttctagaccttcccggcggtcgtggacactagcaggttggaccagattggcatgaaggacgacctact

SEQ ID NO: 10992 - DNA, 417 bp, Zea mays
  Clone ID: LIB3150-064-P1-N1-B6
tttcattcgccccggcctcagcctcatccccaggcacacccatgcccgtgccaacagccgcatccaagcccgtgccagctgcagggaacctgcggcgttggcagcaccccgatcctgggccagtgcgtcgagttcctgaggcatcagtgcagcccgacggcgacgccctactgctcgcctcagtgccagtcgttgcggcagcagtgttgccagcagctcaggcaggtggagccgcagcaccggtaccaggcgatcttcggcttggtcctccagtccatcctgcagcagcagccgcaaagcggccaggtcgcggtgctgttggcggcgcagatagcgcagcaactgacggcgatgtgcggcctgcagcagccgactccatgcccctacgctgctgccggcggtgtcccccactgaaga

SEQ ID NO: 10993 - DNA, 411 bp, Zea mays
  Clone ID: LIB3150-064-P1-N1-B8
tctcagcttctgctcatcgtcaggttaggtacggtccttcgttcgttccggagctagctagggtggtggaccaagatgagcttcttctccggcggcggcagcaagaaccaccagaggaccttcagggcgaagaagagcctgtcgtcgcccgggaacaagggtacgcaactgaggaggcacattgacgccactctcggcagcggcaacctgcgagaggctgtccgtctacccgtcggggaggacctcaacgagtggctggctgtcaacactgttgacttcttcaaccacataaacgttctgtacagcacgctggcggagttctgcactccacatacctgcccggtcatggcagccggaccaaagtacgagtacaggtgggccgacggagccaaagtcaaggtgcccatcaag

SEQ ID NO: 10994 - DNA, 411 bp, Zea mays
  Clone ID: LIB3150-064-P1-N1-B9
tctccgccaaagtatggtgccatgattatgggagctctttcggaattgaatcagccgaatggttcagatattgatgcaatcttcgacttcataaagcaaaggcatgtggtgcaatcgacctttagaagatttctaccctcaaagttacggcgacttgcagactcaaacaaaattgaaaaggtcgataacttctataggctcccagattcatttgcaacaaggactccagctcaaataaaagtttcagatccaaaacagaaggatccatctaaggcgtcaaagaccataggcttgtttgctgcctccagccctgcactagaggcagcgatggcagctgctgtcaaggtgactgacgccgaggcaaaagcacatgatgcacatgatcagatgatggaggcagaaaggatgctg

SEQ ID NO: 10995 - DNA, 418 bp, Zea mays
  Clone ID: LIB3150-064-P1-N1-C1
cccggttcatccctcggaatcagactgacagtaccgtcctcaggacaaggcacctcagaagcccttctcgtccgcgccgcctccttgaccccgctggccggcgagctgctcagcgcggctttttttttgcatccacaatgccgcagcttggcacatgttcattgcctggagctgcaatctatggcacttcaactaggagatttggaggtttggagtttcagcaacataaagttaatcacatctcatttggtcggaaagcgtctgttaaagcaacattgaaaactgtgagatgcaatgccactcaaacacaaagcgtccaaaagaaatcttcaagtgcaactattcagcgtgataagaaaggaaatgtacaagggccaaaactggatgacggaagcggtgggttccctccattccgctt

SEQ ID NO: 10996 - DNA, 51 bp, Zea mays
  unsure at all n locations
  Clone ID: LIB3150-064-P1-N1-C10
taaaaanccacccacgcgaacacaaacacaaatcctatacaagccacccac

SEQ ID NO: 10997 - DNA, 410 bp, Zea mays
  Clone ID: LIB3150-064-P1-N1-C2
tggacgccccatgatttagctctcttcttgccggcgagacccaaccataccagcggcgccgcaggctgacgaggaggcggagtatagtggccggactacctcgacaccttcactgcaaccatgggtatctcacgtgattcgatgcacaagcgccgggccaccggtggaaagcagaagacgtggcgcaagaagcgaaagtatgagcttggccgccagcctgctaacaccaaactgtctagcaataagacagtgaggagggtccgtgtacgtggaggcaacgtgaagtggagggctctccgattggatacaggtaactactcgtggggaagtgaggctcttacccgcaagacccgcatactggatgtggtctataatgcatcaaacaatgagcttgtgaggactcagactct

SEQ ID NO: 10998 - DNA, 415 bp, Zea mays
  Clone ID: LIB3150-064-P1-N1-C3
tcgtcgacaacggccagcccgtcgtgctcagctgcgtgcgcgaggccgagcgccggatcgcgggcaacctcaacatggagtaccttccgatgggaggcagcgtcaagatgattgaagagtcactgaagctggcgtacggagaagattctgacttcatcaaagataagaggatagcagcggtgcaggcgctttcaggcactggtgcctgccggctctttgctgatttccaaaagcgttttttgccggattcgcagatctacataccaacaccaacgtggtccaaccatcacaatatttggagggatgctcaagtgccacagaagacattcacatactaccatccagagtcaagagggcttgatttctcaggattgatgaatgaaatcaagaatgctccagacggttcattcttttt

SEQ ID NO: 10999 - DNA, 409 bp, Zea mays
  Clone ID: LIB3150-064-P1-N1-C4
ttttctaatacttgatcaaccttattgactcaccggggcacgtcgatttttcttcggaagtcacagctgctcttcgcatcaccgatggtgctctggttgtggttgattgtattgaaggtgtctgtgtgcaaactgaaactgtgcttcgccaagcccttggtgagaggattaggccagttcttaccgtgaacaagatggacaggtgcttccttgagcttcaggttgagggtgaggaagcttatcagactttctcccgtgttattgagaatgccaatgtcatcatggcaacatatgaagataagctccttggtgatgtccaagtatacccagagaaggggacagttgccttttctgctggtctgcatggatgggcctttacactcactaactttgcgaagatgtatgcatc

SEQ ID NO: 11000 - DNA, 335 bp, Zea mays
  Clone ID: LIB3150-064-P1-N1-C6
ttagttacgaggaaggcatgccggcgttcgggctgggcaacaaggccacggggctcgccatcaagcactccctcggccagtcccacccggtcaagctcgcgcctttcagcccggaccaggaggacgcgtcggtgctgtggacggagagcaaggacgtgggcaagggcttccgctgcatccgcatggtcaacaacacccgcctcaacttcgacgccttccacggcgacaaggaccacggcggcgtgcacgacggcaccggcgttgttctctgggagtggtgcatgggctataaccagatctggaagatcctgccgtggagtcccgaggctcaactt

SEQ ID NO: 11001 - DNA, 411 bp, Zea mays
  Clone ID: LIB3150-064-P1-N1-C8
ttcgctcctgagtgcagtctctctctgtgcgccctgcgctctgcgccgccgccatggaggacgacgatgactgccctcctctcgccgttgagctccctccgcgggtgccgtcccctccagagcaatctccctcagacgcctcgccagttggcgtcaccgtcatcaccggctacctcggggctggcaagtcgacgctagtcaactacattctgaatgagcaacatgggaagagaattgccgtgatactaaatgagtttggagaggaaattggggtcgaaagggcgatgatcaatgaggggcaaggtggtgcacttatcgaggaatgggtggagctggccaatggatgtgtctgttgctctgtaaaacacagtctggttcaagcacttgagcagcttgtgcagagaaaggata

SEQ ID NO: 11002 - DNA, 379 bp, Zea mays
  Clone ID: LIB3150-064-P1-N1-D11
tctcaagtaccggcctgaagacaagggtgcgaggaaggagaggcttctgaagagggcccaagctgagaatgaaggaaaaactgttgagtcgaagaaaccaattgttgtgaagtatggccttaaccatgtgacttacctcattgagcagaacaaggctcagcttgttgtcatcgctcatgacgtggatccgattgaactggttgtgtggcttccagccctgtgtaggaagatggaggtcccttactgcattgttaaaggaaaggctcgtcttggatcgattgttcacaagaagaatgcatcattcttgtgtcttaccactgtcaagaacgaggataagcttgagttcagcaagatcttggaggcttttaaggcaaaactt

SEQ ID NO: 11003 - DNA, 345 bp, Zea mays
  Clone ID: LIB3150-064-P1-N1-D12
tttatcttcttgctcctcctaacactgggggggcactctttcgctcacgaacggctgttctcttcttactcctaccaaggccagtattcaaaaatgggtgatccaagtgagaggaatggacacggctctcttacccgtttgctattctgtgatccatatttgcctgcttctactaactacaccagggagtatttgcaggactatccattcattcatgttgatgaagtaggtcttgagcaggtacctgttgttattcacagctatcatatatgcgtagtaaaaaataagcgtatagattcagatattattgccaaggcatcttatatgaagattttaatgcatttt

SEQ ID NO: 11004 - DNA, 344 bp, Zea mays
  Clone ID: LIB3150-064-P1-N1-D2
atcaagtgcataacaccttcagggaggcccgcaggacagctgtttgtgctggaagatctatataactctggcgcaccatggtctccgtggtcgctgcacgctgttctttggcatttcagaatggcacaaggcctagcaccgtcccatatcgttttaccaacgagatgtgctgcgtgtgcacaagggacgacaaggacgctgaagtatattggcttcaatctgaattgaggggagcctgttcatatcataatgaccaccattgatgggagaacattgcagacaaagcacaccattagctacacaggtgcaacaatggtaggccatggatcctatctaaccgtttt

SEQ ID NO: 11005 - DNA, 415 bp, Zea mays
  Clone ID: LIB3150-064-P1-N1-D3
cttcgtcgtgcggcaactgcgcgaccgccgacgcccgacggcaggtgcaccaggtcttcgtcgaccccttcgcaaggcctcggttccatccttcgccggaggcgaccgcccgtcaacaggacttgatctactactcactagcggtgtagaggcgaagagaagaacttgaccatgagcagcataggcacaggttacgatttgtctgtcacgactttctccccagatggtcgtgtcttccaggtcgagtatgccaccaaggccgtcgacaacagcgggactgttgttgggatcaagtgcaaagatggcattgtcctgggtgtcgagaagctggtaacctcaaagatgatgctggaaggatcaaaccgaaggatccattcggtgcaccgtcactctggcttggttgttgctggtttag

SEQ ID NO: 11006 - DNA, 375 bp, Zea mays
  Clone ID: LIB3150-064-P1-N1-D6
tttctcatcctggagcagatggatgttgacgagcgagatagcaaagctgatggtggagctgtcccgtagtcaagactatgaaatcggggatggtaccaccggggtggtagtcatggcaggggctcttctcgagcaggctgagaagcttctggagcgtggtattcaccccattagggtggctgaaggctatgagatggcgtcaaaggtagcttttgaccacctagaacatatctccgaaaagtttgagttcagtgcagacaacattgaacccctggtccagacctgcatgacaactctatcctcatagattgttaaccggtgcaagcgggcgttggcagagtatgctgtcaaagcagtacttgcggttgcagattt

SEQ ID NO: 11007 - DNA, 369 bp, Zea mays
  Clone ID: LIB3150-064-P1-N1-D7
tgctaaaaccatcagatctagcagaactgtggcgacctcatcggcgttggcggagcgcgtgttgaccggagatggctccgagcgggtggaggaggagcgcggcggcgcgggtcgcctggcgcccggccacggtttgcctgtggctcgcgctcgccgccgtcgcactgacgctcgcccaggctaagaaggacctgacggaggttacccacatggtctacttctacatcgagatcgacggcaagcccgcatgccggattgtcatggggcttttggggaagactgtttctaatacggctgataacttccgagctctttgcacaggagagaaaggggttgccaatagtgtcataaaccttcactacaaggtaa

SEQ ID NO: 11008 - DNA, 384 bp, Zea mays
  Clone ID: LIB3150-064-P1-N1-D8
ttaaaccccaaaccctagcttcgctcggtggggcgagccggcgatggcgaagtctctgcgatccaaacgcgagaagcggcttcggacgttgcgccgggagatagcggagccgttctacgacaagaaggaggccgccaagctcgccgcgcaggccgcagccctagctgctgccccgctcccggtccgcgggcccccgccgtcccaggatgccggcacctcccgcgcagctagctcggcctcggctatggatgtggagatgtctggtgcagggaacagcaggtctaatacctttctgaggccacttgacagcatttgcaagaagaaggtgcaccttcatttgtagatcaagaatggcctgagaaaagcttggcaagaagggaaagt

SEQ ID NO: 11009 - DNA, 416 bp, Zea mays
  Clone ID: LIB3150-064-P1-N1-E1
tccaaatcgcgaaaccccagccgctcctcgatggcggcctggagccggcgcgacgggatggggggcgggaactacgccaggcagatggcgatgtgcttgagcatgattgcctccggcatcgggatggagaccggcggaattaagttgctcgatagaatgactgaagactctgacaaggaggagcacctggggccactgcatgatgcggcaagggcaggtaaaatggatgtttgcaaacacctggtggagaatcttgggtttgatgtcgatgttcgtgctaatgatggttcggggaagactcctttgacttgtgcagtgtcatgtggcaaagtaattgctgtgaggtatcttattgccatgggtgcagatcttgaaaaacaagatgctattggctttactcctctgcactatgctgg

SEQ ID NO: 11010 - DNA, 185 bp, Zea mays
  Clone ID: LIB3150-064-P1-N1-E12
gttggttcgatctcaggcgggtggggcccgaagtttgcagtatggcggggtacccggaggacaaccagcacgagttgaacgggtacgacgaggaggtcgacgaagaggagggacaccccgggaggcgggtaggccgggatgggggctctgggtacgctgatgctgtcggagaggatgggaggggg

SEQ ID NO: 11011 - DNA, 279 bp, Zea mays
  Clone ID: LIB3150-064-P1-N1-E2
ctcgccgctttgggttggggtttaagcgcgtgtaagggaggccggaggcgacgactactgctccggcgtcggagaagaagaagcagacaactctcgtatgtcttcttgccccttttccgatctggtggtcgtagcgctcatcatcgccgtcgtcgccgtcatcctccgcgccctcgcttgctctggccgatctatgcgcaaggggctcaacggctggaacaaatcctcgtcgatgctcagggacgggttcggggtgaagtattccggaattctccacat

SEQ ID NO: 11012 - DNA, 409 bp, Zea mays
  Clone ID: LIB3150-064-P1-N1-E3
tgatgatcctcattgttaccaggctgttggctgatgctgctgggactacgtgcggtcagcggctggagaaggtcattggtactgagcacacagacatcattcgcgttccgttcagaaatgagaatggcatcctccgcaagtggatctctcgttttgatgtctggccatacctggagacatacactgaggatgtttccagtgaaataatgaaagaaatgcaggccaagcctgaccttatcattggcaactacagcgatggcaacctagtcgccactctgctcgcgcacaagttgggagtcactcagtgtaccatcgctcatgccttggagaaaaccaaataccccaactcggacatctacttggacaaattcgacagccagtaccacttctcttgccagttcacagctga

SEQ ID NO: 11013 - DNA, 363 bp, Zea mays
  Clone ID: LIB3150-064-P1-N1-E4
tcctcgcgccgccgccaacgcaacccttggagccccaatccctcacagcaaccatggctggcgcgcaggagtccctctctctggtgggcacgatgcgcggccacaacggcgaggtgacggcgatcgcgaccccgatcgacaactcgccgttcatcgtctcctcctcccgcgacaagtccctgctggtgtgggacctgaccaacccggtccactccaccccggaatccggcgccaccgtcgactacggcgtccccttccgccgtctcaccggccactcccacttcgtccaggacgtcgtcctcagttccgacggccagttcgccctttccggctcctgggatggagagcttcgcctctgggacc

SEQ ID NO: 11014 - DNA, 410 bp, Zea mays
  Clone ID: LIB3150-064-P1-N1-E5
tttctaacatccacaaaaacaaaagaagggagaaaccacaagctagccatggttagcagcaagattagtattgtcggagccatcacatctccaattgtggttgtggtggcactgacactattgatcacacttttggcatcgacagtagatgcacaaccatactcaacaatgccacctagcatgattggagatttattgccacggacgagagtacctccgtccgggcctagccatcctccacccatggcggcgatgccaccatcatggagaatgccagccgctggacctacgaagcctccttccatggcggcaatgtcacctgatgttgttggggatttgctaccacgaggaagagtaccaccctccgggcctagccatccaccacccttggtggcgatgtcacctgatgt

SEQ ID NO: 11015 - DNA, 312 bp, Zea mays
  Clone ID: LIB3150-064-P1-N1-E6
ttttaaagagactgctctggggaacattgggagcattgactttcgtaacagtgagctctccatacgctacgtcgatatcggaataccagcgaacaacaaggggaggaacagcattggatgtctgttctggcttctgtccaagatggttctgcaaatgaggggcactatccttcctgggcacaagtgggaagtcatggtcgatctgttcttctacagagacccataggaagcaaaggagcaggaggaggaagctgccgcggcccctgagtttgccgcaattactgtttaccaaggaactgatcagtggggtgg

SEQ ID NO: 11016 - DNA, 212 bp, Zea mays
  Clone ID: LIB3150-064-P1-N1-E8
tcttctcggactagttttttctgaagattcagctgtggcttcgacgatccagtgggttaaagctcgccagatctttgacagccgcggcaaccctacagtcgaggtcgacgtgttttgctcagatggaacctttgcaagggcagctgttcccagtggagcatcaactggtgtatttgaagctctggagttgtgggatggtggatctgactatt

SEQ ID NO: 11017 - DNA, 363 bp, Zea mays
  Clone ID: LIB3150-064-P1-N1-F1
tttatggaagacactgtcacttggtgagagcgagggcccgcgtcgccgccggggtggttgctcttctcgccctctttgtcgtcccggccacggcgcacgcccctgccgagtggcccaaactcgcccaaggcgctgaaccacccaagatggcctgtcttccggcgtcgccgaccagggcccccatggactacccggcctagacttccacgatgtcgaccgcgtacgcctgctcccgctacgctgcagccacaagcaccgtatgtgcgggatttcgaaacacgatgtccccagcatgagcctgcggtattactctggacgccactcccgtcaccaataagagcacagtctcatctgccttcgcca

SEQ ID NO: 11018 - DNA, 410 bp, Zea mays
  Clone ID: LIB3150-064-P1-N1-F10
ctgtctccaactctccatcgcgtctgctacgcctctcctgcaggacgaccaatggcttccaggaagttcttcgtgggtggcaactggaaatgcaacggtactggcgaggacgtgaagaagatcgtcaccgtgctcaaccaagccgaggtgccctctgaagacgtcgtcgaggtggtggtgagtccgcctttcgtttttctgcagcaggtcaaggggctgctgcggctggacttcgccgtcgcagcgcagaactgctgggtgcgcaagggcggcgccttcaccggcgagatcagtgctgagatgctggtaaacctgcaggtgccctgggtcattttgggacattctgagcgcagagctctgttgggtgaatccagtgattttgttgctgataaagttgcatatgcactcac

SEQ ID NO: 11019 - DNA, 413 bp, Zea mays
  Clone ID: LIB3150-064-P1-N1-F2
tacagcacaggcagttcgagagagagagagagagagagagagataaagatgtcgtggttcgggcaccaccaccacaaccagccggctcccccggcgtcgggccccaaccaggtgttcaagatcttctgccgcgccaacgagaactactgcctggccgtccgcgacggcgccgtcgtgctggccccggtcaaccccaaggacgaccaccagcacttggtacaaggacatgcgcttcagcacccgggtcaaggacgaggaaggcatgccggcgttcgcgctcgtcaacaaggccacggggctcgccatcaagcactccctcggccagtcccacccggtcaagctcgcgcctttcagcccggaccaggaggacgcgtcggtgctgtggacggagagcaaggacgtgggcaagggct

SEQ ID NO: 11020 - DNA, 381 bp, Zea mays
  Clone ID: LIB3150-064-P1-N1-F5
ttccttcacgcagttcaggaagctgctctccatagagcgtagtcccccaattgaagaggtgatcagcacaggagtcgtgccccgattcattgagttccttacacgtgaaggaccatccacaactccagtttgaggctgcatgggcgctcaccaacattgcatcaggcacatcagagaacactaaggtggtggttgagagtggtgctgtgcccatctttgttaagctcctcaactccaatagcgaggatgttcgtgaacaggctgtatgggctttaggtaatgttgctggtgactccccaaagtgccgtgatctggtgctaggccatggtgggctatttcccttgctgaacagcttaaagagcatgctaagctctcgatgct

SEQ ID NO: 11021 - DNA, 409 bp, Zea mays
  Clone ID: LIB3150-064-P1-N1-F6
tctcttcttcgtctagcctcccgcccgcaggcaggatggcacccggcctctacaccgacatcggcaagaaaaccagagatttgctgtacaaggactacaacacgcaccagaagttctccctcaccacctgctcgccccatggcatcgcaatcacagctgcaggaacaaggaaaaatgagtccacctttggcgatcttcacactcaaattaagaacaataaattgacggtcgatgtcaaagcgaactcagaatcagatcttttgacaacaatcactggtgatgagattggtactccagggctcaaatcaattctcactttggttgttccggaccagaggtcagggaagcttgaactccagtacctacatgaatatactggtgtgaatgcaagcatcgggcttaatttcaa

SEQ ID NO: 11022 - DNA, 297 bp, Zea mays
  Clone ID: LIB3150-064-P1-N1-G1
tttctttcttttactctagccctcccagggtgtcggttcggcggcggcgatgggtgtcgccccggacccggcggacggcggcgccggcaccggcaccggcaccggcgacgactggttcctcgactgcggcattctcgacgaccttccggccgtggactgcggggccttcccgtgggacgcgtacccgttttctttcaaccccattgtggtagtgtgctgatttgtgaattcccatgttgtttttaaggagcccaattaatgtcttcatatatgcctggtagaattaaatatttttat

SEQ ID NO: 11023 - DNA, 400 bp, Zea mays
  Clone ID: LIB3150-064-P1-N1-G4
tatcttctcttcagatcccaatcccatccaacggttggatcctctcctccagtgctcccctcacttctcgccgccgcccactgccgctccccccaccaatccacagcgagacacgcccgagcgagtgatccccgacccagccgccgccatgaggccgtcgctgctgaagtccacggccgagctcctccgccgcagccgcggctacgcgttctcggccaatccggagcggaaggtggccatcctgggcgcggcgggtggcatcgggcagccgctctcgctcctcatgaagctcaacccgctcgtttcctccctcttcctctacgatatcgccggcacccccggcgtcgcggccgacgtctcccacatcaacttccccgccctggtgaaggggctcatgggg

SEQ ID NO: 11024 - DNA, 365 bp, Zea mays
  Clone ID: LIB3150-064-P1-N1-H4
ttcgtctctcaacacaagcacaggcagttcgagagagagagagagagagagagagagaaagatgtcgtggttcgggcaccaccaccacaaccagccggctcccccggcgtcgggccccaaccaggtgttcaagatcttctgccgcgccaacgagaactactgcctggccgtccgcgacggcgccgtcgtgctggccccggtcaaccccaaggacgaccaccagcactggtacaaggacatgcgcttcagcacccgggtcaaggacgaggaaggcatgccggcgttcgcgctcgtcaacaaggccacggtgctcgccatcaagcactccctcggccagtcccacccggtcaagctcgcgcctttca

SEQ ID NO: 11025 - DNA, 288 bp, Zea mays
  unsure at all n locations
  Clone ID: LIB3150-064-P2-K1-A10
acaccctacaaaacctctgtttttttcatttttanccgggttaaggccaaacaagagggtgggtgactcttgtatgggttggccagagagttaattacaaaaaaaccaaaaccattttccactttttccaaccataccaatacacattggttggtttaccaagacatcctactctctctctttaaatgctgtccaccaaccaatataacaattaacgaacggacaatggcttaccaactaaccaaatcgactcttaagtgccacacatgtaaagatgatgcatcagca

SEQ ID NO: 11026 - DNA, 333 bp, Zea mays
  unsure at all n locations
  Clone ID: LIB3150-064-P2-K1-A4
ccacgcgtccgctcccgtgcccctcactgtttagtggcgactacttttcgacagtcgccgccgcctcccgctaagtgcctttcccctggtctgcatgttcnnctcttcncccaccagatatgagcagctggcaattcgattttgaggccattatttgataacccgggacaagtgcactggttacctgaccattttagctttttgagatggctacacagttgccatgcttcacacagctcagtccaccgtcttgtagttggataaaagatgtcgggaactgcaaggctacgcctgatagggtagccagaagtgcccgagctttgggccactgtc

SEQ ID NO: 11027 - DNA, 359 bp, Zea mays
  unsure at all n locations
  Clone ID: LIB3150-064-P2-K1-A7
cggggcgggcggccttttttttttttttttttttaagggaaacaaaccatcttcattggtttaaacatancctcntcaataatgcaacatgcaaacagagggtgggagaagacttatccccaacaaacacaacaagagtttacacctgttatctacagactttaatgcctagtttgagaacccattttacaagggatttccattttcctaagaaaaaatagtttatttttacttgagaaaataaaaatcactttggaaaatgaagttcccaaactagccctaacagggaaaaaaatcttctgcatgaccatgtactttcctgcaattgaaccatatcatttgaacaggcattacaactt

SEQ ID NO: 11028 - DNA, 78 bp, Zea mays
  unsure at all n locations
  Clone ID: LIB3150-064-P2-K1-B1
tgcggccgccctttntttttttttttttttttttttttttttttttttttttttttttaataccaagcttcacatata

SEQ ID NO: 11029 - DNA, 335 bp, Zea mays
  Clone ID: LIB3150-064-P2-K1-B12
ttcccggtgcagccgcgcctttttttttttttttttttttttttttctacggaatccttaaaagatctaaatgaaactttaaaagaggattattcaccaggaaagcaagaaaatttttctaccactttcatcgtcaagcgattctgcaagatttcaataaatataaatgtcgtgcaaatcacaggcaaaaaaagaatcttggcgaagccagcaacacacctgcactgtgacgtgcagcagttctgagtgagaatctatgaatcgagttggagtttctttttttattcaaaacattggtgtgtcaatttgctctctgttctttttaaaaatgtact

SEQ ID NO: 11030 - DNA, 246 bp, Zea mays
  Clone ID: LIB3150-064-P2-K1-B7
gataaaaggaaattattgcttaatgtttaccaaacaccaggccagtacatgtggggagttagaagttattcaggtgggataggtgtataaacactcactacttttgcatgaactagtatctatctggtaatggtggagggcctatcgatttggacggaccaggagatgttatagttctatcatcttcataaagagcttggacatatgatggtggatgatgaggggtatgcgatgggatgttgtttt

SEQ ID NO: 11031 - DNA, 302 bp, Zea mays
  unsure at all n locations
  Clone ID: LIB3150-064-P2-K1-B8
gcaaaacatattcagatattcaacatatctcatatttcttagtttataacaagtgatgctggatcactagtccagacaggagtatctanctcaatagaaaggagtatgaccaccgatgatggagagatttggcgtgtgctcactgtattcaactatcgatgtaggaggcaactgcccaaaacagatctcatgcactgttgataacagaagaaacagctcctgccatcctcgataagtcaacacttcataaacttnccttgctgtggacactccctggagtttttggccacacaacatctctg

SEQ ID NO: 11032 - DNA, 164 bp, Zea mays
  Clone ID: LIB3150-064-P2-K1-C1
aacaaaagaacttcttttaaagcaagatttatttattgagggggcgaatgccattatcataacaacccttttttttacatttcccaattactaccaaataaatcccatataacacctaagttctcccttaaaaattcccaccaataccatatagaaaaataaac

SEQ ID NO: 11033 - DNA, 158 bp, Zea mays
  Clone ID: LIB3150-064-P2-K1-C10
ggggtaattaaaaaagacaaaaggggtccttttaaaccaaacaaattacttttaaaacaaattattaactttattcaacaacaattttaaaggatcaaccacataatttacaattttgcgtctctgaaaatcctaaaactaaccaaaatatctttctt

SEQ ID NO: 11034 - DNA, 122 bp, Zea mays
  Clone ID: LIB3150-064-P2-K1-C11
ctccccacacatatatattttaacaacattaccacgaaaataatacaaagacttacttctaatacaggagaagccctcaccataatatttataccaatttatttatttattctataacaacc

SEQ ID NO: 11035 - DNA, 340 bp, Zea mays
  unsure at all n locations
  Clone ID: LIB3150-064-P2-K1-C6
aatcnatcttcaaacccgcattaaagctttatcagaggaaacacaccncaggagtttttataactcgggggagcancattctatcaantttcctttactnttaccnattattcnaatccccattacaaacatcttcacctaannacctaaanaacacacttttcccacntcatctataatccaanatcantntnccactttaattcctcctnttcccttaaaaattccacttntccttctaaattacatacatctatccatcattactatcatcacattaantcctatattctttatcatcaatcttatcatcaatatcaacacttcttctacctccttt

SEQ ID NO: 11036 - DNA, 424 bp, Zea mays
  unsure at all n locations
  Clone ID: LIB3150-064-P2-K1-C7
aacaacagccaacaggataatgatgttattaacttccttctcaactcttcnagtacgtcatgagaacattcagggacgtggctaactctaacaaggattgaaccaccacagatttttaacaagagtcatcaacaagggccatgtataacatatctattcgatcaggtcatcatcgtcatcggggaggggctgcgcagcggcagctgcaagctcagcttcatgctgctgctgcagggccatatcaatctgcacttctggtggcttcagagcaacagcttcaacaaagtgaaggttctgatcccctgccagcttcctagcgaggtaaaggaagggcttctcaaagttgtaattgctcttggcagaaatctcatagtactgcaagttcttctttccgtggaatgtaacttgcttggccttgacttgc

SEQ ID NO: 11037 - DNA, 219 bp, Zea mays
  Clone ID: LIB3150-064-P2-K1-C8
aacaacatccaacaaaattattttttttttaacttccatctcaactcttttagtacagttttataacattcagggacggcctaacttctaacaaaaatttaaccactacaaattttttaacaacattcatcaacaaattacattataacatatctatctccatcacttatcatcttcattcaataaaaaatcacatcaatatttacaaattcatattaa

SEQ ID NO: 11038 - DNA, 214 bp, Zea mays
  Clone ID: LIB3150-064-P2-K1-D1
attcacaatttctccattttaacacaacattttttcaacataagaaaagaacccattccctttatacacaaaaataactaataacactttacataacatacccaattttccttaatacacaatttattatttactattacctaactaaatacctccatacaattattaacacctcaatttcacccttattctctaactctaaacttacaaaaac

SEQ ID NO: 11039 - DNA, 169 bp, Zea mays
  Clone ID: LIB3150-064-P2-K1-D10
caaaaccaaacacaaaattttttgtttgtccctatttggggggaagaagaaacccccttcccaccaaattccaaaaatcaacccctttcaaaatttttacccctccctgggaaactccggtttaaaaaactaaatatatttttgtccccacaaaaccacaactcccaaa

SEQ ID NO: 11040 - DNA, 476 bp, Zea mays
  Clone ID: LIB3150-064-P2-K1-D3
accggtcctgattcccgttgcgccgcccttttttttttttttttttttttttttttttttttttttttttttttttttttttttttccacccaaagggttttttttatcatttgagagaaatatacctccctttcccacaaaaacaaaatggcaaacccaccaaaaaaaattacagtcttattctttagcgggctcacaagacccttacaacgggagcggaattgcaccaaaattacaaaaggttgagctcaatgggagttatttgggttggcttctcctattgacaaatccttggaaaaaactgttgacggcaagcatatcttaaaaaaccttaaggccatttacatcctttttttcaaatacagctccatcttgaaccttcaactttactccaaacttggcggtaattttcacctttcccttttaacttaattccaaaaccaaaccagtcatttccataaaccctttaaacttt

SEQ ID NO: 11041 - DNA, 152 bp, Zea mays
  Clone ID: LIB3150-064-P2-K1-D5
cttccttattccccttccaccccccttttttttttttttttttttttttttcttattttttttttcctttttcattttttttttttttccaaagaatttttttaaaagaaaaagaaccccccaacccccttctttacttttcctccccttcc

SEQ ID NO: 11042 - DNA, 149 bp, Zea mays
  Clone ID: LIB3150-064-P2-K1-D7
gccggccttccttttttttttttttttttattttaaaatgtcactttttttttatcaaattcataattttcagaacacgggattttaactcgaaagggagggattttttcccactaaacccaaacctggaactattacacaccctttta

SEQ ID NO: 11043 - DNA, 391 bp, Zea mays
  unsure at all n locations
  Clone ID: LIB3150-064-P2-K1-D8
cgaattcccggtgcggccgcgggcgctgacctctaaggcctcctccacttcccgttgcaattaacttaancggtggttatataaccgtttagacggacactttccctgtgcgggaggggtctatacacagcgcccatgttccctttccccaacacacccacaccatttacatttccctccccccccccccctaaagcgacagttttatctttttgtggcccatccaaaccagacacactttcccgccgtcccgtttcctctccagccccgtaaacattttttttctaaacccggcacatccaagtttgacttatattcccaaccctatgccctcccatatgctctccacctttcccgccattccctccgcgcgtggaaacacccacacggc

SEQ ID NO: 11044 - DNA, 124 bp, Zea mays
  unsure at all n locations
  Clone ID: LIB3150-064-P2-K1-E10
aancnaanaccactcccccaagaagaatttttttaaaaaaaaaagaaaacccttttcccctcccttattctttttcttttattcatcacacccccccaaaaaaaaataaacttcctcttttatc

SEQ ID NO: 11045 - DNA, 190 bp, Zea mays
  Clone ID: LIB3150-064-P2-K1-E4
aaaaaaaaaagcaaacttatatattccctcatcatttaatttttcccattacccacataaacattataccttccttattttaccaaattcaaaaaatattccccccccaaaaatccccccccaccacaaataaatttttatgcaacacacccttaccaccctacaattaaaacttattaatttacattac

SEQ ID NO: 11046 - DNA, 339 bp, Zea mays
  unsure at all n locations
  Clone ID: LIB3150-064-P2-K1-E5
aaaaaaaaaagaaaacttatttatttttttttatattttaattataaaatattaataaataataaaaaataanaaaaaaaaaaaaataataaatttttttttataattaataattataaaaaaaaaaattaatataaataatttgnttttataaattaaaaaatataaatacttaaaaaaaaaaagtatattataaattattattaaaataataaaaaaataataataatatattataaaaataatatttatataaattattaaataaaaattaaatatattttataataaatataaaaattataataatataaataaaaatatacaaaaataaataaa

SEQ ID NO: 11047 - DNA, 362 bp, Zea mays
  unsure at all n locations
  Clone ID: LIB3150-064-P2-K1-E6
attcccccgccagccgccctttttttttttttttttttttttttttttttttttttttttttttttctttttttttttttttataaagaattttttttaaaaaagtaaaacctttttaaccccnnaaaaaacccccaacccttctttttccactattatatttaaaaaattcctcccaatcacaaaaccccatttttttaaataatcccaaaaaaaaacaccccttaattttacactcccccctccccccatatttaaacccccccaactctaacccataatcccccccatctcttctcttattcacctaaaaatcccctaattcttcttaatcttatttattacccataccttaatccttc

SEQ ID NO: 11048 - DNA, 363 bp, Zea mays
  unsure at all n locations
  Clone ID: LIB3150-064-P2-K1-E8
ttnttnntnaaccaccccctctttcatttacacttgcatattatttcctccgactgaaaagaaattaaaaaggggggggaagcaaatcaattcctcnccacttatattcaaaaaataaagatgaaaaagagacacttattattcccccccatatgatattaataccggcgtgatctacattaccacacaccacatggcaaacctacaggaggcataacatcattctttccaaggcccacagtcaaaggtaatcatctctgtctgggctcgacagtgcgcacgttagcttctgtcattccttcaaacctgtcctttattatatttacaaagtgaccaaccattttatggaattgcttcaaaccc

SEQ ID NO: 11049 - DNA, 191 bp, Zea mays
  unsure at all n locations
  Clone ID: LIB3150-064-P2-K1-F1
accggtcctgttttcccttttccgcctccctttttttttttttttatccaataattattcattctttttttttcanaaaggaaannanancnaaagcaaagttttttaaaaaaacaaagcaaacccatcttcctaaatccataattcaacaccccatcaccactccctcctcaaacaacacacacccccac

SEQ ID NO: 11050 - DNA, 405 bp, Zea mays
  Clone ID: LIB3150-064-P2-K1-F3
ggccgcccttttttttttttttttttttttttttttaatttttttttttttcccccaagcgtttttattaatgggagcccacatcccccttgggagaagcgggaaatcatccacaaatccaaccaaatgtttagaaacataaaaaaaatagtccccactatatctacagttgcaacatataaccacatttgtcttcctaaggtaaatcttccccctaaaagttacttttttttccctaaaaatttaacctactatattctttaattgttaacctaaataatgctcaaacattttctctttatcttcttcaaaactatcatcaatattaaatatcctcctccttttcttaatttttaacacaaaactttgctttctcttttaactttattcctttcaattttaaaa

SEQ ID NO: 11051 - DNA, 141 bp, Zea mays
  unsure at all n locations
  Clone ID: LIB3150-064-P2-K1-F5
aaaaaaagagaaagactttttaataanttttttatttattaaaaaaaaatataatataaaaatatcaataaatattaataaaaaatatataattaaatatttttaattataaaaaaataatataataaaaaaatttttttt

SEQ ID NO: 11052 - DNA, 235 bp, Zea mays
  unsure at all n locations
  Clone ID: LIB3150-064-P2-K1-F6
tccccttcagccgcccttttttttttttttttttttttttttttttttttttttttttttttttatttttttttttttttttaagaaatttttttaaaaaaaaagaaagatttttaaacaatataaaantaaatattaaaaaattcattttaaaaaaaaaatttaaaaataaacaaacatttaaaaaaatttcttttccctaatttataaccccccaccccccaaaaacaccccc

SEQ ID NO: 11053 - DNA, 361 bp, Zea mays
  unsure at all n locations
  Clone ID: LIB3150-064-P2-K1-F9
gtcccttaattcccgtttcggcgcgcgccttttttttttttttttttttttttttttttttataattttttttttttggaaaacaaacantatcacgagctggaactcaaaagtgtagggtgagaaaccacgtttaaaccacnaacatatcaaagggttattttgtgctactgataattcgactatagcttgcaatacattttttagcaaaagcaaactctgacccacattttctggccccccatttacacgtaactttttataaaaaacttccttatgtcctccacaatcgcaatgggctgccctttttttaacttgaagaccctttctaatacttaaagctcggtggctgtcgtgtccc

SEQ ID NO: 11054 - DNA, 102 bp, Zea mays
  Clone ID: LIB3150-064-P2-K1-G1
ccggtgccggattccggggcgggcggccttttttttattttttttattatatttgtttttttttgtttttttggtaaagataatttaattagggggggggtt

SEQ ID NO: 11055 - DNA, 332 bp, Zea mays
  unsure at all n locations
  Clone ID: LIB3150-064-P2-K1-G10
cggccgcgccttttttttttttttttttaatnnntnnaaaaacgagcccaactataattgttgcataagttctcagttgggggggcataacataataatggaggatgaatcacagattagatcacacacccccgtatcatatgatacggaggtaaccggatcaaattctgctgactccaaattatattatactaacgacacccaacataaattatgatccccaacacgattcgagaaccaagaggtcaagaaatgcactctgtgtgcgcttcagtgacgactgacaagggggcgctgctagccagtgtgaattatagcatcccagaacaatc

SEQ ID NO: 11056 - DNA, 198 bp, Zea mays
  Clone ID: LIB3150-064-P2-K1-G2
cctttttttttttttttttttttttttatttaattaagaggttaaaaaagtgaactgatttgattaaaagggggacttttttcacatgggcgcgacaaaatttcacccattaatgctcaaccaaccactagtatacacccaacatatcttcatacattcctatggaaaaaaatttattctttaaagcacttttcttcg

SEQ ID NO: 11057 - DNA, 300 bp, Zea mays
  Clone ID: LIB3150-064-P2-K1-G3
aaaagaagcgagtatagttattcttgtccaaccaaaccacacataacagggttgtccaacatgataaattggtgggtcatgtaccagtaattcaaacaaacatactgatataattcaacagaaatatgcgattctagcaggtagcggcaaaactaattgggccttggcgtcgcccactcgactcggaggataaggttgtcataaccatacccgttgagcttgttgatggccttctcggcgttctctctgtgaacaaagtttacaaaccctaacctcttttttgacccattcttttgattc

SEQ ID NO: 11058 - DNA, 103 bp, Zea mays
  unsure at all n locations
  Clone ID: LIB3150-064-P2-K1-G6
agattatccatttttttttacncactacatcnnacacatatctaagatatatttttaacaaaagaaagaacactccccccccccttacatcctctacactctt

SEQ ID NO: 11059 - DNA, 199 bp, Zea mays
  Clone ID: LIB3150-064-P2-K1-G9
aatgtaccattcataaagaaaaagttactttgcaaaatggaagactttacatttcaaaacaccatccatgacaaaacaaaacccaaattttgactcccccaattcttaactataatatagatatcgcatttaaacatgcaccccaccagtttaactcttcactcaaaccatcctaaacctctactgtctcaattggggc

SEQ ID NO: 11060 - DNA, 302 bp, Zea mays
  Clone ID: LIB3150-064-P2-K1-H10
gaaaaaaaaacagttcttttctgcttttggtgctcccacgacaaaatcacctgaggaggtctctatcaaacacgagcatagatttattgctaccgtacaaacattgtaacaaaaggcagcagcgagctagtatagctccacaagaaaacatccccatcctcttcctttcttagtagggctccactggtgccctgaactttgctccggcgtagaccgcggcatcaccgagctcttcctcgatcctgagcagctggttgtatttggccaggcgctcagaccggcaaggagctcccgtcttgatt

SEQ ID NO: 11061 - DNA, 383 bp, Zea mays
  unsure at all n locations
  Clone ID: LIB3150-064-P2-K1-H2
attcccctgcggccgcccttttttttttttttttttttttttttttttttttttcattaatagcccttgtttttcattantagacagatttcttaacaacgatggggggggccatttcatacccattccaggttgagtctgctcaaatttcctagtagttaaataatcccaggtcagcgaaggccaattggctatttcttctaatcaagggtgcaaccaacacaaaatggccttcttctctcctaaatggttggcatttgtccgactttttaaaaaaaaaaaaattttgaaaatccgacacacctcaacaaatttattcttttacaattcaagagcccgacttttttaagctccttctactcatttatcccttaactcaaaaa

SEQ ID NO: 11062 - DNA, 211 bp, Zea mays
  unsure at all n locations
  Clone ID: LIB3150-064-P2-K1-H3
cctttccttattcctcgtgcggccgccctttttttttttttttttaaccatttactaaaccattcttttactctgnttcatctnaaacatcacggcggatttcttattagtcttagacggttactctcatcattcacttcattacaaatatttttcaaaaacattttcattttacaactaaaacaaaataaaatatttaaccctctttttt

SEQ ID NO: 11063 - DNA, 353 bp, Zea mays
  unsure at all n locations
  Clone ID: LIB3150-064-P2-K1-H4
ccgcccttttttttttttttttttttttttttttttttattttttttttctttttttttttttttttttgtaaggggcaaaaagaactgaagagggggtctcacaaaacttaanaaaactaaatcaatcaataatatgctatttaagtccaataactccatttggaacaaaacaccattttttttttttcccataatttctaacaaaataaccctaaaactaangggatcttaacctaaccaataattatcttcttttaaaaaccctttaaggtactttcaatttacatatctccctaaatcttactaatattccaaaaattttccttttaaaatccaccacaaatattttat

SEQ ID NO: 11064 - DNA, 340 bp, Zea mays
  unsure at all n locations
  Clone ID: LIB3150-064-P2-K1-H5
aaaacataataccacattttaataagtatcattagtgattacaggatcggattttcaaaaatgatgaacggaaatttctttcatcccaaataactataccanaaaacccattaacatggctaatcctttccactctactcctccttgtcctcttcttcttaatcagtaacccactctaccatctatcccggtggcagggatggaggccaagtcacaccatcaactaaagcaaggaggtacctttaatttaacacttaggtagtgtttgctgggggaggtacttgcttggcgagcatccactggttaagtccaccattctttaatacgtccaccaacttca

SEQ ID NO: 11065 - DNA, 269 bp, Zea mays
  unsure at all n locations
  Clone ID: LIB3150-064-P2-K1-H6
atgcaccaaaatccttaaatatctttgaaagtccaatccaaagcaagagaaggggctactactccntaagaaattattactattcttatggcccacaactttcttaaacctttaacccacgggtgttcctccttccactatccttctcgaacttccttcccttggagcgcacatattgccttggtgtggctttgcngcactccaagaacctttccgaattgccttaccgccttacgtgcattcttgttacccctcaaaaaaactttttt

SEQ ID NO: 11066 - DNA, 115 bp, Zea mays
  unsure at all n locations
  Clone ID: LIB3150-064-P2-K1-H8
gctgttgaatcggcgcttattataatagaaatttagttncatacaaaagcgtcatcttctccaacatatgttgcttttnctacataaacctatcttaaagcaaaacaacatcata

SEQ ID NO: 11067 - DNA, 328 bp, Zea mays
  unsure at all n locations
  Clone ID: LIB3150-064-P2-K1-H9
gccgttccgttcgaaagtttttagtgaaaattttttgattctctttaaaatggtcctgaaaacgaaactgggccgcttcattggccagaagaggtagcctntnaaaggcatccggtttattcgtgctgattctcaggttttcctttttgccaactcgaaatgcaagcgctacttccacaaccttctgaagcctgcaaagcttacctggacagcaatgtacaggaagcagcacaagaaggacatccatgctgaagctgtcaagaagaggccccgcgccaccaataagccatactcgaggtccattgtgggtgcttccttggaagtgatc

SEQ ID NO: 11068 - DNA, 238 bp, Zea mays
  Clone ID: LIB3150-065-P2-K1-A11
tcccgggccgccgccctttttttttttttttttttttttttatttttcttttttttttactctttcattttactttatatttttggtttaatatacttaaatgcagggtccctataaaataatatctactttttttctaacaaaaccccatttaacccaaaataacccccaccccacacaaaaaatatacactcttcttaacaacctaccaataaaaacccttcttcctaccccaacc

SEQ ID NO: 11069 - DNA, 296 bp, Zea mays
  unsure at all n locations
  Clone ID: LIB3150-065-P2-K1-A12
accgggccgggattccggggcgggcgcccttattttttttttatttatattaaaaattataaaatttttttaaaaaaattaatanntaaaaatgggggggggaatataaaaaaataggggggtaacaataaatataaaaaaacagataaagaaaaaaatgaaaatactaaataaaaaacattaaaagaggtaaaaaaaaaaaaaaataaaaaaaaaaaaaaataaaaaaaaaaataaaataaaaaataaaaaattaaaaataaaaaaaattaaaaaataaaggtagagacaattat

SEQ ID NO: 11070 - DNA, 208 bp, Zea mays
  Clone ID: LIB3150-065-P2-K1-A2
ggcttccaaacatataactgactttgaatggttttacgtgtgcaacaaagtttgatggggcgggtacctggttttttgagttcaaaacccaagtgacacaattagtaaagttcgagtggtgcattttactcagaaaataaagccaacaacaggttcaaaccatgtctgaaagttaccacttaaaaatacttcttcacgagttacattt

SEQ ID NO: 11071 - DNA, 374 bp, Zea mays
  unsure at all n locations
  Clone ID: LIB3150-065-P2-K1-B11
gcctgcacgtaccgtccngattccccgtgcgcgcgccctttttttttttttttttttttttttttttttttttttgccaagcaatctttgtcatggaattcttgctgtagaatgacaaacgggagcgggttaacacgatttgctctagttctaacaaggctcaaaactgttggagacattggataaatataagctgagactatgggcaccaacgacagaacacaggcttagtgcgtaggctgcctgttcttcttcttgacaccagacttggcaacctggaggctgcggtacacagagctcagcctaccaagggccgacttggtcagatcaggcctgtaatatttgtcggcaacctggtttttcacagccttggc

SEQ ID NO: 11072 - DNA, 56 bp, Zea mays
  Clone ID: LIB3150-065-P2-K1-B4
ttcatttttttctctatagctttaaatcatgtgcttccttttaggtgttcctttta

SEQ ID NO: 11073 - DNA, 154 bp, Zea mays
  Clone ID: LIB3150-065-P2-K1-B5
ataagaaccaagctttttttttccagcatgctacatctaaactctggggggccccaaaaatattagggggctttcaaacaaatctcaacatcccaactaacttatatcctccccaccctttctaaacttactagcaccagatccaaattttttc

SEQ ID NO: 11074 - DNA, 408 bp, Zea mays
  Clone ID: LIB3150-065-P2-K1-C10
tgccgtacggtccggattcccgggcgggcgcgcctttttttttttttttttaggaaacaaacggcacagtgcatatatagcatcacagtagatatgcaaatgcgcagtaataaagggaacacaggagatccgagaaacatggaaagaaactaagaaagcatgtctcaacacagcaatcacagtagagcgccacttgttcacagcgcatatatgtcatatactaataaatagatgaaaccgtgccatggggccatcaaaatcaggagcctttcaaaaccacctcaattgacaagaatgcaatatgagagtgtcctgaaataatatttaattaatttcgtcgcgacaacccaatgacctacccgagcaaacaggcatcactgttggtgctgttgctgctgtgcagctggt

SEQ ID NO: 11075 - DNA, 538 bp, Zea mays
  Clone ID: LIB3150-065-P2-K1-C11
gcctgcacgaccgtcccgattctcggggcgccgccctttttttttttttttttttttttcattcttcacacaccacgagtaaccttaaacacttgttacaagataggttttaattttaagagtgggtggaggacaaaattttagggccagacgaaaacacatagccaagacaactttataagttcacgtaataagcaacctcatgtccagactcgcctagaaatagaactagcaaacaaactactcggtagcagcatccttctgcccagcctaatttcccttgacaggcctctcaagtttcacaccaacattctttttgtagtcgccgtgaaccttcatgagcttcccaagatcgaacttgggggccttaagtattcttaccttgcggatgaaaacctttttaaattggaagtatcctggaggtaaacttttaaatcttctataccaataacttttgggaatgaactttataacaaggtttttaagtctacctttaaaaccctgtttaattataatcttacctcttttacggtggatc

SEQ ID NO: 11076 - DNA, 372 bp, Zea mays
  Clone ID: LIB3150-065-P2-K1-D11
ccgccttttttttttttttttttttttttttttttttttttttttttttattttttttattttttttttggggggtttttattaactgtagagggacttattttattttcttttttatttttttcaccacaatataacttttgttaattattttcaccataccatcaccaacgtaatttatgaactttaactccataacaagcgcccgaaaaaaccccataaaaacttagtatttgctcaccaaactcaatgaccatgtgagaggtgtgactgtacatcactgccccataatcaaaaacaatctgacaaaggcggggggtgatgatgacataagcccccaaccaaaacaccatcagggtaattcttcccccg

SEQ ID NO: 11077 - DNA, 481 bp, Zea mays
  unsure at all n locations
  Clone ID: LIB3150-065-P2-K1-D2
cggaatnggggagcggtcgcccttggtttttttttttttttttttttttttttttttttttttttttttggactactggtctgaaacaggggggggcaagtcccaactcccagtgaaccatgcaggatgagtccctgaagcacatggactgttcgactttgaccaactcggcacaaaaatcacgcctatttgctagtagggtcaacaggccctgcacatttttgatgtacacaacctttcatgtaaaaaactcaggtctaatgagcctgcgtttcagcctcactaaaaaagagggttaaatttttcgtttaaaagaaaaataactaaacctacaacaccacaggagtttccagacagacggtttgtaccctggtcagttgatgagccgtcgtcggtcattcgatcgcatccaaatggggacaagatcttatggcatggagcatggacacaacaatacaaagaatgggcccggggggcaacg

SEQ ID NO: 11078 - DNA, 65 bp, Zea mays
  unsure at all n locations
  Clone ID: LIB3150-065-P2-K1-D4
gaatnnnnggggcggcgcgcgcttttttttttttttttttttttatttttatttttttctctttt

SEQ ID NO: 11079 - DNA, 416 bp, Zea mays
  Clone ID: LIB3150-065-P2-K1-D5
attaccggggccggccgccttttttttttttttttttttttgtcccggctgcagagaattttttctaaaaaattatggagtccttacaggtgttccccaaaaaaaatggggtcaggattatgtctaagtcatattggtcttgaaagtattcaataaaattgtacatgacagttagaacatgcgtctccggtttggaacaatctcaggggtgttgttcctcatcatggcaacaaactcctggtaattaattcttccatcatgatctgtatctacttcagcaatgatttcttttattgttttatcatctcccatatcatacttcttcagagcttcttccaactcatctactgttatgtacccgctatggtccttatcaaaatattcaaaagctttgagtatatggtcttcccttttca

SEQ ID NO: 11080 - DNA, 417 bp, Zea mays
  Clone ID: LIB3150-065-P2-K1-D6
cggggcgggccggccttttttttttttttttttttttaatcgggcgtaccagtgtgctattatattgctaaaacaaccacagcagcggcgaaacagttcctactacagatgagcttttatctgcatttgtgctgttacctccatacaacaacatgaactgaaattaactcccaacaaggagaaaagaagtaaaaaaggaaaaataaattgaaaagatttcaatctagctcagtaattttctctacttggattttcccaattgtgggtccgtaactagggcagacactgaaggattaacacaagagtccaattattcataaattaacacaacagaaaaggaggggctgaataaagcaagggctcagaactacagcaggatctcactaggcaaagaaattctgcatgaatgggcttttc

SEQ ID NO: 11081 - DNA, 388 bp, Zea mays
  Clone ID: LIB3150-065-P2-K1-E12
attccccggcggccgcccttttttttttttttttttttttttttttttttttttttttttttttttgttttttttttttttggtggggttttttttttttggagttggggggggaaacccgcaatacaattaaactggggaagaaaaaggggtgggccccaaacaaaaattttgaacttttggctaacacaccctgaaaaaacaaaaccggagaggcccccatttggcgccctcactaacaaaaacaaaggctgaatggcgaatgggagttttttttgcccccccccctttggggaacactatgcggcattttcaaccaacaatagcgttacaggggtcggctaatggggggtttgaacatttttaggaagagcaacctgcccctttt

SEQ ID NO: 11082 - DNA, 422 bp, Zea mays
  Clone ID: LIB3150-065-P2-K1-E2
gcaatgcaaataaggatgaaccttgaattcaaatgtcaaaacaaaccagactgcgccgcaactagaacagggaccgggcaattatgttacgaggcaatattctgacaaaacttcacttcagtgccgaggaattacaaaaaaatcacttcagtgccaaaggtggaacaaaacctaacacgaccataattatgacattgcagctagaccacccagagcccagaacagtaatacaaatgtaaacgaacgtttacttcttcttggcgtcaccagctttggtcttcttgacaccacggatcttcttggccctgttcttccgctccttcatttgcttgcgggacttctcaaccttagtagcaagaccattcctgatgaggcggtatttcggctcgaacttcttggcagcctcgaggttgtcgtagatg

SEQ ID NO: 11083 - DNA, 390 bp, Zea mays
  Clone ID: LIB3150-065-P2-K1-E3
attaccgggcggccgcgccttttttttttttttttttttttttattttgttttactttttttttttttgtcattttattatttttttgtggtttgtttttttttgggggggggcggggggaaacgacgggcttttttttttgaagaaaaaggggcgcccaatttttacaataataggaaccaggccggggggtgccaaaaacccttaaacaagaaaaaaaaaaaaactggggcccaaagtttttggaaaccaaatccccattactccaatacacgaataacaattggaattggggggaaacagatttaaatggcggggaaggttttcccggcggggcttttttttttttttttttccccgcgctaataggagggcaagggaacctgggtt

SEQ ID NO: 11084 - DNA, 416 bp, Zea mays
  unsure at all n locations
  Clone ID: LIB3150-065-P2-K1-E4
gggcgggcgggctgtntttttttttttttttttttttttttttttttctttttttttttttgccgacacgctttttccttgggcggtttttttttttttggggttaggtcttttttttttaattaaaaaaaaaccacgggcctctcccaaaaggtggggccaaaaattcccccattgggggccatgccaaaacctcccccccaagagtggggaaattagatgtgcccaacaaacccccccccttaacccttttacccgggattacaattttttgggggggggggggggaaacgaggattttccttcctacccctttaccccggcgcgcggggggggggggtttttaaacacccggttccttggcctgaggggcactgttcatcccaacccccccccccccttggggggggaaaccc

SEQ ID NO: 11085 - DNA, 360 bp, Zea mays
  unsure at all n locations
  Clone ID: LIB3150-065-P2-K1-E5
ggcctttgttattttttttaccaaaattaacttcttgaggcgttttttattatgcaaacactacaaactggcggggggttgtttgaaggtacgacaggagtctagtctcctgaaaccaaagcacaaagcatgttcgttgctcccagaaaatgatggataaaaccacaaccttgtggcactaccggcctcgcaatcaatcggatttcattggctccgcgtgatagctttccaggtctgtatccagctcatctgcaggcttctcaggcttgctgcctttccctcggccctggaactgggcacggcctctcccccggctctggaactgaccacgggctntcccccagctctggaactggccac

SEQ ID NO: 11086 - DNA, 475 bp, Zea mays
  Clone ID: LIB3150-065-P2-K1-F1
cggagcgggcgcgctgtgttttttttttttttgcgaataatcttaattttaaacttgtttccagacaaaatcttaggggcaggggagggcaagtagacaactgtgggggcacgtcataagcaacctaatgtccagactcgcctagatatagaagtagcaaacaaactactcggcagcagcaacctcctgcacagcctcatctccctcgacaggcctctcaagcttcacaccaacatcctctttgtagtcgccatgaacctccatgagcttcccaagatcgaacttgggggccttgagtatcttcaccttgcggatgaagacgttttgaagtgggaagatgctggaggtagacttctcaatctccttaccaataacttctggaatgaacttcgaaacaagttctttcaggtcacatgtagacgcctggttgatcataatctcaaccatcttacggcggatctgacgaatctgggat

SEQ ID NO: 11087 - DNA, 223 bp, Zea mays
  Clone ID: LIB3150-065-P2-K1-F10
aaaaaaaacacatccggggcaactataatatgggggggcagcccacaggaacataataaaccgtgacatccaaacacaaaacggactgacaccaaacgcagccaaccacatagggtatgctgcgcggcacgacaataacagtttttagacattgacaccagaccgactgacaccaaacgaagactggcattgatgacaccagacaagcaaaataaacttattg

SEQ ID NO: 11088 - DNA, 416 bp, Zea mays
  Clone ID: LIB3150-065-P2-K1-F11
gccgcccttttttttttttttttttttttttttttggtttttcctaaaatcaaattaacaatgccaaaagggtaggatatagctcttacagggttgtggtattgcagaaggtgaaatagcaagaaggtaccaaataaatagataaaagtgcacaggctaacagagctcaacagttcacacaataacagcaacgaccacaaacaaaacttgtaatgatgaaaactaggtattgctaaagcaggcgcaggatcgcatcatttcttcttggcagcagccttggtcaccttggcgccggttgggtccttcttctccacactcttgataactccaacagcaaccgtctgcctcatgtcacggacagcaaacctaccaaggggaggatacgctgagaatgtcctcaccaccatgggcttggt

SEQ ID NO: 11089 - DNA, 269 bp, Zea mays
  unsure at all n locations
  Clone ID: LIB3150-065-P2-K1-F4
tttttnttttttaacaacaganactagtagttaaattactaatctaaagagaaccatcatggacagaggaattatgggggggggagggcccaatataaaacctctaacaagcaaacaacactcagcaacctactcgcaggcaggagatccaaaacaacgggatcgcaaagagaatcaactcagtacttgtagtccttgacgtgaaggctctcggcgtcggtggcaacatcacccttgtaggtgccgagggttgccttggagtccccccc

SEQ ID NO: 11090 - DNA, 236 bp, Zea mays
  Clone ID: LIB3150-065-P2-K1-F7
ccgcccttttttttttttttttttttatataaaatagcgaagcttatgctctcaattcaactgactataagtcagaggccttatctcatggaggatggggtattatttctacaatacataatcaatacacactgctagtttaaaatataatccacacctttctcgtatggcatcaagttatactataactagaatctgtcaaccacaacgatgttaaaaatccaatcaagcatata

SEQ ID NO: 11091 - DNA, 470 bp, Zea mays
  Clone ID: LIB3150-065-P2-K1-F9
gcctgcacgtaccggccggattcccggggcgccgcgccttttttttttttttttcgtcataacaatcgcattttatttcctaataaccaatcaaacacaagcaccaaggtatcattcgaaccatggatggaaaaaagggtgttggtttagttcaaccaattattgtttgcaagctcattattgttcatgctggctcgctcgcacccaatggtacgtgccatcttcttttcaataccataacaaaatagatgcatcgaagggtactgctacgcaaggatgccttcatcgcctatcagacgccaccgattctgcagagaacagatatttcactcgagagagcacctagtcgtgcgctggatcatatggatggtccctggatgggatctccagaatagcatggacggtcttgttgtagcttatccaccagaaaccttattatgttggcaatttactgacttgtgagcacaata

SEQ ID NO: 11092 - DNA, 227 bp, Zea mays
  Clone ID: LIB3150-065-P2-K1-G10
gccgcccttttttttttttttttttttttgaaaagaaaaatttaccaaccatatcattcagacagcaatgcggcagacatttcacccaagtgtgcgggataccctaacattccacatacattcaagtccccctatatatcgaaaccatcactctagcaaattcccaaacagaatataaaaggtacccaatctattccttgtttgcatttttaatattgcaacaaaaa

SEQ ID NO: 11093 - DNA, 422 bp, Zea mays
  Clone ID: LIB3150-065-P2-K1-G4
ttaccggtgccgccgcgcctttttttttttttttagcactaatgataggatacaaaatttgcctgcatcctgaacttgatcatgaacacgcagttgtatttcagattgtggttgcaagggctgcatatttcacgtttcaatgcactcacagaaatttcaagtatcatacttgttccatgtcagacacagttctgcagtcttaacaacgggatctggaacaatgcccatcaaacacaacgtgacgtggaacaatgttcatcagtcttaacagctcaaatagacgcagatcatatcatccatcactacccctaccagataaattgagccactgttaccaacaccatccagcctagtactattagcctaataagaagtgaacctggtgaccggcttggagccctcggagaccgggtgcttggcaa

SEQ ID NO: 11094 - DNA, 204 bp, Zea mays
  Clone ID: LIB3150-065-P2-K1-G5
agggggagggccaaacaggggatgggcgggctaaaaaaattcttcaaattataatggcaaaaaaaaaacaccgattaccatatttttctttcataaacttattccttacactttaaacaaacaccaaatggtccccaaaacattttacaaaacacaacttcttacatatcttatatgttcaaataatatccaactttaaacccc

SEQ ID NO: 11095 - DNA, 399 bp, Zea mays
  Clone ID: LIB3150-065-P2-K1-G6
ccgaattcccgagcggcgcgcgccttttttttttttttttaaacaaacaatgtcactccaactggggtgaattttactaagatacatctgaatggcatatatagttacctaaatgaggttacaggcagtccatcgcacacaccacgccttgtcaggatataacagcaactaaacaagcaagatgcaccagaaatagacgacgcagacacgcagtacatactaacacagacacctggtgaagaaaagttcatctaggattgcatcgcgtcctctccatctgcttccccgggcacttcgttgaacatgtactggctctggtactccatcaggtactgcgtcgaccgcttcacgttcaggaacaactggtacacccggctaatgtcctccatgtcgaccacc

SEQ ID NO: 11096 - DNA, 305 bp, Zea mays
  unsure at all n locations
  Clone ID: LIB3150-065-P2-K1-H12
ggataaacgaagcgaactggatattacactggggtgggggccaacggaaatcccgtgcggcaaagacnaaccacataatccataatcccctaacatataggcacattgtgatagttgtagaattaggccattcactggcactaaatagtttagtcaaaatgggacagcttattggtaccgttttagagcgctagcttactgatcaggaaagaacggaagagtgctttggagaatgaaaacaagcctaaaagtatcaagcccgcccaaatgcttaacaagggaggccccaactaccttgatgataa

SEQ ID NO: 11097 - DNA, 312 bp, Zea mays
  unsure at all n locations
  Clone ID: LIB3150-065-P2-K1-H5
actntagaggaaacacaaagaattgtacaggctatcgcaagcgtcactgttggatagtaaatattggagcgggtcggggtcacactcccacaaaacaggaccaaactcttacttcaattttttagccccttaatttaaaaggctacaaccaaatgtaggaaacaggttgactactcagtccagaacaggaaactatgttaaatgcaatgattcagaacttggtttttaagagaacttcacgctttcttgagctgtaaattattacttctaaactttaccaacccttttcaggtcaccattgcgtgcaccacc

SEQ ID NO: 11098 - DNA, 258 bp, Zea mays
  unsure at all n locations
  Clone ID: LIB3150-066-P1-N1-A1
tttaattttattttttttttttttttttttttanttttttattttttaattttttttatttttttttattttttttttttattttttttttttttttttttttttttatttttttattattattttttgtttatgtttttttttttttattttttttttattttttttttttgttctttttgtatttattattttttccttttcttttttttttttttttttatttttttttttttattttatgttttttttttttta

SEQ ID NO: 11099 - DNA, 271 bp, Zea mays
  Clone ID: LIB3150-066-P1-N1-A10
ttgtggacgcgtggatcaaggccacccgcgggacgttctacacgcacgtgggggagcgcgacatggtcgagaccttagagcgccccttcgagatgtgcattcgggacggcgacgccagctgcgtcatgtgctcctacaaccgaatcaacgggatacccgcctgcgccgacgcgcgcctgctgtcagagaccgcccggagccagtggcagctacacgggtacatctgctctgactgcgactccgtacgcgtcatggtccggtacgccaagtg

SEQ ID NO: 11100 - DNA, 422 bp, Zea mays
  unsure at all n locations
  Clone ID: LIB3150-066-P1-N1-A2
nnncatcntcttatcttctatatactttnccctacctctgcagcgtgggccgtatccaaagtgggggggccaattataaccacnacaatcattgncaanatcaatattnnaaataactnttttntaatgatcattaggctntttgcctgngtctnnctttaaagngaggattnnnngtttngtttaaatttatnnnnnntttaatgngngngnttacataaatatattttttaatttcccacccgtttaaccttttatttattatcantnnttatttttttcattggtctttanttctctttttctttattttttnaantcattttattctttttcttagntatttttttatatattaatctttattctccttttatatataatcatattatatttctactataattattttttttaatatt

SEQ ID NO: 11101 - DNA, 336 bp, Zea mays
  Clone ID: LIB3150-066-P1-N1-A3
ggcggagcacggaggcgaaggaggaggagcagcagcagcaggcggcgccgaggagcggcatcccactcagtgcttgcaaccatggctaggggattgaagaagcacttgaagaggctcaatgcgcccaagcattggatgctcgacaagcttggcggagcttttgctcccaagccatcttctggacctcacaagtccagggagtgccttcctctgatcctcatcatcaggaacaggctcaagtatgctctgaactaccgtgaggtcatttctatcctgatgcaacgccatgtactttgtgatggcaaggtcaggactgacaagacctaccctgctggg

SEQ ID NO: 11102 - DNA, 307 bp, Zea mays
  unsure at all n locations
  Clone ID: LIB3150-066-P1-N1-A5
ttcgtcgtctgccttctgcgcctccatttgggcgtgtgtcccttgcaaggggaatcgcacctccaaccatgggtaaagagaagtcccacatcaacattgtggttattggccacgttgactctggcaagtcgaccaccacaggacacctgatctacaagcttggaggcattgacaagcgtgtgatctagaggtttgngaaggaggctgcttgaatgaacaatctgtcctttaagtacgcgtgggtgctcgacaagctcaatgtttgnccttattagaaatattacnattggttattggctcttaggaa

SEQ ID NO: 11103 - DNA, 266 bp, Zea mays
  unsure at all n locations
  Clone ID: LIB3150-066-P1-N1-A8
tccgccgtctcttccccgctccctcgcgctcgcaagtcgcagctccggccggcctattttgcagaattcggtagatttgtttccttcatgggtcgcaccatcaagaaggccaggaaagcgaaacccaagaagtctaagaagaaaactgaagcgtcttcatcgtccaatcatgcggttgcctgtggtccggctaaggtctggcaaccgggtgtagatgcactggaagatgnggaggagcttcagtttgatcctgaggcttataatta

SEQ ID NO: 11104 - DNA, 166 bp, Zea mays
  Clone ID: LIB3150-066-P1-N1-B1
ctgttatctatctagaagcatcactcaacggaccgtaggttgcctgatcgggggggcgctccatggcgatcatctccgacttcaaggacgacgaggcaccggagcagcagctggcggccggccacggcgtcaaggtggccctcgtggcggcgttggcagaggagcg

SEQ ID NO: 11105 - DNA, 136 bp, Zea mays
  Clone ID: LIB3150-066-P1-N1-B10
tttcctgatggacttcatccccaacacggcggctctctaggactgagagggccgcctccacaaggagaccatcgaaatgctagcggcactcaccatggccgatctcccggacggacagcgccagactgaggtcttc

SEQ ID NO: 11106 - DNA, 116 bp, Zea mays
  Clone ID: LIB3150-066-P1-N1-B2
ccttgatcacactagtattgttactgacggcgggtgctggacagactgacgggtgtgccaagatcttatctaacatcaaaccaatcattatttttcacctatttcatagatttttt

SEQ ID NO: 11107 - DNA, 283 bp, Zea mays
  unsure at all n locations
  Clone ID: LIB3150-066-P1-N1-B3
cactcgcgaactccatttcgatcccatttgaggtcaacccatcctcgtttgctgcgtctagcagcctctcaccctcatggccaagatcaagatcgggatcaatgggttcggcaggatcggaaggctggtggccagggtggccctgcagagcgacgacgtcnagctnnnnnncgtgaacgacccctttatcagcaccgattacatgacctacatgttcaagtatgacactgtgcaccgacagtggaagcaccatgaggtcaaggtgaacgacttcaagaccctt

SEQ ID NO: 11108 - DNA, 250 bp, Zea mays
  Clone ID: LIB3150-066-P1-N1-B4
cccttatccagtatgagaacaactgacaaggtggtgttttatccaagctgggaggggcttactgtctgttagccataggacggtcagagaacttctacagagccttttaggctgagcttgcagatgccattcctgtggtcaagacctttattggtggcactagaataataggccgactttgtgtttggaaacaataatgtacttctatttacacatactacaaccgaccaagagctttagcatttgagga

SEQ ID NO: 11109 - DNA, 422 bp, Zea mays
  Clone ID: LIB3150-066-P1-N1-B6
taagaactaccatcctactgttatttgtcgagcatacaccaaagcacttgatgatgctattgctgtacttgacaaaattgcaatgcctgttgatgtgaatgatcgtggggcaatgctaggccttgtgaagagctccattggtacaaaattcactggccagtttggtgatcttattgctgaccttgctattgatgctacaacaacagcaggcgttgaccttggtcagggtatgcgtgaagttgatatcaagaaatacattaaagttgaaaaggttcctggtggtcagttagaggattctagagtccttaaaggagttatgatcaataaggatgttgtggctcctggaaaaatgaggagaaagatagttaacccccgtatcatcctgttggactgccctgttgagtataagaaaggagaaaatc

SEQ ID NO: 11110 - DNA, 300 bp, Zea mays
  Clone ID: LIB3150-066-P1-N1-B8
ccgctcttggatcactagctagctctcgctcgtcgcaacaagcgaagagcttggtcgttttggttatggcggtgatgaagagcaggacggtcatcgtcgccgccgttctgttggcggttgtcattctgtcctcgctgtgtccatgctacgaagccggcggctgcatcgggaagccgtccaagacgccgtcgccgaaaaggccctgcttctcgccctactccgaggaccactgtgaccgtcagaactgtcgcttcgtctgcatgtcgcacggttacagtgacgttggcttgtgtgactaga

SEQ ID NO: 11111 - DNA, 374 bp, Zea mays
  Clone ID: LIB3150-066-P1-N1-B9
ctgggatctatctagaagcatcactgaacaaaccctaggttgcctgatcggttgatcgctccatggcgatcatctccgacttcaaggacgacgaggcaccggagcagcagctggcggccggccacggcgtcgaggtggccctcgtggcggcgttggagaggagcggcggcgcgctccccttcctacaggcggctatggatgtcgcccaccgcaggtccggcctgttccgcgacccttcggcggtgagcaaggtcaccgcgatggcggcggccgtcagggcgcagatcgaagccgaggagagggtgaccagggaggcggaggccaagaggaaggcggaggaggacgagaggaaggcggaggccgaggcgcaaagg

SEQ ID NO: 11112 - DNA, 142 bp, Zea mays
  Clone ID: LIB3150-066-P1-N1-C1
tttatctcaacctcccaaaaagggtagcggattgttcttttccctccgactgggtcggctcacaaaaaggcggcattacaattccaccccttctgttccgccaagttcggagcgcaacgcaaggcgggcgtttgagcaagaa

SEQ ID NO: 11113 - DNA, 170 bp, Zea mays
  unsure at all n locations
  Clone ID: LIB3150-066-P1-N1-C2
ggaaaggggagacctggaacgaccgtcgggggtagagcggntgcgcgctgcgccgagagctggngagtggggactggggaccgaattgaaggcaagaaagtagaaacgaaccaccacaggcggcgcggaaatggatgagcgcggggagaaggaggaaggagcaacggagt

SEQ ID NO: 11114 - DNA, 108 bp, Zea mays
  Clone ID: LIB3150-066-P1-N1-C3
tcttcattatcgttgactacatgaacctcctggttggggaggtttccgtcaggggcgcgattttcgacgatggcattccgctcgagaccgatttcttcggtgggggca

SEQ ID NO: 11115 - DNA, 435 bp, Zea mays
  unsure at all n locations
  Clone ID: LIB3150-066-P1-N1-C4
ttgttctctgaagcatcacgagttctcctgggcgggacgcctacagagtttgggcatctctctattgttaaggccacaagagcggtngggaagctcaagaagaatgcattcntaccccttttggnccaagcctcttagctctccaccacctcttctcgcgccccttgtctttactttgttcttttcagnactcctcttaaaccggtctattcaaccactctataagtgcttttcttgctcactcatttttttgagccctttctcgtttatattttcctgttagatgtccattttttttttctacctttgttaaatcttttttttttttttgtattcagtattagtgttccataactaattttttctatcttcaaatttttttcatacttattttgttatcttaattatttgtatatatatgttatttatttcttt

SEQ ID NO: 11116 - DNA, 93 bp, Zea mays
  Clone ID: LIB3150-066-P1-N1-C5
ggtgatcagaaaaatgttctaccaattcatgcatgtaccaaaggataatataagctgctcaaaaaatcgtggttaattagagttttttgttgg

SEQ ID NO: 11117 - DNA, 338 bp, Zea mays
  unsure at all n locations
  Clone ID: LIB3150-066-P1-N1-C6
gggggggtccaaggaaaaaagggggtgaatcttatacaccgttcaggctcaaaggatttttgacaagtttttcaacaaccatcatccagtcaaacagaacacgacaccccttatttgtacttatcaaaaccatgcaattacgtgcacaccagttcataacatcagaaaatgttggatacacataatccggaaagcaagcttgtgagcaacannnntntgacttacttacttacttcgtaaaattgacacattttttagctaaatcactatcttttcttattccatgtctaggaacttttccttgtcttttattcttttacaatatcctttcccttata

SEQ ID NO: 11118 - DNA, 230 bp, Zea mays
  unsure at all n locations
  Clone ID: LIB3150-066-P1-N1-D1
tacgcttccccttccctcccgctcccattgacggcgtatctttnntngaggcgccgcttcaccagcgacgcgcccttctcacccacctcgccgaggaagtatttaccgatggagacgccactgtcttccaggaggatcaccctctcgctctccgccgcatatgcccagaagagcgcctccgccgttccggactccgnctgtcctttttcccgttccaagaacaccgcctt

SEQ ID NO: 11119 - DNA, 376 bp, Zea mays
  Clone ID: LIB3150-066-P1-N1-D5
tacagacaagacctaccctgctgggttcatgggtggcatttccatccccaagaccaatgataactacaggctgctgtacgataccaagggccgcttccgccttcacccaatcagggatgaggatgctaagttcaagctttgcaaggttaggtctgttcagtttgggcagaagggcatcccgtacctgaacacgtatgacggccgcaccatccgctaccctgacccgctcatcaaggccaacgacaccatcaagatcgatctggagaccaacaaaattgtggacttcatcaagtttgatgttggcaacgttgtcatggtgactggcggtaggaacacttggtcgtgtgggtgttattaagaacagggagaagcacaa

SEQ ID NO: 11120 - DNA, 214 bp, Zea mays
  Clone ID: LIB3150-066-P1-N1-D7
ttagagagagagagttgtacaaggctgcgggccggccgcactgtaggggtgccttgagcctgttcaccgccgtcgcctgccgcctcacatccacagcatccatggccgacacagctcgcctcttcatgctggtggcggtggccacggcggcgctcgccggccgctcagacggcgcgtggtgcgtgttccggtcgtaccttgctttacagttctc

SEQ ID NO: 11121 - DNA, 416 bp, Zea mays
  unsure at all n locations
  Clone ID: LIB3150-066-P1-N1-D8
tcttccgtccgctgcattcctgctcggtgggtctcctcgctctcagaccacagttgccgccgccgccgccctaagccagggtgctgaggctttcgttggcctcttcgccggcagcgagcacccaccagcagttctgtagaaatggctgatggtgaggacatccagcctcttgtctgcgacaatggcaccggaatggtcaaggctggttttgccggcgatgatgcaccaagggctgtattccctagcatcgntgggcgtcctcgtcacaccggtgtcatggtagggatggggcagaaggatgcatatgttggtgatgaggcacagtccaagagaggtattctcacgctcaagtaccccattgagcacggtattgtaagcaactgtgatgacatggagaaaatctgggattacacttt

SEQ ID NO: 11122 - DNA, 255 bp, Zea mays
  Clone ID: LIB3150-066-P1-N1-E3
tcttcgctcaaaaccctagagctctcgcctggtcggcttcgccgccggagcgagctccccatcttcatccgtcaaccatggcgacccagatcagcaagaagaagaagttcgtcagcgacggtgttttctacgccgagctcaacgagatgctgacgcgggagctggcggaggacggctactctggcgtaggaggtgcgcgtcacgccgatgcgcacggagatcatcatccgctccacgcgcacgcagaacgtgctt

SEQ ID NO: 11123 - DNA, 290 bp, Zea mays
  Clone ID: LIB3150-066-P1-N1-E4
tccacgcgtccgatggttcaacaacttggtgggaccaaaaatgagtggggatggtgcaagcaaaagcttggtgctaatgcgattctggctgtgtcattagctgtttgcaaagctggggctagcatcaagaggattcctttataccagcacattgccaacctagctgggaacaagcagttagtgttgcctgtccctgcattcaatgtcatcaacggtggttcccatgctgtaaacaagcttgctatgcaggagtttatgatccttcctactggagctgccttatttaagga

SEQ ID NO: 11124 - DNA, 354 bp, Zea mays
  unsure at all n locations
  Clone ID: LIB3150-066-P1-N1-E6
tcttttcttttttgttaaaggcaggtgcagcgtggggggaagaagccaagggggggggggnannnnncagagaggcatagctttgcaatggatcttccgttgggaatgctgntgtcgctgctgctggtcctctccgtcttgtcctcgtcatcttcgtcggctgcttacacgctcgccgtcagctctttgttctcactgcctgtttcttcttcttgtcaatgctcaagactccctattcaattctcactcaacttaacttctatacatttccccggtagctgaacaagtatctttttcttgttttaacctctttttttctttcttgttcatttcttttttttattttttactttt

SEQ ID NO: 11125 - DNA, 213 bp, Zea mays
  unsure at all n locations
  Clone ID: LIB3150-066-P1-N1-E7
cagagcacaagcgacggctggtctggggtgatggaacaaggtcaaactcagatagaagggaccatgggcattcttatggggcatactgacagggcctcagttgacttccttgaggttcattctactaggaagcggatgcccgtnttcttccgaagatagtatgatggtagatcaaattggtggtgatcgaaacggtttcaggtgtatgattac

SEQ ID NO: 11126 - DNA, 179 bp, Zea mays
  unsure at all n locations
  Clone ID: LIB3150-066-P1-N1-F1
tttgcagcgtcccggcgcgcggccggccattgttccctaaggacccatcgagcgaccgatctttcccttggaccgcgacctcaggtcagtctgtactacccactgtgtttaagcatataaataagcgcatgagaagaaacttacnaggttttccctagtaacaaccgagctaacctgtt

SEQ ID NO: 11127 - DNA, 192 bp, Zea mays
  Clone ID: LIB3150-066-P1-N1-F4
tgctttgttactcccgtgaaggcgccgggggggggggaccataccttatggttgtttacaaagctcgaaacctaggtcatgatacccctcacaaccacgatcctgaccatcgatctccgcaccgagccatattgcattccgtccccattctgcgtgaggtcatggatgaggctgtcttcattgtcttctctc

SEQ ID NO: 11128 - DNA, 357 bp, Zea mays
  Clone ID: LIB3150-066-P1-N1-F5
tccacaccacacctcctcgcttccactccgctcgtctgacatctcgtcccgtgctttcgtttcgaagcctcgcgagccccgacgatggccaccgccgcggtgtcggtcgacgagaagctcgacaagcttcgcgccgaggtcgccaagctcgaccagatcagcgagaacgagaagtccgggttcatcagcctcgtgtcacgctacctcagtggggaagcggagcagatcgagtggagcaagatccagacccctacggatgaggtggtggtgccctacgataccgtctcgtcttcttccgaagatctcgaggagacgaagaagctgttggataagctcgttgtgctcaagcttaacgga

SEQ ID NO: 11129 - DNA, 100 bp, Zea mays
  unsure at all n locations
  Clone ID: LIB3150-066-P1-N1-F6
tatgtaatgcctcgcctcattatacattgggccgggcccctcagatcttgggtggctcatttctaccacccatcgacctttatgccagcctnggattatt

SEQ ID NO: 11130 - DNA, 376 bp, Zea mays
  Clone ID: LIB3150-066-P1-N1-F9
ctcctctctcgcatccgcagcctctcgaggtctactccatcccctcgatcgggaagcgcagcagcagcagtcaggcggccatggacgccagcgcagcaggagccggcgggaaggcgaagaagggcgcggccgggcgcaaggccggcgggccgaggaagaagtcggtgacgaggtccgtcaaggccgggctgcagttccccgtcggccgcatcgggcggtatctgaagaagggccggtacgcgcagcgcgtcggcacgggcgcccccgtctacctggccgccgtcctcgagtacctggccgccgaggtgctggagctggccggcaacgctgccaaggacaacaagaagacccgcatcatcccgcgccacgtgctcct

SEQ ID NO: 11131 - DNA, 367 bp, Zea mays
  unsure at all n locations
  Clone ID: LIB3150-066-P1-N1-G4
ttggatgggtacccagcgttcgcgctggtnaacgatntcaccgtcgaagccgggaagcactctctgggacagagccacccggtacgccttgtgccctacaaccccgagtacgttgacgagtcggtgctgtggacggagagcctcgacttttggcacggctttcgctgcgtgcgcatggtgaacaacatctacctcaacatggacgcctttcacggcgacaaggaccacttttgttttcacgacggcaccactcttgtgcttttggagtgtgccatggggtttctctatcgctttatgatcctttctttgttattcttggtcgttctatatgtatnctttgtatccttttttatnttttttcgttttt

SEQ ID NO: 11132 - DNA, 418 bp, Zea mays
  Clone ID: LIB3150-066-P1-N1-G6
tatcaacacagagaaggttgacagtgtgggactcatccgtgggatcaagaagaggatcatgctgaaggatgcgagggtccagtacctctccttggtcctgcttgagaccattgtcaagaactgtgacaaggccttctcggaagttgcggccgagcgggttcttgatgagatggtcaggttgattgatgatcctcaaaccgtggttaataacaggaacaaggcccttatgctcattgaagcatggggggagtctggtgatgaactccgttatctgccagtctatgaggaaacatacaagagcttgaaatcaagaggagtgcggtttcctggacgtgacaatgagagcttggctcctatatttactcccgcgcgatcagttgctgaagctgatgttgatgcaagcttgccccagcaggtg

SEQ ID NO: 11133 - DNA, 285 bp, Zea mays
  unsure at all n locations
  Clone ID: LIB3150-066-P1-N1-H1
tatgaacacacgtgagacagcttttgcccttaggaagttgtcactcaccaaggccaaaagttaccttgaggatgtgatcgcccacaagcaggccatcccgttccgcaggtattgtggtggtgttgggcgcactgctcaggctaagtcttgccactcaaatggtcagggnnnctgtcctgtcaagtttggtaaattcattctagaccttctcaagaatgcagatagcaattcttaggtgaaaggacttgatatgtataccctctatgtgtcccacattcaagttta

SEQ ID NO: 11134 - DNA, 415 bp, Zea mays
  Clone ID: LIB3150-066-P1-N1-H10
taaaatgtcgctcctactatgatacagcggtggattaaaaaggctccgactgagaaactccatcttccagaacctaatattttcgtaccaaaggatttatctcttaaagaagtgcatgaaaaggttacttttccaacagtgttaaggaaaagcccactttcacagttgtggtataagcctgatacactcttctccacaccaaaggttcacattatcattgatttccactgtccattatccagccactcctctgaagcagttgttgctactgagctctttgttgatttgttagtagattatttgaatgcttatgcttatgatgctcaaattgctggtttgttctattcaatatatcttacttctgctggattccaggtttctttaggtggttacaatgacaaaatgagagctctct

SEQ ID NO: 11135 - DNA, 89 bp, Zea mays
  Clone ID: LIB3150-066-P1-N1-H4
tgaggcggcgtgccgttctcgatccaggcgcccgaggagaaaatcgagatggactcgcccgccctttattcccgcttcacttgccgaag

SEQ ID NO: 11136 - DNA, 257 bp, Zea mays
  unsure at all n locations
  Clone ID: LIB3150-066-P1-N1-H5
tgtatagagaaggaaaaatatccccaaacggtagctcccgatctcgatggcggagcgcgctcgcgtcttcttcgacatgaccgtcggcggcgccccggcgggccggatcgtgatggagctgtacgccaacgaggtgcccaagaccgcggagaacttccnngcgctgtgcacgggcgagaagggcgtgtgtcaagttcgggaagcctctccactacaagggctccacctttcatcgcgttatcccttagttcatgtgc

SEQ ID NO: 11137 - DNA, 416 bp, Zea mays
  Clone ID: LIB3150-066-P1-N1-H6
attccccagggatgaccccaagaagccttgcgcatgtcactgccttccttggctacgaggctggcatgactcacattgtccgtgaggttgagaagccaggatccaaactccataagaaggaaacttgtgaggctgttaccatcattgaaacccctcctcttgtcattgttgggcctcgtggcatatgtgaagactcctcgtggccttcgcacactcaactctgtttgggcccaacatcttagcgaagaagtgaggagaaggttctacaagaactggtgcaagagcaagaagaaggctttcacaaagtatgctctcaaatatgaaaatgatgctggcaagaaggaaattcagctgcagcttgagaagatgaagaaatatgcttctggtatccctgtcattgctcatacccagattag

SEQ ID NO: 11138 - DNA, 76 bp, Zea mays
  Clone ID: LIB3150-066-P1-N1-H9
ttcgtgaccagcgaggcgagatcgggggcggggagcctgagcacgggtgggagcatctgaatccgtcgccgtcatc

SEQ ID NO: 11139 - DNA, 156 bp, Zea mays
  Clone ID: LIB3150-066-P2-K1-A12
ccttttttttttttttttttttttttttttttttattttttttttaaaataataaattttttattaagaaagttttattaaaaaaataaaagattttataatattaatttataaaaaaaaaaataaataattaattaaataaaataaatttataat

SEQ ID NO: 11140 - DNA, 167 bp, Zea mays
  Clone ID: LIB3150-066-P2-K1-A3
ttcatccaattttttcacaaccattaattccacactaatcctctcaaccttcatttcattccatacattcttaaaataaaagcgtaagtatcaaaaataactctaactactcacccccataatttcttccacaatttcttcattcaaaactttaattgaccatgacc

SEQ ID NO: 11141 - DNA, 280 bp, Zea mays
  Clone ID: LIB3150-066-P2-K1-A5
ctttttttttttttttttttttttttttttttttttaatttttttattaatatatttttttttttttagaaagttttttttaaataaaaagaaggtttttttttttttttttttttttatttttttattaaataaaaaaaattttttttttaaatttaaaaaaaaaaaattctataaaaataaaaaaaaaataaaaaaaataaaaatttttaaaaattataaataacaataaaatttaaataaatataaaaaaattattaattaaaaaaaatatataatt

SEQ ID NO: 11142 - DNA, 219 bp, Zea mays
  Clone ID: LIB3150-066-P2-K1-B7
ccggtcccttattcccgttgccgccgcccttttttttttttttttttttttattaatttaattttttttttttatccttttctcttttcccaaggagggttttttaaaaaaaccccgagcctcctttcttctcccccatccaaaccacccaaatcccccctctttctctctctcccccccccctaccccctaacccccacccccctatctccccccccc

SEQ ID NO: 11143 - DNA, 188 bp, Zea mays
  Clone ID: LIB3150-066-P2-K1-B8
tcccatagcagccgcccttttttttttttttttttttattatcttctaaatctttttaatttaattacactctttttctcaaaaagttttttttaaaaaaaaaaaagcccctctcctctcttctctcaatctttatcctcacccacttcatacttaccaacttacacttcttcttttattacttaaaa

SEQ ID NO: 11144 - DNA, 248 bp, Zea mays
  Clone ID: LIB3150-066-P2-K1-C11
cccttttttttttttttttttttagaaattattaaattttttttataaaatataaaaaattaattaaagaaagattttttttaaaaaaaaaagaacacaatttttttaaaattaacaaataaattaatatattataatataactcataaattattaaaaaaaaaaaaaaaaaaataattttaaaaaaaaaataaaaaaaataataaattaaaaaacattttattaaataatataataaatactttaat

SEQ ID NO: 11145 - DNA, 248 bp, Zea mays
  unsure at all n locations
  Clone ID: LIB3150-066-P2-K1-C12
cggtccggccgcccttttttttttttttttnttnnnnnnncaagaaaatcattctccgactcgattttactgatcacagaaagattatctgggggggaaggggaggccttttcctatataaaccaccaccttaaccagccttatttttttcaataacccctttacaatgcaagggaattaacaacttttacaacattaagtgttttaaaccaaacaattctttaaaacaaacacccattacccttttt

SEQ ID NO: 11146 - DNA, 426 bp, Zea mays
  Clone ID: LIB3150-066-P2-K1-C2
ggctcttcggagtatcatttcagtaaaaatatacgtgggggggcacataaacagaagtgcagacgcagcaaagaagattacaattattctctagcgggctcacatgaccctcacagcggaatcggaatgcacatgaaaattacaaaatatagagctcagtaggagggattaggcttggcagttcctgtgacatgtccttgggaaaactggggatgataaacattgcttaaagatcctcagggccattgacatccttgttctcaagtacgtctccatctggaatctccaacttcactccaggcttggcgataattgtcaccttgcccttgagtgtaattccagagccaaaccagacatcaccagaaaccttcaagctgtcaagctcaactatgctggggatggacttgaacccgaccaaggaaattg

SEQ ID NO: 11147 - DNA, 179 bp, Zea mays
  Clone ID: LIB3150-066-P2-K1-C6
ggaagcaaaatttcatttccttataattataaattcctaacgcacgatttttatagtccttgggaagccaccattccaaaactgcccaactaaaagtaaaaaaacatatttattcccacccaaactacatttggtcaaccagtaaataccactgccttattacttataacattgttgtg

SEQ ID NO: 11148 - DNA, 164 bp, Zea mays
  Clone ID: LIB3150-066-P2-K1-D1
ccggtccgggattaaccgttcggccggcctttttttttattaatttaatacatttaaattttaattttttttttaattatatagaactaaaatttaggagggggtttttttaagaaggagaggaggttataatattttattaaaatctaaaaaaaaataaataa

SEQ ID NO: 11149 - DNA, 429 bp, Zea mays
  Clone ID: LIB3150-066-P2-K1-D10
ccgtaccggtctgaattcccgttgcggcgccctttttttttttttttttcattcattcttttatttatttcattcattcatttcacccatgacaaagatggtctctttttatttccgagcgaggatttactggacattgtcatgatgttcagattagaagaatggcgcacgttggggaattcccttgcgtctgtgacgagcaaccctttttggtggtgggtcttcgtagttcttgtcattgcagctgttttggtcatttgtagtacttgaaccaacattgtcaatcctagccacatgatccataccattggaccgagggttgttgccaaccatatcttgcataccagtttgcatatttaagcctctaagattgcatccaagagagcagaagcgtaatgcatcaagttgcacacggctacatgtttcaca

SEQ ID NO: 11150 - DNA, 335 bp, Zea mays
  Clone ID: LIB3150-066-P2-K1-D12
ccgccctttttttttttttttttttttttttttttccgggttaattccttaacgaatcagggagtacatggggagtaacagcatctattggggggccctcaattcccactctccatcccagggcaaataatccgcaaaatgaaacaaaaaataaaataaaacttgtatcatgctgaaccatttcttctaagttcttaagtaaggcgagcgaatccggttttagagggtcatcaaacccgtttttttagcttccaaactacatttcacgaaaactgtcttcctgtccttttaccttccgaactaaatcctgctaatccacctttttgtttcctttt

SEQ ID NO: 11151 - DNA, 67 bp, Zea mays
  Clone ID: LIB3150-066-P2-K1-D3
ataaaatataatatttttttttattaataaaataataaaattgggggggggttttttaagggggggg

SEQ ID NO: 11152 - DNA, 408 bp, Zea mays
  Clone ID: LIB3150-066-P2-K1-D4
ccaatccatggtgcataggaacatcttaacaaggacttacatggttcaaggtagggttcattagcacccatagaaggattcagtcacgaaactaatggaccgccaagcagcttcggaggtaaacatgaggcccgaacataacctctcataaaacagtcagttttccctacagcaatttcacaccaacaccttttagagaatctatcacggccttcaccttgccatggtacttctggtctcttgacatggagacagatactgcagggatacccttgaacagcaagcgctctccaagcaacttcccaatctttgcagccgcagcaacatcccgtgtcgactccatgcttggcctcaggagtttctcctgagagcttgcagagcatgcgaccgtggctgacggtgtgtgga

SEQ ID NO: 11153 - DNA, 285 bp, Zea mays
  Clone ID: LIB3150-066-P2-K1-D9
aaaaccccaaaataggggatagagccttcaaaggagaggcgggacatctggttacacttgcagacaaacaaccgtgcaaaaaatcaaacaacaaaagtttgaagcatttcgggatgggatgggatgcgatgctatgcaatgcaaagtattgcaagggccccttgtgattttgatttgtcgccccaaatttactcccggatcacatgacgatctcgggcttgaggatgctggatttgatctccttgtgcggatgcacaactcctccgtggttggagatctttacta

SEQ ID NO: 11154 - DNA, 405 bp, Zea mays
  Clone ID: LIB3150-066-P2-K1-E1
aataaaatatttttttttatcaacctttccaaaccaactgtgggttttttatcaccagagaggggtcacccatcaattcttataaaatacattccccaaaatgtaaccacataaatttatctttactctttttccaaccccactcaacctatttcacatatatataaaaaaccaaccaaactccataaattttcttagaataaaacccttagaaaaacactttttttccaatataagtcgaaaaacaatattattccccctataaaatcaataaaaatattctttatactctaaaatcttataaaattctctattattgcttttttcccccttcttctcatttgtaaacttcacaatcttttttcttctctcactcttaaataaaaaccttttcttaatatctaa

SEQ ID NO: 11155 - DNA, 135 bp, Zea mays
  Clone ID: LIB3150-066-P2-K1-E11
attcccattccagccgccctttttttttttttttttttttttttttttttttttttttttttttcttttttttttcctcttagaaaatttttttctaataaaaaaaaagacatccttcttccttcctctttttcc

SEQ ID NO: 11156 - DNA, 430 bp, Zea mays
  Clone ID: LIB3150-066-P2-K1-E2
gaattaccggagcgggcgccctttttttttttttttttataattggccatgctgataacaggatggaccacaacatcgattaagcataggatgggacattgagtattacagaacataccctaaaacacacggaattattcaacaacataaaacattattaagctttccaaagcatcgattgttccatctagaacgcggtcatccttgtagtagccacaaagtgctttattaatttgcactgaaatttcacttcattgtggccagacgattgatgaacacattgaaggcttggtctgtgtcaaccatactaactctgacagcccttgcattcactccaaaccttgtgccacctcgagtgataatctttttctcgagtaggaaggcctccagatcttcaatatcatccttgttgtagcgaagccatgcaaat

SEQ ID NO: 11157 - DNA, 449 bp, Zea mays
  Clone ID: LIB3150-066-P2-K1-E3
gcggcggctttttttttttttttttacataaaacagtggagatattccaatcaagagaaacttaatactggagggctcccgattacatgaccacaaaagggtgaacgactctgctcatcatccaggggtgaaaattgtgtacacggtgtagtatgagttaaaaataaaagaatgctatgcgtttagcagccagagcgtctcgggcagaatgattacagaaggtcaagcgacgaagaatatgaagatcatgaggaacaccatcagcacaaagaatatcttcatcatcagccacctgttggacgaaatgcttttgaggtacttcaggagctggccctgctctccctccacgttagccacggtttcctccatgttctcgtcgattctgattgctagctctccctgttgagaaaccatggttgccaactgtgtaaagatgttgctcaactcat

SEQ ID NO: 11158 - DNA, 368 bp, Zea mays
  Clone ID: LIB3150-066-P2-K1-E4
ctactgtcacttgtgataattaactataaaacacccaccgaccgcggtgtaggggggtacataacctcagtgagagaggcagacatgcctcctcatatcaaaacacgtcgcagatcccctctctctctaactccgtccctctctctctctccctctggtcccgcaaaaactaggcgttggaggcacgttagcgccaggttttcctcccatgcttacgcagccacagccgtccacaccttggatgctcacagctcgtccttgacgggctcggcggcggctgccttctctgatgccagtggcgcctgggtggtgttggttattatatcctcttctctttttatactacatctacaatttattttatattc

SEQ ID NO: 11159 - DNA, 258 bp, Zea mays
  unsure at all n locations
  Clone ID: LIB3150-066-P2-K1-F1
cggnnncggattcccaaatcgtccgccctttttttttttttttttttttttttttatttctcttttttttttttcttttttttttttttcccttaggagggtttttttttataggaggaagcttcctccaaaacaataaaaacaaaagagctacccacaaccacaattcctcatccactatacacttcccaactacttagaaaaactaaatccccctcccaaactctaaaaccaaatttgtgccttaaaaataaaccc

SEQ ID NO: 11160 - DNA, 391 bp, Zea mays
  Clone ID: LIB3150-066-P2-K1-F12
cgcaatagtgtataacttggagatatggatttgcaagagaagactaccccaactcataaaggaaaaggaatgggaaaagaaagcgcagaggagaaagaaagagcaaggaagagaatggcatctgttttggattccactaatgacacagtcatcagcgaggaaatgccagagtataatcttgatgaacctactatggaggaaaaactggcaaccctgaatttaatcaatagagagaatgaaatacatggtactgagaagcaatcgctctctgtggcaccaccaagtgcagattcagtccatatcttgctgaagcaagctcttcgtgctgatgatagtgtatcactcgtaacttgcttgtataatatagatgagaaggttattacgaagtcta

SEQ ID NO: 11161 - DNA, 84 bp, Zea mays
  Clone ID: LIB3150-066-P2-K1-F6
cttttttttttttttttttttttaaatattatatatattttttttttaaaatatatatttattttaagaaagagatttttatat

SEQ ID NO: 11162 - DNA, 172 bp, Zea mays
  Clone ID: LIB3150-066-P2-K1-G11
ccgccctttttttttttttttttttttttttttttttttttttttttttcttatttaattttttttttaagaaaatttttcttataaacaaaaaaattttttttacatttcttatcaactacttattatttcctcttacaccaaatccaccaaaaaaaaaaaaccccccccc

SEQ ID NO: 11163 - DNA, 390 bp, Zea mays
  unsure at all n locations
  Clone ID: LIB3150-066-P2-K1-G4
ccggccttttttttttttttttttttgatcaaaattttcctcaattgcttttaaaggcgccaacagantacatgggtgttccattcagagagcagggaggcacactcacatagacagagaggggggagctttattttgtttcggtctacacaatggtactcaaccactgtaacagttcagtcactgtactcatccatgaacgcctcatggaaagccttgaagcgtttgatcaccgcggtgattttgtcttccttctgcaggatctgtcatctttcttgccatgttcctagaacttacccaatatcagattcagtaaccacatcagtgtcagttgtttcacggtaattgttcccactttaatgcatcaggttgctctttttttcatctttt

SEQ ID NO: 11164 - DNA, 168 bp, Zea mays
  Clone ID: LIB3150-066-P2-K1-G5
caagttaatatcattattagtgccttcttttagcattttttttaactccataggatagatccttacgacagcgtgtgagaagggaaaatcagtacatgatggccacaaacatgcaagagctggaagtaatatccgagtagaggtccaacgtccaaggctctcgctatt

SEQ ID NO: 11165 - DNA, 349 bp, Zea mays
  Clone ID: LIB3150-066-P2-K1-G6
ggtgggcattaagattattcatttacctccggttctcaaaaatcaaggggagaatcacaccatgggaaggcgaatagcggtacatatgacttcagcaaatgtaaattctatctaccggagctgcatttgccacattcagataattgacatcaactgcgttctccccaaaatcatcttcgtatactgttctaacaatctgaacatagtcacgtatcatctcttgatagataattccatcaggatgtgcgtccaagacaactagtaatcctggtgctaaccaagcttttgtctcatttgatggcaaaagtgctaaccaaaatacattgcgcaaattcatcgaatcatcata

SEQ ID NO: 11166 - DNA, 362 bp, Zea mays
  unsure at all n locations
  Clone ID: LIB3150-066-P2-K1-G7
cctncnnngagcaaaagggaagggcattttataaagggagggggttccaaataacacaaccgcatgacaaaataaccttctcatttcacaacatgctacaaccaatccgggtaggttcacatccagtaattacaaaacttcacttactgctaagggcggaacaaaacctaacacgaccataattatgacattgcaactagaccaccacccagagttcaggtcatcaatacaaacaaataaatgactggttacttcttcttggcgacaccaaccttggtctttttgacaccacatatcttcttggccctgttcttccccctttttatttgcttgcgggactctccaaccttagtaacaagacc

SEQ ID NO: 11167 - DNA, 132 bp, Zea mays
  Clone ID: LIB3150-066-P2-K1-G9
cattcgaagggcatattttaaagacaaacagattttaaacacccaccttaataacctctccccatccatatacacaactcaaaatttttttccaatcacaaaataatcaccccttaataaaactaacaattt

SEQ ID NO: 11168 - DNA, 264 bp, Zea mays
  Clone ID: LIB3150-066-P2-K1-H10
ccgcccttttttttttttttttttttatttttttttaattttttttttatttttaaccttttttttttggggggggcaaaacatgggctaggggggtaccattcccaatatttatccccaaaccgttaaaaaggggtaacttaacaattaaaccatacttttatcctttccaaaaaaacaaccaataacttgccaaaaaccttaaacaatatttaaaattaaacttttacaatttgctttttttgggttataataaaccccaag

SEQ ID NO: 11169 - DNA, 354 bp, Zea mays
  Clone ID: LIB3150-066-P2-K1-H11
ccgtgcggccgcctttttttttttttttttttagtgcaaaatgcaaaactttttaaatagaatgaccgttaaaagtttgacgataacatccactacgaggcgagcgccgttataggttttagacaatcagataagaaaaatttattctcggaagcacttccggggaagaaacacaactctctttgcatgctttcatcactctttgcatgctttcatcagtttgttcatttacttggtgctgttcatgtggcggatcaggtcgaccactcgggtgctgtatccccactcgttgtttgtaccaggacacatgctttacaaagtttccgttcaaggcaatgccagtcttcttattaa

SEQ ID NO: 11170 - DNA, 242 bp, Zea mays
  Clone ID: LIB3150-066-P2-K1-H5
aaaaaccccattccctctgggtgatgtccatatataagagagagggctctttaataaacttccatatcactcccacaatgataagctctacctaattctattccatcctagtcaaccatccttaataactatatacccaattccaatccttcccaacttatttcaccttaaacatactacacaaattcctctaatttattacatctacaaaatttctccccaattattaataaattcaccat

SEQ ID NO: 11171 - DNA, 155 bp, Zea mays
  Clone ID: LIB3150-066-P2-K1-H6
cggccccctttttttttttttttttttttttattaaaaaccaatttttttttttaaaattaccttttatattgagggagttcttctactaggagggacccctctttatttttaaacaatcacattataaaaatttatttctctaaacactttcat

SEQ ID NO: 11172 - DNA, 343 bp, Zea mays
  Clone ID: LIB3150-067-P1-N1-A1
gcgagttgcgcctctcgccctcacccccacccccagtcccccgcaggcgcaccaccgaaactgctccgcctccacgcccgctcgccctgaccacggcgatggccgccgccgccctccgctcttccgcgcgccggctcctgcgcctcgccccggcagcctcgtcggctctgtccgctggttcccggcccagcgccggggctgcgccgttcacgcgccccatgagcgcgtttctaggtggcaacgatcctatatcatggaaactgaggcggttcttcagttcaattgaataacacttgcccgcattatctgatccagagatagaatcttgcatttaaggattttg

SEQ ID NO: 11173 - DNA, 203 bp, Zea mays
  unsure at all n locations
  Clone ID: LIB3150-067-P1-N1-A2
gcggcttcggcggcatgaggagggccaacatcgcggactacttcgttggccctggactggatgatcttatcgagcagntgacccagaatgatcgtcgaggaccaccacctgctgcacagacctcgaacgacgctatacccacagtgaatatctcccagaggcaatatagtgtggacttatactttctaatctgtaaggagatg

SEQ ID NO: 11174 - DNA, 394 bp, Zea mays
  Clone ID: LIB3150-067-P1-N1-A3
cggacgcgtgggtgctgacctttatgtcaatgatgcttttggcacggcacacagagctcatgcttcaaccgaaggagttaccaagtatttgaagcctgctgttgccggcttcctcatgcagaaggaacttgactaccttgttggagctgttgccaacccaaagaagccatttgccgctattgttggtggatccaaggtctcaagtaagattggtgtcattgagtccttgctggcgaaggtcgatatccttatccttggtggtggtatgatctacacattttacaaggcacatggtttttcttgtggaaaattctttgttggtagagggatatatttttgctttgtaacctttttttattgatgtaatgcatatgtctatggggttttttttttt

SEQ ID NO: 11175 - DNA, 128 bp, Zea mays
  Clone ID: LIB3150-067-P1-N1-A6
gtgtccgccgtcgtgcgctcgctgcccctcttcctcgaggcctttgccggcgaagagcgcccagtcgcccaccaggatgaagtttgttgctgtctacctgcttgctgacctcgcttggtacttcagcc

SEQ ID NO: 11176 - DNA, 98 bp, Zea mays
  unsure at all n locations
  Clone ID: LIB3150-067-P1-N1-A8
ttttgagnatcganggnagaggcacgggggggggantttaatgaatgggncagagcctttaaaaagaaagactataanaaagcgtatctgtttcttaa

SEQ ID NO: 11177 - DNA, 422 bp, Zea mays
  Clone ID: LIB3150-067-P1-N1-B1
tggacttgcaaagttcactactgataacaacacccatgtgtcaacaagagtaatgggcacctttgggtatttggcacctgagtatgcagcatctggcaagctcacagaaaaatccgatgtattttctttcggagtcatgcttcttgagcttattactgggcggcgaccaattgacacaacccaaacatatatggatgacagcttggttgactgggcaaggccattactgatgagagcgctcgaggatggtgaatatgatgctttggtggatcctcggctcggaaaggacttcaatcctaatgagatggcaagaatgatagcctgtgcggctgcgtgcgtacgccattccgcacgtcgtcggccacgaatgagtcaggtcgttcgggctctggaaggcgacgtgtctttggaggaccttaaat

SEQ ID NO: 11178 - DNA, 236 bp, Zea mays
  Clone ID: LIB3150-067-P1-N1-B2
aatttaatttttgctaacccacccaaggtagaggagaagcttggtagctaccgggatggcctatccaccaactctgaggttgcccagagggaagctgagtctatctctaggaagactcttaggagctccccccagaagtttgaagtccaggctgatgtgtccagactcatgaacatcatcatcaactcactctacagcaacaagggaatatttctgagggagctcataaccaatgc

SEQ ID NO: 11179 - DNA, 381 bp, Zea mays
  Clone ID: LIB3150-067-P1-N1-B3
tttccagtgcccgccgtcgccgccgccctcctcttggtcccgccgtccgtcgaggtcatcatggtgagggtcagtgtgctcaacgatgcgctcaagtccatgtacaatgcagagaagaggggcaagaggcaggtcatgatcaggccgtcgtccaaggtgatcatcaagttcctgacggtcatgcagcgtcatggatacattggcgagttcgagtacgtggatgaccacagagctgggaagattgtggtggaactgaacggcagactaaacaaatgtggtgtaattagcccccggtttgatgttggggtaaaggaaatctaatgctggactgccaggctgcttccgtctcgccagtttggctatattgagcttacaactttt

SEQ ID NO: 11180 - DNA, 193 bp, Zea mays
  Clone ID: LIB3150-067-P1-N1-C1
tgcacttataaccctaacgccgccgccgcttcacaggtaagccgccgtcatggtctccggttccggcgtatgcgcgaagcgcatcgtggtggacgcgcgccaccacatgctgggccgcctgtcgttgattattgtcaaggaactgctcaatgtgcagtatgtggtcgtcttttatttttattatatatctttt

SEQ ID NO: 11181 - DNA, 372 bp, Zea mays
  Clone ID: LIB3150-067-P1-N1-D1
ggaattaaccggaatccataacgatccacgcagggaaatactacacttgcataccgaacgttccaaccccaattaactcaagtttttaagaacaaacccaaacacatgagactgttccaacttgccccaaaaaaattagcaaacatatttcatggctaaagggcagaggaactgattcagcacgggggggatctgtgtgcaaccacaccaactactcggttggggctgcatcggctttggttttggtcactttgccagaatcaggggactccgacttgccactttcctcagatttgccctcgctcacagtgggctttttcagcaattctgtcgtggaagagccattttgaccttccttggtctttgtttttg

SEQ ID NO: 11182 - DNA, 385 bp, Zea mays
  unsure at all n locations
  Clone ID: LIB3150-067-P1-N1-D2
cgcgtttgtccgctacccctccccgaccagatcgccacgagacgccgcgcgatccgacccaggccgacgccgacgacccctctcgccgccggcggccatggcgtacggcgaccgcgtcaccaccttcgaggactccgagaaggagagcgagtacggctatgtccgcaaggtctctggacctgtggttgtggctgatggaatgggtggtgctgccatgtatgaacttgttcgtgtcggacatgataacctcattggggaaattatccgtcttgagggcgaatcagctacaatccaagtttatgaggaaaccgctggactgatggtaaatgancctggnttgggaacaagaaagccttttttagttgaattggggcctgggaatttt

SEQ ID NO: 11183 - DNA, 165 bp, Zea mays
  Clone ID: LIB3150-067-P1-N1-D3
tttttcgtttgttcgctacccctccccgaccggggcgctacgagacgccgcgcgatccgacccattccaacgccgacgactcctttctgccttcttcggccatgtcgtacggcgaccgcgtcatcatcttctaggactcctagtaggatagcgagtacttttatt

SEQ ID NO: 11184 - DNA, 289 bp, Zea mays
  Clone ID: LIB3150-067-P1-N1-D4
tgtagacatatgatgttacaacaatcagagcaagtaccccaatgtttttgatgtcacgcaaaatcaaatctttgggtgtgaagatggttatttctggcgaaggttcagatgaaatttttggtggttacctttattttcacaaggcaccaaacaagaaagaattccatgtggaaacatgtctgaagataaaagcactacatctgtatgactgcttgagagcttacaaatgcaacttctgtctggggtgttgtggctctgtgttcattccttgacataagttttattaatg

SEQ ID NO: 11185 - DNA, 279 bp, Zea mays
  Clone ID: LIB3150-067-P1-N1-E2
ttcttttccgccgcagccaaaccctccccagcagccgtcgtcgccaccgctgcagcgcggaggcgaccccccatcgccgccaagatgcagatcttcgtgaagaccctgacggggaaaaccatcacgttggaggtggagtcctcggacaccattgacaacgtgaaggccaagatacaggacatggagggttttccgctctgtatcatctattgttttatttttctcctgataagtatttttttggatcttttatataccttttatctcttacaattatat

SEQ ID NO: 11186 - DNA, 270 bp, Zea mays
  Clone ID: LIB3150-067-P1-N1-E3
tttaattgtctaggagattgatgatctgtgcgttgaccgtatccgcaagcttgctgacaactgcaccggcctccagggcttcctggtcttcaatgccgttggtggtggcaccggctctggccttggttctctcctccttgagcgcctgtctgtggagtacggcaagaaatccaagctgggcttcactgtgtacccatcttcccaggtgtcaacctctgttgtggagccttacaacagcgttctcttcactcactaacttctggtgcacac

SEQ ID NO: 11187 - DNA, 211 bp, Zea mays
  Clone ID: LIB3150-067-P1-N1-E4
tagaccattagctttatctactccagagcgcagaagaacccgatcgacaccatgagggtgttgctcgttgccctcgctctcctggctctcgctgcgagcgccacctccacgcatacaagcggcggctgcggctgccagccaccgtcgtcggttcatttaccgccgtcggtgcatctgccacctccggatcacctgctcccttcggtgcatt

SEQ ID NO: 11188 - DNA, 412 bp, Zea mays
  unsure at all n locations
  Clone ID: LIB3150-067-P1-N1-F2
ggttgcttgatcaaccttactagtgacgggaaaaatcttgaaaaatcaaggcaacatattgccaaatttcttgattcactcccaagtagcccatccattggaagtgatccatggctttctcggctaccttctgtgaatgaagccattgttgtcccaactcaggttaattatgttggaaaagctggaaacctttaccaaagtggataccagctcaatggaagcgcctatgtcatctcaaagcacataagcaatacatggttatgggatcgtgttcgagttagcggtggtgcatatggaggattttgtgattttgacacccattcaggagtgttctcatatttatcatatcgngatccaaacttgctgaaaacactagaggtctatgatgagacagcaagattccttagagagc

SEQ ID NO: 11189 - DNA, 309 bp, Zea mays
  unsure at all n locations
  Clone ID: LIB3150-067-P1-N1-F4
ttaaaattccttaccaaaatctcctccccctgaagtcccgaagctcgcggaagcgccgagatgtaccatcccacgagaggcggcgtccgcggcggcagagatcaattcaaatgggacgatgtgaaggttgacaagcattggtagaattaccttggtcatagggttatggctctctttggaatattgttagaaaggaattgtttttcttctgtttttcttcngattatttaatttcttcttttgttgtgtttttattatttttttaattcttttaatatattatgttttattatatatatttatatattt

SEQ ID NO: 11190 - DNA, 415 bp, Zea mays
  Clone ID: LIB3150-067-P1-N1-G2
gacccacctcgtccgcttcgtcctctcgtctactcgcactcgctagctgacgctgcgtgcgccaaaagcagcactgcagcagcaggtccagccgtcgccgttcccacttcccaccactgccacgcgcgccccggatcgagggagggcacgcagacgcggaggagggaggatgagtctcttcgggcttggacggaaccagaagacattccgccccaagaagagcgctccatcaggcagcaagggagcacagctccgtaagcacatagatgccactctcggcagtggaaaccttagggaagctgtgaggttgcctcctggagaggatatcaatgaatggcttgctgtcaataccgtggatttctttaaccaagttaatatgctgtatggcacgctcacagaattctgcacacctgag

SEQ ID NO: 11191 - DNA, 337 bp, Zea mays
  Clone ID: LIB3150-067-P1-N1-G4
ttgcttattgacttctggcagtggtggacgcaggatgaaattctaggtggggccaatccgtaatggagaaatcacaagaaaaaaatgctaaactataaatggtttcttggtaatagcatgaaattaagttgtaatatcatgactattataaaaaaatgtggatatcaaaaatccttttagcgacaccaaatcatcgatagaaaattcaatctacaattagaagaaaaaagtattagtaagcttcaatataagtaaataaacaatactatatagataaaacatcgaaaacaccatttaaccatcaatcttgtggttgtggcagcttgcactctatttt

SEQ ID NO: 11192 - DNA, 211 bp, Zea mays
  Clone ID: LIB3150-067-P1-N1-G6
ttaaaattatgggcaactgaggtctttctcagagctatttagtcggctaaatggtgcccttgaaaggtttgaagagggtcctccattcacactgcaaaggctttgtgagattttgttggattcaaaaggaacatatactaaattaccaaagctttacattggccctggagatgaaacttctagttacatttactataactaagttcacttg

SEQ ID NO: 11193 - DNA, 305 bp, Zea mays
  Clone ID: LIB3150-067-P1-N1-G9
taagcgcccctctccctctctctctctctcttcgccgtccgaagctccgcaccccaatctaatcgacacctcgccgagatgggccgcaagttcttcgtcggtggcaactggaaatgcaatggaaccacagatcaggtcgagaagattgtcaaaaccctgaatgaaggacaggttcccccttcagatgttgtggaggtcgttgtcagccctccttatgtcttccttcctgaggtcaagagccagctgcgccaagagttccatgatgcggctcagaactgctgggctaagaatggaggtgctttcta

SEQ ID NO: 11194 - DNA, 270 bp, Zea mays
  unsure at all n locations
  Clone ID: LIB3150-067-P1-N1-H2
gggtcttcagaccattagctttatctactccagagcgcagaagaacccgatcgacaccatgagggtgttgctcgttgccctcgctctcctggctctcgctgcgagcgccacctccacgcatacaagcggcggctgcggctgccagccaccgccgccggttcatctaccgccgccggtgcatctgccacctccggttcacctgccacctccggtgcattttccaccgccggttcacctgccgncggcggttcatctgttaccgtcggtcca

SEQ ID NO: 11195 - DNA, 371 bp, Zea mays
  unsure at all n locations
  Clone ID: LIB3150-067-P1-N1-H3
tgcagatggaagtgaggatgcgcaggagacacagggaaagtggtgtgatgaagctgccaagatccacagaaaattctgatgaagcgatgtgtccaggaaattcaaataatcaacttaccaatgatcatactaaggcaaggtagcagataagggccaacaaagacattaaaacaccaccagtgaacgctagtgttccatgcacacagattgatgctgcacgatttgcattagatcagcatagctttattngcacgcgacccattgatagaccttactggactggaatcatttataatgtcctggaatttattttatggttggacacttgttaaataagtattgcttgatgtgtatgttttatctgttgttat

SEQ ID NO: 11196 - DNA, 190 bp, Zea mays
  Clone ID: LIB3150-067-P1-N1-H4
tccgattccgctcgctcgccgccagttgtccagcagctcggatcgtctcatacctcggcgaaaatgagagagatcttgcacatccagggagggcaatgtggcaaccagatcggtgccaagttctgggaggtcgtgtgtgacgaacacggtattgacactacaggttgttacactggcacttttgaccttt

SEQ ID NO: 11197 - DNA, 198 bp, Zea mays
  Clone ID: LIB3150-067-P1-N1-H5
tatccgatcatatcacagtgacactacacgatggtgagcgccagaatcgttgtcctcctcgccgtcctcctatgcgctgccgccgcagtcgcgtcgttctgggaggacgacaaccaccacctccacggtggccacatgtccgggcgatgcttgcggcggagcgtggtccgtccctggcaccagtgttccctggtgcct

SEQ ID NO: 11198 - DNA, 489 bp, Zea mays
  unsure at all n locations
  Clone ID: LIB3150-067-P2-K1-A12
ggaaaacccgcggcggccgccctttttttttttttttacacactattaagcttttattatgntaattctgttcgcatgcaaatggaaggagaactcatcgacctcgcagggggggcctactgatctcagccagcttgcagcagctactgcatacaacaaagaaccgtcaaaagcacactatttctcaccatttgccaacactggtgtagattgcttcttcgcgtcctctctgctcttcatgcggttggccgccttgtcggcttctctggccgcgtcgatgtccttctggctcaggaaactcggttggttggttgaagacagcagcctcgcccacatcctgtcagttatcctcaccttgttccttgtagatgttaccctatgaaatggtatatatgcatgcctgccattaaccattccgactgaaaagctgtatcccgccattgcaccatgaatggcactatgtgcgagcaaggtgccaaaaacattggc

SEQ ID NO: 11199 - DNA, 202 bp, Zea mays
  unsure at all n locations
  Clone ID: LIB3150-067-P2-K1-A4
accgaaagaacgaggcccacacggaacccattctgcacaaaagaggaggacaacacccagacaagcctggagataacacggggaaaccaaacggcaaatgagaagcacacaaccacccaacgcgaccccaacaagccggcctaaatcttggagattcgccgaggntgcgacacagggcgccaaccgaaaccctgaggaagga

SEQ ID NO: 11200 - DNA, 168 bp, Zea mays
  unsure at all n locations
  Clone ID: LIB3150-067-P2-K1-A6
atatacaatttacccgccctgtttatttacccacancggccaaaccagaacgcaggtttttaacgcgagctgggagctccactacctcnagcatggcattcaagctgatggtcagatgcccggagacaagaccattgggggtggtgatgacgcttacaacaccttctt

SEQ ID NO: 11201 - DNA, 235 bp, Zea mays
  Clone ID: LIB3150-067-P2-K1-B2
acagcagacacaaatcgtcttttttctactgttgaaaaggaaaaatcaatacctgagggcctctaaacatccaagagcgtgaagtaaattccgagtagaggtccaactttcaaggctctccctatctctagtccacaatcgtgccttttggaagctcgtacaggttcacattaattccattttatttttattaatcattctctcctatttatcttgcttttcttctttttccttt

SEQ ID NO: 11202 - DNA, 205 bp, Zea mays
  Clone ID: LIB3150-067-P2-K1-B4
accacaacacacaaagacagctgggagcatgttacacacaggctgcggtcccccgttgcgcaacgcgctttcccccacttcacccgcctcggcgccatggctaagctcgcgctggcgctcctcctcctgctggccgaggcggttttcgtgtcggccagcagtgggagccacctggatctcgacctggtcttactctcttctggtg

SEQ ID NO: 11203 - DNA, 371 bp, Zea mays
  Clone ID: LIB3150-067-P2-K1-B6
atattctatttactcttccgtttgttttactcctcccccaccaaatcattttcgggttttttaaaaactccggggagcgccaacaacggttagcttatccaaatggcggccaaccaccccaaaaaaaaaaattttttggcggaaaagaaaaagacaaaaaaaaccactccgtacacaacacccccaacaactacggcgtccttctcgagtccaacaacatcctttatccctagaaacaaaacacccacatctttaagctacaacaatctttaaaataaaaaaaaaaacacggaacaaaaaaaatatcatgaaccgaaaaaaccaaaactttcgaaacatcaccaacaacttggtccaatcccaacaaaatt

SEQ ID NO: 11204 - DNA, 59 bp, Zea mays
  Clone ID: LIB3150-067-P2-K1-B8
cgaccggaataccgggccgccgccctttatttttttatcctataaaaaaaatttaccct

SEQ ID NO: 11205 - DNA, 216 bp, Zea mays
  Clone ID: LIB3150-067-P2-K1-C12
atagtctacccacgcgttctatttcgagacagcggcaccatacccgggggggcttttataaagctgagcgagcgctcaaaacgagcgttgcggctcaagtaccctacattcattgtggacaactgctccgtacttttcctgtacctgaaccgacagttttaacctgctcccgtcaagaacaacattatccattttctattttcttacgacttaatt

SEQ ID NO: 11206 - DNA, 132 bp, Zea mays
  Clone ID: LIB3150-067-P2-K1-C4
cttaacactacacaataacagtaacaaccccaaacaaaacttctcgatggaatgacaagtcatttatttcaaaaccacatacaggattaaccacaggctgcatcatttctttttaccaactcccttcataac

SEQ ID NO: 11207 - DNA, 354 bp, Zea mays
  Clone ID: LIB3150-067-P2-K1-C7
tttccagcatgccaataaaataatatctgtgggatattctaaccacaactgggatattccttaaatagccaactgatgtccttcaacttcctgccgctcatacttagaaatgactgttatggctacttccttactccacagttcgattgctaccaacaagacatataccattagcgtttccaaatacagaagcagcttgcatagaaagttcaactccccatgtaggaatttattctttaccttttctgggctgatatttccttcattaacctgctgaggtgccgtctgatttcatcacccatcttatccttcattctcattactttttcacttcctttactcctctttttccct

SEQ ID NO: 11208 - DNA, 214 bp, Zea mays
  Clone ID: LIB3150-067-P2-K1-D4
cgggcgccgcccttttttttttttttttaaacaaaaactctatgcttaatggtcatcttgaaggtcttatatatataaagagggcgactctattgagatgcatgggctctccatcatcgattaaagtatcagaaccttattgtagcatgcatgcatgcatctgccggttctggaagaaggtttttcccctattttctcccctacttcaagcttc

SEQ ID NO: 11209 - DNA, 286 bp, Zea mays
  Clone ID: LIB3150-067-P2-K1-D6
ttccccggcggccgcccttttttttttttttttttttagcggacaaaaacacagatttgtatcaacaacaacgaacacgaaacgaggacgatacggacacgagacgaccgcggacgaagataaaccccctctagactagggtgaacacggtagcagaagcgaacaagataactaggcctcagcggaccccaccgctcagttccttcagttcccgtcgttgttgccgtagccgccgccgtggtttgcaccaccgtatactctaccgtcgtcgtatcctctacgacca

SEQ ID NO: 11210 - DNA, 156 bp, Zea mays
  Clone ID: LIB3150-067-P2-K1-D8
gaccgattcccggcgccgcccttattttttttttttttattttttttctatcatttttttttcactttcatctatttatatcttgggtattttacctaaaggcagcccaaacaacaaaaaaacaacaaactgaaaaacccaacctaccaacaaacc

SEQ ID NO: 11211 - DNA, 195 bp, Zea mays
  Clone ID: LIB3150-067-P2-K1-E11
cctactcctcgcccatcgatacgagggttttttatatggaccggggcacccacaacaaacttaataacttttatgctcaccactatctcaaaacttatgtatctatatactccataactaataataactattatttctttacattaattattaaatattttatttttttttattatttattcttatatactcatt

SEQ ID NO: 11212 - DNA, 214 bp, Zea mays
  unsure at all n locations
  Clone ID: LIB3150-067-P2-K1-E12
gtccgnattcccgcgccgccgcccttttttttttttttctttatattctacccactctttcgtttcatatcagcatattttcatttcttggcgggtatcttagaacagaacggcgggaacatcgtcatcgttctcgtcgtgtgcctggctctgtcagctgccaacgcctctgcaatgcacgatgccctgcccctgcgcggagctgcagggcttg

SEQ ID NO: 11213 - DNA, 295 bp, Zea mays
  Clone ID: LIB3150-067-P2-K1-E2
ggataaacacaccaccatacccacttctcttggattggtacaggcgattttttgggggctcgaaaacgctcaagggggggacctctactctatctacacagatcagacgcacgcaccacctggtctgttgggaatggacccgtccactccgatcaacaagcgaagcaaccgtcaactaaggctctaaatctcctaccctccgaccctcataataccgatcaagcatggcgacacctactcccaattctgcgagcagatcataacactccaatctcggtccctaccccccagtacc

SEQ ID NO: 11214 - DNA, 349 bp, Zea mays
  unsure at all n locations
  Clone ID: LIB3150-067-P2-K1-E4
aanngaaaaacaagacaaaacctcggggatttattttaacttgggcaaaaaaaaaaaaaatgactgctcttggcatgctgagataaataagaactgtcacttgagtggcttggggggtcactttttcgtgccccccacccgcgggccacgtgaggcactatgtgcatataatacccgccacaggtaaaaaaaagatcaaccgtctaatggtgaaaacttcccctcaaaaaaataatattattttaaccacccatccacaatgccaaaaccccttttctttttttttctccggaaaataacctggcataattttttaaccttcctaccccttttttggcaaggggggttt

SEQ ID NO: 11215 - DNA, 90 bp, Zea mays
  Clone ID: LIB3150-067-P2-K1-E5
aacccaaaaaaatcctcaacccacttctcaacaaaacttgcaaacccaaaaacctccacctccctcaacaccaaaacacacaacacaaac

SEQ ID NO: 11216 - DNA, 327 bp, Zea mays
  unsure at all n locations
  Clone ID: LIB3150-067-P2-K1-E7
atattctacccacgcttttttttttgcacacnaaaactttatttacttggtggtttatacaacaaaaccggggcttaaaatttttatacttaaaatttttaaaaaaagaataccccctaccttttttaataaaaaacaccaaattaattaaattaagcacccacatatcaaggtatctaaaccttttttctattcccccatcattacaaaaaactttttttttttaccaaacaaaaaccctcttattgaattttcacactaatatattgacttccccttcccaaatcctttattaacaaaaccttcattttataaatatctcttccc

SEQ ID NO: 11217 - DNA, 176 bp, Zea mays
  Clone ID: LIB3150-067-P2-K1-F11
cgtccgattcccggcgccgccctttttttttttttttttaatcacaaagcttttttcacccgaaagaaatcccaggggcggaattctaagggggggggggtcactcatggtaatatttaacataaagctcaccacctgctgtatagaaacacaaacctcatttatacatccaaata

SEQ ID NO: 11218 - DNA, 260 bp, Zea mays
  unsure at all n locations
  Clone ID: LIB3150-067-P2-K1-F3
gcggccgcccttttttttttttttttttaaatacgacccacttctccgtttttttttagcccnccaaccccaagctccgaacgccgtatttaaaacgcggcccgcctctttaaaacctatatggcacttcccaatcaggggaccgttgattaccccatctttaagctctgtatcgtaagcgatggtggaactttttaaactacatttctgaacaggcatcttactgtatagtttgagaagaaatatgaaccacccatttt

SEQ ID NO: 11219 - DNA, 269 bp, Zea mays
  Clone ID: LIB3150-067-P2-K1-F4
cggccgaattcccgggcggccgcgccttttttttttttttttttttttcatcgcgaacatatcgttcttttttgtctccccaaaacttacattagacagaaagttctagagtggtggcacgtaccatctgtgcataaagattaaggtaaccaactgccttagcattgcccttatagcaagataaaaacctatgtaggacccgatcaaactgacatttcaaggacacagatgggacctcacaccttaggaggtgccaagacctgatggcg

SEQ ID NO: 11220 - DNA, 237 bp, Zea mays
  Clone ID: LIB3150-067-P2-K1-F5
cggattcccgggcggccgcgggcgctgacctcgaaggcctcctccacgtcccgctgcgagtagtcgaagcggtgggtgatgagcggcttgacgtccaccttgccgctgcgcgggaggtccattcacagcggccaggtgtccttgcaccggaacacgcccaccacgtccacctttcgcgccgccgccgccgtctagagaaacatcatcttattgtgtctcattaataccagaccacct

SEQ ID NO: 11221 - DNA, 159 bp, Zea mays
  Clone ID: LIB3150-067-P2-K1-F7
ccgcccttttttttttttttttataaagccaatcatcacttgttttattaataactcaaaggaacaaaaaaagggggattttaaaaacatgtcacggcaccacaacagctcgttaaaccaaaattacattgtcctcaaaagttcaaatatcaacataca

SEQ ID NO: 11222 - DNA, 247 bp, Zea mays
  unsure at all n locations
  Clone ID: LIB3150-067-P2-K1-G11
gcgccgcccttttttttttttttttttacatcaaacatagacctattttagactgcaaactgnanaaagcancaacaggatgacatcagactggcggccggaacacatacattcaacaacccattatactacagacagcctacacaggccacagacactactgtaacacagccacaattattctagcacacactagacaacacacgcaccggaaatcccactacctctactacccacacttgttgac

SEQ ID NO: 11223 - DNA, 371 bp, Zea mays
  unsure at all n locations
  Clone ID: LIB3150-067-P2-K1-G2
gccgcccttttttttttttttttttggagacaacccacccgtccattttttaaaaaaaccaaccagatgcaccacgggggcgggttatcaaccgaagtggcgcggccatntttcacaaaaacttacaggcaacactcctggttttccctattcaggaacgatcatctgcgtcgacatattttattactgcagaattgatcccagcagcactaccggtagttacggtagacaaggaatgtacatgcagctctgtgcatattttaccaggtcccttgggggaggcaaacgggtcgccaaaccgagttcataagcttttgcagccacggctgcggcaatgccacacaagaaccaaggtggccttgttggccttt

SEQ ID NO: 11224 - DNA, 266 bp, Zea mays
  Clone ID: LIB3150-067-P2-K1-G5
cgaatacccgggcggccgcgctttttttttttttttactcacaagtaaccaggtttaaatatggtgtgtaatacagagcattatggtggcacgcgtattattccaacacttgggggggcccttatgaaaagagagatgctaggaaaaaaacgcgataataattaataaaggacgctatgcttgcgcatgctcagtcagacattggaatggttaaggcataggaacacagctctataaactacaccaccgggaccattactcgaatg

SEQ ID NO: 11225 - DNA, 313 bp, Zea mays
  Clone ID: LIB3150-067-P2-K1-H10
ttcccgagccgccgcccttttttttttttttctttatattttatccattctttcttttttgatcacaaaaccttaaaacctccgggtgatctttttgtgtggcggcgagcaaaaacatttagttctttttccatacggcttactgcgcaagaacggtaacgagaggactgtggccatggctaagaggctcctcccctctcagaaccagttgctggtcgagaagccggttcaacccaacaataccgcctgcggtatctctcttcctgaaacatccaaaccccttaatgcttctaaaatggctactgtttcccct

SEQ ID NO: 11226 - DNA, 306 bp, Zea mays
  Clone ID: LIB3150-067-P2-K1-H12
cgccctttatttttttattctttttattttatctactctttttttttttttttttttttaattttttttttgggtttttttacaagggatggcggggctttttcttttttataataccgcacccatccaacgaagcagaggatctcaaaaaaagcaaacgccaaaccagaccacaaatcgtgtggcgttacctgaaaaacacacacagaacacaaccactgacacagaagttcccatacatgcaccaaagccacccactgctgaagcatcagcccccccaaaaaaaccaaaagcgaaaccaactca

SEQ ID NO: 11227 - DNA, 235 bp, Zea mays
  Clone ID: LIB3150-067-P2-K1-H3
gattccccggcggccgcccttttttttttttttttttataggcgacccacgcgttcgtttttttagtgcgtagagaggatcgtcgaacagaacatcttgaagatggtcagcggtctcgtcgtgtgcctggctctgtcagctgccagcgcctctgcaatgcagatgccctgcccctgcgcggggctgcaaggcttgtacggcgctggcgccggcctgactactatgatgggcgccg

SEQ ID NO: 11228 - DNA, 373 bp, Zea mays
  Clone ID: LIB3150-067-P2-K1-H4
acgggcggggcggcctttttttttttttttcccttgtggagccatagatctcattcattattggattacaagaaggtgccaggaaatgggctctgtcaccatccgcgcgtagaagtggaatattgcttcctggagatgtcagaatttgattggcttcagccaactgctcatttatgcaaattttgacgaggttattcacgatccaccatgaattagggctgtttttgccagttcccgggatcactaacacattagaacacatggttgatgcgtggctccccactgcataggccatccaactgtctatattaggggccaaattcttaacagccttcttgctatatgagactcccaaaccaaaacttatagcatt

SEQ ID NO: 11229 - DNA, 159 bp, Zea mays
  Clone ID: LIB3150-067-P2-K1-H6
cgccgaaaaacgagcgggcgccccccccttttttttttttatataactcactcatctttttttttttaccaacagcacctatcatccaggcggcattattatcaagagcgggccgccccatactaagtacattctctgctgactcatgtaccgaggcga

SEQ ID NO: 11230 - DNA, 234 bp, Zea mays
  Clone ID: LIB3150-067-P2-K1-H9
ggcgggccgccttttttttttttttttttatattcgacccacgcgtagttttcagcaacttcgggtggtcacaaaccgggaaaaatttgaaacaaacgggggctcaatgctgtcagggcaaactaatgtatacagaaccttaataaccgcgagaaccatgaatgcatagttcgcgtgttatgtaacggtagcaaaccaactttcaacataagaaagctcgcaagctgcatcact

SEQ ID NO: 11231 - DNA, 224 bp, Zea mays
  Clone ID: LIB3150-068-P1-N1-A2
ccgagctgctgtgggacgagtacgcgctcgcgcagatcttggaccccccggccgacgtggccgccgaccacgccttgttcgccgtgcacccgtccctaaccagctcctggccgtcggcgacgacggctccgatctcatgatgttctcgccgcccccggccgccgcatcaagcgggaagcgcaaggcgatggtggcgatgaacatgagcccagctgacgagtgcg

SEQ ID NO: 11232 - DNA, 207 bp, Zea mays
  Clone ID: LIB3150-068-P1-N1-A5
tttcctgcgtccattcaaagctatcaagcggcgcagtcgcgagtaaagaacgagcagcaggccaccgctgctataaaaccctccgcctccaccggcggctcgccaaactccgtttcgaattctagggttttgctgctctccgaccccgagctccgaaggccgcagcatcaggcgcggcccccctcgcgtgtgaccgagatggcgctg

SEQ ID NO: 11233 - DNA, 229 bp, Zea mays
  Clone ID: LIB3150-068-P1-N1-A6
ttgtggatccaacatgtatagttcatatggtggatttggcaacacttatggtaccggtggactcggaaatagcatgtactcgagttacggaggaggttatggtggtggcatgtacggtggtggcatgtattgtggctgtttgtttattaggttttaatgtattaattaatttttttttatttttttatgtttattttgtatttttttatttttttaatttttttatttt

SEQ ID NO: 11234 - DNA, 199 bp, Zea mays
  Clone ID: LIB3150-068-P1-N1-A7
tctcgcccgttgttgtatctcgtcactgatcagtgttgtttgctttgctttgccgtgctaatggcgcccgctccatgtggccgttcgtcgcagagggtgttccacttcggcaagggcaagagcgagggcaacatgtacatgtaggagctgctgggcggcaagggcgcgaacctggcggagatggcgagcatcgtgctgt

SEQ ID NO: 11235 - DNA, 318 bp, Zea mays
  unsure at all n locations
  Clone ID: LIB3150-068-P1-N1-A8
tagttctagatcgcgacggcgccctttttttttttttntnnnntggggggggtntnntttntnntntttgtttttgtgtntgttttttttggtttttgggtttttgtgttttttttttttttttttttggttttgtgtttttgttttgttttggttttttttttttttggtttttgtgttttttttttttttttttttttttttttgtgttttttttttttgttttttttttttttttttgttgttttttttttttttttgttttttttttttttgttgttttggtttttttgttttttttttttttttttgtttttt

SEQ ID NO: 11236 - DNA, 210 bp, Zea mays
  unsure at all n locations
  Clone ID: LIB3150-068-P1-N1-B2
gttcgagaccaccaagtactactgcactgttattgatgccccgtgacaccgngacttcatcaaaaatatgatcactggcacttcccaagctgactgtgctgttcttatcattgactcaaccactggtggttttgaggctggtatctccaagatggcagacccgtgagcatgctctcttgtttacactggtgtgagcaatgattgtgtgac

SEQ ID NO: 11237 - DNA, 283 bp, Zea mays
  Clone ID: LIB3150-068-P1-N1-B3
ttcttttatgttggtgccgctcccacgagcgcaccaggacgccggcttggaggtacttgcacacaagggtcgagctcggacgtcgtagcggctcggagggcctttgtcagtacatgctccacccctgctggcatgccggctcggatgttgaacgatggccacaccaccgagcgtgctgtctttaatgtcacacttgttgtttatccggtgattaagctgtcgcctcacgatgggtgcttcttcaccctagtattcaaaggcccgttattatgagattgtgtag

SEQ ID NO: 11238 - DNA, 146 bp, Zea mays
  Clone ID: LIB3150-068-P1-N1-B4
agcgactggaccaaatttaagcttcgcctccagccatgggtaaggagaagtctcacatcaacattgtgagttattggccacgtcgactctggcatgtttactaccaccggccacctgttctacaagcttgtaggctttgtcatgct

SEQ ID NO: 11239 - DNA, 106 bp, Zea mays
  Clone ID: LIB3150-068-P1-N1-B5
ttcttttatatatataccgaaaatagcctcactatgtagattccatgggctcaaaggtgggaaatgggggctattgggtctctatttgtttggctcttggtgcttt

SEQ ID NO: 11240 - DNA, 352 bp, Zea mays
  Clone ID: LIB3150-068-P1-N1-B6
cggacgcgtgggctccaaccccggcacatcacaggaggaggaggacgacgcgcccaccatggccatggcgacggccctccgcaagctctccgccaacgctctgcgccgccagccgctctcccgcatcacgccgctctactacatggcgtcccttccggcgacggaggagagatccggaatcacctggactaagcagttgaacgcgccgctggaagaggtcgaccccgagattgctgacatcatcgagcacgagaaggcccgccaatggaagggttctggagctcatcccgtccggaaatatttacgttaggttttatgttttgcaagctagatttgtttctgtcttagtcca

SEQ ID NO: 11241 - DNA, 123 bp, Zea mays
  unsure at all n locations
  Clone ID: LIB3150-068-P1-N1-C1
cctaccttcgccccccccccctggggggttcggtgtatattagtgctgcgctcacctagacccagtttaatttttnccgctagggaagcagcagcagaagctccttcttgaacccccaccttc

SEQ ID NO: 11242 - DNA, 345 bp, Zea mays
  Clone ID: LIB3150-068-P1-N1-C2
tctgtctcgtgggtcaagatcgggatcaatgggttcggcaggatcggaaggctggtggccagggtggccctgcagagcgacgacgtctagctcgtcgccgtgtacgacccttttattatcaccgattacatgacctacatgttcaagttttacactgtgcacggacagtggtagttccattatgtcttggtttatgacttcattacccttctctttgttgagatagttgttgcttgtttttttttgtttttcctttcttgtaattccctttattttttcttttctttttttttatttttttttttcatttttctttattttgttctttatgtctttttatttatt

SEQ ID NO: 11243 - DNA, 409 bp, Zea mays
  Clone ID: LIB3150-068-P1-N1-C4
tctcggacgcgtggggccaagttttcttcgcgtccttcacccgcgacgagcacccaccaggcatagagagagatggcaagtctaaccggcctcaccgcgaaccctaatccgaacaagtcattcgagatactgccgaacccaggtgactctgtctccagcctcagctttagtcccaagagtaatctgcttgtggcaacctcctgggataaccaggtgaggtgctgggagattgttggtggtaacagtcagccaaaggcgttcatttctcatgatcagccggttctctgctcggcttggaaggatgatggaactactgtcttctctggaggctgttacaagcaggtcaaaatgtggtctcttctgtcaggagggcagccttaaacggtttctattcattgtgcccctgtca

SEQ ID NO: 11244 - DNA, 353 bp, Zea mays
  Clone ID: LIB3150-068-P1-N1-C5
tttgtctcagacaccccttatcctcatccaggatggtgactccaagaagttcttgaaggttcacgttgaggctgaccagatcgtctcttggttgaaggagtactttgacggcaaattgactccgttcaggaagtctgagcctattcctgaggtcaacattgagcctgttaaggtggttgatgttgtcatcttttcaattttttatttttattttttgtctaatatgttctttatttatttctttttttctatttatcctttttctttttttatgttttttcctttatattgtttcttttttttccattctttgctttttttattatatgatttttttttattatagtgtattt

SEQ ID NO: 11245 - DNA, 224 bp, Zea mays
  Clone ID: LIB3150-068-P1-N1-D1
ttttcttttcttccgcggacgcgtgggtgaaaacctcacataaccctcgctcgggggcccaccaccccgccgtgccgtcgtctgtaccagctgcgtcaagatgagtcggcaccctgaggtgaagtgggctcagatgatcgacaaggttacattactgtacaggtacctgacgcaaaggatgctttggtcaatttggatccagatggtgtctttacattcttttg

SEQ ID NO: 11246 - DNA, 157 bp, Zea mays
  Clone ID: LIB3150-068-P1-N1-D2
aaagttgctagtgagtcgagaagagagagagaggcgtccggaattcatcgccagcgatgtctccttccgccttctccccctgcccggtcttcttcgtctctgctccctcgctcgcgccccttcattttgtgcatctttacttaccttcttttgttct

SEQ ID NO: 11247 - DNA, 201 bp, Zea mays
  Clone ID: LIB3150-068-P1-N1-D3
ccctcttcaggtaaggaagaggaggagggcaggatgtcgcaccgtaagttcgagcacccgaggcacggctccctcggcttccttcccaggaagcgctcctcccgccaccgcggcaaggtgaagtcattccccagggatgaccccatgaagccttgccatctcactgtcttccttggctacaaggctggcatgactcacatt

SEQ ID NO: 11248 - DNA, 266 bp, Zea mays
  Clone ID: LIB3150-068-P1-N1-D4
cagtcttttgcaaactcagagagggacccgatggcacccaaggcggagaagaagccggcggcgaagaagcccgcagaggaggagcccgcggccccggcggagaaggcccccgctgtgaagaagccgaaggcggagaagcggctcccggcgggaaaatccgccggcaaggaaggcggtgttgacaagaaggggcggaagaaggccaagaagagcgtggagacgtacaagatctacatcttcaaggtgctgaagcaggtgcacccgga

SEQ ID NO: 11249 - DNA, 199 bp, Zea mays
  Clone ID: LIB3150-068-P1-N1-D5
accgtgatcaaccccaaggccaagccctacttcctcttcgacggctacgcgcacctctcctccggactcgcctgcggcctcgctggcctcgctgccggcatggccatcggcatcgtcggagacgccggagttagggcgaatgcacagcagccaaagttgtttgtgggcatgatcctgatccttatcttcgcagaagctt

SEQ ID NO: 11250 - DNA, 173 bp, Zea mays
  Clone ID: LIB3150-068-P1-N1-D6
ttttgctctctctctctttctcgtgcggcggctgcgaggccgtcgacgcccgacggcaggtttcccaggccttcttcggtcccatcgcgaggccatagttgcatcattcgcctgagacgactgcccaccgccaggactgatctcctcactaggcgcgttgtggtgaagagatt

SEQ ID NO: 11251 - DNA, 110 bp, Zea mays
  Clone ID: LIB3150-068-P1-N1-E5
tctgtttgttagcgaccgcaccggcacgggggggaggcattcatcgccatgcgtgtagcccagtccaaaggaaccctatccatgagcgccgccttcaataagctcttcca

SEQ ID NO: 11252 - DNA, 366 bp, Zea mays
  Clone ID: LIB3150-068-P1-N1-F1
cccacgcgtccggtggcagtccaacgacggcacccacaccgcggccgaccctgtgatgcacgactaccggagggcccggtaccttgccttcttctacagcaactccacctccttcgtggcgtccgtggtggtcgtcgtgcttctgctgccaaaagccgctgcacaagaagtggtggtggctcggggtcatgaacgcgacgatcgtgctggacctgctgggcctcttgatcgcctatgccgccgggtccagcaggacgtggaagacttctgtggttgtttccggtctcgttctcgctgtgctcgcctatttcgtcatacatgtgctgctgtcaagctgcgtcaggagagggaagaagacaggccccg

SEQ ID NO: 11253 - DNA, 411 bp, Zea mays
  Clone ID: LIB3150-068-P1-N1-F2
gatttcaaggaggtaaccagcaaaaaagccgccatcattaaccattatagtgaaatgaaagaaaagttaggctcagaagcttcaatttcaatcgaaaaaggtgaagtgataagcacacattacaagctatttttccgctgatattcgtgacataccaaaactggattcagttattcgcatggctgaaatggatcctagagtgtgtgcttatttacctggacccaactgccactggtgctattgtgagttgggcatctcaaaagttctccactgctgtctttttcttatatgagcagattcatcctgatgatgcatttggggagcaaatgattagaaatcttgagaggagaggatgcccccttcttggtataaatgcttcaccaaccctgaatcacaaggaggaactttttt

SEQ ID NO: 11254 - DNA, 209 bp, Zea mays
  Clone ID: LIB3150-068-P1-N1-F3
gaaaactcccaagacttcttcttcctctgcggcgctgcgcagaggaacgacgtctgtggaatacaggtttgggacatgataaccatagtggatggcctgaggatgcaagtggatggccaagagatggagggtcaggagttgggggagctagtgggtcaagggaaggagaagctggtgtgtctggaagcgggggagttggaggtactttt

SEQ ID NO: 11255 - DNA, 376 bp, Zea mays
  Clone ID: LIB3150-068-P1-N1-F4
tctctctctgtcggtgcggatcaagctgtccgagggcgccgtcaagttcaaggtgcgctgctccaggtacctttacaccctctgcgtacacgactccgacaaggccaacaagctcaagcagtcttcttccattagtttctgactttgtctagtagttttaaaggtttaaatgtcctaatcatctcttatttttagtatttttatattttaagtattctaattttttttttaatgattatatttctttatttttattattatttttttcttttttattaatcttggttttttgtgttctttattctattttattttttttaatttctattttataatttatttattttttcattttataattatttttttctttatt

SEQ ID NO: 11256 - DNA, 191 bp, Zea mays
  Clone ID: LIB3150-068-P1-N1-F8
tctctaacgtcctcgtctctggactccagggactaggcgctgagatcgcagaaaaccttgtcctcgcgggtgtcaagtctgtaaccttgcatgatgatggcaaagtcgagctatgggacttgtcatgcaatttctttctctcagagaaggatattgggcttaaccgttctaatcttgtgtaccaaagctac

SEQ ID NO: 11257 - DNA, 285 bp, Zea mays
  Clone ID: LIB3150-068-P1-N1-G10
tcagatggagcgctatgcctttaagcgccgcaccgacggcatctacatcatcaaccttggcaagacatgggagaaactgcagcttgcagcgagggttatcgttgccatcgagaacccgcaggacatcatcgtccagtccgcccgcccctatggccagcgtgctgtcctcaagttcgctcagtacactggcgctcatgccatcgctgtgaggcacacccctggtaccttcactaatcaactccagacgttcttcactgtgccttgactggtgatgcttaccgaccc

SEQ ID NO: 11258 - DNA, 105 bp, Zea mays
  Clone ID: LIB3150-068-P1-N1-G3
tttcattctgtggccctctcctagtctcgcgaaagccgactcagccgtgtgccatggcccgctcgctcgaactcgggttggggaggcacggagtcactgtcccct

SEQ ID NO: 11259 - DNA, 326 bp, Zea mays
  Clone ID: LIB3150-068-P1-N1-G5
tttaattgtcttgcgacatggagtacagaaagagggtggatgcgttagtgtttttctcgttacttctcctcggatactttgctgctcatgcacatgggaagggtcatgccacagatgatgtcggtgtttctactccagctaaagaaggaattatgcaaggtaacggagcatgatgcattgtagggtttcctccatgcaaagataacaagtgctactgctgcattgggggggcgaactcatgttcgcttctctacgctgtcttgttgttgtcatgcttgtcttttaacaaatatttagatcactggtattataacatcgttttggta

SEQ ID NO: 11260 - DNA, 318 bp, Zea mays
  Clone ID: LIB3150-068-P1-N1-G6
tcttgattgaatccccaaatctcgcacacctggaagccttcgaggcccgaaagggtagctcctcggcctccccgccgcttccacccatggctccaggactgcagcgcttcactgacattgccgacgacggcacgccccagctcgacgccgcgtccggcgaggagctggtccgtgtggaccgcaccgtggctgtcgcccttggcccccgctcgccggagtcctcgttgactctgttcgcctccaccaggagggtgattttgctttttcgatggcggggatgaggttttgtcttcctttttgtttcttactactcttttt

SEQ ID NO: 11261 - DNA, 303 bp, Zea mays
  Clone ID: LIB3150-068-P1-N1-H3
tctttctcatctactacatgaatggtgtaatgttgttgatgatagaaagcatgtaatgttcggtggttttcgctatagtgtctagtatttttacgcttgattatttttacaatatgattatttttttgagttttttatttcctttacttcattatattgattatatctatatagttgttttagttttttactatccttttatttttctttctttatattacattttttttattttatttttttttatttatttttatttattattttttttatttacttttatttattcttttatttctattt

SEQ ID NO: 11262 - DNA, 251 bp, Zea mays
  Clone ID: LIB3150-068-P1-N1-H4
ttttcttcgtctctcctgttgtgcgtgttgctgttcagtgcaaggttgcctgtgaccttcccaagctagtcgaaggtttgaagcgtctagcaaagtccgatcctatggttctctgtacaatggaagaatctggtgagcatatcattgctggagctggtgagcttcatcttgagatttgcctgaaggatctgcaggaggacttcatgggtggtgctgaaattattgtttccccacccgtcgtttcctttcgt

SEQ ID NO: 11263 - DNA, 272 bp, Zea mays
  unsure at all n locations
  Clone ID: LIB3150-068-P1-N1-H5
tttcttctcatcacaggcagttcgagagagagagagagagagagagagataaagatgtccnggttcgtccaccaccaccacaaccagccggctcccccggcgtctggccccatccaggagttcaagatcttctgccgcgccaactagatctactgcctggccgttcgcgactgcgcctattttttttccccttcctatctcaatgacttactttcctgttctttgttcttgtacttttctcttttagttccactttttattatacttttctt

SEQ ID NO: 11264 - DNA, 271 bp, Zea mays
  Clone ID: LIB3150-068-P1-N1-H6
ttttctttttacccgagcgggggcattaaggaggcggggatgctttgcgaatgtttgggggtctgagctcgttgagacactggccggcttgcccatcccaagttggttgtgtctggcggggctttagcgtctctgcagacctgtggtgtcaggaatggcgtgaggctggctttacagagcagcgaacactgtccactttcaacggtgggaggtttaacaagagccgttgctttttgaacccaacacatgcctcagaatcttacttaaataa

SEQ ID NO: 11265 - DNA, 277 bp, Zea mays
  Clone ID: LIB3150-068-P1-N1-H7
cctaagctcctatcctctatattctacccactttttctatttaatcccccttggtaccaaaagagaacttttatacccaccaaggttacctctccacaatctctttctatcttccaattttccaatgtcataaactaactacattattaccttatctctaatactcatactttcaattaatcttaccattacacatacaacaattaatctttatacatattatttttatttttttttatctcaataattttaccattcttttcttaatttcatactt

SEQ ID NO: 11266 - DNA, 189 bp, Zea mays
  Clone ID: LIB3150-068-P2-K1-A1
gaagcaaaatttcatgtgcttattattataagttccgaacgcaccgtagtcagagtccttatgaatgcaccagtacaaaactgccccacgaagagtgaaaaaacatatctattccgacgcaaactacagtaggtcaaccagtaaataccactggctgagtacttagaacattggtgtgggtgattcagg

SEQ ID NO: 11267 - DNA, 233 bp, Zea mays
  unsure at all n locations
  Clone ID: LIB3150-068-P2-K1-A11
ccctcggccgnccttttttttttttttttttttaattttttcacccttcctcctttcccccaccatatttttctttaagaaccttttttaaaacactcgggccccccttatttttttttttttccaccccaaaactcttccacaccacccccccctctcccccatacaaactctacaaatcaatcttcccataacccccccacaaacatcttcttaaaacccacaatacactc

SEQ ID NO: 11268 - DNA, 440 bp, Zea mays
  Clone ID: LIB3150-068-P2-K1-A12
ggaaaaaacaagtccagctttttcttgtaataacagttaatcagccaacagaggagatacaaaggagatgagagtagcggcgacagtcggtattcatcgtctcaacatgaagcccttaacaaattcgttcatcacaagagttttcggctgtcttttagccatagttcaggcggaacatgtcattctgcacgaagaaggacccagctgccggcagcaaatggaatgcctgagagaacttgatggggtgctcctcggggccggtgcggatggaaccggagacgaagacgagcatgcctccctggggccccgacggctggcagtcgacggtgacgatctggtgctcgcaggcctggaagggaagagatccgagcttgccggcaatggcggatgggccctggaacttctggccctcgaaggtgagcatggaggtctcctgatac

SEQ ID NO: 11269 - DNA, 59 bp, Zea mays
  unsure at all n locations
  Clone ID: LIB3150-068-P2-K1-A2
cgggcggccgncctttttttttttttttaattaaactttttatccactttctttttact

SEQ ID NO: 11270 - DNA, 388 bp, Zea mays
  Clone ID: LIB3150-068-P2-K1-A3
ccattaaatttttttttaaaatttcctttttcaacaaactccataccttcttgggcggatccaaaaggatctgcgtgggacatgaaaacacaagcacacaaaatgccacgcactactcttccatcgcgttatcttctgtctgctgctgaacaacttcaaccttgaccttcgttttctcagccgcaagatggttgctaataagcttcttcgggagcatggcgatgtcctgctccagctccttggaatccttttccatctccttgcgtttaccaggtttatgtctgtttgagatgtgtttttccatacgatcatgcctaatctttgtaataagcgggatagccttcagggtctgctccgtcaaattgcggtcgtagcgctcgggcctgtt

SEQ ID NO: 11271 - DNA, 386 bp, Zea mays
  Clone ID: LIB3150-068-P2-K1-A4
tttttaacaacttctctttcgagttccttgataaaaattcgggagtacctctacagttgtcgggggggtcatcttgcaacacaagaaaattctgaacaactcgattgctttgcagcactgactaaaccagaaaagggctgcctagtttgttgagtgaaccctatgcttcactacgattaaaacaatgcggacaatggaggtaggcttccaccagcaacatctgcagcagcgccctcatcctcagtagattcgcatggtaacttgtcgtacattgtgtccatgatcactttaccgagaacaaatcggacctcggcaagatccccaagtttcagcgacgagtaatcaatcccacgcatccctcttctcccatcatatgaatgtaggtc

SEQ ID NO: 11272 - DNA, 250 bp, Zea mays
  Clone ID: LIB3150-068-P2-K1-A5
accttaaaaaaaaatttaaaaacccccccccccttttcaaaaccattccaattaaaaccccaaatcccttttcctacacaaacaattctcccccccctaaaccccccccttttcacaaaatacccacccccccccccccttttcccaaacataaaaaactctaaccacccccgtcccccaaaacaacctaaaatacccccccccataaccaaaaaaaacccccctcccaaaaccccccttttttccccct

SEQ ID NO: 11273 - DNA, 467 bp, Zea mays
  Clone ID: LIB3150-068-P2-K1-A6
ccgtagccgttatatagttcggtgcaaaccacaaagggtttttgtccggcacccaagcacaccacagggatacgggcgcaagtagcatgaaagacagctctgcaataagatagtgcatcaaatcatttttacatcaggatgcttccatgtacagtaggcagactgatataactagctgaagcgaagagcatgtcgtcatccttttgttatgatgcttgatatccgctcaaagaacatgcggcacattttcatgctgaatcttatgtcttgcctcatccaatcaacggctatcctttccagtgtgcccaacgaggagagcttatatgaccattcatcagatgtttctagccaggtgaggatgaaactgtaaccactagcttcatgagatactgaaaccgaaaatatttctgttccatcatttactgagatcttcatgcgaactaaagattgaagcagcaaagaaagca

SEQ ID NO: 11274 - DNA, 310 bp, Zea mays
  unsure at all n locations
  Clone ID: LIB3150-068-P2-K1-B6
acctatccaactttttttttttacaaccccaagactctnattagcggggtctaccccacgaggggggggctcttttccctttttctcctgggggaacaaacccctcttccttcactcaaaaaagggcctccaggggatgtgaccacctgccccctccccccatggggaggcgggccccatttttcctcaatccacccccctaaaaaaccccacttgccagcttccgcccgcctttcccccacaacaaatttttttccagggggcccccccccccccccacccattgggccctggatccctttctccaacc

SEQ ID NO: 11275 - DNA, 336 bp, Zea mays
  unsure at all n locations
  Clone ID: LIB3150-068-P2-K1-C10
ccgtccttattaccggtgcgccgccctttttttttttttttttttttnttaatgcatctgaatcttataacatgattaaagcaaacatgttcatagctcataatgacagaagtgacaggacgcgccgatcgaacgctcgatttctgtctcctggaatctataacatttaacaaaccttatgcagtttaatataagtaaataaatactagagaagatactgctggcactgctgggatgattactcctgatgcagngcggctgcggcctcgcctttatgagcatcctccagtactgggaaaacaggaggcttgacttgcatgaacggacgaacactga

SEQ ID NO: 11276 - DNA, 236 bp, Zea mays
  Clone ID: LIB3150-068-P2-K1-C2
tggagaacaatagcacctttcatttaaaccactttggatatttttacagctggactttctggacatgtggtgggagaataactatttttttacacattttgaagcacacataacttcatgaatgattcctcattcttattcactccacatgtaaattgtggacccttccaaataaattgtgaacaatacaccgctggaagagatagatctaccatcattttactactaaaagttca

SEQ ID NO: 11277 - DNA, 231 bp, Zea mays
  Clone ID: LIB3150-068-P2-K1-C6
atattctatctactcctcctaatatttttattatatatttttttttttcgggggtttttttaagttgagggggggtctttccaacaccccaacccccttataaaaaaaaaacactcaccacccatccacccaaaccaaaaaccaccataaaagtgcaccaaaatcaaaaaaacctgcccaagattacaaccccaaaactaaaaaaaccacctggatcacaaaataaaaacc

SEQ ID NO: 11278 - DNA, 291 bp, Zea mays
  unsure at all n locations
  Clone ID: LIB3150-068-P2-K1-D2
tncacnnnnncngagaaatcacaagggggaaaactgcaatggcattagctcacagagtaacaaatggcaagggcaaggttactgggttacagaacccatggctttgattcagatcccaaggttgggttacaggacccatggctacgattcattgttagttaattcagccagggttttaaaaacccatgctcaatgcagctgtaatgaagttggacatcgcagaattgtggttaccttccaaggacctgttgtaacttgtctaaaattttgtttccgcttctcccatttttt

SEQ ID NO: 11279 - DNA, 60 bp, Zea mays
  Clone ID: LIB3150-068-P2-K1-D3
cgtccgaattcccgggctgccgccctttttttttttttttaaaaagggtaaacataacag

SEQ ID NO: 11280 - DNA, 185 bp, Zea mays
  unsure at all n locations
  Clone ID: LIB3150-068-P2-K1-E2
ccgcccttttttttttttttttttataaanataaaaagaaacaatatttctttttttacatttcaaatgttcatgcaggatatttcttacactggcgctgccacccaatataattcttaacacattattactcaatcatcatctctatatgactaaactaacttactaaccaacaactatactac

SEQ ID NO: 11281 - DNA, 266 bp, Zea mays
  Clone ID: LIB3150-068-P2-K1-F1
ccgcccttttttttttttttttttagtagaagtagtgctggtcattatcttttcaaacatatccacacacacacccaccattagccaaagctgcaaagagggaaggcgtacagctaccgcctagtacagcgatgttcgttctacggcgtcgctgcggctggagtcaaagctgcagctgcagcggttaagaaagtttgaaagggtgggcatagattccggcgttccccatagtctacagtttttagggcgtactgagatctttgctg

SEQ ID NO: 11282 - DNA, 152 bp, Zea mays
  unsure at all n locations
  Clone ID: LIB3150-068-P2-K1-F2
annnagccattgcatagtcttatttaaattacagcagtgaaaacccagctacataattatttgaccaagggcgcaaactacataaacctgcacatttctacaacttttagccagacagtgataactgaaaactgctactactactttcacct

SEQ ID NO: 11283 - DNA, 187 bp, Zea mays
  Clone ID: LIB3150-068-P2-K1-F3
gggggggggggccttttaaataaaaataaaaaaaaaaaaaaaaaaaagatttagtaagagaaaaaaagggaaaaaaggggggggttaaaaggggagggaggaaaaaaatcaaaaaaaaaaaaatagggaagagggaaaaaaaagaagaaggggagaaaagagaaggagaagaaagaaaaaggaggga

SEQ ID NO: 11284 - DNA, 211 bp, Zea mays
  unsure at all n locations
  Clone ID: LIB3150-068-P2-K1-F4
gtacttaccggtgcgggcgggcgccctttttattaattttcttattgacaacaaccaatttttttttattgcataccgngatacatgcaccaggttatacaagcaaacagaacgagtgcaaacaaacacatgaatactgatacagataccacacaagcgagctagaggtagttggaatttgtttcttacgttcataccatgtatagccaaa

SEQ ID NO: 11285 - DNA, 129 bp, Zea mays
  Clone ID: LIB3150-068-P2-K1-G1
attaattcttcccttccttttttttccaaacaaaccaccaaatccatcgggggcatgacacgcacgaaaaaggggggcgtacaggtaccgctcaacacaacataatttgctcttcggcataattacaaa

SEQ ID NO: 11286 - DNA, 409 bp, Zea mays
  Clone ID: LIB3150-068-P2-K1-G3
cccggtgcgccgcccttttttttttttttttgggtctaaaagtctagttgcttcttcttgctgagacagtctagtagtatgcacaaacccaaccacaaataaacgcggcgggcaacccacccagtgtcgcgaacgaaacgaaaaagaaaaagacgccggctacgacatcgtctcgtcgctacccagatatacaaaacgccggctatatagcacggcgccgctatggttaacacgaaaaagaattgtctttttcctactgaatccaccctcctcttgttctttttggcatcccttaacccagcgcgacaatgtgagtctccgagagcgcgtggctgttgacacgcacccttcgctgtcgccgaacctccttcttcttcgtttcgccgcgttgctgccaccgtacgccctt

SEQ ID NO: 11287 - DNA, 279 bp, Zea mays
  Clone ID: LIB3150-068-P2-K1-G4
ctccttgatggagacaaaacaactgttggtccggcgaacaaagacctaatcctttctaacactgcctctttctgcgctgtcactgagctcttctacagttctactgaacctccaacttaactcacacacatcgttacagtttagtcgcggtactctgccaaaaacgcctcattgaaagcccttaaactgtttatcaccatatggtttctttttttccttcttaataataatatcattttattttaccattattcaataacttttacacaaatttatttc

SEQ ID NO: 11288 - DNA, 280 bp, Zea mays
  unsure at all n locations
  Clone ID: LIB3150-068-P2-K1-G5
acaggtcaaactgcgttgatagattttctcgagattatgatatagcannctcctgtcaagtttgttgacttcataaggcgctaaacagttccctaagttgagttccagctaagtcaaacaaccaaaaaaatcccccaaacgggtcacataattccccgcctaaacgcgagggctcagttctcctggtccccatcatcgtcattgtcatcaccatccaaattatcatcgtcgtcgtcgtcgtcaacatcttctacatcttcttcaaattcattcttaacct

SEQ ID NO: 11289 - DNA, 141 bp, Zea mays
  Clone ID: LIB3150-068-P2-K1-G6
aaaaaacacaccattttttttttcattaagaatgacataaatcatcgtgagcttttcatatacacagccgaagtcatttcccttttacaacctacacattacaacattctatcctaactcaaaccctataccttttttaat

SEQ ID NO: 11290 - DNA, 252 bp, Zea mays
  unsure at all n locations
  Clone ID: LIB3150-068-P2-K1-G9
aaaaataaaaaaattttttttttttaaattaaaaaaaaaaaattagtagggtatttttaataatattaggagctatattattttataaatttattaaatcttaattnaaatatattatatataataattattttaaatttaattcaatatataaaaaataaatatttttttaattaataaatataatatatattttatgaaatataaaataaatataatataaaataatattaattattattatttttttat

SEQ ID NO: 11291 - DNA, 402 bp, Zea mays
  Clone ID: LIB3150-068-P2-K1-H2
ggccgggccgctgacctctaaggcctcctccacgtcccgctgcgagatgcttaatcggtgggtgatgagcggcttgacgtccaccttgccgctgcgcaggaagtcgatgcacagcggccaggtgtccttgtaccggaacacgcccaccacgtccaccttccgcgccgccggcgccgtcagcggcagcgtcatctcgttgtggcccataccgaccaggcacaccttcccgccgggccgcgtcgtctccagcgccgtcgacatggtcttgctgaacccggcgcagtccaggctgacgtcgatgtgcgagcccatggccgcgcggatgcgctccacctcgtccgccaagttctccgcgcggtgcgacacccgcacggtcgcgtccgcgcccagagacctgtccac

SEQ ID NO: 11292 - DNA, 274 bp, Zea mays
  Clone ID: LIB3150-068-P2-K1-H4
ggccgcccttaatttttttattctttttattttttccactcttcctttttttttttttttttttattttttttttgggcggtttttttttttttgtgggggggtcttcttttttcttttctttttttccgggggacccccaaaaaaaagaacccccccacccccccaaaatgttacaaaaacaataaagcccccccttatcaattttccccccctcctaaataaccccccccaacaaaccgttcaaaagaaaaaatcccccctgtcacgggccc

SEQ ID NO: 11293 - DNA, 411 bp, Zea mays
  unsure at all n locations
  Clone ID: LIB3150-068-P2-K1-H5
cgggcggccttnntttttttttttttttttttttttttatttttttttttttttttttttattttttttctttcacgtatggttttttttttttttcgggcgcactttttttttttttttttttcctttcccagagaaagcgccccccccacaaaccccgtttaaaaaaaaatccccaaccccccgggcttttttgccggggggtccccaaaaaaaaaaaaaatccctttttttttcccacaaaaccaccactttgggccccccccttttttcccgggaaaaacaacgggtgctttaaaaaaaaaatttaaaaccccgaaccccaattctcttgcgggttgtttaaaaaaacctattttttttttttatggttccccccccccataaccccgaaatttacaaaaccccccc

SEQ ID NO: 11294 - DNA, 397 bp, Zea mays
  Clone ID: LIB3150-069-P1-N1-A10
ctcagcctcccctctcccctcctcggcatcttcgccgccggcgatctatctctctcacaatggcggcgcccatgtcagccatcgactcagcgtggcagctcctgatcgccaacttcaccgagttccagctcgccaccgtcgtcaccttcctgctccacgagaccgtcttcttcctctccggcctcccctccctcctcttcgagcgcttcggactcttcgccaagtacaagatccagaagaagagcaacacctctgcttaccaaaacagatgtgtcttgcgcctcattctctaccatgtatgtgtgaacctgcctgtcatgattttctcgtatcctgccttcaaattcatgggtctcaggagctctcttcctttgccacattggtcggttgttgtatc

SEQ ID NO: 11295 - DNA, 148 bp, Zea mays
  Clone ID: LIB3150-069-P1-N1-A11
tccggagcgagctccccatcttgattcggcaaccatggcgacccagatcagcaagaagaagaagttcgtcagcgacggtgttttctacgccgagctcaacgagatgcttacgcgggagctggcggaggacggctactctggcgtggag

SEQ ID NO: 11296 - DNA, 376 bp, Zea mays
  Clone ID: LIB3150-069-P1-N1-A3
gaacttctccagaaaggttatggtttgggatctggtatttctctgttcattgctaccaatatctgtgagaatatcatctggaaggcatttagccccacaaccatcaacagtggtcgtggtgctgaattcgaaagggctgtcattgcactgttccatctgttgattacgagaaccgataaagtccgtgctcttcgtgaggctttctaccgccagaacctttcaaatgtgaccaatttgcttgccactgtcttggtattcctcatagttatctatttccaaggcttccgtgttgtgcttccagtgagatcaaagaatgctcgtggccagcaaggctcatatccaattaagctgttctacacttcaaacatgcccatca

SEQ ID NO: 11297 - DNA, 396 bp, Zea mays
  Clone ID: LIB3150-069-P1-N1-A4
gccgagattgaattggagcttattgaaaaagagaagtcagttcctaactttgttgagcataccaatgatacgatggtgcttgccatgccatcatatgaccgtgatggtagtgaggttaataaacggctccagcaaatccgggaaaatattcggtccctggaaaggtctaggctgaaagaggaaattacagcgcgcagacaaaagaagctgcttctaagacatgcccgtgaaaagtacctagaagagacatgctccagggaaacggagcttatgcaagagctcgacagggaaagagctctcgagatggaacgtgaagtagaaaggcagcgtcaactggatattgagcgtgcaaagtctagggaactgcaattcaacattgatttggaaaaagagaaa

SEQ ID NO: 11298 - DNA, 247 bp, Zea mays
  Clone ID: LIB3150-069-P1-N1-A5
ttagagattggagggaggcccctgcccaaggcaagagaaaccgcggcgcgcggagagggaggaaggtcagacgcagacgggcgaacaagatgagggagatcatcagcatccacatcggccaggccgggatccaggtcggcaacgcctgctgggagctctactgcctcgagcacggcatcgagcacgatggcaccatgcccagtgatttctcggttggcgtcgcacatgatgcctttaacacgttctt

SEQ ID NO: 11299 - DNA, 384 bp, Zea mays
  Clone ID: LIB3150-069-P1-N1-A6
ggtgaagtcattccccagggatgaccccaagaagccttgccatctcactgccttccttggctacaaggctggcatgactcacattgtccgtgaggttgagaagccaggatccaaactccataagaaggaaacttgtgaggctgttaccatcattgaaacccctcctcttgtcattgttgggctcgtggcatatgtgaagactcctcgtggcctccgcacactcaactctgtttgggcccaacatcttagcgaagaagtgaggagaaggttctacaagaactggtgcaagagcaagaagaaggctttcacaaagtatgctctcaaatatgaaaatgatgctggcaagaaggaaattcagctgcagcttgagaagatgaagaaata

SEQ ID NO: 11300 - DNA, 248 bp, Zea mays
  Clone ID: LIB3150-069-P1-N1-A8
aaacactggaagaacattcttcagagtaatgtagaggatcggttgccagcagtattaaaactggaggaagaaagtaaaacacttcgggattttcatgttgttgatattgaactcccagggcagtacttcacagatcaggaaatcgcaccggaccacactgttaagttggacagagttggacctgtcattccaattgttccggaggcatggtagttgcttttgacggttgtcactcattcgttttgttg

SEQ ID NO: 11301 - DNA, 90 bp, Zea mays
  Clone ID: LIB3150-069-P1-N1-A9
gaagagctatgaccccccatgcactcatacttaatcctttatcctctacacccgacccacgtcttttttacactaaaacaacattcttca

SEQ ID NO: 11302 - DNA, 301 bp, Zea mays
  unsure at all n locations
  Clone ID: LIB3150-069-P1-N1-B1
tacgatggcggcgagggcggctgatgagaacagaaggccgggggtgaggaggcccgcgccatgcgtccgagacatggggagccggcgcgcgctcacggacatcaagaacctcgtcggggttgcctcgaacccctgcaccgtcgccaagaagcccgtgctgcacaagagcnnnnnggaccaaaagaagacagcgttgccaagcagcctgccaatgacaaggaaattcgtcgtcttcttggcgagcaaagggcaacctgaatgtcagccgaccggagctggtccagaacccgcagttgatcca

SEQ ID NO: 11303 - DNA, 407 bp, Zea mays
  Clone ID: LIB3150-069-P1-N1-B2
cctgcctctctcctctccggctctcccaccggccaccggccaccggccggcaccgtcgccgccatgccttttcgattccagttcccatggctcaagaacccaactacaaacggcggcacctccaacatagacactaaccctagcccccgcttccccaaccccttcctccctatccaagcccatgtcacctccttcctctcctccttcccccgggcgctcccgccgccgccgccctgggcgcgcatcacctcgccagcctccacctccggggccctacctacctctgagatcgaggagcggctcgccggggtgcccgtgtacgcgctcgccaacgccgcccaggagttcgtgcttgtgtcgtccacacgcgtgggagggcaagggggcgagagcgtgagtccaacgca

SEQ ID NO: 11304 - DNA, 336 bp, Zea mays
  unsure at all n locations
  Clone ID: LIB3150-069-P1-N1-B3
ctccagtcaaggggggtctaaaggagatcgcgcaggcctacgcggattctttcgcgccgagggacggtgacccggcaaaggtccctgactttgttgaagggatggtgtacacagagagcgagggtgtcatgatgacgggcgtgtacgcttccaaagaagaggcgaagaagaagggcaacaagatcaactgcgtggtgttgtggtttaagccctggttctaccagcacgctcagacggcgctgaagaggggcgagtttgtggagtacatcccgacgagggagtactaccaccngnacacccggtgcctgtactgggaggggaagctgatcctgccct

SEQ ID NO: 11305 - DNA, 350 bp, Zea mays
  Clone ID: LIB3150-069-P1-N1-B4
ggcaagagcgtcgtcacaactggccgcaagatcattggcgccaccaaccccctggcttctgagcccggcaccatccgtggcgactttgctgtcgacattggcaggaatgtcattcatggaagtgacagcattgagagtgctaataaggagattgccctgtggttccccgagggccctgctgattggcagagcagccagcacccctggatctacgagaagtaaacatggaaagtttcacatcaaaccttgagagccagaggaagcatgtcaccatttgtgctttagcaatgttttcgaaaagattatgatctgtatcttggaaccttatttcaatggaccaaatttctttc

SEQ ID NO: 11306 - DNA, 403 bp, Zea mays
  Clone ID: LIB3150-069-P1-N1-B5
ttcttatcagactttctcccgtgtcattgagaatgccaatgtcatcatggcaacatatgaagataagctccttggtgatgtccaagtatacccagagaaggggacagttgctttttctgctggtctgcacggatgggccttcaccctcactaactttgcaaagatgtatgcatctaagtttggagttgatgaaactaagatgatggagaggctatggggtgagaacttctttgaccctgccacaaagaagtggaccaccaagaacacaggttcttctacctgcaagagaggatttgttcagttctgctatgagccaatcaagcaaatcatcaagacctgcatgaatgaccagaaggagaaattatggcccatgctgcaaaagctcaatgttaccatgaaggct

SEQ ID NO: 11307 - DNA, 187 bp, Zea mays
  Clone ID: LIB3150-069-P1-N1-B6
ttttcttttcgtacggccgcggatagagaaggaaaaatttccccaaaccctagcttcggatctcgatggcgaacccccgcgttttctttgacatgaccgtcggcggtgccccagccggccggatcgtgatggagctgtacgccaacgaggtgcccattaccgcggatgactttcgcgcgcttggcac

SEQ ID NO: 11308 - DNA, 399 bp, Zea mays
  unsure at all n locations
  Clone ID: LIB3150-069-P1-N1-B7
tttgaagtcattccccaaggatgaccccaagaagccttgccatgggactgccttacttggctacaaggctggcatgactcacattgtccgtgaggttgagaagccaggatccaaactccataagaaggaaacttgtgaggctgttaccatcattgaaacccctcctcttgtcattgttgggctcgtggcatatgtgaagactcctcgtggcctccgcacactcaactctgtttgggcccaacatcttagcgaagaagtgaggagacggttctacaagatactgtgcaagagcaagaagaaggnttttccagagtacgctctcaaacaacgacaccatgatttcaagcttnnnnttccacacgcgtgggagggcaagggggcgagagcgtgagtccaacg

SEQ ID NO: 11309 - DNA, 395 bp, Zea mays
  Clone ID: LIB3150-069-P1-N1-C1
ctgccttctgcgcctccatttcggcctgtgtcccttgcaagttcagtctcgcctccaaccatgggtaaagagaagtcccacatcaacattgtggttattggccatgtcgactctggcaagtcgaccaccacaggacaccttatctacaagcttggaggcattgacaagcgtgtgatcgagaggtttgagaaggaggctgctgaaatgaacaagcggtccttcaagtacgcctgggtgctcgacaagctcaaggctgagcgtgagagaggtatcaccattgatattgctctgtggaagtttgagaccaccaagtactactgcacggtcattgatgcccctggacaccgtgacttcatcaagaacatgatcactggtacctcccaggctgactgtgc

SEQ ID NO: 11310 - DNA, 116 bp, Zea mays
  Clone ID: LIB3150-069-P1-N1-C12
tcataccattagctttatctactccagagcgcagaagaacccgatcgacaccatgagggtgttgctcgttgccctctctcttctggctctcgctgcgagcgccaccttcacgcata

SEQ ID NO: 11311 - DNA, 399 bp, Zea mays
  unsure at all n locations
  Clone ID: LIB3150-069-P1-N1-C3
ccgaggccgctatggccgcggccatggcatcactcggcgccgccgccgtggtgcactgcaacaccgagccccactcccaggccgccatcgtacgcgctgccaagtcccgccgcctccccttcgtttcctccgtgcccttcttctccccgtcctcctccccgacgctcaacgatttcgctggcagcgagtacgccctcgtcaccgagcgcggagattcgctctccaggctcgtcggcatcgctgtcgcggccgatgctgcctcccgcgagggtcccatctctgtctcggagtacatgcgaccgacgccacgctcagcctnctctgccttcgacttcgaggaagcagcaaccttccttgccgatgagggtctggattacgctcctctcgtatccgatgatg

SEQ ID NO: 11312 - DNA, 73 bp, Zea mays
  unsure at all n locations
  Clone ID: LIB3150-069-P1-N1-C5
tttctctttcccctccnacctcccacggtccgaccatcccagggccgccgcgcgggggtctttccgtacacct

SEQ ID NO: 11313 - DNA, 208 bp, Zea mays
  Clone ID: LIB3150-069-P1-N1-C6
tgctggtgttcgccagcggcccgccatgtcctcctccaccgcgcgcgggcgcgccgcaacctcgcctacttccgcgccaactacgcgctggccgcgctcgcgctcgtcttcctcggcctcgtctaccgccccgcgtccatgctcgcgttcctggcgctcttcatcgcctggctcggcctctacttcggccgcggcggctgggagcctg

SEQ ID NO: 11314 - DNA, 402 bp, Zea mays
  Clone ID: LIB3150-069-P1-N1-D1
ggcgtcccccaagaactagtaaacatggcaaaactgttgagcctgttcttagccctctcctttgtagcagctatgtttgccataggctctcatgctgatggagactgtgagaatgacctccaaagcctgataagtgactgcaagacatacgtgatgttcccagctaatccaaaggtccctccttcggatgcttgctgtggtgtcatcaagaaggcaaacgtttcttgcttgtgctccaaggtcaccaaagaaactgagaaggttgtgtgcatggagaaggttgtgtatgttgctgagcagtgtaagaggccatttgagcatggctttcagtgcggaagctacaaggttccagcaaactgatgataccataagagggaagcgtttggcgtagtctttagattt

SEQ ID NO: 11315 - DNA, 378 bp, Zea mays
  Clone ID: LIB3150-069-P1-N1-D2
cggagcacgacctcacggcgctgatggcggcgcagctggaccgccacctggtgttccccctgctggagttcctccaggagcggcagctctactcggagtcggagatcctggaggccaagatccgcctcctcagcggcaccaacatggtcgactacgccatggacatccacaagtccctctacggcaccgacgacgtgcccgaggacatggtgaagcgccgcgccgaggtcgtctccaggctcaggtcgctcgaggaggccgcagccccgctcgtcgccttcctccagaacccgcagctcgtgcaggagttcaggcccgacaaacagtacaacatccacatgctccaggagcgataccagatcggtcctgaccagattg

SEQ ID NO: 11316 - DNA, 373 bp, Zea mays
  Clone ID: LIB3150-069-P1-N1-D3
caggagttcccgcatctccctctctggtctggtcacaggagctccgagacctctccaatggcggttaagatctacgttgtgtactattccatgtatgggcatgttggcaaactagctgacgagatcaagaaaggtgccttatctgttgaaggtgttgaggctaagatatggcaggtccctgaaattctctctgaagaagtgcttggaaagatgggcgcgccccctaagcccgacgtgccagtcatcacaccgcaggaacttgcagaggctgacggtatcctctttgggtttccgacaaggttcggaatgatggcagcttagatgaaggcgttcttcgatgccaccggtgggctctggagggagcatagccttt

SEQ ID NO: 11317 - DNA, 136 bp, Zea mays
  Clone ID: LIB3150-069-P1-N1-D4
tctcagaccattagctttatctactccagagcgcagaataacccgatcgacaccatgagggtgttgctcgttgccctcgctctcctggctctcgctgcgagcgccacctccacgcatacaagcggtggctgttgtt

SEQ ID NO: 11318 - DNA, 393 bp, Zea mays
  Clone ID: LIB3150-069-P1-N1-D5
tttgaaattcttgcatataattgagaattctccagtgtacccagttatctatgatagcaacaggactgtattatcattacctcctatcattaatggcgcacattcagctatcacccttgcaacaaggaatgtctttattgaatgtacagctactgaccttaccaaagcaaatatagttctgaatacaatggttaccatgttctctgaatattgtgagactaaatttgaagtggaacctgttgaagtgatacatcatgatggaaggaaaacagtttaccctgatctttcatgttacaaaatggatgttttggtatctgacattcttgggcctattggcatcttccaggacgagaaacaggttgtctgtcttttgaataaaatgcaacttcaagc

SEQ ID NO: 11319 - DNA, 322 bp, Zea mays
  Clone ID: LIB3150-069-P1-N1-D6
cattctccctcgctcgaactcttttattagctgcttggtgcgatagagactggatcaagttttaagcttcacctccagccatgggtaaagagaagtcccacatcaacattgtggttattggccatgtcgactctggcaagtcaaccaccactggccacctgatctacaagcttggaggcattgacaagcgtgtgattgagaggttcgagaaggaagccgtttaaatgaacaaacggttcttcaagtacgcctgggtgcttgacaagctcaaggctgagcgtgagagaggtatcaccatttttttttgcttttgtggatgttt

SEQ ID NO: 11320 - DNA, 400 bp, Zea mays
  Clone ID: LIB3150-069-P1-N1-E1
cccacgcgtccgccattcctcccaacaccacctcgcctgcgatctccgtagcctccgtcgcgtcgagcatcgatcatgtcggcctactgcggaaagtacaaggatgagctcatcaagaatgctgcctacattggcacccctggcaagggtatccttgctgctgatgagtccactggcaccattggcaagcgcctttccagcatcaatgtcgagaacgttgaggagaaccgccgtgccctccgtgagctcctattctgctgccctggtgctctccagtacatcagcggtgtgatcctcttcgaggagaccctgtaccagaagaccaaggatggcaagccttttgttgatgtcctcaaggagggaggcgtcctccctggcatcaaggttgacaagggcacca

SEQ ID NO: 11321 - DNA, 387 bp, Zea mays
  Clone ID: LIB3150-069-P1-N1-E2
caagcaacatagaaagtggaatacagtagcaacaatagagcaacaatggcggccaagatattttccatccttatgctccttgctctttctgcatgtgttgctaacgcgaccatttttcctcaatactcacaagctcctatagctgcccttcttcccccataccttccatcaatgaccgcttcagtatgtgaaaacccagcccttcaaccctacaggctccaacaagcaatcgcaacaagcaacttacctttatcacccctgttctttcaacaatcgccagccctatctttggtgcagtcattggtacaaaccatcagggcacaacagctgcagcaactcgtgctaccagtgatcagccaagtagctctggcaaacctttctccctac

SEQ ID NO: 11322 - DNA, 182 bp, Zea mays
  Clone ID: LIB3150-069-P1-N1-E4
tttctttttcatctcgccagctttgcgggaaaagagacaccagggacaagccccgcctcctctcccgagtcctgacgtgccccttttgctccggccccacttcctcgcaaaaccctaacccctcgatctcccaagatggcgttgcagcctccgccccctgcctcagtcgcggcatttggagc

SEQ ID NO: 11323 - DNA, 361 bp, Zea mays
  Clone ID: LIB3150-069-P1-N1-F1
atttcagattgataggggaagaagaccaggaattccacacccaacttgtcaatgggttccagtcactcaccgctgagctatctcactatatccctgctatactctccgagctatgatagaactgtagcaagccagaaattaggtagcatgtgaatggttgttcattcattcagttgcaggttcccaccaaatgtccatatttccattagctttggttgtatagttctaggaaccggaaattaactagtcttcgaagttctgtaccgtattgcagaaccgattcctgatttttaactgtgcataacagataacactaggtattatacagactttacactccaaaatcaagaatcggttctgc

SEQ ID NO: 11324 - DNA, 400 bp, Zea mays
  Clone ID: LIB3150-069-P1-N1-F2
tcccaattttcaaggtttgcctgatgaaaagcctcctttgcttgtcaaaacacatggaggaccaactgctgaaacacgtgcaattctggacctcagtgtccagtattggacaagtagagggtgggcatatgtcgatgtcaactatggaggaagcactggttatggaagagagtatcgggagagactattgaacaaatggggtattgttgatgttgatgattgctgcggctgtgcgagattcctggtggagagtgggaaagtagatgggcagcgcctttgtattactggtagatcagcaggtggatacactactttagcttcacttgcattcagagacacgttcaaggctggagcttctctctatggtgttggggacttgactctgttgagagcggagaca

SEQ ID NO: 11325 - DNA, 377 bp, Zea mays
  Clone ID: LIB3150-069-P1-N1-F3
aaaatttgaaacaaaggatgattctaaaagttcaaaaagtttggaatctcttcaaggagtacaacatgtgacttctatgctgacaaagaatggtgcggtcttttgtaaagactatctagccagaatcaatgtttcacatgaccttgttgagtctgagttgtacaaaaggtgtatatccttgctgggagacttgggcgtaacaaaagcctctcatttggttaggaatggaattcaggataacgaaaatattggaaaaatgtctacaaattatggacacctcaaccctttcagttcacgttacctcaagagtgacagtactatctttcagagggctttggcccttcttaacaaccagactcgtaagggtttatttactg

SEQ ID NO: 11326 - DNA, 319 bp, Zea mays
  Clone ID: LIB3150-069-P1-N1-F4
ctcatctgcgtacacggtctccctcttcctgtcagtagtagagtgagagtgaggcagcgagtgggagacaaggggaaatggggaagggagcgcaagggagcgatgcggcggcggcgggcggcgaggtggaggagaacatggcggcgtggctggttgccaagaacaccctcaagatcatgcccttcaagctcccgcccgtcggcccttatgatgtccgcgtgcgcatgaaggcagtggggatttgcggcagcgatgtgcactacctaagggagatgcgcatcgcgcacttcgtggtgaaggagccgatggtgatcggtca

SEQ ID NO: 11327 - DNA, 330 bp, Zea mays
  Clone ID: LIB3150-069-P1-N1-F7
atcactctagaccacgacccacttttttttttttcacaggcactctacctaacgagcttctttccttgtagaacgcgcatgatttccaacctttcaaccatggtcacacctgacccataccttgcacgattgtccacctttcgatactgtacaatcttgttctgaccaacaattctgtatctggagagatcccaaaggtctttggcagccttaaaaaactgacacagttggacctttcagataaccatcttagtgggaacatttctgaggagcttgtggagattgtctagattaacacgcttgatctgtcacacaatgagctttctggtc

SEQ ID NO: 11328 - DNA, 382 bp, Zea mays
  Clone ID: LIB3150-069-P1-N1-G1
tggaagttgcagatcctgatgcagttcatgctgtccgtaactttattaagaaggagcttgccgtgcaacttaaagatgatcttcttgcggctgtgaaaagcaacaggagttctgaggcttacacatttaaccatgatagtatggctcgccgtgcattaaaaaatacatgccttgcataccttgcgtcattgaatgagccagatttcgttgagcttgcactgcatgagtacaagtctgcgactaacatgacagagcagtttgctgcattagcagcattatcccaaaatccaggccaagttcgtgatgatgccctcttggatttctataacaagtgtcagcatgaatacttggttgtaagcatgtggtttgctctttaagctac

SEQ ID NO: 11329 - DNA, 388 bp, Zea mays
  Clone ID: LIB3150-069-P1-N1-G2
ggattgggttcaaagttgggcttttggacagctgtggtgtgcacggcagctctgtgacttgtgaggaggaagggagcggatccatggcgtcgaagcggatcctcaaggagctcaaggacctgcagaaggatcctcccacctcttgcagcgcaggccctgttgccgaagatatgttctactggcaggcgacgattatggggccatcagatagcccatacgctggtggcgtatttttggtcactattcactttccaccggactacccattcaaaccaccgaaggttgcattcaagacgaaggtttaccatccgaatatcaacagcaacgggagcatctgtcttgatatcttgaaggagcaatggagccctgcactgacagtttctaaggt

SEQ ID NO: 11330 - DNA, 404 bp, Zea mays
  Clone ID: LIB3150-069-P1-N1-G3
cttcagaccattagctttatctactccagagcgcagaagaacccgatcgacaccatgagggtgttgctcgttgccctcgctctcctggctctcgctgcgagcgccacctccacgcatacaagcggcggctgcggctgccagccaccgccgccggttcatctaccgccgccggtgcatctgccacctccggttcacctgccacctccggtgcatctcccaccgccggtccacctgccgccgccggtccacctgccaccgccggtccatgtgccgccgccggttcatctgccgccgccaccatgccactaccctactcaaccgccccggcctcagcctcatccccagccacacccatgcccgtgccaacagccgcatccaagcccgtgccagctgcagggaacctg

SEQ ID NO: 11331 - DNA, 408 bp, Zea mays
  Clone ID: LIB3150-069-P1-N1-G4
ttcgcttatcagcagccgtcggacatgcaggtcgactcctccgtcgccgaggagaagccggccatcagattctccatcaacgtgcttgagctcatgagggaggcgcagatgcagcatggtctccgccagagcgactacacgcggtaccggagatactgctctgcacgactcagaaggctgtacaagtctctcaagtttttgcatggccgaggtaaatacaacagaaggaatataaccgagtcaacagtcacggatgtgaggtttctccatgtagtgttttatatggccgagcgagcatggagtcatgccatggagaagaaaactgctggtacaaatgcaaaacaacgcatctacatgttgggtcgatttcggaaagcagttaaatgggcatcacttttttcacaatta

SEQ ID NO: 11332 - DNA, 384 bp, Zea mays
  Clone ID: LIB3150-069-P1-N1-G5
aacaagtgccagcgccctctcgcagtcgccgcaatggagagcaccttcatcatgatcaagcctgacggcgtccagaggggcctcattggtgagatcatcagccgttttgagaagaagggcttctacctcaaggccttgaagcttgtgaacgtggagaggtcgtttgctgagaagcactacgccgatctcgcctccaagcccttcttccagggcctcgtggactacatcatctctggccctgtggtggccatggtctgggagggcaagagcgtcgtcacaactggccgcaagatcattggcgccaccaaccccctggcttctgagcccggcaccattcgtggcgactttgctgtctacattggcaggaatgtcattcatggaagt

SEQ ID NO: 11333 - DNA, 397 bp, Zea mays
  Clone ID: LIB3150-069-P1-N1-G6
gctgctgatgcttccccggtctcagctatcgggtttgagggctatgagaagcgccttgagatcacattctctgaggcacctgtctttgtggaccctcatgggcgtggtttgcgtgccctctccagggcccagattgactctgttctggatcttgcacggtgcacaattgtgtccgagctctccaacaaggatttcgactcatatgtcctttctgagtcaagcttgtttatctatcctctgaagattgtcatcaagacctgtggcactaccaagctcctgctcaccattccaagaatccttgagcttgctgaagagctgtctatgccacttgctgctgtgaagtactcccgtgggacgttcatctttcctggcgcacagccagccccccacaggagct

SEQ ID NO: 11334 - DNA, 210 bp, Zea mays
  Clone ID: LIB3150-069-P1-N1-G7
ttttatttttaaaagctgggcttttttacaggttttgtgtgcacattaggggggttacttctgagcagcaaaaaagcgattctattgcgtctaatctaaacctcaagaagctcaaggccctcacaataaaaccttataccttttgtatccctgtctctaataacacatacattgtatacctgtaggctatgaatatgccgccattatata

SEQ ID NO: 11335 - DNA, 370 bp, Zea mays
  unsure at all n locations
  Clone ID: LIB3150-069-P1-N1-H1
tcgatcggtgtccctagcctccccctgcccggctgtcctcctcgatttcgcgggctcctggttacggcggcatctatcgttccgccgcaagggccgcatcgtctctctcgcgacgctgccccagaccgccgagataatggctggccaccgaaacagtcatggaaagcgccagtctgattttactgaaaatggaggcagtaagagaagaaatcctggcgatgatacatatgcacctggtcctgatgacactgtgtatcgctacctctgtgcctctagaaaaattgggagtatcattggcaggggtggagaaatttcattgcaattttagactgtnacccaagctaaaatctagattggctagtgtgttcct

SEQ ID NO: 11336 - DNA, 401 bp, Zea mays
  Clone ID: LIB3150-069-P1-N1-H3
gaggtggcaccaaagcctaagccaaagaaccctcttgatttgcttcctcctagcaagatgattcttgatgattggaagaggctgtactctaacacgaaaaccaacttccgtgaggttgctattaaaggtttctgggatatgtacgacccagagggctactccctgtggttctgtgactacaagtacaatgatgagaacacagtgtcgtttgtgaccatgaacaaggttggtggcttcctgcagcggatggacctgtgccgcaaatacgcctttggcaagatgcttgtggtaggctctgagccccctttcaaggtcaaggggctctggctcttcaggggctcagaaattcccaagtttgtcatggacgaagtctatgacatggagctttatgagtggaccaa

SEQ ID NO: 11337 - DNA, 360 bp, Zea mays
  Clone ID: LIB3150-069-P1-N1-H4
actcgccgtcgtcttctgcggttctgccgtctacgcctccaatttggcctctctcccttgcaagtttaagcttcaccttcaaccatgggtaaggagaagtcccacatcaacattgtggtcattggccacgtcgactctggcaagtcgaccaccaccggccacctgatctacaagcttggaggcattgacaagcgtgtaatagagaggtttgagaaggaggctgctgagatgaacaagcggtccttcaagtatgcttgggtgctcgacaagctcaaggctgagcgtgagaggggtatcaccattgatattgctctgtggaagtttgagaccaccaagtattactgcaccgtcattgatgcc

SEQ ID NO: 11338 - DNA, 250 bp, Zea mays
  Clone ID: LIB3150-069-P2-K1-A2
ggcggccgtccttttttttttttttagataattatctttgagccattgtttgcgataatgtgcaacaggatgcttgggttcttatacactagaaaaaaggattcattttttcgcaactgaatgtaatataacaccatcatgatgcagcgaagaaacaagagagaaaatgctgggtgcagtaattccaaaaatcaaaattattcttggcttggagcatcggttgtcgactccatgagatcttctgttgcat

SEQ ID NO: 11339 - DNA, 153 bp, Zea mays
  Clone ID: LIB3150-069-P2-K1-A3
gaccacccccccgcccaaattttttgaaaagaatagaatatttttaggtgggaggatttaaaacaaaggagaagatctattttttatttggagtacaataattgaggaattttttagggatatattaacgtgtgttgatagaataatgtatta

SEQ ID NO: 11340 - DNA, 176 bp, Zea mays
  Clone ID: LIB3150-069-P2-K1-A4
gccgcccttttttttttttttttttttaattatacaatacatctttttttttagcacaaaaccatattccttatggggccctttaatataagtaaagggtccaatttaacccttttcatttaaatatatcccccactatatactctaatcaattcattccttaaaaacctaatccc

SEQ ID NO: 11341 - DNA, 63 bp, Zea mays
  Clone ID: LIB3150-069-P2-K1-A7
tcccagacggccgccctttttttttttttttttttcttttttttaatggttttttttctccaa

SEQ ID NO: 11342 - DNA, 265 bp, Zea mays
  Clone ID: LIB3150-069-P2-K1-B3
caattctaaaaataaacgttccaacaacaaagaaagaaactttccttcaactaaaattctaaataaagaacttcattcttattcaatgttaacactcaacataattcaatctttaaataaatttttttctccatcaaaatcttaatttaccaatttctcaatttcctctccacacttatttatcaaccattctttttaatcatttaaccccctttccttttaacatccatctttcttatttttttctttctcattcctaatttta

SEQ ID NO: 11343 - DNA, 332 bp, Zea mays
  Clone ID: LIB3150-069-P2-K1-B5
acaaacggatgctgcaaattttttttgtatccgtcacttcatatagcaaaagagctccaagcatcatcggatagcaattgactggaacactgatacagctatatagataaagcattggcatagaagacacatacaagtacttgaatgcctctcctattcctcatatcatcaatcatcattatatctaatgtaggccaacacgcttatcctatttaacgaccaatgtacaaaatgcgagcagcccgtgctgtggcagggcaaatcaccaaaacgtgctgcaaatcatggtagaagtggacgcaccacgacattgcatgaagattgccatccca

SEQ ID NO: 11344 - DNA, 312 bp, Zea mays
  unsure at all n locations
  Clone ID: LIB3150-069-P2-K1-B6
ctaccnncnnctaaaacaagctcttttattattcattcattcaatacnaaaaagaagtctatatcacatacagtagaaggtttctntcttctctcatcattctttattcaaattntatattttaactacactattaccaatttccttcttttaattcattcaaccctttctttcttccatttaaactttataataaatttttctaacactttactttactatattctctactatataatcaataatctcctccatattaactttatatatatctcctatatacaatttataactccttccttctttttattt

SEQ ID NO: 11345 - DNA, 310 bp, Zea mays
  unsure at all n locations
  Clone ID: LIB3150-069-P2-K1-B9
ccttattccccgacagccagccctttttttttttttttttttttattttaaaaaaattttttttttnannatncnaccanaattctaatagatttttttaaaaaaagaagagaaatcatctccttccatttaaaacttntaatcttccccttttcattttttctcaaatacacctccattaaaatattctcatatttatattatttttacttttattaaatatttcatatttccctttatttttccaattttttcctccaaaaattcatttctttattttcattcttttatttccctttctcaaacctat

SEQ ID NO: 11346 - DNA, 215 bp, Zea mays
  unsure at all n locations
  Clone ID: LIB3150-069-P2-K1-C11
aattaagaacaatactttttttttttcatttcaattgttcattcanggaaaggctctcactgacactaagaagaatctttattctttacacattattactcaatcatctccaataaatgactcaactaactagctagccagtggctatactacaacacatattttcttcagtgttatacaccccctacagcacttgtacgttcatttattcatct

SEQ ID NO: 11347 - DNA, 187 bp, Zea mays
  unsure at all n locations
  Clone ID: LIB3150-069-P2-K1-C3
aattccaaaagacccatttaatttctttaacagatacccannctttctccaagtactctcttataaacaaacatagaatcacatttcacactttacttacaaacattctcacaaaacatacaatactcatatcttactcttaacacaataatcctctctttctctttacctctccccttcccatcac

SEQ ID NO: 11348 - DNA, 107 bp, Zea mays
  unsure at all n locations
  Clone ID: LIB3150-069-P2-K1-C8
acaaaaaaanaaaaattttttttataccacacttccacaccccacaaagaaaattctctagaaaagaaaagaaaaaactactttctcatcacacaaaccctattctc

SEQ ID NO: 11349 - DNA, 213 bp, Zea mays
  unsure at all n locations
  Clone ID: LIB3150-069-P2-K1-D12
cccttttttttttttttttnnannntataaccaaaaaattttttttccctaccaacacatcatatacaaagaaanttttccagaaaaaaagaaccccccttccccanttcaacaaaaaaacacaatacccaaaatcaaaaaaaaacaccttccataacaaaaaacctacaaaacccaaacaaaaaatctaacataacacacaaaaccccacac

SEQ ID NO: 11350 - DNA, 465 bp, Zea mays
  unsure at all n locations
  Clone ID: LIB3150-069-P2-K1-D3
aataaaaatttttttttttnacatnncncttttttttaaaaagattttttcaaaagaaaaaagataccctttctcccctccccttcttcttctctcctctccttctctcttcctctcctcctctctttcccccctctttctcctttttccttcctcttttcttctctcctcccactcctctcccacctcttctcttctcttctccacttccctcttctttctcctcttctttttttccccatatattcttctcttcatcccctttctcttcctccttcttcttctccctttcttacttctctattcttcctttcccttctcctcttcctcctgtcttttccctcctctccttccttattctccttcttctctcatcttttctcccctcccttcttcctctcttcactctacttccctattctctttctcttacctcttctactccctttcccttactccttctct

SEQ ID NO: 11351 - DNA, 190 bp, Zea mays
  unsure at all n locations
  Clone ID: LIB3150-069-P2-K1-D4
cctccacctccnncccccccagaagacctttttttacaataaatagtattctccccccctttattttaatccttccctcatttaccctaattttcccaccaacaccactttcataaatatactacctcccttcccaaatttaaccaaaacctatttccaaaatgcttcccatccttatttttcccctcta

SEQ ID NO: 11352 - DNA, 423 bp, Zea mays
  unsure at all n locations
  Clone ID: LIB3150-069-P2-K1-D5
ccaacataacatatttattcttccaaaataaccaatccaagccaagggagatccaccccctagtaaagtgaattctctanccccacctatacttccaataaagtaaacaaagtaattgcattctaaagataggtatcaagcaaaaattgccagcaatttctgaatcatcaaaaacattcagctggagaggaccccatcattcattgatagattagccagctgctgctcgatgaaaacattgctcttctaaagatgctgggctgagcgtagaacctccatttcttcagcaaccttagccttgagagcatctggcgactccaacatgtgaataacctccgtctggtccatctccaaatacatgccaatgaccttatcagcctgctcactctccatcttttcaacaagaatttacattttctcacc

SEQ ID NO: 11353 - DNA, 151 bp, Zea mays
  unsure at all n locations
  Clone ID: LIB3150-069-P2-K1-D6
cctcataaaccantttttttaaaagaatctttctaaaaaagaaagaaacccaacccctctctaacctcttcaccccccaatttatttaatttaccccccactttatcccccaacaaatattttccatcaattcctcaccttttcatttcat

SEQ ID NO: 11354 - DNA, 296 bp, Zea mays
  unsure at all n locations
  Clone ID: LIB3150-069-P2-K1-D8
anacctgttccatcattttttttttaggcaaacnacatttcaacgaggggattcctccactcgaaagaaggtttatatattcaaataaaaacanttcttttctgcttttaatgcttccactacaaaatcaccttagtagctctctagcaaacaccaccattcatttattgctaccgtacaaacatttttacaaaatgcatcatcgagcttgtatatcttcacatgaaaacattcccatcctctttctttcttaataagtcttcactgattcccttatcttttctcccacttatacc

SEQ ID NO: 11355 - DNA, 301 bp, Zea mays
  Clone ID: LIB3150-069-P2-K1-E1
aacttaaaaaggagtcgagtgtccttacgtatgtttacttaaaggaggcacctaaaacatcatgttggtgagggggcgtcatcatcattatacatccttaaccaccaccagacccgtacttcttgccaaagacaaccacctggagcttgtcgtacccatcaaggacaccagcaccaactacagctcgtaggatgtttgcgccatcacccttgaatagatacttgattccctcctttgctacaatcttcttgaaagccttcaacgagctttttaacttgtccgcctcaccatatgttattat

SEQ ID NO: 11356 - DNA, 249 bp, Zea mays
  unsure at all n locations
  Clone ID: LIB3150-069-P2-K1-E10
attacttataattatttaaaaaagaatatttctccaaaataaagaataatcacctcanttcttctttttctcatacaaattaacctatttctcacattcatattttcattttatcaataatttacaaactcttcaaacttaaaattatatacaattatttattatttttacctcttcccattctttcttcaattattacactctttattccataatcttttttcaactcttttacttaaattttttttc

SEQ ID NO: 11357 - DNA, 335 bp, Zea mays
  unsure at all n locations
  Clone ID: LIB3150-069-P2-K1-E12
caaagattctttatcccacggaataaaatcnnatctaagaacctttctaaaaataaaaaagacgtctttcacctcccctaattctattcatcacaatctattcactcattcctcttttattttaatactactcaatttactttcccattaaattcaaaacttctaaaattctccactttccacattcataactttctaaaccaataactttcatcacaatttataattccattactatattgcaatcctttaatcccctattcactaattccaaccactaatcttacataaaaataaaatcttcttaaatcctcttactctctaatatccatacc

SEQ ID NO: 11358 - DNA, 365 bp, Zea mays
  unsure at all n locations
  Clone ID: LIB3150-069-P2-K1-E6
ctntaaannagccctaaatttttcccttaccagtaacacccccctacagaactttttcaagagaaagacaagacactcatcccaaattcacatccatgattaccgacatttcccttcattttcctatttcaacttccttgcaaaccatatctccttcctcatctcttctatccacacattttatctactccaaccgctcctatctacctatattctacctcaattataccttcctactctccctttctctttacattaattcccttcacctttttactttctttctcatttaatcttttccaaatagcaaaaaataaattctcttccattcttccttcctttccatttccttttttttaccctct

SEQ ID NO: 11359 - DNA, 178 bp, Zea mays
  Clone ID: LIB3150-069-P2-K1-E7
attaaaaaaaaaaaaaaaaaaaaaaaaaaaaataataaaaaaaaaaaagaaggaaaggaaggaaaaaaagaagaaaaaaaaaaaaagggaaagaaaaaaaagaaaaaagaaaaaaaggagaaaaaagagaaagaaagaaggaaaaaaaaaagaaaaaagaaaaagaagggaaagaaaa

SEQ ID NO: 11360 - DNA, 288 bp, Zea mays
  unsure at all n locations
  Clone ID: LIB3150-069-P2-K1-F1
ccccnccncccccncccccaaaagggccttttttgagaaccaatggcccccaaanctttgttcaacacaacatcattcaaatcctttactggaattaaacaaaatgcttaacgaacagggccccaaaaactttcccaagaaaaattctttttttttgggccctcaaaacacaaaacacggggcccatttacctttcacataaaaagagtcggccttaaaccccttaaaaatggcccgacctttcttgtaggccgcctcacctttcggtccacaagataaaactttatc

SEQ ID NO: 11361 - DNA, 327 bp, Zea mays
  unsure at all n locations
  Clone ID: LIB3150-069-P2-K1-F12
caaaaaannccnattnacggtggctttcttctcaggcagacggggcttctgcccccccaccaaaaacccccccttctttcttccccccgtcaccccaccccaagaccccctggggcacaccctctttctctttaccccccccccattttattgcccacagagggggggacccccaacccaaaaacccctccgggcaacccccggggggaaaaaaacttttcttcccctattaaccccccttgggcccccccccccagggaaaaaccctccccccccttttttccccccccgcctttaaaaaaaccccccccttctgggagccccccc

SEQ ID NO: 11362 - DNA, 451 bp, Zea mays
  Clone ID: LIB3150-069-P2-K1-F2
aaccttcctcacccccgcattcttccaactttttttttttatagtggggccacataaaattagggggctggccgttgtacaacaacgtgactactaaaaccacgctgtcaccacacttattaatcttgttgcacatcatccttttttcagctggtgtcataacaacgaggagggcaccaatgatcgttcttaacaactgctgagcctgcttggtgaataatacgccccgtgctgcagcgcatcattaaccgcggctgttgtagttactcccagcatgaccactactcttgtcagcagcctactacccgctgcttctgctgctttccctcccttctttgtcacgacggtcggcttttctccccatgatgttattaatgggctgcttcctggagggcgacttagtagtgctctacagctcctccaccacaaactagttgaggaggatgatgga

SEQ ID NO: 11363 - DNA, 470 bp, Zea mays
  Clone ID: LIB3150-069-P2-K1-F3
gcggccggccttttttttttttttttttttttaagaaccaaaagggctttttgcgacagacttcaattccaaatgcaaagagtagagcagttcagcaagggatgatggaaggaaacacccaaacattacccaggacacaaacaaaggtttttcaacaccacaacctggctcgacagccaaacagattcatgcaagcagatcagtattcctcctcctcgtcgccgtcatcactgccgccctctgcggcgacctcctcgtagtccttctccagggcggccaggtcctcgcgtgcctcggagaactccccctcctccatgccctcgccgacgtaccagtgcacgaacgcgcgcttggcgtacatgaggtcgaacttgctgttgatgcgggagaacacctcgacgacgctggtggagttggagatcatgcacacggcacgctgcaccttggcgaggtcggcacccggcaccact

SEQ ID NO: 11364 - DNA, 372 bp, Zea mays
  unsure at all n locations
  Clone ID: LIB3150-069-P2-K1-F4
ctacccaccncaattcccaaaccaaaggggttttcttttaggcaaggaaggtttaaaaaaacaccccatctttcccaataaacaaacaaagttttttcaacaccccaccctgctcgacagccaaacatattaatgcccgcatatcactttccctctcctcgtaaacatcatcactgncggcctctacgacgacctccatagaatccttctccagggcagacaagtcctcccctgcctcaaagaacttccccttctccattccctcgccaacgtaccagtgcactaacgcgcacttgtcgttcatgaggtcaaactttctgttgatgcagaaaaacaccttgtccacgcttgtggacttttaaatcatgcaca

SEQ ID NO: 11365 - DNA, 397 bp, Zea mays
  Clone ID: LIB3150-069-P2-K1-F5
gcaaattccttttagtatccattttttaaatatagcaaagcaacccccaagggtattcttttctaaggtaacggaaacattgatccagacatttaggtaaaacattggcatagatggcaaacaagtacttgagtgcctctcctattcctcatatcatcatcatatcatctaatgcaggtcaagattgtctattttaacggccaatttacaaatgcgagcagcccttgctgtggcaggacccataagcacgcaaatcaccataacgcacctcaaatcatggtaaaagttgacgcaccaccaccttgcaggagatcgccacccccgtggtattgcactagtctgggagctgttttggacttttgccactgaccaccaatcaggcaaggtatttgtacgt

SEQ ID NO: 11366 - DNA, 158 bp, Zea mays
  Clone ID: LIB3150-069-P2-K1-F6
aaagggaagggtttttttttgagagttttttttttggggtttgagaaaaaaaaaagaactggaaaaacccaatttttaaagggccaccacctttcttgaaaaatataaaaaagcccccccctttaaatgatccaggggaaccaaaaaaaaaattgggg

SEQ ID NO: 11367 - DNA, 411 bp, Zea mays
  Clone ID: LIB3150-069-P2-K1-F8
ctcgtggaacaaaactgcaaccggggcacattcagaaaaaagctaagctcacttcccatattagcgcgcggttctgtctcagatggccgcaggaagggaaacaaaagtgcaaaacatgtccagactcagcttgaacctggcgacccaaaggcacgcgccatccacatttattcttggcatacacaagcagaaaccatccatgaaatgcaggggggaaaaacccctactgggtcttgaacatgtggcggatcaggccgcccacccggttgctgtagccccactcgttgttatcccacgagacgagcttgacaaagagttccttcaaagcgatcccggccttggcgtccaaaatgctcgacctgctggcaccaaggaaagcggtagaaaccagatccttttccacattaccca

SEQ ID NO: 11368 - DNA, 352 bp, Zea mays
  Clone ID: LIB3150-069-P2-K1-G1
gctgcgacatatttcttctattatagcaccaaatataaacaaaggagtcgtcgttgtacaacaacgggactactaaaacaaccgtgtcaccacacatattaatcttgttgcacatcatccttttttcagctggtgtcataacaaagaggagggcaccaatcatcgttcttaacaacagctgagcatgcttgatgaatagtacgacccgtgctgcagcgcatcattaaccgcggttgttgtggtgactcccagcatgaccactacatctgtcagcagcctactagcggctgcttttgtttttttctttccctttttagtcacattggtcggcttttttccttaagaagttaat

SEQ ID NO: 11369 - DNA, 173 bp, Zea mays
  unsure at all n locations
  Clone ID: LIB3150-069-P2-K1-G10
attcccgcagcagccgcccttttttttttttttttttttattcattttcntttttttttttttttttattttttttttttttaagggcctctttccaccccaaaaggagcttttcccctcatttccatcccattttatcatccctttaacccatcatttaacccccaccccca

SEQ ID NO: 11370 - DNA, 318 bp, Zea mays
  Clone ID: LIB3150-069-P2-K1-G2
cctccatcttacctccttctactttttccttctccccccctcctccagagaactcttctataaacaacagaagtctctcttcttcccccccttcttctctctatttcttttttcttaaatccttcttttttttccttccattcttacttcattccttccctcccccaccctttcctacatcattttcctccttcatatcttctattacttcctcccttttttcatctattcctcctctacttcttttttcttctctttactttttttattcttcatttttttcttcatatcttctctatttcttctttttttcctttc

SEQ ID NO: 11371 - DNA, 239 bp, Zea mays
  unsure at all n locations
  Clone ID: LIB3150-069-P2-K1-G6
cgcggtcaggagcagcatcgacagcgccagctccttcttgtatatcctgttgtgcttctccttcttcttcttcacggtggtggcggcggcggcaagatccttcctcgacattcnttntnatttttttttttttttaattacttttattctatttttttattttactctatttacatactttcttttctctttttcttctctttttattcttctttttttctcattttttttattttttt

SEQ ID NO: 11372 - DNA, 399 bp, Zea mays
  Clone ID: LIB3150-069-P2-K1-G9
cctgcaggtaccgtccgtattcccgagcagccgccctttttttttttttttgaaagaaacaagaacgttgcatcttatcttaggtatggttaactcaaatactggcaacaaaacagcataaaggggcaatgcttagctttgaattcttgagctggaatggaacaaaacaaaatgtcttgggcatttaacttgttcaaaacaagtagaaaagctgaatggacattgccaacggactcttgggagactacagagacgggtaacagctcatttcagaggaataaaccgcgaggagtgggtggctccgatacctggcctgccatgcttgaccggcttatatgagtttgataactcatgaaggcatttatctttcatctcatgctaaatctcaaccctgtttaa

SEQ ID NO: 11373 - DNA, 400 bp, Zea mays
  unsure at all n locations
  Clone ID: LIB3150-069-P2-K1-H1
atccagcagttttatccagatgtgatagccgaatttatcgagacactaagttatataacagggaaacagttcaagcgctccaaaatttgactagagcttataaaagaaagtgcagtactggactagaaagctacagctttatttcaatacttcacttctttgctttcttcggtgccccagtagctggagctgtggatgagacaggtggtgttatttctcgtggaccctgtgccatccttttctccctcctagcgatcttccttttacggctcgccttgcttttggcgcgcttggcctcaaactggtcagaaagggncttttttttggccttttcagccttggacttgtggatacttttcataagcaccctttttttctttgaaggctttcctttgacctt

SEQ ID NO: 11374 - DNA, 307 bp, Zea mays
  unsure at all n locations
  Clone ID: LIB3150-069-P2-K1-H12
ccgttctttttattttttttttttactnntagaggaccagaggtttgaacgcactcaattctggncagattaagtccatgttagaattatgtcggttgtaaccgaaaaggcctaaccatttaaaaaccattaacacactctcaatggcacgctagctaacccaccatattgcacgtttccagcaccttgcacacgtggcctaaacacacggacgcatctcacttgctacaacaactgttaactagttagctgagtggacgcttgatggaaggagggagtaaagccatcagcctcagttatttttcca

SEQ ID NO: 11375 - DNA, 353 bp, Zea mays
  Clone ID: LIB3150-069-P2-K1-H2
aaaaaggaaagagtttctaagggaatttcacttacaacacaagagtaatatcctcaagcttatgacaaactttttattccctcactgccaccccacccatcccttgcaaaacccctgcatctaaaaaaaggacagggattgcttgagaaccccaaccatgatgaacaggaggaggttgctcccaagccccttcatccttcacaagaaggcgaatttctacctttatcattaccccgaaccttcaagtcccggatctggggtccttgcccgtggtcgcctcaaggccctttaaccctcattccacctttgccctagtctgttttcttttgaatttaattattcaacccttacca

SEQ ID NO: 11376 - DNA, 430 bp, Zea mays
  Clone ID: LIB3150-069-P2-K1-H3
accccgggccacttccgcctgcctcccccggaatttttcgggtttgatcgatggcgtcgaagaggatcctgaaggagttgaaggagcggcataaggacccgcccacctcctgcagcgcaagtcctgttggtgaggacatgttccattggcaagcgaccatcatggtgccttcggacagcccatttgcaggtggggtattcttggtgaacattcacttcccaccggattaccctttcaagccaccaaaggtgtctttccgcaccaaggtattccacccgtacatcaacagcaacggcagcatttgccttgacattcttaaggaacagtggagtcctgctttaactatctcaaaggttctcctgtcaatctgctcactgctcacggacccaaaccctgatgatcctcttgtccctgagattgctcacatgta

SEQ ID NO: 11377 - DNA, 370 bp, Zea mays
  Clone ID: LIB3150-069-P2-K1-H4
agttccgcgcgcccttttttttttttttttttttttaaaactgaaacctcattttttattctttaacaaagcacaaaagaacgaaaacttgcgaattcgttacaggacgtcaacacataagttaaacacaaaaagacagcgtgtccaaaaccagcatggatccagcgtccaggggcaccgttcacatttattctcagcatagacaagcagcaaagatggtctgcgaccaaaggccattggggacgacccacgatagggaggcagaaatctatctctctactagcctactgggtcttgaacatgtggcggatcaggtcgacgacgcgggtgctgtagccccactcgttgtcgtaccactagacgagcttga

SEQ ID NO: 11378 - DNA, 395 bp, Zea mays
  Clone ID: LIB3150-069-P2-K1-H5
aaaatgataagagtccaaattttaactttaaatatatgcccatggaaaaggggttttcatgtgctggaacgggaccttgtgatttctattaagtttcaactctagctaaccacaacataataagagttgggtctaaaagaccatgttttacattctccaatatgcagtacaacaccgtttagattgaggcacgtaacagcaagccaatgcatgaatcatccgatgggcgtgttctaatggcctgcagtagaccaaccagagcccttgcgatactccttggcggccatattctacttggtcatggttcctacgccgatgaggaccttgctaccttggtgaacgcgctcaaaacccataactcgcccttaaaaacgtacctgtccttgatgattgct

SEQ ID NO: 11379 - DNA, 308 bp, Zea mays
  Clone ID: LIB3150-069-P2-K1-H6
atattataaaaaatccaatttttttttttaaggggcaactacatatacgggggccaacacattaagacagaaggatttttttcaggttcaaagagcaatcaattatttgtaaaacccaatccactcttaaaaggattggatcggattcttttacaaacaacccaagatttgatggttgatgacccattttttcacaaacggacggtcccacacatttctttggagtagtacaaattatttgccggtcacctaatgatcaatcctcattgatcagtgcttgtgcttcttgggcttttttactatcatta

SEQ ID NO: 11380 - DNA, 475 bp, Zea mays
  unsure at all n locations
  Clone ID: LIB3150-069-P2-K1-H7
cctgccgtaccgtccgnattcccgtgcggccgccctttttttttttttttttttttaaacccaggacctttatttcctggtcccaccaaaaaaaagcctaaaagcataccttaatgggtttggtgtttggccgaaaaattttaccattaccctgttaccatttccaaattaccgggaaaccaaccttgccccttccgttttttttggtttgcccaaaaaaaaaaatcaagaagtggccccctaggtgccagcttttccaatccgtattttttggcctgtggcaattaccattcctcccagtgggaaagcacatttttcttaatggattaagtaacctggcctaaccttccgtgaaggctattccaggctctgccccgccttggaaccgttacccctgaaagggtcccagttcttcggggggttacccaacttgtcccttgcccaattgagtccagtgtatgcaccacaaccttgt

SEQ ID NO: 11381 - DNA, 392 bp, Zea mays
  Clone ID: LIB3150-069-P2-K1-H9
tcccgggcagccgcccttttttttttttttttttttttttattataaaaagtcatttctttgatagtaccaaatgttaaaaaggggaaaaacaattggcgaagtgggaagcaaaaaagcagtacagcctcagataacaataagtctgaacggtacaatatagtttgcgtttttcactataatagccagccatggatcttcaatcgtcatcaccaaaggtggtcttttttcctgtactagctgtaccagcggtctgtttgaaaggcgtacccctttcaccacggcttttgtttcccctttcaccattggcttcaaattcacttccatgtataccacctatgtcttttttactacttctcttctttgcctccattgatgcatttcattttttct

SEQ ID NO: 11382 - DNA, 339 bp, Zea mays
  Clone ID: LIB3150-070-P1-N1-A1
tctccccactgcctcgtgtggccgtcgtctcgcgttcggaacgccaagccggggctccggcgaaatggcccccaagcgaggtggcagggcgccggtgccggccaagaagaagacggataaagtgacgaaccctctattcgagaagaggccgaagcagttcggcatcggcggcgcgttgccgcccaagaaggacctgcaccggttcgtcaagtggcccaaggtcgtgcgtatccagcggcagcgccgcatcctcaagcagcgccttaaggtaccaccggcgcttaaccagttcacccgcaaccctgacaagaaccttgctacgaacctttttaagatgct

SEQ ID NO: 11383 - DNA, 211 bp, Zea mays
  Clone ID: LIB3150-070-P1-N1-A11
ttatcacccaccacaaaacggcctattggtttttatcccaatccatatatagattggatgagattaagagagtttaaattcttaacaaaaaaaaaaaaaaaaaaaaaaaaaaaataaaaaaataaaaaaaaaaaaaaaaaaaaaatataaaaaaaaaaaaaaaaataaaaaattttttatatttttaaattatatatattattttaataaa

SEQ ID NO: 11384 - DNA, 394 bp, Zea mays
  unsure at all n locations
  Clone ID: LIB3150-070-P1-N1-A12
ctcaagcacgtgattgtcttctcccaatgggcctcacatctgagaatgttgcacaccgttttggcataacacgactggaccaagatcaagctgctgttgagtcacatagaaaggctgctgccgcagcagctgctggtaaattcaaagaggaaattgtgccagttcatacaaagattgttgatccaaaaactggtgaggaaaagaagatcgtagtctctgcagatgatggaatccgagtggatacttctcttgcagtcctgtcaaaactcaaaccagcattttcaaaggatggcagcactactgctgggaatgcaagccaagtgagcgatggcgctggggccgtcttgctaatgagacgggatgttgctatgaanaagggtcttccagttcttgg

SEQ ID NO: 11385 - DNA, 348 bp, Zea mays
  Clone ID: LIB3150-070-P1-N1-A2
tctgttcaccacaacatcgatgtcattcacgtgaaaaaaaatgtttgtgggagtgtgcttgggacactcatgagtgatagatgggaaacccaggaccatgcaaaagcacgagcttaccttgaagaattggacataaagcccgagctctattctgacaagtccagtgcccaaccacctttattcagaatatattgccagaaaaaacccgaatggcaatcatgaacctctacttatttaatgtaatctctcaaaaagtccttgatgaaagatcactggatgatcatgaaatgaacatgtgtgagatgatgtgtctttccgagcttacttctcgctgactttctttgacat

SEQ ID NO: 11386 - DNA, 403 bp, Zea mays
  Clone ID: LIB3150-070-P1-N1-A3
gcggcggtgaaggccggcaggacgatcatcgactgggacggcatggccaagttgctcgtcaccgacgaggcgcgcaaggagttcgccgccctccgccgcgctttcgatgacgtcaaccaccagctccagaccaagttctcccaggaaccccagccgattgattgggagtactacagaaaaggaattggatcaaaagtggtggatatgtacaaagaggcttttgaaagcatcgagatcccgaagtacgtcgacacagttactccccagtacaagccaaagtttgatgctgtgattgctgaattaaaggaggctgagaaagagcatcagaaggagtcagaaaggatagagaaggaacttgctgaaatggaggaaatgaggaaaaagatcagtacaatgacagcag

SEQ ID NO: 11387 - DNA, 395 bp, Zea mays
  Clone ID: LIB3150-070-P1-N1-A5
gggaatcacatcgccatggcagccaagatgtttgcattgtttgcgctcctagctctttgtgcaaccgccactagtgctacccatatcccagggcacttgtcaccactactgatgccattggctaccatgaacccatggatgcagtactgcatgaagcaacagggggttgccaacttgctagcgtggccgaccctgatgctgcagcaactgttggccttaccgcttcagccgtgccagatgccaatgatgatgccaggtatgatgccaccgatgacaatgatgccgatgccgaatatgatgccatcgatgatggtgccgactatgatgtcaccaataacgatagctagtatgatgccaccgatgatgatgccaaacatggtttcaccaatgatgat

SEQ ID NO: 11388 - DNA, 349 bp, Zea mays
  Clone ID: LIB3150-070-P1-N1-A7
tctctgacgcgtgggatttgggcaagtggagcttgtacagcttcctgtgggtgcaatgactggattgtgcaaaggttatggatttattcagtttgcacggcttgaagatgcaaaagctgcacagagcttgaatgggcagcttgatatcgctggcagagttattaaggcttcatcttttaccgatcatttgggaatgcaaacctagtgagcaactactggagacttatatttctatgatatttctcaaaaggcactcttttgaaaggtccacggggtggtctataaaaataaaaatggtttagagatgatttttttttccccggtttttttttttggatttttttttttt

SEQ ID NO: 11389 - DNA, 393 bp, Zea mays
  Clone ID: LIB3150-070-P1-N1-A8
cggcaccagaacctctgcctccgcagggtgcttgctggtatcattacaatctggtagttttagtggttgggcttgacttcctactattcagaaacacagtaccgagaagtctttaggtggggtcaaagatggtgtcgctgaagttgcaaaagcgccttgccgcgagctacctcaagtgtgggaaaggcaaggtgtggcttgacccaaatgaagttagtgagatctccatggcaaactcccgccagaatatccggaagttggttaaggatgggtttatcatcaagaagcctcataagatccactctagatcccgtgcaagaagggcacatgacgccaagcaaaagggacgccactcaggatatggtaagcgtaggggtaccagggaggctaggc

SEQ ID NO: 11390 - DNA, 370 bp, Zea mays
  Clone ID: LIB3150-070-P1-N1-A9
gttaccaaccccaccagggtcgccaaggccatcaatgagaagacctgcgaatgctctcctcttgaaggtgaaccaaatcgggtctgtgaccgagagtatcgaagctgtcaggatgtccaagcgcgccggatggggagtgatggcaagccacaggagtggcgagacagaggacaccttcattgctgacctctcagttggcctgtctacgggccaaatcaagacgggagctccttgccggtctgagcgcctggccaaatacaaccagctgctcaggatcgaggaagagctcggtgatgccgcggtctacgccggagcaaagttcagggcaccagtggagccctactaagaaaggaagaggatggggatgttt

SEQ ID NO: 11391 - DNA, 342 bp, Zea mays
  Clone ID: LIB3150-070-P1-N1-B1
ctcacgcgtgcgaccgaatctgtgagccatgtctaccaacaagggcagcgcggccaagggcggctgagggaaaaagaaggtggtgaagaacgagacccagctcgggatggcctatatgaagggccacaacttctatgagtggtactgccaggtcgtttttaactctgcaatgctttaccactataacatgtcctgctccgatatattgagggcaccaacgtcgggcgtatgcagcgctactggacagattcttatgcagcagccttaaggtaccctcgaccctaaaccatattatctgcaccctcttgatgatcctaacttcctaccttttgaagatgcttc

SEQ ID NO: 11392 - DNA, 203 bp, Zea mays
  Clone ID: LIB3150-070-P1-N1-B3
tcttcgctgactttcctcgccttctccgccgagcgcgagactcctatctcgggggcaccgcaacacacatagcaacccctacttccggtccgatccgcgctctcctttccgttgcttcaataatggataggaatgacacctgcaggttcttagttcgacgctaaacactatgattctaacatgcaagtatctttgatcacctc

SEQ ID NO: 11393 - DNA, 281 bp, Zea mays
  Clone ID: LIB3150-070-P1-N1-B4
tttcttggttgaggatgttgatgagaaggaagaaaaggaaaagaagaagaagaagatcaaggaggtttctcatgagtggcaattggttaacaagcagaagcctatctggatgagaaagcctgaggagattaccaaagaagagtatgctgctttctacaagagcttgaccaacgactgggaggagcatctcgccgttaagcacttctctgttgagggtcagcttgagttcaaggctgtcctgtttgtgccgaagagggcccccttttgtcctctttgacacc

SEQ ID NO: 11394 - DNA, 339 bp, Zea mays
  Clone ID: LIB3150-070-P1-N1-B5
ctctgcggcaagtactacagggtgtgctgcctcagtatcatcgacccaggtgactcggacatcatcagtaccacccctggcacccagtgagccagccccggcacccattgcagctgcttcgcctttctcaaaatgagatgagatgtagcgctccggccctatgtccgtttccttttttatcttttagctatgtaattttgctaccatgtgtccatctaccatactgatagtacctcttattatggctgctatgcaaggcatatccatggttttgtttgtaatataaaatatatattaaattatataaaataattttattatatttatgggcgggcgccc

SEQ ID NO: 11395 - DNA, 289 bp, Zea mays
  unsure at all n locations
  Clone ID: LIB3150-070-P1-N1-B9
tctccttantcatcctccaccaggtacaaagggtgtggtcatctcttctccggggaggaacccctattctcccaccanatcacttgtttaactttgttgaggggtgatggcgttttttttcgcaaaccttaacacctagtcagttcttaaaaagcttgatgagtaccttcttactctcagctacatcactgtctaccaagcttccaaggatgacttggctgactacacttcgttttcgtctgctccctcatccaagtatattatacttatcacgtgttgtttaatctca

SEQ ID NO: 11396 - DNA, 401 bp, Zea mays
  Clone ID: LIB3150-070-P1-N1-C1
ctcccatccagccgccaccaggtgcagagtctttcgtcatctcttctccggcgaagaacccccagtcgcccaccagatcacttgttaaactttgttgaggggtgatggcggtttctttcgcaaacctcaacaccgaggcagggcttaaaaagcttgatgagtaccttctcactcgcagctacatcactggctaccaagcttccaaggatgacttggctgtctacacttcgttttcgtctgctccctcgtccaagtatatcaacgtagcaaggtggtttaatcacattgatgcgctcgtgaggctgagcggaattactgcagagggccaaggtgtgaaggttgaatcctcagcagttccttcagccccaactccagatgttgctgaagcacatgccccagct

SEQ ID NO: 11397 - DNA, 70 bp, Zea mays
  Clone ID: LIB3150-070-P1-N1-C3
tctagtttctgtggcggacaatgattcttcaggtgtcttttcatatcctggggaggagccatctatcctt

SEQ ID NO: 11398 - DNA, 381 bp, Zea mays
  Clone ID: LIB3150-070-P1-N1-C6
tgtcctgacatgaggcaattacatggaaagtccctcgttgaagtaaacagaagtttccttgaaaaacacaatgcttccttgatgcaccgagcagctggtgctgaaatgatgtatctcttagagccaaataagaagatggaggcaattaatttaattgaagattcaacaaatattacatcatcagggcatagtttgcttggtccttgaaaaacatggcaaattcaagattgtattgatgtttataaattgctggagacagtctttggtgatcatattttttcttttggtgtgtggtttttgttttctttttttttttttgttttgtaatgtcttttttttattttattgttttattatttttttttttcttttctttttttt

SEQ ID NO: 11399 - DNA, 397 bp, Zea mays
  Clone ID: LIB3150-070-P1-N1-D1
ctccgcctcagcgcgtcgcccgccgccacatcctacagcgacctcatcgatcaccttcaactttcaatcatggcggacgtcgatgtcgaaccggaggttgccgccggcgctcccaagaagaggacgttccgcaagtacagctaccgcggcgtcgacctagatgcgcttctcgacatgtccacggacgacctcgtccagctcttccccgcgcgcgccaggagaaggttccagaggggtctgaagaggaagcccatggcactcatcaagaagctgcgcaaggcgaaaaaggatgctcctgctggtgagaagccagagccagtcaagacacatctccgtaacatgatcattgtccctgagatgattggaagcattgttggggtctacaacggcaagacgt

SEQ ID NO: 11400 - DNA, 389 bp, Zea mays
  unsure at all n locations
  Clone ID: LIB3150-070-P1-N1-D2
ctggccatgtcgttctataagaaactagtgatcgttggcttcgccttaaccttgctccttgtgtcattccgaatggatgcgactgcaaagctttgcagtacgacaatggagagactcatttgcggcggagcaagtcgaggcgacgtgaacagggcatgcgatgaaacgtgcagatccaagggctacacgggtggcggcttttgcaacatgaaaatacaacgctgtgtttgtcgcaagccgtgtgtccaggaggagcaaacagaggcgcgcgccagagacgaagcatncggcgctggagatatgatgagccggacgatggcagattgagtgatgcgcatgacagatgtttagccaccatatatatatatatatatatatatataaggaat

SEQ ID NO: 11401 - DNA, 290 bp, Zea mays
  Clone ID: LIB3150-070-P1-N1-D4
ttttggatccaaggtctcaagtaagattggtgtcattgagtccttgctggcgaaggtcgatatcctcatccttggtggtggtatgatctacacattttacaaggcacaaggatattctgttggaaaatctctcgtggaagaggataaacttgagctcgcaacttctcttattgagaaggcgaaggcaaagggggtttctcttttgcttcccactgatattgtagtagcggacatgtttgcagctgatgctgagagcaagattgtcccttccactgttttcccttatgact

SEQ ID NO: 11402 - DNA, 78 bp, Zea mays
  Clone ID: LIB3150-070-P1-N1-D5
tctctttaaccctagtcgggcttcatacatccggcagcgcgttcctttttcttcggggggggtaactctcttttgctg

SEQ ID NO: 11403 - DNA, 386 bp, Zea mays
  Clone ID: LIB3150-070-P1-N1-D6
gactcgtatacccaggcggcggttgaggaggaggagaagaagaagaagaagatggcttcctccgcgtacgcctcatggtccaagcggtggatccgtcccgaggtgtacccgctgttcgtgccgatggccgtggccctgggtatctgctcgtaccagcttgtgcgcaacatcacgggcaaccccgaggtgcgggtgaccaaggtgaagagggcggccggcgttctggacatccacgacgagggcgagaggttcgccatgcactgtctcaagaagttcgtccgctgtaagaatcccgagatcatggcttacatcaacttcttcttcgccgacccttccatggacttttaatctagtttccgtatggttggatgagtttgttttaccta

SEQ ID NO: 11404 - DNA, 209 bp, Zea mays
  Clone ID: LIB3150-070-P1-N1-D7
ttttctctctcagcgcgtcgcccgccaccacaggctgacattttcactaatcgatgacgttcaactttcaatcatgtctgacttcgatgtctaacctttcgttgcctccatctctcccaataagatgacgttccttaagtacagctacctctacttttacctacatactcttcttaacattcccacggacgacctcattcagctctttc

SEQ ID NO: 11405 - DNA, 368 bp, Zea mays
  Clone ID: LIB3150-070-P1-N1-E2
ttctttctcctctactcgccagtcgccatgggcgggattaagatcggaatcaacgggttcggaaggatcggcaggctcgtggccagggtcgccctccagagcgaggatgtcgagctcgtcgccgtcaacgaccccttcatcaccacggactacatgacctacatgttcaagtacgacaccgtccacggccactggaagcacagcgacatcacactcaaggactccaagacccttctcttcggtgacaagccggtcaccgtctttggcatcaggaaccctgaggaaatcccgtggggtgaggctggcgctgagtatgtcgtggagtccaccggcgtcttcactgacaaggacaaggctgctgcacatct

SEQ ID NO: 11406 - DNA, 393 bp, Zea mays
  Clone ID: LIB3150-070-P1-N1-E4
ttaaaacagagcgaagccaatggaaggactggaggagggaagtagcgtgatagtgatgccgtagtggtcgagctcgcggcggagcagagaccagagagtgagagcgagcagagcaaccaaagcgtaggcgatctcaacgcgaagcggaattgattgcgcccaccaccacgtcttctccccctccgtccgacccgtcctcaagtcaccaggccaccatcattgccgccatcccgccgcccggccgcgggagcccagctacgcattcataactgtttctctcttggcttctcggcgaagtgttgcggttgcgggtactggagtgcggagagcagcgcggcgcgagggaggaagccaccacccaccaccaccttcattaaaggcgctcacgcgccg

SEQ ID NO: 11407 - DNA, 375 bp, Zea mays
  Clone ID: LIB3150-070-P1-N1-E7
cccgtccccgtccgcgccggccgacgccgccttttcgtccccgcgtcagcgtcgcggctccactgagcgtgcgtgtcaccggcgggaggcaagggcaggcggtggtggcgatggcgtccgctgacgcgcgcttggcggggatcgcctcctccatccgcgtcatccccgacttccccaagccagggatcatgttccaggacatcacgacgttgctgctcgatcccaaggcgttccgtgacaccatcgacctctttgtcgagcggtacaaggaccaagggatcaccgtggttgctggtgttgaagctagagggttcatttttggtccttctatcgctttagccattggcgcaataattgtgcctttgaggaagccga

SEQ ID NO: 11408 - DNA, 377 bp, Zea mays
  Clone ID: LIB3150-070-P1-N1-F1
aagctgaacacactgtgtgaccgtgttaagaccctggccattaccaaaagtgtcatctttgtcaacacccgccgaagggtggactggctcactgacaagatgagggagcagggaccacaccgtttctgccactcatggtgacatggaccagaacactagagacatcatcatgagggagttccggtctggctcctcccgtgtgctcatcaccactgacctgcttgctcgtggtattgatgttcagcaggtgtccctggtcatcaactatgatcttcccacccagccagagaactacctgcatcgtattggtcgtagtggtcgttttggtaggaagggtgttgccatcaactttgtgacccgcgacgacgaacgtatgc

SEQ ID NO: 11409 - DNA, 378 bp, Zea mays
  Clone ID: LIB3150-070-P1-N1-F10
gcagaattttatgtcaaagttgaagataacattaatcttgacttagctgggttaattgagatgctcgaaggccgtcgaggtagccaaggattgtacatgggttgtatgaaatcagggatggtcataagtgaagagggccaacaatggtatgaacctgagtggtggaaatttggagattcaaaaacgtattttcgacacgcttctggttctttgtttatcctctcaaaaaatttggctcgctacatcaacataaatagtgcgtcactgcagagttatgcacacgatgatatatcagtaggttcatggatgatgggactgaatgcaacttacgtggatgatgtccgtgtgtgctgcatcatttccagtcaagtgataatc

SEQ ID NO: 11410 - DNA, 397 bp, Zea mays
  Clone ID: LIB3150-070-P1-N1-F2
ggcaaggttgaggatgttgatgagaaggaagaaaaggaaaagaagaagaagaagatcaaggaggtttctcatgagtggcaattggttaacaagcagaagcctatctggatgagaaagcctgaggagattaccaaagaagagtatgctgctttctacaagagcttgaccaacgactgggaggagcatctcgccgttaagcacttctctgttgagggtcagcttgagttcaaggctgtcctgtttgtgccgaagagggccccctttgacctcttcgacaccaggaagaaactgaacaacatcaagctctatgtgcgccgtgtcttcatcatggacaactgtgaggagctgatcccagagtggctgagctttgtcaagggcattgttgactctgaggacc

SEQ ID NO: 11411 - DNA, 167 bp, Zea mays
  unsure at all n locations
  Clone ID: LIB3150-070-P1-N1-F3
ttcttggtgcccgaggggattcgcgtccccatgccaattcacaacgcatggtcggggtcccacaacacggtccactaaccctagcgacagcctnggctcgtttgatccccgcggggagctctagttccgccaagcgtgcgttccggcgtttcggatccgggaccgaa

SEQ ID NO: 11412 - DNA, 299 bp, Zea mays
  unsure at all n locations
  Clone ID: LIB3150-070-P1-N1-F4
acttactcacaccaatctccgcccccgcattgcgtcgaacacctggtgttcgctggcaccgaccccaccgaaccgtaccttcaccaacaacaccaccagtccaccaccacccaccttccacatgtgcacacgctcccttcttccgttcaccaccgttatatatcccggcgcccctttcttccttccccgtccttccctccgnctacgnccccgcccactccttgctgtcaccacttctgtcacctnttgccgcgccgacgcatccttcatggaccccgtttcacatggtgtctaacccc

SEQ ID NO: 11413 - DNA, 350 bp, Zea mays
  Clone ID: LIB3150-070-P1-N1-G1
ttcttatagagcacgcgctcacggctgtcggatccgttcagacctccgtatgtatcaaagctgccaacggtgtagtgattgccactgagaagaaactgccttctattttggtggatgaaacatctgtgcaaaagattcaggcactaacaccaaatattggagttgtctatagtgggatgggtccagattttcgtgttctggtgagaaaaagtcgaaagcaggcacagcagtattatcggttgtacaaggagcatatacctgtaacacatcttgtgcgggagactgcttctgtgatgcatgagttcacacagtcaggtggtgtaagaccatttggagtatcgctgtagatt

SEQ ID NO: 11414 - DNA, 288 bp, Zea mays
  Clone ID: LIB3150-070-P1-N1-G12
ttatcctatacagttaacccactcttccctttttttattcttctcctaccataactctgggtgagttttatatatgagggggggcggtcttcaacatacttgttttcttttaatacacatttctttttttatcggtttcactattgtctctttttcagcatttttcaattcttcacagctcatttctaccaatctttttattgtttatctttactgctgtgattttttacttaaactaattcaaatcatttatcatcctttctatattttttcttgattctataactt

SEQ ID NO: 11415 - DNA, 397 bp, Zea mays
  Clone ID: LIB3150-070-P1-N1-G2
cgctcctgtccaccctgccaccgccgacgccgcgccgccgcagcaactgtcaccgtcgctatggcccgtatcaaggtgcacgagctccgggggaagagcaagacggacctgcaggcgcagctcaaggagctgaagtctgagctctccctcctccgcgtagccaaggtcaccggcggcgcacccaacaagctctccaagatcaaggtggtgcgcacctctatcgcgcgcgtgctcacagtgatctcgcagaagcagaagtcggcgttgcgggaggcgtacaagaagaagaacctgctccccctcgacctccgccctaagaagacccgtgccatccgccgccgtctgaccaagcaccagctttctctgaagacggagagggtaaagaagcgtgagaagt

SEQ ID NO: 11416 - DNA, 230 bp, Zea mays
  Clone ID: LIB3150-070-P1-N1-G3
tctccgctgttaggttctaccaggagaccttcggcgtccctccggccacgcgagctcgccgaaatggtcgcccacaggttccatcagtaccaggtggtgggttgtgcgctttctacctcaaccgatgagcaccctatgatctaccgtatgaagctttgggtcaccatcgtgggttgtgcctagttcatttttttttttcttttttgagatagtttatgttggtgattatg

SEQ ID NO: 11417 - DNA, 390 bp, Zea mays
  Clone ID: LIB3150-070-P1-N1-G4
cgtctattaaaaaccttgaagctacaatgtattggtactggggatgacgccctagatgctattggttcattctgtcctcttttagagatcttgtcactcaacaactttgaacgatttacagacaggagccttacttcaattgcaaaagggtgcaagaatctcacagatcttgttctcactgattgccagttactaactgatagaagccttgaatttgtagctcgtaactgcaaaaagttagcacgtttgaagatcaatggttgtcagagcatggaatctgttgcactggagcacattgggcgatggtgtccgcgccttttggagctctctctaattttctgccccaggatcgagaacagtgcattcctggagatttggagcggcttgctt

SEQ ID NO: 11418 - DNA, 181 bp, Zea mays
  Clone ID: LIB3150-070-P1-N1-G5
tcttctttataacaagcttgccatgcaggagttcatgatcctcccaactggtgcctcctcgttcaaggaggccatgaagatgggagttgaggtgtaccacaacctgaagagcataatcaagaagaagtacggtcaggatgcgacaaatgttggggatgaaggtggtttattacctatacat

SEQ ID NO: 11419 - DNA, 206 bp, Zea mays
  Clone ID: LIB3150-070-P1-N1-G6
cttcaacatcaacgccggcatcgttaaggggctctgcactgccatcgccaagcactgccccaacgctcttgtcaatatgatcagcaaccctgttaactccactgtcccgattgcggcggaggttttcaagaaggctggtacttatgatgcgaagaagctgtttggtgtgactactcttgatgttgatcgtgctaaaactttttatg

SEQ ID NO: 11420 - DNA, 396 bp, Zea mays
  Clone ID: LIB3150-070-P1-N1-H1
cttccccaactctgcaggctgctcgtcgccctccctccacgccggacgcgccccgatccagatccaggggcgtaacatggcatcaaaacgtatcctcaaggaattaaaggacctgcaaaaggaccctccaacgtcatgcagtgctggtcctgctggtgaggatatgttccactggcaggcaaccatcatgggtcctcctgatagtccatatgctggaggtgttttcttagtgaacattcatttccccccggactaccctttcaagcctccaaaggtatcttttaagacgaaggtcttccatccaaacatcaatagtaatggaagcatatgtctcgacattcttaaggagcagtggagccctgctttgacaatctgtaaggttatgctttctatctg

SEQ ID NO: 11421 - DNA, 337 bp, Zea mays
  Clone ID: LIB3150-070-P1-N1-H3
cgcgccgcacgcctgcgtcggtcgccgaccccagtcaccggtccacgcccggggcctttctcctccggcctttcttgtgaccgccgccgcgggccctagcccgccgttccctctccggcgccccgctcccgcacccgcaccggatcagtccgggccgcgcggtcgcccccacctaccgtctcggagtcactcgctcgcggttgcgtgtcccgcggggtggcccctaggtcctgagaagctaccggattcaaatggggctctcgtaggccgactctggcgacagggtgcatctctttttgttccacctccagagggggcagcaggagggccaggatct

SEQ ID NO: 11422 - DNA, 392 bp, Zea mays
  Clone ID: LIB3150-070-P1-N1-H4
gccgcctctcctgctcctaccgcagctctccctcaggtttagtgttcgcaatggcggccttcaacaagcttggtggccttctaaggcacagtgctctggtgagcggtatcactggtggctcttctcctgcagtgttcaatgctgcacggctcatgtctaccaagctatttattggtggtcttgactggggtgttgatgacgtgaaactaagagaagcatttagcagctttggagaggttactgaagcgagggtgatcacagacagggagactgggaggtcaagaggctttggctttgtgaactactccgacagtgatgctgccaaggaagctatttctgcaatggatggcaaggaaatagatgggcggcaagtacgtgtcaacatggctaat

SEQ ID NO: 11423 - DNA, 385 bp, Zea mays
  Clone ID: LIB3150-070-P1-N1-H5
gtggtcacccattgccgcgttctcttcgctatcccttggttgccgcagcctccaaagccactcccaaacccccgcttccagaaccttctcgaagcttcccgccggcttcttcactcgcaccgatggcgaaggaaccaatgcgcgtgctcgtcactggcgccgcaggacaaattggatatgccctggttcccatgattgctaggggtgttatgcttggtgcagaccagcctgttattctgcacatgcttgacattccgccagcagctgaagcccttaatggtgttaagatggagttggttgatgctgcgtttcctcttctgaagggagttgttgctacaactgatgttgtggaagcccgccctggggtcaatgtggccggcatggt

SEQ ID NO: 11424 - DNA, 388 bp, Zea mays
  unsure at all n locations
  Clone ID: LIB3150-070-P1-N1-H6
gcggcgcatccactggaatatatgaggccttggagttgagggatggaggatctgattatcttggcaagggtgttcttaaggctgtcagcaatgtaaataacattattggaccagcaattgttggaaaggaccccactgagcaggttgagattgacaacttcatggtccaacagcttgatggaacctccaatgagtggggctggtgcaaacagaagcttggagcaaatgccatccttgcggtttcacttgctgtgtgcaaagctggagctatggtgaagaagattcctctttaccagcacatcgcanatcttgctgggaacaaaactctggtgctccctgtacctgcctttaatgtgattaatggagggtcacatgctggaaacaagct

SEQ ID NO: 11425 - DNA, 342 bp, Zea mays
  Clone ID: LIB3150-071-P1-N1-A1
attcaatatccctcttagctctgtattgagtatcagagacaagtactgagtgaggttcctaatgcatcaccaacagcagcctctgctagttcagatctgtatggagctgcagttttggatgcttgtcaacaaatcaaagttcgaatggaacccattgctagcaaagggacccacaactcgtttgcagagttggctcaagcatgctacatggaacgtgtggatctctctgctcatgggttctatgctacacctaatattgggtttgactggacgattggcaagggaactccattcaattatttcacatatggagctgcatttgcagaagttgagatcgacacc

SEQ ID NO: 11426 - DNA, 389 bp, Zea mays
  Clone ID: LIB3150-071-P1-N1-A4
catgagggtgttgctcgttgccctcgctgtcctggctctcgctgcgagcgccagctccactcatacaagcggcggctgcggctgccagccaccgccgccggttcatctaccgccgccggtgcatctgccacctccggttcacctgccacctccggtgcatctcccaccgccggtccacctgccgtcgccggtccacctgccaccgtcggtccatgtgccgccgccggttcatctgccgccgccaccatgccactaccctactcaaccgccccggcctcagcctcatccccagccacacccatgcccgtgccaacagccgcatccaagcccgtgccagctgcagggaacctgcggcgttggcagcaccccgatcctgggccagtgcgtcg

SEQ ID NO: 11427 - DNA, 400 bp, Zea mays
  Clone ID: LIB3150-071-P1-N1-A5
gcccatcccgccactgctgctctccagagtccaggcgatccaggctgcgcgggcgttcggtgttgttagtcccgaccaccgccggccatggcatccaacggcatcgcccccagagatgtatgtgttgttggcgttgcacgcacccctttgggtggtttccttggtgccttgtcttccttgcccgcaacaaagcttggctctatagcaattgaagctgctctgaaaagagcaaatgtggatccggccctcgtgcaggaggtctttttcggaaacgtcttgagtgctaatttgggacaagctcctgcaaggcaagccgctctgggtgcagggataccaaacactgttgtttgcaccactgttaacaaagtctgcgcatctggcatgaaagctactatgttcg

SEQ ID NO: 11428 - DNA, 316 bp, Zea mays
  Clone ID: LIB3150-071-P1-N1-A8
ctttgggagtcggtaagcagcacgtcttgtggagaatgcactagacttcggggtcaataaatctccaggcatcctcaagtacaacctgggcacccgggaaaccactgccattagctgcccgactatgacgaatcctcacgttgcactcatggtggcagagggtggtgggctgggatgcgccaccattaggtcatccaagctctgcctgtggtcacaagaggttggtcctggtggtggccatagcggatgggcactagacagaaccattgagttaagcacgctcgtccctgctggtcattccatacgtgaatttgat

SEQ ID NO: 11429 - DNA, 375 bp, Zea mays
  unsure at all n locations
  Clone ID: LIB3150-071-P1-N1-B1
ctcgtttctccgcagctgagcacgccgaaaagctgatcagtgctcatccggtgctggcccgttctcagtcccagtgagaggctccatgaagatcctggtcgcggtgaagtgggtggtggactacgctgtcaaagtgcgcgtgaggccggacgggaggggcgtggagacggccaacgtgaagatgtccatgaatccattctgcgagatcgccgttgaggaggcgctgcggctccgggaggccggcgtcgccgctgaggtcgtcgccgccaccgtaggccctgcccagtccgccgacacgctccgcaccgnactcgccatgggcgccgatcgcgccgttcacgtgctccacgacccggaccctgcgcgggcccttct

SEQ ID NO: 11430 - DNA, 308 bp, Zea mays
  Clone ID: LIB3150-071-P1-N1-B4
gtctccaccgccgctctcctctccagtgggcaccgccgctctcctgccgggaccgcccgcaacccccctcccctgcgagatccggggcgcgatgtggcgcatctgcgtctcgcggggcctctccagggccaaggcctccgccttcaggctcctctccacggcgtcgtcgtcctacacggtggtcgaccacacctacgacgcggtggtggtaggggccggcggcgcggggctccgggcggcgatcggcctctccgagcacggcttcaacaccgggtgcatcaccaagctctttcccacgcgctcgcaca

SEQ ID NO: 11431 - DNA, 388 bp, Zea mays
  Clone ID: LIB3150-071-P1-N1-B5
tcagttgttgggagagcatttgtggttcatgagcttgaagatgatttggggaaagggggccatgagctcagcctctctactggaaatgctggtggaagactggcatgtggtgttgttggcctgactccattgtaggttgctcgccgggtgcccgggttgcagttgcagctacgctgttacatccttgccttggtggacttttgtcttcaatcgtgttattgggacagtcagacagtgaccttttttgtattacttggattcattccatgcatgtggtatggtgcgtaatatcctttgcaggtcgactgtataaaaagcaatatttagttgaggaaataagtgttgccacatatccaaatcgatctatgaagcactatgaacatcaaat

SEQ ID NO: 11432 - DNA, 400 bp, Zea mays
  Clone ID: LIB3150-071-P1-N1-B6
tttagctcgtcacagcgcctcccccgaaccggaaacctccacctcggcgggggccatggcgttctccggcaggatccaggagctcgtgaggaagtatggcaaggtggccatttgcgtccacctatccgtctcctgcgccttcatcgccggcctttacgtcgccatcaacaacaacgtcgacgtcgaagccgttttccggaggttcggtatctcccccggcgttaccgtatgcggcgaggcctcacccgcccccgtttcccgcgatgaacacctgcgcgacgtccccctgccgcccatggccaacgaggtactgcaagaagagacggagcgagagcggcagccccgcaacaagacgatggagctcgtggcgtcaagtggcggcgcgttcgcgctcgctgtc

SEQ ID NO: 11433 - DNA, 387 bp, Zea mays
  Clone ID: LIB3150-071-P1-N1-C1
caggggaagaacattcaggaatacaagggccctagggaggctgatggcagggtggattacttgaagaagcaggttggccctgcgtccaaggagatcaagtcaccagaagatgcgacggcccttatcgatgacaagaagatctacattgttggtatcttcgctgaattcagcggcaccgaatttacaaacttcatggaggtcgcagagaagctgaggtctgactacgactttggccacactttgcatgccaaccacctcccacgtggtgatgcagcagtggaacggccattggtcaggctgctgaagccatttgatgagcttgttgttgacagcaaggattttgatgtcgctgcactgatgaagtttatagatgctagcaccattcct

SEQ ID NO: 11434 - DNA, 347 bp, Zea mays
  Clone ID: LIB3150-071-P1-N1-C11
tgactgccatatcacatcccgctagtccatctcccttgagacaggagtggaatcgcatcgcttccatgggcagctcctcgaatacctactcaagcatgctggccacgtacacggcggtgacgagggaggacatggtcataggcagggactcgtcaccaccatccttcaaggagaacgaatggatgctcggctaccacgaggcgatcctctacgatgtcaaggtgctaaggatcgaataccatgaagacgtacggcgcttcttcgtccataatctcggttgagaataacaactgcgatgaatagcttgctaatgaccgcttgttggaattgactgaggaaaacgtgcg

SEQ ID NO: 11435 - DNA, 392 bp, Zea mays
  Clone ID: LIB3150-071-P1-N1-C2
tctgtacgccccgctatcggtgttggtctgactatttctgttgcaatgggggctgcgagcatttgctggtctgtacaatataatcagccctcttgggaaggattacgacacagagcatgcagataccgatcaagaagcacaaatccatgccacctcaaccgagagtggcagaccaacttcacggcttcagtcattcgagaggagatactctttcatccagagcgatgaacgccgtttcgtggagagaaggcctcattgggttggcgggctaatggatttctgggaccagatatccattgcgtacttatcacttttctgcagctgctgtgtctttggctggaacatgcagaggcttgggttcggtaacatgtacgtccacatcgcaacgtttc

SEQ ID NO: 11436 - DNA, 400 bp, Zea mays
  Clone ID: LIB3150-071-P1-N1-C3
tcccttatcgtagcaagaggatgatgatccggagaaccgactcgagatccatccgtagccccgacgaaaacacgacgaggcaaaggcaagcgatcgcattctatgagggaggatcgtgccgaacaggccagtacttcgcgatcgcgttagctttccctatcccgaagagcgatggcggccagagcggagcagggcttctgggttcttaccggaccaacggaagacggcgcgcgccagcaggaagtgggttccgcgaccgatgggcggcctggcgtgtggtgtggcgaatccctcaccggcagagatgggaattgggttgcggagcggagtggagcggatcggattggattggaacacagcgcaacatccaacgagtgttttcgtcgtcgagcgatgagtc

SEQ ID NO: 11437 - DNA, 359 bp, Zea mays
  Clone ID: LIB3150-071-P1-N1-C4
cccaacaccacctcgcctgcgatctccgtagcctccgtcgcgtcgagcatcgagcatgtcggcctactgcggaaagtacaaggatgagctcatcaagaatgctgcctacattggcacccctggcaagggtatccttgctgctgatgagtccactggcaccattggcaagcgcctttccagcatcaatgtcgagaacgttgaggagaaccgccgtgcccttcgtgagctcctattctgctgccctggtgctctccagtacatcagcggtgtgatcctcttcgaggagaccctgtaccagaagaccaaggatggcaagccttttgttgatgtcctcaaagagggaggcgtcctccctggca

SEQ ID NO: 11438 - DNA, 380 bp, Zea mays
  Clone ID: LIB3150-071-P1-N1-C6
gcttcttctgacgctgaccgttgggtccgtggagccacccctatgccacacaacggccagggggcgggggagaggccacgcatcgtccttaatccacctaaacgtgacccgtcaactgcctctaccccacctgctgaggtggctcgcaaccggccaagcccttttggggctgcaaggccccgggaggatgtgctggctgagaagggggtggattggaagaagtttgagaatgagattgaccagaagaccagccgccctaccagttcgcactccagcaggccgaatagtgctcattcctcccgccctggcagccctgggtcacaggtttcggccgttgggagcgaaggagcaccaagggcacggccaaaggttaacccatt

SEQ ID NO: 11439 - DNA, 250 bp, Zea mays
  unsure at all n locations
  Clone ID: LIB3150-071-P1-N1-C7
gttgacttatcctccccctccggatcgagttcgagttcgtgagggtctccaanattcggtttcgtggctcagcggatcgagatagccgcgtccgatgttgagtaccgctagcttcgtcggcaggctctcctgggccacggacgaccactacctccacaacgccttcagcacctacggcgaggtcctcgagtccaagatcatcctcgatcaccagacccagagctcccacatgttctgcttcatcaccttc

SEQ ID NO: 11440 - DNA, 176 bp, Zea mays
  Clone ID: LIB3150-071-P1-N1-C9
cacgcgtcgtaagctgatccttaaccccatctttcaggctgcaagactgtgggtatcggggaaggggtccctcacaagttctctactacattgaactaaagagcacaaacccaatcaccacccaggacatacatacgtcagccaagcctaacaccgtacaccttcttatactatag

SEQ ID NO: 11441 - DNA, 370 bp, Zea mays
  Clone ID: LIB3150-071-P1-N1-D11
tgaattgtgcgcctccatttaggaggaggcgcattgcaaggagagagtggggtacaaccattggtgaagagaagtcccacataaacattgaggtggttgaccatgtagacctgtaacgagacgaccaccacaagacaccttatctacaagctaggaagcaccgactaacatgcgatcgtacatgcagtgatggaggctcctgaaatgaacaagcgatagttgaaatactcctatgtgctcaacaagctcaatgctgagcacgagagaggtataaccaatgatatcactctgcataagtctaagaccaccaagtactactgcacggccatagataccactagacaccgcgacttcatcaagaacatgatca

SEQ ID NO: 11442 - DNA, 408 bp, Zea mays
  Clone ID: LIB3150-071-P1-N1-D2
tccctatctcccctacaccagaaaaattcgcagttctttggtccgcgtcagagaggcggctgcgatgtctgggcgcggcaagggcggcaagggtctgggcaagggcggcgcgaagcgccaccggaaggtgctccgcgacaacatccagggcatcaccaagccggcgatccggaggctggctaggaggggtggcgtgaagcgcatctcggggctcatctacgaggagacccgcggcgtgctcaagatctttctcgagaacgtcatccgcgacgccgtcacctacaccgagcacgcgcgccgcaagaccgtgaccgccatggacgtcgtctacgcgctcaagcgccagggacgcaccctctacggcttcggaggctaggctaggcgcctcttcatagtcggagactggtt

SEQ ID NO: 11443 - DNA, 401 bp, Zea mays
  Clone ID: LIB3150-071-P1-N1-D3
gccttgtgggaggacatgcggttgaagaggatgctggtcgattacatgcgtcggatgtcctactacaattccgccaccaagctcgctgagacttctggtattcaggacctcgttgatattgatgtctttctcgatgcgaaaagagtaattgattctcttcagaataatgaagtttctcctgctttagcttggtgtgcagaaaacaagtctcggctaaagaaatcgaagagtaagcttgagtttttactgaggcttcaagagtttgtggagtttgtcaaggttaagaatttcattcaggctatagcatatgctcgaaaacaccttgctccctggggctctgtacacatgaaagaattgcagcgtgtcacagcaacattggtttttagaagcaatactaattg

SEQ ID NO: 11444 - DNA, 404 bp, Zea mays
  unsure at all n locations
  Clone ID: LIB3150-071-P1-N1-D4
tctctccctttcccgtctcttcnttcttcccccgtccacttcttggtccgagccgcgtctggggtctcggcatccctgcttcgatcgatagaatagctggatcagagcatattaggaggttagcagtaaaagtcggtagagtgcttttcttcttcctcgttggtggctagagggacgggggagaactacaacagattggaggctgcaagttctcgggaggagccgggcttctcttgcggcggcaaacatgaggaagctcttcttcgtctacctcgtcctcctgctggccgctgcagtagttcacggtgaagatggtgcgtacattggcgtgaacattggcacggccatgtcgtctgtcccggcgccgacgcagatcagcacgctgctccgctcgcagaacattc

SEQ ID NO: 11445 - DNA, 311 bp, Zea mays
  Clone ID: LIB3150-071-P1-N1-D6
tttttctttttttcaaatccatccatcctggggtagttctttccgaaggatgtcaggcccatttccattatcatgatcgggatcaatgggttctgcaggatcggaaggctgtttgccattgttttcctgcagagtgacgatgtcgagctcttcgccgtgaactaccccttcatcttcaccttctacatgacctacatgttcaatttcgacactgtgcactttcagttttagcaccatgaagtcaatgtgtaagactccataacccttctttttggtgagaatgatgttgctgtttttgtcttctgtaaccc

SEQ ID NO: 11446 - DNA, 402 bp, Zea mays
  Clone ID: LIB3150-071-P1-N1-D7
atttcttctctctctgctcctccgcctccgcctgatccatccaagacagggatcgccatgtcggactcggaggagcaccacttcgaatcgaaggccgacgctggggcgtccaagacctacccgcagcaggctggcaccgtccgtaagaacggcttcatcgtcatcaagaaccgtccctgcaaggttgtggaggtttctacctccaagactggtaagcatggccacgccaaatgccactttgtcgccatagacatattcaatgggaaaaagcttgaagatattgttccttcatcacacaactgtgacattccgcatgtgaaccgtactgagtatcagctgattgatatttctgaggatggatttgtgagccttcttacttcagatggcaacacttaggatgat

SEQ ID NO: 11447 - DNA, 381 bp, Zea mays
  Clone ID: LIB3150-071-P1-N1-E10
ctagttagcatggaggaggccatgacaactgctgactttatctggttacacatgcctcttacgcctgcaacggacaagatgctcaatgatgaggccttcgctaagatgaagaagggtgttcgcattataaatgttgcacgtggtggcgtaattgatgaagaagctctagtcagggcacttgattcaggggtagtagcacaggctgctcttgatgttttcactaaagaacccccagcagctgacaacaagttggtactgcacgggaatgttactgtcacacctcaccttggtgccagcacagtggaggcacaggaaggggtggctattgagatagctgaagctgtcattggagctttgaaaggggagcttgtagcttctgca

SEQ ID NO: 11448 - DNA, 297 bp, Zea mays
  Clone ID: LIB3150-071-P1-N1-E11
ttacagtttgaagtagtattgaagcggtgacaatgatgataacctattttagtgctgacaaaaatgttgttataatctccagttgttacaattcctgcatgtgtatttattctatgcttgatctgaaaaatacttgggccccaaaaaaaaaaaaaaataataaaataaaaaaataaaattaaataatataataaatataaaataattaaaatttttttatattatataataaaaataataattaaaaataacttttaataattataatttaatattaatttaggggggcccccctcc

SEQ ID NO: 11449 - DNA, 278 bp, Zea mays
  Clone ID: LIB3150-071-P1-N1-E2
ctctagttttggcgcccacaggcaaattctcgtgcactcaatcgcgagcataggcagcactgcatgcatggacgccagcggagccggtagcatggcgattaacggggcggctgggcgcaaggctggcggccccatggaagaagtcggcgtcgcggtccagcaaaggccggtctggagttccccgtgagccggatcgggcgctacctgatgaaggggcggggcgcgcagcgcgtgggcaccgtcgcccgcgtgtatctaggcgacgtgcttgagtacct

SEQ ID NO: 11450 - DNA, 403 bp, Zea mays
  Clone ID: LIB3150-071-P1-N1-E3
tttttgtttttgagatttcacttcatgaaccagagcacgtgactgtttatgctactggagggagaaacactgaaagtgtaattgtcacaggactgatcaaagttgacaaggcagaaataggaatctctgacaatgatgctggggccgtggagtctgtccaaaagttagatcttctgaaagatacaaaagtgtgtctttctgcaaaccatctgcagaaactgtgtttatgttttcaactaaccacaccgattgggcacacattttaacctcaccaggtgttcttgaaattgaggcatgagagtaaggttgtacacttattcgtggtacctggctctgcaaggcagttcaaaattgttcttgacttcctaagcttggtggagaaattgtactacctttctggaag

SEQ ID NO: 11451 - DNA, 383 bp, Zea mays
  Clone ID: LIB3150-071-P1-N1-E4
tcatctgtccaaagtgccgttacagaagttgctgcaatggttggggagaatgtgaaactcagaagaggcttcatgctttccacaactgcacatggtgttgtttcatcttatatgcatacctgccctcagccaggtatgggtcgtatagctggattggtcacactagaaacagaagacagcagtactcttcttgattctgtcaaaagtgttgggtcatctattgcgatgcatattgttgcggcaaagccattattcttatcaaaagaactggtttctgcttcggctttagaaaatgagcgtgaaatacttcgaactcaggcccaaagttcagggaaatcccaaatggctatggataagatggtggaaggacgattgaggaagta

SEQ ID NO: 11452 - DNA, 384 bp, Zea mays
  Clone ID: LIB3150-071-P1-N1-E5
tggtgatcctgccttttccccaccggctgcattcaatcctgcgtctgggcggaacccaatcaactggtgcttctggccctggagcaatcgctggaggtgttgctgctggtgctgcattggtttttgctggtccagcaattgcatttgcaatgtggcgccatcggaaacctgaagagcatttgtctgatgttcctgccgaggaggatccagaagttcatcttgggcagctcaaaaagttttgcgctgcgggagcgttaagttgctactgatacttttagtaacaagcacattgtaggaagaggtggtcttggaaaagagtacatgggaaggcttgctgatggctcattggtcgcagggaaaagacttatagaggagcgcacacct

SEQ ID NO: 11453 - DNA, 386 bp, Zea mays
  Clone ID: LIB3150-071-P1-N1-E8
gtaaatgccaaactagacacgattaccagtgagccattgcgacatgaagaaaagagaaaatctcgaaggaaaatatctgcaagactgaattcagtatcttctgagcacacagatatcgttgttgagactgagcacaaagatgttattgtttctttggccggttccacttcaaatgtctcaatggagcagcggacaaatcaagagcaggatggtgattgtttctcaaggaaatccaatgaaaatcagatattagggaggaggtctctaagacgagctgctgaaaaggtcgtctcttacaaggagatgcccttgaatgttaagatgcgacgaccttaactgccaggaggatgaccatggtgacatgttgtagcttgctgtcctgacta

SEQ ID NO: 11454 - DNA, 382 bp, Zea mays
  unsure at all n locations
  Clone ID: LIB3150-071-P1-N1-F1
agcgaaacagcctctggccgctgcccgagcccgactccagctggccaggggttggcccgcnacaagcactccaccagacgagaggggattcccagatgcccaggggcaccagcgacgcgaagatcctgatccagaccctctgcaaggggtacgctgtcacaccaacaaatttcaaaattattgacctctacgcgggggttgcgagggccaccagccccattcaagatgcttacaagggaatggggggggggggtgtccttcaacaacttcctttcaggagagccttcatgcataggaactacagttcttgctgtttgcctccgcattcaattgaacaaagacaacaaagaattcatggacgcttcccccagaaagggccttt

SEQ ID NO: 11455 - DNA, 400 bp, Zea mays
  Clone ID: LIB3150-071-P1-N1-F2
aatcaagctgaagacggagacgtaggcggcgacgatgaagacgttctgtgtcagcacctactggtcgctgcagacagatacaacttggagaggctgaaatcgctatgtgaaaagaagctgtctgagtgcatccatgtgggcacggtagcaatcatcctgacgctagctgagcaacaccgctgccctggactgaagaagttgtgcctccattttctcagatctcctgcaaatttgagggcagtcgtagccagcgacgcctttaagcatctgagcagcagctgcccctctgttatggggggagttggttgccatgcttggcaactcagcgtagacctccatctaagcaggaaactgcacttggtgtttttttctggatcgacttgtattatcaagcggtctt

SEQ ID NO: 11456 - DNA, 401 bp, Zea mays
  Clone ID: LIB3150-071-P1-N1-F3
cgcccaccaccactctctagtctcaccggcccgtcccgctcattggacgagacgacggaccccttcccttctcgcacgggaagagtagcgaggaggcgcggcgcccgtgcggcgtatgcccgttcctgccgtcgggctccgcctctaggactagggtccgctccagcgccagccgtccgccatgggtgggctcgaggagatcaagaacgaagccgtcgatctggagaacatccccatcgaggaggtgttcgagcagctgaaatgcacccgcgaggggctgagctccagcgagggccagcagcgtctcgagatctttggccccaacaggctcgaggagaagaaggagagcaagatcctcaagttccttgggttcatgtggaacccgctgtcgtgggtcatgg

SEQ ID NO: 11457 - DNA, 401 bp, Zea mays
  Clone ID: LIB3150-071-P1-N1-F4
gcggcttcccccaaacaaaacctcttctgcgccagagtccgcgtccgcgtgggccagatcaaacgaatcggcacgacgcatcggcatcgcctccgacgatcttgagacaaacaaaacccaccgctgcggcaactccgcctcccgccgacccggggatcgcctgacaacaggcagcgaaaaggggcgcagggtttgcccgccaagatggaggacgtggacgtctcgcggcagctgaagcagatgacggacttcatccgccaggaggccgtcgagaaggccgccgagatcgaggccgccgccgccgaggagttccaaatagaaaagttgcagctggtggaagctgaaaagaagaagatcaggcaggaatatgacaggaaagagaagcaagttggcatcaagaa

SEQ ID NO: 11458 - DNA, 388 bp, Zea mays
  Clone ID: LIB3150-071-P1-N1-F5
tcggcggcgcgggcggacaaggagcaggcggaggaggagttgtgccaaggcacaatgggtatctcgcgtgactcgatgcacaagcgccgagccaccggtggaaagcagaaggcctggaggaagaagcgaaagtatgagcttggtcgccagccagccaacaccaagttgtcaagcaataagacagtgaggagggtccgtgttcgtggaggtaatgtgaaatggagggctcttcgccttgatactggtaactactcatggggaagtgaagctgttacccgcaagacccgtatcctcgacgtggtctacaatgcatcaaacaatgagcttgtgaggacacatacccttgtgaagagtgccattgtgcaagttgatgctgccccattcaagc

SEQ ID NO: 11459 - DNA, 405 bp, Zea mays
  Clone ID: LIB3150-071-P1-N1-F6
ctccagcgccctcgccgtcggcagctcggccgccgtactcccgctaccgagctaggaggcatcaccttcgccggtccaacatgggtaagacacgtggtatgggagctgggcgcaagctcaagacccacagaaggaaccagaggtgggctgacaaagcctacaagaagagccatctcggcaacgagtggaagaaaccctttgctgggtcatctcacgcaaagggaatcgtccttgagaagatcggcattgaggctaagcagcctaactctgctatccgtaagtgcgctcgtgtccagctggtgaagaacgggaagaagattgctgcctttgtgccaaacgatggttgcttgaactacatcgaggagaacgatgaggtgctgattgctggattcggtcgtaagggcc

SEQ ID NO: 11460 - DNA, 398 bp, Zea mays
  Clone ID: LIB3150-071-P1-N1-F9
tcccaccaagaaggagcaggtgttgtccagctactcggacaaccaggctggtgtgttgatccaggtgtacgagggtgagaggacccggacccgcgacaacaacctgcttgggaagttcgagctctccggcatcccaccggctcctcgtggtgtcccccagatcacggtctgcttcgacatcgacgccaacggcatcctgaacgtgtctgccgaggacaagacgacggggcagaagaacaagatcacaatcaccaacgacaagggccgtctgtccaaggaggagatcgagaagatggtgcaggacgcggagaagtacaagtcggaggacgaggagcacaagaagaaggtggagtccaagaacttgctggagaactacgcctacaacatgcgcaacacga

SEQ ID NO: 11461 - DNA, 399 bp, Zea mays
  Clone ID: LIB3150-071-P1-N1-G1
ggctactgaaagatatcgttgttatggcgaagcaaaatggactgcagctggtgcctgcacttgtcaaaaggatgctggataaaaacatgtttttgtttggctacatgaatttgatcgacgacaacggggacaagcaggtcgaggaattgaccgcattgcagaacaagcgagtaaaatttgcatgtgacaagttatttgcaaatacccaagcagaaagatatttgcacatggacttgggtgctgagttcgagcttgatagcatcaagaaattgtcaaaggagtatgcacaagcaaaggaactggcccttgcgggtgcctgtccattgccattaggcaagccaaactgtcgaagttgacgatgctaagcacctccttcagagtgagagagctgtgggcgac

SEQ ID NO: 11462 - DNA, 381 bp, Zea mays
  Clone ID: LIB3150-071-P1-N1-G11
tcgtgaacgctgctgtggccacaatcaagaccaagcgcaccatgcgggtgggggactggtgcccgactggcttcaagtgcggaatcaactaccagcctcccagcgtcgtccccggcggtgacctggccaaggtgcagcgtgccgtgtgcatgatctccaactccaccagtgttgtggaggtcttctcccgcattgaccacaagttcgacctcatgtacgccaagcgcgccttcgtgcactggtacgtcggtgagggtatggaggagggcgagttctccgaggctcgtgaggatctggctgcgctcgagaaggactacgaggaggtcggtgctgagtttgacgagggtgaggacggcgacgagggtgacgagtactagacgc

SEQ ID NO: 11463 - DNA, 402 bp, Zea mays
  Clone ID: LIB3150-071-P1-N1-G12
tttttgcatcccacccgcacgcgctggggcggtggctcgcgcggggcgtggggtcccacgacgcgcacctcacccgcgacgaagtcatcgaccggatcctcgacgtcatcaagagccaccccaagatcgacccctccaaggtgaccccggaggcgcacttcgagaaggatctcgggctcgacagcctggacaccgtcgaggtggtcatggccatcgaggaggagttcaagctcgagatcccagacatggaggctgacaagatcgactcactccctctggccatcgagtacgtcgccaaccaccccatggctggctgagcctctgctcgcccgagaggaggcgagttgaggtgaggcttctcttggttttgtttccgagggcaaataatctgctggagtggca

SEQ ID NO: 11464 - DNA, 397 bp, Zea mays
  Clone ID: LIB3150-071-P1-N1-G2
tgccttctgccttctgcgcctccatttcggcctgtgtcccttgcaagttcggtcggacctccaaccatgggtaaagagaagtcccacatcaacattgtggttattggccatgtcgactctggcaagtcgaccaccacaggacaccttatctacaagcttggaggcattgacaagcgtgtgatcgagaggttcgagaaggaggctgctgaaatgaacaagcggtccttcaagtacgcgtgggtgctcgacaagctcaaggctgagcgtgagagaggtatcaccattgatatcgctctgtggaagtttgagaccaccaagtactactgcacggtcattgatgcccctggacaccgtgacttcatcaagaacatgatcactggtacctcccatgctgact

SEQ ID NO: 11465 - DNA, 322 bp, Zea mays
  unsure at all n locations
  Clone ID: LIB3150-071-P1-N1-G4
gagctattcagcgtagaggccatgccaacattcctgttcatgagggagggggacgtcaaggacagggtcgttggcgcagcaaaggaagagctagcaaggaagcttgaactacacatggcctcgtagatcagtgatgccgtaatgtagtattcgcctaaataagaggacgcctcgcctcaactctgagaaaactagtgcttctgtgatggtaattcgtatgagagagtgccccctttggtggtacttcttcgtatgtagtattaactcctgtcttaatatgttgccctgcttgtgcttttcattntaaaaaaaaaataataaa

SEQ ID NO: 11466 - DNA, 402 bp, Zea mays
  Clone ID: LIB3150-071-P1-N1-G5
gatttaaatggcgaagctaagcaggatgatgacgacgacaatggtgatggagaaccaccgcgtaatgaatcagaggataaaatcatcaccaacgacgatgtgttaggggacgaagtgccatatgaccagcaagaagctttgcgtgtgctatgttataagttgcttgaaatgccccttataaggggacattcacaatttcctggatcacatccagtttctcttaacagtgaaaatctgcaactacttagacagcgatactactatgctacatggaaagctgacggaacacgatatatgatgcttataatgagagatggttgtttcttgattgatcgaaatttttgctttagaaaggtcagatgcgctttccccataagagccttgaaggtctgcatgatatga

SEQ ID NO: 11467 - DNA, 351 bp, Zea mays
  Clone ID: LIB3150-071-P1-N1-G6
tgcgttggcgaccctccctccttcgctggttccgggccgcctcccgggggggggcggcatggtgaagtactcgcaggagccgggcaaccctaccaagtcggctaaggccatgggcagggatctgagggtccacttcaagaacacaagggagacagcctttgcgcttcgcaagttgtctttgaccaaggctaagcgataccttgaggatgttattgctcacaagcaggcaattcccttccggagatactgtgggggtgttggtcgcaccgcgcaagctaagtcgcgccactccaatgggcaaggccgctggcccgtttaatcagccaggttcattctggatttctgaaaaat

SEQ ID NO: 11468 - DNA, 380 bp, Zea mays
  unsure at all n locations
  Clone ID: LIB3150-071-P1-N1-G8
gcgttcttaatcctttatcctttttattctacccacttttcttgtactcactcacatctnaccccaaaaaagcttttccttataatagagaaagcgtccatctccttcctatttcccattatttctttcattcatacccaatctttatcttatattccctattctcattcccttttcttttctttctataccttctcatacactttcatttcttttctcattataaagataccaatatattatgatttccttctcaatatatttttttcttttcattctattactcttttcttctttattttcttaatttttactactatttctattcattttcattactactttcctttctttttcaatttttttattttctttttttc

SEQ ID NO: 11469 - DNA, 383 bp, Zea mays
  Clone ID: LIB3150-071-P1-N1-H1
gtccgcacgaacccatcacacgctccgcgcactcccccaggcgcacgggggcacctctccacctccggcgactaccaccaccatggcggccacctccctcgcgcgcctctcccgacgcaccaccatttccgctaccgccgcggcgccctccctccggcgcctcctctcagtcacctccacagcctctgtcgcggcaaccgccccgccgccgccgccgcccagcgcgactggcgccgcggccgtgggcgcggatcgggtgcggtgggactatcgtgggcagaggaagcttgttccgctgggacaatggatgcccaaggtggccgtggacgcttacgttcgccccgaggccgtgctcgccggccaggtcaccgtccacgacggtg

SEQ ID NO: 11470 - DNA, 401 bp, Zea mays
  Clone ID: LIB3150-071-P1-N1-H2
gttctgttcctccccactcactcctgcgcgtcctcgccgcgcgggtccgggtgcctgatcctcctttggcttcgcggttcatggcgatgtggagggccgccgctaggcagctggtcgaccgggcgctcggctcaagggccgcgcacacgtctacaggcagcaaaaagatagtcggggtgttctacaaggccggggagtatgccgacaagaaccccaacttcgtcggctgcgtcgagggtgcactcggcatccgcggctggctcgagtcgcagggccatcaatacattgtcaccgatgacaaggaaggccccaactgtgaactggagaagcacattgaagacatgcatgtcctgattaccaccccattccacccagcttatgtcactgcagagaggataaag

SEQ ID NO: 11471 - DNA, 396 bp, Zea mays
  unsure at all n locations
  Clone ID: LIB3150-071-P1-N1-H3
attgagtttatagaagaggaggaatctgagatggatgaaaagaatgggcgaaaggaacctgattcacctcaaggcgtgaagatcgaaacccctggtcttacaacaagacagcgagcccttcaaggcaggggtggcaatggtgaaagctntattgagtttcctgatggattaccaacagcttcatcaagaaagcaaaaggagaagctctcagatatggaggtacaagccaaaaaggcagaagctgcgctgaggcgcaagatgcaagttgagaaggcagagaaagaacagcaggctgaagcgatgaggaagatactgggaatagattctgagaagaaaaaggaagagaagaagctgtaagaacgagaagagagggaaaaacaagcaagattagaagaa

SEQ ID NO: 11472 - DNA, 380 bp, Zea mays
  Clone ID: LIB3150-071-P1-N1-H4
cccgtttcccatcgcggccactctccttcgagccgtccgccgctcccaggcgcaccactcgccagctcgccacttcctcccgtctcctcccttccagaggcggcgcgtaagccccgatggccgcctctctcctccacgccgccgccgcctcgctccagagttccacccagcacgcccgcgcgggcgccgccgcctttcaccccctcgcgtgtgccccatccctacgccttacgcgctcctcgttctcgaccaatcgccacctcgagatttcactccgggcgatctcggccagtcgccgtttcgcggggaggggggcaccccgggaccgccacgttgtcggcgccctagcgggggagcaaacccgggggtcagaggtgggg

SEQ ID NO: 11473 - DNA, 395 bp, Zea mays
  Clone ID: LIB3150-071-P1-N1-H5
gacgcccaccagcacctgccctcctcggcgtcggcgcctccctccgcgcgaccgatctaccctccgccaccaccatgtcgctgatcgccggggaggacttccagcatatcctgcgtttgctgaacaccaacgtggatgggaagcagaagatcatgttcgccatgacctcaatcaagggtgtcgggcgccgcttctccaacatcgtctgcaagaaggccgacatcgacatgaacaagagggccggcgagctgacgcctgatgagctggagcgcctgatgacggtcgtggccaaccctaggcagttcaaggtgccggactggttcctcaacaggaagaaggattacaaggacggcaggttctcgcaggtcgtctccaacgcccttgatatgaagctc

SEQ ID NO: 11474 - DNA, 377 bp, Zea mays
  Clone ID: LIB3150-071-P1-N1-H6
cccaaggcgaggcgttgaaacccttaaccctctgggacctcgaagcggggcgaggagggagagtgtgagtggactcaagaggcggcgggcgaaatgaagcttaacgtcaagaccctcaagggcaccaacttggagatcgaggcgagccccgatgcgtcggttgctgaggtgaagaggatcatcgaaactactcagggtcagagtacctacccagcagaccagcaaatgctcatataccaagggaaaattctgaaggatgagaccactttggaaagcaacggaggtgctgagaacagcttccttgttataatgctgtccaaggctaaggcatcgtcaagtggagcttccactgctactgctgcaaaagctgctggaac

SEQ ID NO: 11475 - DNA, 269 bp, Zea mays
  Clone ID: LIB3150-072-P2-K1-A12
accggggcgggcggcctttttttttttttttttttttttttttttttttcttttttttttgggcggcaacataggatacatggggggtttaattcaaaacccagggcatcccacttcaggtcttcaggcttggcaagggaagatttttcgagaaaaccctggaaacaactggctttcgttttcggaccttgatttccacacctgccatgccccttaaaagcctggtgggtttgcttttcacaatcccggttaaccttctttggtttttg

SEQ ID NO: 11476 - DNA, 287 bp, Zea mays
  Clone ID: LIB3150-072-P2-K1-A2
tcccgtgcccctcactgtttagtgtcgacgactggttgacagtcgccgccgccgcccgctggggggcgttcccctggagtgcatctgcggctctttgcccaccagatatgagcagctggcaattcgattttgaggccattatttgataacccgggacaagtgcactggttacctgaccattttagctttttgagatggctacacagttgccatgcttcacacagctcattccaccgtcttgtagttggataaaagatgtctggaactgcaaggctactcctgatagg

SEQ ID NO: 11477 - DNA, 435 bp, Zea mays
  Clone ID: LIB3150-072-P2-K1-A6
cgggcggccgcgccttttttttttttttttttttttttttttttttttttttttttttttccacaatattttttttttttttggggtttttttaaaaagcaacaaaactttaattaacccaaaagtcccccaaccccccaaaacaaatgtcaggcatggaaattggaaaccaaagcagggcttgttttaattgctacataaacattaaaattgggccacttttttttataacagtttttgtagacccacatgttaaacttaacacccaaacagggggccaaaaagcttaaaaaaaaaatttccccttcccctttttgtctccacaaatcaaaaaaggcttgcttttttggatggcgcccttgaaatagtgttttcatttttgcccctgcatcttaaaaaacaattttttgggggtcttgcctctttttggaaaaa

SEQ ID NO: 11478 - DNA, 364 bp, Zea mays
  Clone ID: LIB3150-072-P2-K1-A8
attgattcccgggcggccgcctttttttttttatttttttttatttttttttttatatcgaaatcaaggaaattttaggggggcatctttacaggactgattcgcccataaccctcccatctaaaattacacgaccatcctggatagatgatctaacaacataagaagacacagtttggactgttccttaatactgtaggaacagttccacaggccaagcacaaaattttttatccatttcttctggacccaacttgacacgtcatgccaataactatttgtgcctcaacttttaatcacacccgcttaaaagtcacactgcatacttgggagccctcaatttctccaaacattatggtatgat

SEQ ID NO: 11479 - DNA, 461 bp, Zea mays
  unsure at all n locations
  Clone ID: LIB3150-072-P2-K1-B12
cggccggccttttttttttttttttttttttttttttttttttttgttttttttnncntttttttttttttttggttgttttacagcacacaagaacgggaattaaataaacaaactgcaaaaactttaaaatacaacatccattttacgtattttatttgtctacaggatgccctcaggggggtttcaaatgtaaaaaccacatttcgtttgagcaaattagtttacaaagtgataaaaccaaaacattttgttggagcaaattagtttacagagtgttaaaaccaaaacaagcttaaggctggcttcttataagggaggctggttttgttgtttgaaacacttaatttttaacagacaattttctccaccttttccaaaaaatcctttatctttgatgggcttaaaactttaaactcacggccaggttaaataattcccatttcaatgttgttggaaga

SEQ ID NO: 11480 - DNA, 370 bp, Zea mays
  Clone ID: LIB3150-072-P2-K1-B2
aattaccgagcggccgcccttttttttttttttttttttttttttttttttttttttgtacatccttcacctatttctttttatttgttgggtttttttttaaattttgtacccaaaaaaatttttttattttcttaatcattaatttttatatttttttcatttcttttctctaaaaaaaaaaaaaaaatcttttccccaaaaaaaataaaatacaaaaaaacacttaatcccaaaaactcccaacaaaaaaaaaccccccccaaaatacaaaattaaaaatttttataaaaaaaaaaattaatcccaaaaaaaaacacttttccaaaaaaaaaaaaaagattaacataataaaaaaactaaatctaaa

SEQ ID NO: 11481 - DNA, 163 bp, Zea mays
  unsure at all n locations
  Clone ID: LIB3150-072-P2-K1-B4
ccgccctttntttttttttttttttctttattttttttttttaatccatcattccccccgcctttaatttcccagagggcttttctaaaaatactgggccgccccaacaaacctcttcccttaataaaaaaaaaacacctccttaatctaacccaaaccccat

SEQ ID NO: 11482 - DNA, 429 bp, Zea mays
  Clone ID: LIB3150-072-P2-K1-B6
aataaccgggcggccggcctttttttttttttttttagctgtaaactcacaaagcacttttatttatagacggcgccacgaaaaaaaggacggaacaacacgtgactgacaaggcgcagtaacaagagtagaaacactttccggtggcgcgcgcgcttctgaggaagccaagagtccaagactgaaagatcaagcagctcactccgccgccgcctgctcgacaaccatcggcagtgactcctctttctccctccctttcttcccatgctcctcctcctccttcccaggagaggacggcataatcagggcctcccgttgcgcacgcaccagcttactgaactccttttcgcgagcgccgaacgcggcggcgatctccggccctagcatggtacggagcaccgaggaggcgccgaccaggaactgctgccg

SEQ ID NO: 11483 - DNA, 426 bp, Zea mays
  Clone ID: LIB3150-072-P2-K1-B7
cccggggcggcgcggccttttttttttttttttttttttttttttttttttgttcatccttagggaaaagcttgagatggggaaagtaaatttttgcaacagggaacacaaagagtggctggggctggcctaggaggggaggaagaagagtgccatcacacgaaaaccatgacctcacagcattggtgcagtaacatttcactatttagagcctatgatcaggcttttgtctcctgagctacttcttcaaaagtctctccaggaacaagctctggaacatcgtcatcgttatctttcttgacctgtgctgccgcaccggcagcagccacctgcttgtgcatttcctcggcaattcttttaaggtgctccatgttgtcagggccaagctggttaatgataccagggagaacatcctgtagctttttc

SEQ ID NO: 11484 - DNA, 427 bp, Zea mays
  unsure at all n locations
  Clone ID: LIB3150-072-P2-K1-B8
attaccggtgcggccgcccttttttttttttttttttttttttttttttttttttttttttttaaccnttttttttttttttggttggggccttcaaaccaccgggatttatattcaagtgaaatttttttcagcatttacaaccttatttgtactcgcgtccgtccatacaaattaaacctaataaagcacaatgccctttttccccaactaaaacccacccaaatacaccccccaaaaaaagcctaacggcagttgacaaacttacttccagcgttaaatgttcctaaaatgtaccttatccccaagctaccccttttcctttggatttacaaagaacttgaaaaactttccaacccctacaaggaacaacaaggcacttcaaatcttgaatttttgccccgtttaactactttttaccgaactc

SEQ ID NO: 11485 - DNA, 468 bp, Zea mays
  unsure at all n locations
  Clone ID: LIB3150-072-P2-K1-C1
ccggcctttttttttttttttagctgcnaacaaaaaccttgctctttcttctctcgtctcgtttcatagcgggaggagccatttttaacaacaggggtaccaacacctaatccaaaggtagaacggacactaacacggtgacagaagcgaacggtaacacgatactatagatagataagataactcggccgaagccaggatgggcccacacatcagtccctccagccgccgccgccgccgccgtagccgtcaccaccaccctcgcgccgaccgccgtagccgccaccgtcttcgtagccgtcgtcaccaccctcgcgccgaccgccgtagccgccaccgtcgccataaccgtcgtcacggcgcccgccaccatagccgtcgtcgccgcgaccgccgtcgtagccaccgtcgtcaccgtcaccgtcacgggactgggcctggttaacggtgatgttacggccgtcgagc

SEQ ID NO: 11486 - DNA, 416 bp, Zea mays
  unsure at all n locations
  Clone ID: LIB3150-072-P2-K1-C10
gcgggcgcccttttttttttttttttttttttttttttttttttnngttttttttncnnttttttttttttttggtggggaaaattggggggcattactgttttacccatctcgtgatttacctttcgaaaccgcagcgacaattcccaaaaaaaaaagggggggaaagataaccggggcaaaaaagagccaaaaaaaaaagccgggggataattaatgctgcgggtcgtctattattattggaatgaggatgccgcccgcggccccctctgtggcggtggtggggcaagccaagccagggcattttttcactttacccggggggggagggtgaccccctcccccaccgggagcttgcaaatctcaacccggtcctcggtgggaaaccccttttttaggaccagccccaaatctcg

SEQ ID NO: 11487 - DNA, 451 bp, Zea mays
  Clone ID: LIB3150-072-P2-K1-C11
ccgccctttttttttttttttttttttcttttttttcttttttttaattccccctttttttgggttttttggtgggtttttttttgtggtttggcgccccctccaaatccaaatggtcattcagggcattgctcacactgacactgccacccatggggatgcgggacacattattacccaatcatcgccgctaaatgacccaactagctagctagccagcggctttactacaacacatagtttcttcagggggggacaccccccgcagcagcgtaggggcatggagtcggctgctgcaggccccacatcgccggcagggggtgggctatttgcccccccaacaaccccgagacctggcccttttgcggctgctgctgcaggatggaccggaggaccaaacccaaaatcccctggtaccggtgctgcggctccacctgcctgagccggtggc

SEQ ID NO: 11488 - DNA, 465 bp, Zea mays
  Clone ID: LIB3150-072-P2-K1-C12
cggggcgggcggcctttttttttttttttttttttttttttttttttatttttttaaaaggagcaacttgaaaacccaagagggtttctaagacaataatactggaaccaatgtataacgacagaacatttttttgcatatgtcagcactggccgatccgagtaatattactagtacataataactgtccttcaaaactaaaggccacatgcgaagggaaacaccatgtccaaaccaagggcaacttcactccatggaagaagaggttgggcccgcgccgaagccgttgccgccaccacgcccaaagccaggccttctgaatgatggctggaactcagcaggagctccactcttatcgccaccaaagtcaccaggagcaccacgaggaccaccacggtacccatccctgtcaccaaaccttggcctgtcgccgtcaaaacggcctgggccccttgggcggtcacc

SEQ ID NO: 11489 - DNA, 299 bp, Zea mays
  Clone ID: LIB3150-072-P2-K1-C2
ttttcttcatgcctgcgcattatccacacgggagcgtaatttttgatttcattcgaccagacacatggacacaccacaaggactgttaaaacaatgtcagtacccaacgttaaataaatagaaagaaagaaaaataccggcacatgccgtaccagcaaataatcatgaaccatgtcatgctaaccaacacctgcgaatattgattcatgcttgccacgcatggtctggctaggcgtgaaacgcgcacttggcgagcggtccacccaaaaggcacctgttgccgacgaacgacttagcgc

SEQ ID NO: 11490 - DNA, 385 bp, Zea mays
  unsure at all n locations
  Clone ID: LIB3150-072-P2-K1-C3
cggccggctttttttttttttttttttcaaatttatatacttaaaanngttagtaatggcgatacaaataaatattgggggtgtaattgtagaaaaacaatgctaattgataaaatgacagacccaatttatacagcccagacaggtagcccatgaggcccatctcgacgagtccatatgaacaaacagttagggtttgaaccctaaccgttcgtctctccttcctggtggcggtcgcccaaggccctggcggcgcggtcgagcgggcaaccggccctggcgtgtgggcagcggcctcagtgcgtggcccatacggcttggcccctcgacggtgcgcaccctggcggtgcggggcgcggtcccacaagtgtgaggcttcgccatg

SEQ ID NO: 11491 - DNA, 220 bp, Zea mays
  unsure at all n locations
  Clone ID: LIB3150-072-P2-K1-C4
acctncctaanattcccccaacaanattttttttttttgtttctttttaaaaaacgatggccccccaaacaaaaacaaaaaatttttttttaacccacccccccaaaactattttcccttcccctaccataatatctccacccaatttttttcatcatcaaccccccccccaaatatcattcctatcaactcacatttttcataaccaaaatttcctccc

SEQ ID NO: 11492 - DNA, 445 bp, Zea mays
  unsure at all n locations
  Clone ID: LIB3150-072-P2-K1-C5
cttttttttttttttttttttttaggtttttttttttttttttttttacccccanaananaattttaaagtaggtttttttaaaagtagggccccccaaaaaaacctcttttttatttttatttttttttttttggggaaaaaaaaaaaaaggccttttaatcccttccccccaaaataatggccccttttaaaaaaaaaaaaaaaaaaacccccaaaaaaaccccgaaaaaaaaaaaaaacccccccccccccccccccttttttttttaaaaaaaaaaaaaaaaaaaaaaaattttttaaaaaaaaacccaatggggggaaaaaacccccccccccaaaaaaacccccccgccccccccattttttgccccaaaaaaaaccattctcaaaaaaaaaacccaaaaaatcctctttggggaaaaaccccccaaattgtttgtccc

SEQ ID NO: 11493 - DNA, 375 bp, Zea mays
  unsure at all n locations
  Clone ID: LIB3150-072-P2-K1-C6
ttttttntttttttttttttttttttttttcngtttgtcattacccccccnnnnnnnnttttagaagatttttttttaaaaggggggcccccttaaaaacaanngcaacaaacccagcaaaaaattaaaggggaaaaaaaaaaggcccaacaaaaaaaaacccccaaccttgggggtctggcaatacttgttacaagctacaaacaccaccattatttttaccaaccgaacaccggaaaataaaaaaagcggtttgggggaacaacccgccccttttccattgaaccccaaaaacatctcatttatcaaaggggggggaaaaataaccccccctcccccgcaaaaaaaggccccaaaaccaaccaccccaccccc

SEQ ID NO: 11494 - DNA, 458 bp, Zea mays
  unsure at all n locations
  Clone ID: LIB3150-072-P2-K1-C7
cggccttttntctttnttttttttttttttttttttnntttttttgaccaacgcaaccaaccaggatacgtcgtgttttttaaaaggccaaacggtaacatataattcaaactgcataccaaagaatatggctcgcttacgttcacagcataaaccaacatagtaaacctctggtactcctacaagccattaccatgttcatacaaaaaagcaacaattactcataaatctaagtagagaggcactttcgctgtaacgagatagaccttacaaagatcccaaaacactgaatattcttaagcaaaggtggcagcagaagccttgacggcggcaaaaagcttggacctcctcttggccaagctctcgctccggcggtccctctgttccttcagcctctgggcaagaagcttctggtactcaacagcctcagacttcttcttagttatcctcttcttctt

SEQ ID NO: 11495 - DNA, 350 bp, Zea mays
  unsure at all n locations
  Clone ID: LIB3150-072-P2-K1-C8
acaggnccggaaaaaccggggcggccggcctttttttttttttttttttcanttcttttaaaacatacctcatctgcgaattaataaattaatgggggggttatcaacaagatagataaacccatcctgctcgtacatactcctagatagcacagctagttataccacccacccaacaaggcatgcaattagctaaactgcttggagaaacattattctactaataatattattactaaatccaaaacagatgctggggtcgttcacagttacagcactccctcgcttgggctggtgcttgacccccctaaatcccttctacggcatactcccacctacaccaacatgag

SEQ ID NO: 11496 - DNA, 485 bp, Zea mays
  Clone ID: LIB3150-072-P2-K1-C9
tgaaaaaccggtgcggccggtcttttttttttttttttttttttttttttttttttttttttatacaattaatacgacttcatctcagtgggtttattttgaaggggtacaaaaataccttcggactttacaaagagagcgagaagataagatgcaacaccttagaaggctgagagaactcggtccagtccgttctccaatcgtgtcaatgtatgtcactatgtatgtccatgttcctctatttatagttagagggtacagctttatgtgaatttacaatggtctcttgacggtctcatgcgaaatgcaggcaggaggcagcattgtcttctgatgctaagctccagtaatgttagtttggaagatttatatttacccaccggccaccggtacgtaccataatgcagaaaaatgatgctactccaggtgggtctttaaccatttgcattgtcgaggagtcaccatcttctctgaaactgtccttt

SEQ ID NO: 11497 - DNA, 470 bp, Zea mays
  Clone ID: LIB3150-072-P2-K1-D1
gggcggccggcctttttttttttttttttagagcaaactagttagtccaattatttgtgttgggcaattcaaccaccaaagatggttaggaactagatgtaagcctaattccctttcagcagcgcacctcggccatgcgcagtgcgtctgcctgcctacacaggaccatgcggctcatgcacagggaggaccatgcaggctccccacacggatccatgcggccaacccaccggccaaggcactggccgctgcgagcccttggccgcatgtgcccaggtgcacttcggcgcgggtgaggcacgaccccggtcagtccaatgaacacggcacggtcgttgcgagcccttggccgctcgcgaccaggcgcggtccggcaagaaccgaccacggcgagggacagcctcggttacgcgcggttgagccccagtgcgggcaagccccggccgccgagcgccccggcgcgggcacgc

SEQ ID NO: 11498 - DNA, 479 bp, Zea mays
  unsure at all n locations
  Clone ID: LIB3150-072-P2-K1-D10
gtcctgaataaccggtcggccggcctttttttttttttttcatataactatcatctcttacttgtacaagtacaaccaatcaagccaagcgggggggtctttacatctgacgaaccaggtgtcacgacagacagcgtgctcgcacatggagccacaacatacaaagagggggtgggcataatttgataaatgaaccgtaccatgcaaatctgccacacgtatcttgagaaatgaaggggacataacttgagactaggcaacgatgaggaacttgcgaagcctagaagcacttcctgtgaacaattgccgggccagactcatcgtactcctccttagatatccacatctgttggaaagtgctcagcgaggctaggatggaccctcctatccagacactatacttcctctcaggcggtgcaacgaccttgatcttcatgctgcttggtgcaagggaagtgatctcnctgctcatacgatca

SEQ ID NO: 11499 - DNA, 392 bp, Zea mays
  unsure at all n locations
  Clone ID: LIB3150-072-P2-K1-D4
ggaataaccggagcggccggcctgtttttttttttttttttttttttttttttttttngtttcatttcccccaaaaccagtatagctatgggtggggtcctttttgtttgacgacggggctatgaatttaccaactccgaaaaacagtttgtaaatcatcttccccatccaagttgggattggggagaagccaattaaggcccagatgaactagcctacttattaaggctaagatgcgtttagggcatcaagttgaccctggagctcctcgagatcatcatcatcatcaatagcgctggaactcactggagcagctggtcctgcgtatgaatcagggttgggaagctgacggacaagaccttccggtgggatatttggagtgtttataaagc

SEQ ID NO: 11500 - DNA, 459 bp, Zea mays
  Clone ID: LIB3150-072-P2-K1-D9
ggccggccttttttttttttttttttcagttctcatagcattatcttgtatctcagaacataacaggtgaaacacgagtcattttgaggcgccatggggttcacagatccacacctaaaccgctaaattaaactgcgagcgatacatgataaactaagaccaccactcagatcaccaccatcttattcagatccaaaggaacggacgcagggggagtcgacgatgacggagggagggcggccgaacagaccagatcagagagatctaggagagctgtccgcagtcagcgaccttgaccaccttggaggtggagccgttgcgggtgcccaccttctcgatggccttgacgacgtccatgccctcgacgacctgtccgaagacgacgtgcttgccgtcgagccaaggggtcgcgacggtgcagatgaagaactgggagccgttgttgttgggcccggcttt

SEQ ID NO: 11501 - DNA, 406 bp, Zea mays
  unsure at all n locations
  Clone ID: LIB3150-072-P2-K1-E10
ccgcccttttttttttttttttttttttttttttttccttttgctaattacaccctttanattttttttgggggggttttttttgaagtttggtccccccccaaaactcttttttctcttcttttttgggaaaaaaacaaaccattttttttacccccccccccaaaaaaaaaccccccccccaaaaaggaattcccccccccaaaaataaaacccccaaccccccccaaaattcaacccccgggcctaaaaaaataacgcccttttttccccaacatcaaataaataccccccccccaactttacaaaaaagggggacagagctaggggccccttcctaaaaaccccacccccaacaaaaagcccccctctcgtcgctggtttctttatccccccatcaacaaaa

SEQ ID NO: 11502 - DNA, 379 bp, Zea mays
  unsure at all n locations
  Clone ID: LIB3150-072-P2-K1-E11
gccgccctttttttttttttttttatttatttttttcccttgngtantcccccccgttactcatcattagaagggttttttaaaaaaagaagaccccccccaaaacanncccccaatataaacacaaactaaccaccaacccgtttgacccccaaaaaaccccaaatatcttaaatccccccaaaacccccccaaaaaaatccccacacctttaaaaaaccccccacaacccccccattattcccccccttaaccccccccaaaaaaaaatttctaaaaaaaccacccctccccccccaacaaaaaaccccaacccccccgtctaaaaaccctaaccccccccttaccaaacacccaaaaaacaccccccccccccttt

SEQ ID NO: 11503 - DNA, 466 bp, Zea mays
  unsure at all n locations
  Clone ID: LIB3150-072-P2-K1-E2
cggccgcccttttttttttttttttttttttttttttttttttttttttgtttttcctaccnttttttttttttttgggggtttttttttggggggttgttgtccttttttttcccccacaacccatggttcctttggaatgggaccaaacccccaaaaacgggttcaaaccaaaaccccgggttccttgggggggggcaaaaccccaggggcgggttcaaaacaaaaaccttggccatgttttttgggcccccccggttgggaaaataaacccctggaacaaatttttgggcggcccccaaaaaccaaaaaggccctttttttttgtgggggggggggccccccaccccccccttttttcctggggcccccccccatttcctttttttttttttttccccttttgggagtcccaagtttttttttaaaaaccttaaggccccccttttccttcccacccctaaaa

SEQ ID NO: 11504 - DNA, 321 bp, Zea mays
  unsure at all n locations
  Clone ID: LIB3150-072-P2-K1-E4
cggccgcgccttttttttttttttttttttttttttttttttttnnntnntttttttccncgaaacaggatgaaatgtggtagcttattttataacacagaggctcctatttgtttggggaaatttaaatgtgcaggaatctggctactgtaggcttacacaacaatgcaatctgtttctgttaaggaacgcaggaaggaactatcagagaccaacgatcgttgggtggtgttgtggctgagccttctcagggcttgtgccccatcctattctgcttcctatgtctttttatgcctttaccttcatattaatgacatccca

SEQ ID NO: 11505 - DNA, 351 bp, Zea mays
  unsure at all n locations
  Clone ID: LIB3150-072-P2-K1-E5
ccggcctttttttttttttttttttttttnntttttgaaccgatacatagttcaaatgtgcagcacagctttacgacggtcaacttacaaggtttgctgtctcattggtgtatccctttcatgctacatcctgcgacctactgataagtatgcaggagcaaaaaaaaaaatgccaatataaagctgttacatctaacaaatacacctcaacagagaaaaggatgcacatggcaaataccatgtaccaattacaatgtcaatataattctaatatgttgacctggatcctgattgatgttctcgagataattgcccatatgtgtccttggggaaaaacactcagcccccaac

SEQ ID NO: 11506 - DNA, 479 bp, Zea mays
  unsure at all n locations
  Clone ID: LIB3150-072-P2-K1-E6
cggaanaaccggggcggccgccgcagcttccacctccagaagagcacctgctcctcctgcggtttcttctcgccgcccgcatccgcaagtataactggagtgtgaaggccatcaggcgcaagacaaccggtaccggaaggatgaggtacatgcgccacgtgcctcgccgtttcaagagcaacttcagagaagggactgaggctgctcccaagaagagtgctgccgctgccaactaagtctggatgttgctatcaagaacctgataagctagaacattggaacattttgcttgagttgtacttctgaactatttagcccaaatactctggatgtactggtttatagtgctttgaattaaagtcagacgccctggtggtttgatgtttcttcttttaattatttggtaccacagtttgatgatgctcatgctcgcatggaaacatttgcgccctgtacggtattagaggagaaagagagct

SEQ ID NO: 11507 - DNA, 468 bp, Zea mays
  Clone ID: LIB3150-072-P2-K1-E7
ggccgcccttttttttttttttttttttttttttttttgaattccatttggaacggggtttcgaattaaagcaaatggactctggtactggtacattcgactcgaataggatccaaaaatactcacggcaatatcactggccacacaaagcagacatatagctatggaaaaattaggctggtgcattgcccagccaccaccatcgccagcaccccaggggaaggactgatcgaaagtcacgcctagatcttgttgaaggcaacgatgtcgcagctctggacgtactcgttaactggctcagcgcacagatagtcctcaatgagagtgtcgacagagacaagatcgtcgactatggtcatcatgatttgcagcttcttgataccatatccgactgggacaagcttggatgcgccccagagcagcccttccatctggacactcctaacagcttcctcaagcttggccatg

SEQ ID NO: 11508 - DNA, 464 bp, Zea mays
  Clone ID: LIB3150-072-P2-K1-E8
ggccgccctttttttttttttttttttttcaagtaaagtttcattgttcaatggcatactagtggccaaaatgggcgacagatttataggaaccacattgtcttggataggctacgtgtttcaacacaagcaaaagatggcatcatcatgcagtgccatagatgatgcagtcaaggtaagattgatacaataccccaaaaaaaacagaaaacaatgtgaagatagttaactacggtatggaaggcagccatcatctcctcctcccagcaacagcagcaggtgcccgttgtgctccaggttggccctgccctgcagcttcctctggtatgttggcagctgccgtaacagcattcatgacaataagaccaagcggaatgatgtacatccaatatttagcccaaaaagatttctcaggtggtttcattacttcgccaagaccattgtcagcttttattaactgatct

SEQ ID NO: 11509 - DNA, 404 bp, Zea mays
  Clone ID: LIB3150-072-P2-K1-F1
tttggctcaaattgctttatgttcataaaattcaaaggatggcagaaagacatccatcaattcgactcccatttcagatatagccatcaattcgattccatttcatcatcgtttcaatccagcagtagacacccaaccacacaatacattttcaggactccacgatcgccaagaaacagatcaggaactagagcagcacatacggcgaccaccactcagtgcttgttcctcggcgaggtcctccttgacccagccgccgacaagggcgccgcggctgttgcagcagccttcctctttggcgacgccctcgccggcgccccagcagcgggtacagaagccttcctctttggcgaagccctcggcacggtagccttcctctttgttgacgtcgtcgccggcgtcgc

SEQ ID NO: 11510 - DNA, 464 bp, Zea mays
  Clone ID: LIB3150-072-P2-K1-F12
cggggcgggcggcctttttttttttttttgatagcgaggatagatttaattgttttgaaatatttgatatgaactggcgtcgggaactgtataagcactgcccaacaggcaggaaccacagattttaaaactacaggttttcttaacacaaattgctgagacaggaaaacactatcagttcagatatagatttcaaaaccaggaggcgaacaaggactgaaacctaggcggtgagcacgacggcgccgcctgctgccttgatcttcttctcggcgaccttggagatgagcttggccttgacgacaatgggcttgggcggcagcacccccttcccgagcaccttgaagtagccgaactgcgtgacgtcgatctgcggggccttgtcgccgccggcctccgccgccttgtcggcgggcaccatcgaccagaggcgctcgatgttgaccgcggggcagtagaacttg

SEQ ID NO: 11511 - DNA, 471 bp, Zea mays
  Clone ID: LIB3150-072-P2-K1-F2
ggccggcctttttttttttttttttttgagcagtgacggtcatccatatattattggccatgctgataacaggatggacgacatcatcgattaagcataggatttgacattgagtattacacaacatacccgaaaacacacggaattattcaacaacataaaacattattaagctttccaaagcatcgattgttccatctagaacgcggtcatccttgtagtagccacaaagtgctttattaatttgcactgaaatttcacttcattgtggccagacgattgatgaacacattgaaggcttggtctgtgtcaaccatactaactctgacagcccttgcatccactccaaaccttgtgccacctcgagtgataatctttttctcgagtaggaaggcctccagatcttcaatatcatccttgttgtagcgaagccatgcaaatggaggattggcggtgacagtctcattggaa

SEQ ID NO: 11512 - DNA, 441 bp, Zea mays
  Clone ID: LIB3150-072-P2-K1-F4
gatagaattcccatgttcattttttgttcttaaaccaaccaacttaaaataagcactacacttgtccagaatctagagagagagagagagaggaactagaatccagagaggaaaggcaaataaacgaaaaatacagcctcaaaacccatgatccatcattgcaaaacccagttaatcatccttctattcctaaaatacctgacacgccagaacacagaccatgactaccaccaaacacaagcaactagctaagcctctagctcctatgaactataggaaacaagctcaatgggacatcagaatttcctcaaacaacccaccacagccttaggttccaccccgacaccactgtcaacggcttgagctaacgaaaaatattaacagccatttagacccgccaacttctcagtttgtgttttcaggtcctgtggggcgacatca

SEQ ID NO: 11513 - DNA, 420 bp, Zea mays
  Clone ID: LIB3150-072-P2-K1-F5
gcgtccgcccttttttttttttttttttttttttttttttttttcattttttttttcccccccccctattacttttgggtggggttttttagaaaatggggcccccccaaacaacttcccttttcccccccccaaaaaggcacccaaaaaaaaaaacccccccagggaaaaaaaccaaaaaaattggggcccccaaaaacccccccccaaagaaaaaaaccccccccaaaccccccaaaattaattttcccccaaaaacccccccaaaaacccccattttcaaaaagccccccaaattttattccccccctttcaaaaaacaaaaaaaaaagggccccaaaaaacgaggggtggaccaaacccccccttcggggccccaaaaccctcccacccaataatataaaccccctataccccccc

SEQ ID NO: 11514 - DNA, 456 bp, Zea mays
  unsure at all n locations
  Clone ID: LIB3150-072-P2-K1-F6
cggaatnaccgagcgtgcggccttttttttttttttttttttttttaggtgtttttttttnntttatttcccccngnaaancaattttgggggggtttttttttattgttggtccgcctttatatttcttctttttccccccaaacccccttttttaaaaaaaaacaacccccggggaaaaaaaaaaattttttttgggaattaaccttaaaaaaaaaacttaggccccccaacttttttccccccccttttaaaaaacaaaaaaaaaaaattggtataaaaaacccccggggcccccctttaaaaaaccaaaacttttttaaacccccccaaaaggggggggttttttttaaaaaaaccccaaaaaccaatggggggttacccctttgcccctttccaaaagggggtcaccaatttttattaaactccccaaaaaaaatccctagaaaaaccccc

SEQ ID NO: 11515 - DNA, 311 bp, Zea mays
  unsure at all n locations
  Clone ID: LIB3150-072-P2-K1-G11
ccgccctttntttntttttttttttnttttttttttccnntttttttatacncccgnnnncnnnnncttggggggtgttttttaaagggaggggggcccccccaataatccaaaaacaaaaaaggggggaaaaaacccccccaaaacccccttttaaaaaacccaggggaaaaagggggcggacaaaaccaaaaagtctaaaaacacaaggggtgaaaaccccaaccggggaaaaagaaacaaaaaaaccctgaaataaccccaaaaagaaattttttaataccaataacaaaaaaaccctccccacccca

SEQ ID NO: 11516 - DNA, 465 bp, Zea mays
  Clone ID: LIB3150-072-P2-K1-G12
cggggcggccggccttttttttttttttttttttttagttaccactgaaatgtttaattattaaaaaaatcagcagtgaagggaacaaattttgtgaatccgagttctttgcatcctaaaaaaacagaaagaaaagcacccaacagaatcaaaccgctgaggacaagggatacagtgcctttgttccaatgtagagttgatcagttgaggcagaatcatcatgcctctgttcttgctccataagcttccagtacttgaggaatctcttcctggtgcttatcaacgtacctttccttgaacttcttttccggcattgtcagatggctcatcctgatgccttttttgatgacaccacgggacgccagtatatgaagcaccctgtacctcggcagtacccgcttctcgtggctgaaggaaagaatagtcgggtacgacgacagaacatcagggttccagccaagcttt

SEQ ID NO: 11517 - DNA, 399 bp, Zea mays
  Clone ID: LIB3150-072-P2-K1-G2
ggccgccctgtttttttttttttttttttttttttggaacaatactttttttttttcatttcaattgttcattcagggcggtgctcacactgacactgccacccatggtgatgcgtgacacattattactcaatcatcgccgctaaatgactcaactagctagctagccagcggctatactacagcacatagtttcttcagtgggggacaccgccggcagcagcgtaggggcatggagtcggctgctgcaggccgcacatcgccgtcagttgctgcgctatctgcgccgccaacagccccgcgacctggccgctttgcggctgctgctgcaggatggactggaggaccaagccgaagatcgcctggtaccggtgctgcggctccacctgcctgagctgc

SEQ ID NO: 11518 - DNA, 219 bp, Zea mays
  unsure at all n locations
  Clone ID: LIB3150-072-P2-K1-G3
cgccttttttttttttttttttttttttttttttttttcattncttaanttcaacctcaaatttttttttagagtgtgttttttaaaaaaaatgtcaaacaaaaaaatttttatttaaattatattataaaaatttttttattaaaaaaattttaaaaattaaattaccaaaactacaaaaataaaaaaaaaacaacattaaccacaattaatatttat

SEQ ID NO: 11519 - DNA, 475 bp, Zea mays
  Clone ID: LIB3150-072-P2-K1-G4
gaatacccggggcggccggcgcaggcgaaaccccctcatcgcttcgcgctgtccaccgacttatcttccccagctgagttaatcggggactggtcgtgtgcggagatgttggtgctcttcgagacccccgcggggttcgccctattcaaggtgctcgacgaggggaagctcgacaaggtcgaggatctatggaaggagttcacgacgtcggactcagcgagaaaggtggtcgagctgaaggctttcaacaagtttgagaacacatctgatgccctatccgcggcaaccctgattattgatagcaagcctagcaagggtctgcgcaagttcttgcagaaacattgtgagggtgaaacattagcagtagctgattctaagcttggaaatgctataaaagaaaagctgaaaattgactgccttcacaatagtgctgtgatggagctgatgagaggactgagaaatcagcttaccgagc

SEQ ID NO: 11520 - DNA, 455 bp, Zea mays
  Clone ID: LIB3150-072-P2-K1-G6
gcggcccggccttttttttttttttttctgacaaggctttcttgctagctttttttgggcaaatgacgaacaagtaacagggggtgttctcttcagaaaaccaacacaaacactaagtgcttaaacacgcatccaccaaggatcataaatcaccattctttttatcaaaggtgaacttcaccttcaaatacatattacataatgctttacacatgcatcaagagctatataacaccattccatggccattgtctgattctaccaattgcacgacaacttgctcatcatcaggcactgacttatctgacaccattgacgatacaaaggggccgattttatcctttccatgttgccacagctttttgttcaaatataaagacaaggttggctcgggtcccttgcttagtttgccaaatgccgccatagtaccttcaaacctatatttatctcgccta

SEQ ID NO: 11521 - DNA, 444 bp, Zea mays
  Clone ID: LIB3150-072-P2-K1-G9
ggccgccctttttttttttttttttttttttttttttttttttttttttttttcccagaactctaatgtcaaagtcgttacaccgatttcacacaggaaatacaaggcttcctcaaatgtagagaacattctactggacataagggaaatgaaatactacatttaagtccaaattcaagcatgtcaggtcatgctccactggtccagcaacgctactttgggttatcagctatgtgcgccatcaattcagttgcactcaagacaaagggggcaatctacagagaaatccaacaaagtaggtttgaaaactaaatataacccggggttggggtgtcgtcatcccacaattccttgaattcactcatgaagtccatccctggtgactcctccagcattttttcttccatagcctgagactcctgcatttttgacacaacagtcaaa

SEQ ID NO: 11522 - DNA, 393 bp, Zea mays
  Clone ID: LIB3150-072-P2-K1-H1
caattcaacaagatgatgaatggcggaatcttaacaaggaacacaacacggcaaacatgccagtgaacatatcaggagccacaaggcaaagaggaaattaggctggaacacataagttccacagatctaaacacgaacatgctacagcagagcgctagtgaagtgactaatttctaagccttcttcggggacttggctgccttctttggggacttggcggccttcttaggggacttgctctccttgctgccgccgctggacgccttttccgccaccttcttgggcaggagaaccgggttgatgttggggaggacaccgccgtgcgcgatggtgacgccagacagcagcttgccgagctcaacgtcgttacgaatcgccaggagcaagtgtcgc

SEQ ID NO: 11523 - DNA, 459 bp, Zea mays
  Clone ID: LIB3150-072-P2-K1-H10
ggccgcccttttttttttttttggttttttttttttttttggtttttctcagcaagattacctgttccatcaggatgagtttttgcaaacgacattacaacgagtgcagaccaccactcgtcagaatctagagagattgaaaaaaaaacagttcttttctgcttttggtgctcccacgacaaaatcacctgagtagctctcgagcaaacacgaccatacatttattgcgaccgtacaaacattgtaacaaaaggcagcagcgagctagtatagctccacaagaaaacatccccatcctcttcctttcttagtagggctccactggtgccctgaactttgctccggcgtagaccgcggcatcaccgagctcttcctcgatcctgagcagctggttgtatttggccaggcgctcagaccggcaaggagctcccgtcttgatttggcccgtagacaggccaa

SEQ ID NO: 11524 - DNA, 402 bp, Zea mays
  unsure at all n locations
  Clone ID: LIB3150-072-P2-K1-H11
gcgggcgccctttntttttttttttttttttttttttttttnnttttttttgaagggggaaaactaaaatttttgggtgtccttgatggagacaagacaactgttgctcctgtgaagaaggacctaagcctttctaacactgcctctttctgcgctgtcactgagctcttctacagttctactgaacctccaacttaactcacacacagcgtaacagtttagtcgcggtactcggccaagaacgcctcatggaaagccctgaagcggctgatcaccgcggggatcttgtcttcctgcggcaggatcgtgcattttatgtgccatgttccaggaacttgaccaaatccagatccagggaccacgacgattccagttgattcaaggagaccgagagcgttaaaa

SEQ ID NO: 11525 - DNA, 457 bp, Zea mays
  Clone ID: LIB3150-072-P2-K1-H12
gcggccggccttttttttttttttttttgaaacggatgcacccagtatttataatccaaacgaaatagtaaggtaggtacattaacagaagaataaacaatctcgcaggaaatactgcgctaccgagtgtaacttcactcgcttaacctagctacaaaaccacgagcgagccacaaaacttgcccggacgagttgcacagggacagcagctgaagtagagtagcacctggaagggcctacgagataattccagtccggggtcggagctccatagaagagcactgcagcaaacgctaacagataactaataagcacacgcattcggcacgtcgcatttctcgcgcctagtagtagctccctcggccaccgcgcggtggcccgcggcctccacgcccacgccaaggcatgccgccccttctccctctgccacgtccgcggccagggggaggagcatatt

SEQ ID NO: 11526 - DNA, 144 bp, Zea mays
  Clone ID: LIB3150-072-P2-K1-H2
caaaaccaaccccaaccaccctcccaactgcactgaatggcaagaccccctgtacggccataaccgcgtgtgggacccacagcccacatgcacccctaccccctctcgttctcctcctttcccactcccctccctcaacttaaa

SEQ ID NO: 11527 - DNA, 426 bp, Zea mays
  unsure at all n locations
  Clone ID: LIB3150-072-P2-K1-H3
tagcaaccataaatagcttactaataacacctgcatggcttgntcacggcgtgacattaagtagggggggcgaaccacacccctcaattgctgaatcatgcatcttgtatttttttctaacaaaaagatacctaataactttctctcttttccccccttctctgagaaacggtacgcctgtccgtggctttcattaggttcagcaaaacatcttcgccagcaccggcaacagcctcttttatttctgtggccacaagaaccctgtccatctttcgcaggaacctgttttccactagctcgacgcacatgaccaccattcctcctttgtgatcctcattaacagaatgtattatgtccacttcaaattcgttaatttaacataaacattctaaatgttgccccacacttccattaacctatttatca

SEQ ID NO: 11528 - DNA, 387 bp, Zea mays
  unsure at all n locations
  Clone ID: LIB3150-072-P2-K1-H4
cggcctttnttttttttttgcacaatgttaaaactatcattgctcttattctgtgaaagaattcacacgttctggaagatatcttaaatgagaggggcctccaaataaaagcaaaaaacatacaattcccatactgcttacaaaattggagaccaatatcaggatcctgtcagattaatagttcaattttcacctgaaatggcccttccacaacattaacagtttctttaatggatattgccttttttcgatgatcaacatctgtctacattttatccacacaacctctcttaatatcctgctttctcactttcaccgtagatggctggggaccaccctttattattcctaaaccatcttttttaacatctacaattacaccaaata

SEQ ID NO: 11529 - DNA, 462 bp, Zea mays
  Clone ID: LIB3150-072-P2-K1-H5
ggccgcccttttttttttttttttttttttttggccacaacttcattttttaacaaggtttatgaacaaagacatggataaagtttccagcaaattcatggcgactattccaatccatttccacactcaaaagttgcaacaagtccaaggagaaaaagatgatccagacaatgataactcaagagagagtccaccctagaacaacttaaatcgtgcaaggcacaactcctgctcaagtccaagactcatgatcctttctactcaatcagatcatcatcgtcatcaggaagaggttgtgcagctgctgcagcaagctcggcttcatgctgctgctgcatagccatgtcgatggtaacttccggaggcttaagagcaacagcttcaacaaagtgaaggttcggatcaccagccagcttccttgcaaggtacaggaaaggtttctcaaagttgtagttgctcttg

SEQ ID NO: 11530 - DNA, 436 bp, Zea mays
  Clone ID: LIB3150-072-P2-K1-H7
ctacgaaaagaatcatttttttcgaggcttaatttgaggagggcgcgtggtaggtttaatgtgcaggaatggcctcaacaacgacatgcacatctcacaccacgaaaaccctcagttttaagcatgaacagtttggaagttttacatagctgagaaaatagatggaactgtagcttttatgagcgctgctactaatactcttcacagagcatatggctctggcatagtagtattattaatcaccagatgcaccaacagcaggctgtcaacgaggaggcacccttagacaagcacctgagctgcagcttgcctcgcgatcgggaccctgtaaggggagcaagaaacgtaattcagcccaatcttggcgaagaaagcaacctatgaaggctcttcaccatgttctccacaaatgcccaacttcaagttaggcctagct

SEQ ID NO: 11531 - DNA, 465 bp, Zea mays
  Clone ID: LIB3150-072-P2-K1-H9
ggccgcccttttttttttttttttttttttgcacatttctttttttttttttattgctgagggtgtctgtacaaagggaaattttcagttgatgcatttcctccaccagatttacaccttggcatcttctctaacaaaaccccaatatttcatgtccaataggatgaaccattgtatcttgacaacagatcaaacggtcaaatgtgttagcaacgagcactttgtatcagcaactagtttaactggttggagctacaccggaaaccctttctgtcctgagaactactttggctaattctctaatgcctcagtaggaccagtaaaaatcatctcgatgcctaaggccaaattttttttgcagaaacgaaaagggaaattgtcaatcaggcatcaagcaatgttccctacagtgatgaaaagatctggtcgagcaactcagagagcttgcggatctttttggtcatt

SEQ ID NO: 11532 - DNA, 195 bp, Zea mays
  Clone ID: LIB3150-073-P1-N1-A1
tgtccacctccgctcgccgctctccccgcggctccctatcatacgcagctcgtccaggtaagatgtcgttcgaggcgtccaaggtagcggtgccggagtcggtgcttcgtaagcggaagcgcgaggaacagtgggccaccgagaagaaggagaaggccctagtcgagaagaagaagtgcatctagagccgtaagc

SEQ ID NO: 11533 - DNA, 415 bp, Zea mays
  Clone ID: LIB3150-073-P1-N1-A12
gcgttggcagcaccccgatcctgggccagtgcgtcgagtttctgaggcatcagtgcagcccgacggcgacgccctactgctcgcctcagtgccagtcgttgcggcagcagtgttgccagcagctcaggcaggtggagccgcagcaccggtaccaggcgatcttcggcttggtcctccagtccatcctgcagcagcagccgcaaagcggccaggtcgcggggctgttggcggcgcagatagcgcagcaactgacggcgatgtgcggcctgcagcagccgactccatgcccctacgctgctgccggcggtgtcccccactgaagaaactatgtgctgtagtatagccgctggctagctagctagttgagtcatttagcggcgatgattgagtaataatgtgtcacgcatcaccatgg

SEQ ID NO: 11534 - DNA, 415 bp, Zea mays
  Clone ID: LIB3150-073-P1-N1-A2
gacaggctcagttgggcttttggaggaggtgatgaaggttgtaacatacgatgtacgtaaaggttaatgaggataaaaagtgttcaactagtgttatctgcagatccatgttttgacttggacaaaaatggacgctgtgtgtgcacacaacatacaatttatttatgatgtgcacttattgacgaggcatttatacgtctatgatcgatcccactcactttacagaggtaattttatatcgggaagcctatttaatgctggatattcacaattattgtactgtggaacatgaaaactgctacaaaaatgttatataataagaactgttacattaagtaatgctgtactggctaatgttactgtagcatctcataatgaatctggtgcgccattagcgtcaacgtcacgcttattt

SEQ ID NO: 11535 - DNA, 416 bp, Zea mays
  Clone ID: LIB3150-073-P1-N1-A3
gttctggaggcatcaccttcaaccgggggtggtatgatatttctaagagcctacatcccattatatcgaacccaatgagcacctataaactgtacagaaattccataaacaagaatgcaggaaattttatgagattatcatactttttgacgtttgcaaagggaaaggatttgtcaggaatcatgatatctgttgatagaagcttggattttgagtggttagacgcagtggtcaaagaacttgatgactttggatatagtatacagactgcccaaaatggtatgagtcactcaaccaacaacttattgttaaaaaagtttaagcacgaaaccaataacagtcttgattacatgatagaagaaagtgtcagaaaagccgcacctttatcccttgcagactattaatatgtttgctta

SEQ ID NO: 11536 - DNA, 347 bp, Zea mays
  Clone ID: LIB3150-073-P1-N1-A4
gctttgtcatgctgtgataatatggttgaggaggacccatctagctcttgtaacccagctttggcatgctgggatatggttgatgttgctcctgtccaggagggaaatgatgcacatgaagcgatggtgtttgttctgagctatcttggcttacgtgacatcctctctgttgagatggtgtgcaagtcattgcattcagctgtccggaacgaaccctttttatggaagtgcatccatattgactcgcgcttggggaaaaaaatgtctgatgctgatcttatgtgcctgacacagaagtccccaagttctatgcagagcctgagtcttatgcactgtgacaacattac

SEQ ID NO: 11537 - DNA, 432 bp, Zea mays
  Clone ID: LIB3150-073-P1-N1-A5
tttttatctgaagaagtagaggcagaagaagcgagttctgaggatgagttagatccatttgtaaagtctgatcctaagttaccaagagttgtccgaatggcaaacctctgtgttgttggtgggcattcagtaaatggtgtagctgaaattcacagtgaaattgtgaaacaggatgtgttcaacagcttctatgagatgtggccaactaaatttcagaataaaacaaatggagtgactcccaggcgttggatccggttttgtaatcctgcattaagtgcattaatttcaaagtggattggttctgatgactgggtgcttaatacagacaaactggcagaactgaagaagtttgctgataatgaagatctgcattcagagtggcgtgctgctaagaaggctaacaaaatgaaggttatttctcttataagggag

SEQ ID NO: 11538 - DNA, 418 bp, Zea mays
  Clone ID: LIB3150-073-P1-N1-A6
gctttgacatgatccgatgatcagagcgaggcggccccatgtaactttttgtacggcagaatggaaatggcaaccattccaggggatctgatctggcacattgtgaggaagaacaacatcttgcttgtgaagcagttcggcaacagcaatgccaacgtgcaattcaccaatgagccaaacaacctatacaacatgcactcatttaaacactacgaattggcgaacaagaagactgtgactatccactcagctgcaaaggactagactgtggatctctgtactaacaagaccaacaaacaaaacgcacctgcgaagctcatgcacaagtctgagatgctcaaggagcatcgcaagatggccaaggctgtgaaaaaccaggttggtgacaactactacaggcctgatctgaccaagccag

SEQ ID NO: 11539 - DNA, 417 bp, Zea mays
  Clone ID: LIB3150-073-P1-N1-A9
tcgtttcgcgcaggacctaaggaagctggggtgggatgctcagaaggagggggcccactacactctcacgcagatccagccgcgtgtggtctccttcgaggagcatgtggttgtgattagagagaagcttgcagagctatatgagtctgaacaacaatggtcaaaagcagtacaaatgcttagtgggattgacttggattcaggaatcaggatgcttgatgacaccaacaaattatccaagtgtgttcaaattgcacgactctatttaaaggatgatgatgcagtgaatgctgcggcttttataaacaaagctttatttttggtcaccaacagccattaggagggtctaaacttacaagacaaggtctgttatgcaaggattttggatctgaaaagaatatttcttgaagctgcact

SEQ ID NO: 11540 - DNA, 420 bp, Zea mays
  Clone ID: LIB3150-073-P1-N1-B1
ggtatcttgcaatcacaacgaacaaaagctgtcgatctcaccgacaccgaggaagaagagatcaatggcgtccgagcagggagtcgtgatcgcgtgccacagcaaggctgagtttgacgcccacatgaccaaggcccaggaagccggcaagctggtggtcattgacttcactgccgcctggtgcggtccatgccgcgccatcgccccactgttcgtcgaacacgccaagaagttcactcaggtcgtgttcctgaaggtggacgtggacgaagtgaaggaagtcaccgcggcctacgaggtcgaggcgatgccgaccttccacttcgtcaagaacggcaagacggtcgcgaccatcgtgggtgccaggaaggacgagctcctggcccagatcgagaagcatgctgcgcctgcgcctgcgtc

SEQ ID NO: 11541 - DNA, 437 bp, Zea mays
  Clone ID: LIB3150-073-P1-N1-B10
ttgtgccttcccacttcgcaccgacaccggggggggaccgttacaccggcgaccgccgcaccgcatcgctccagccgatcgttccgagatttgttgatcaaagaaccatggaaggatcgttccagttgaatcccaacgccagtcctttcatacctggattgctgggttcatctgcacaaaaagccccagaaaaacaaggagggtcatcatcaaagggagagccttctggtagcacctttgatccttctgagtatgaggaaaatgacatggatgaacttgctctagtcaaaatggtcttttcaatgttcccaaatgtcttcacggacttcattgatgagttaatcaaggcaaatgattttgacatgaatctgactgttgatatgctttatgagctgaactcacaagatatggttcatgatgattctgaggttattaat

SEQ ID NO: 11542 - DNA, 279 bp, Zea mays
  Clone ID: LIB3150-073-P1-N1-B3
tggacgcgtgcgccgacacatgctcaaaatcagacttcactggaagatgagaggcaggaagactgagaagcgtgtacaagggggtgtacaacaccataggacgggcgatcgcggagcactgttgatcaggacactagagcatacagacggtcgttacgggcgctatgggcacaatactggaagccaggtaaaaaacagagcatattgttgggcttttgggtactgaggcttgacctaacattgcagaacattaaggcatgggttggaggctgtttgata

SEQ ID NO: 11543 - DNA, 372 bp, Zea mays
  Clone ID: LIB3150-073-P1-N1-B4
tatttttaaaaaaaaaaacaaaacacctaatagggcgcaattttttaatttgagggagagaaatccttatatagcaacaaattacaatgaaaaacaaggcctggccctcctgctcttcatgaccatcctaggaagcttcccaatttctccatacatctgcgaacattaaaccttttctgcaaattcgacaaactctctctcctaaaaaaaatcaatatccgaacacatttcctactaatatacaggccgcaatcattatttgacaatcctagattgtctaacaacttaccaatacaacaagaattcacattgcccttcatttccaattgcaaggcgattaaaccttatgactcccctctttataccttaatc

SEQ ID NO: 11544 - DNA, 438 bp, Zea mays
  Clone ID: LIB3150-073-P1-N1-B5
gccgccgccatgtcgaagcgaggcaggggaggttcggcggggaacaagttccgcatgtcgctgggtctgccggttgccgcgacggtgaactgcgcggacaacacgggcgccaagaacctctacatcatctccgtcaagggcatcaagggccgcctcaaccgcctcccgtccgcctgcgttggcgacatggtcatggccaccgtcaagaaggggaagcccgacctcaggaagaaggtgatgcccgccgtcatcgtccgccagcgcaagccgtggcgccgcaaggacggtgtctacatgtacttcgaagataatgctggagtgattgtgaatcccaagggtgagatgaaaggttccgctatcactggacctatcggcaaggagtgtgctgatctttggcctaggattgctagcgcagcaaacgccatcgtttgagagctt

SEQ ID NO: 11545 - DNA, 329 bp, Zea mays
  Clone ID: LIB3150-073-P1-N1-B7
tcgtaagtgagtgagaaagagagagagaggggggaaaatgctgcgccacgccgcccgccgcctcgtttcccgcgccgtcgctccgcccaccgcgcgccgggcgctcgccacggcggaggtgcccgcggaggccgtcgaggactccacgttcgtcgaggcctggaaaaaggtcgcccccaacatcgagcccccagcgacgcccctttaccttatgcaggcgggcctcgccacgccagttaccatccctaccaagctcaccgtcaacttcgttcttccctacaagtccgagatcgccaacaaggaggttgacatggtaattgtaccagctt

SEQ ID NO: 11546 - DNA, 387 bp, Zea mays
  Clone ID: LIB3150-073-P1-N1-B8
tctttttcatcgatctcgtttcaaatccgtgcagcctcgtttcctccgtccggcagcatctcaaccccatggccaagatcaagatcgggatcaatgggttcggcaggatcggaaggctggtggccagggtggccctgcagagtgacgatgtcgagctcgtcgccgtgaacgaccccttcatcagcaccgactacatgacctacatgttcaagtacgacactgtgcacggacagtggaagcaccatgaagtcaaggtgaaggactccaaaacccttctttttggtgagaaggaggttgctgtgtttggctgcaggaaccctgaagagatcccgtggggttccggtggtgctgaatatgttgttgagtctactggcgttttcactgacc

SEQ ID NO: 11547 - DNA, 422 bp, Zea mays
  Clone ID: LIB3150-073-P1-N1-C1
ccttctcccattcacgccccgtctctttcgtggccttccttttccggcggccacaagtgggcgagcggcggcgcccttcaccaggtcttcgtcgggcccttcaccggcgacgagcatccaccagaaacgtggagctcagagcattggtgcctctttcctctttcaccaaggattccggtgccttatttcacaagacaaaaaaagtctcaagggtcttgattcttgtatgaactcaagatttatggtggatcttggagctgtgggatgctaagcctggtctagctactagattatgaactctctgctgatctaatagcatttctacaagaattcttttgctggaaggtttattagttatttgcaacaatgaaggaacatctaatgcttaatattgatgacctaagcattcttgagcctaacga

SEQ ID NO: 11548 - DNA, 421 bp, Zea mays
  Clone ID: LIB3150-073-P1-N1-C2
gggatcccagccaccgccgctagaagaagagctcggcgattcccaggtcccgcgagaagatgccgaagcagatccatgagattaaggacttcctcctcaccgcgaggaggaaggatgcccgctcagtgaagatcaagaggagcaaggatgttgtcaagttcaaggtgcgctgctccaagtacttgtacacgctctgcgtcttcgatgctgagaaggcaaacaagttgaagcaatctcttcccccaggtttgaccgtcgaggaggtctgattggatacatggcaacgtcgggttgaactaccaaagcttctttatcagtagcagagtatgctactctatgtacttttggaacctaagctattagacctgtcagtgttggatgtgtggatcttgcatttttggagaaataccaatttacctcg

SEQ ID NO: 11549 - DNA, 422 bp, Zea mays
  Clone ID: LIB3150-073-P1-N1-C3
gccaagaagatttggtgttttggacctgagaccactggcccgaacatggttgtagatatgtgcaagggagtgcagtatctcaatgaaatcaaggattctgttgtggctggtttccagtgggcatcaaaggagggtgcactggctgaggagaacatgcgtggaatttgctttgaggtctgtgatgtcgttcttcatgctgatgctatccacaggggtggtggtcaggtcattcccactgccaggagggtcatctatgcctctcagctcacggccaagccaaggctgctggagccagtctacctggtggagatccaggccccagaaaatgcacttggtggtatctacggtgttctgaaccagaagagaggtcatgtctttgaggagatgcagaggccgggtaccccgctctacaacatcaaggc

SEQ ID NO: 11550 - DNA, 295 bp, Zea mays
  Clone ID: LIB3150-073-P1-N1-C5
tcttattaggcgggggacaggaatacccaggagccggagcaaggtcaaggcctcaggcgtctcactcgccaacggcagcgacagcggcaggtctggaatgttgccgatgtcgaacccttcagctaatcccacacagcttacaattttctatggtggatcagtatgtgtgtatgactcggtgccaccagaaaaggccgagacgagcatgcttatagttgtggatgtaactgatctgatggccaccaaatgcagcgctgtcactgtttttaagatttcaatggtacatacagccact

SEQ ID NO: 11551 - DNA, 269 bp, Zea mays
  Clone ID: LIB3150-073-P1-N1-C6
tctgtaccacaagttcatcggggaggaggagtgcgtgtttctcggggccaccgcggacctcaccgacgaccccacctggatcgtcgatccccttgacgggaccactaatttcgtccatggtttcccatttgtatgtgtctccgttggccttaccattgggaaaattcccactgtcggagtcgtctttaaccccatcatgaacgagctttttacggcggttcgtggaaaaggggctttcctgaatggctcttcaattaaagcattatttt

SEQ ID NO: 11552 - DNA, 376 bp, Zea mays
  Clone ID: LIB3150-073-P1-N1-C8
tgctaccagaaggtgaaccccaaggagggcagcgtcttatggatctcggctggatttggcatttctggggggagtactctcatccacgagttctattcaagggaagtacaaaaccccatccatcttacagtcgacactggctttactaggggggaggctttcatcaaagcctacatctcattcaatctgtccctcagagatagtcaactcgctgcacaatatcaggaaatccctctggatctgaagatgattgaggcttaaaaggctggatttgagatcctgaaatctactatggttgataagcttccccatgatctcgaaagaatggagttattcgatggggaaactttacattcttatcgatgagatcttcaaa

SEQ ID NO: 11553 - DNA, 425 bp, Zea mays
  Clone ID: LIB3150-073-P1-N1-D2
ttttcattcgccgccgccgcctgctctctggtggcgtcgccatggggagaaggcctgcgagatgctatcgccagatcaagaacaagccataccccaagtccaggtactgccgtggtgtccctgaccccaagatcaggatctacgatgttggcatgaagagaaagggtgttgatgagttcccctactgtgtgcaccttgtctcttgggagaaggagaatgtctccagtgaggctcttgaggctgcccgtattgcctgcaacaagtacatgaccaagtctgcaggaaaggatgccttccaccttcgggtccgggttcaccccttccatgtccttcgtatcaacaagatgctttcgtgtgctggggctgataggctccagactggaatgaggggtgcctttggcaagcctcagggcacctgtgctagg

SEQ ID NO: 11554 - DNA, 438 bp, Zea mays
  Clone ID: LIB3150-073-P1-N1-D4
ttccggcttctggctggcccctgcatccggggggggtgtgtgacctcagggggtcgattcgttcatccaagtgaaggcaaccagactccaggatggagttcaaagccggcgttttcaccgtggcaatgctagccatcgtcgtgctctccacaccagcagccccgcagaagcccaagagccctcccgctccgcgatccccagtcgtcctggcgccggcgccagcgcccgcaccggcggcgccgcaccacgtggacctcgcggacctcctcagcgtggccgggccgttccacacgttcctggactacctgcagaagaccggcgtcatcgagaccttccagagccaggcgaacgacacgaagcggggcggcatcaccgtcttcgtgcccaaggactcggcgttcgcggcgctgaagcagaccacgttcgccaacctcaccc

SEQ ID NO: 11555 - DNA, 430 bp, Zea mays
  Clone ID: LIB3150-073-P1-N1-D5
tttgttcgcctcctcttctccagcgtccgatcgccggttcccacctctcctcgctgcgccgccagctcccgcccccttctctcccctcctcgcctccccgcgcgcgcgtttttataagggtttcggcggaggcgcccggtcgctggcgatggccgacgacggcgggagccacgagggcagcggcggcggcggaggcgtccgggagcaggaccggttcctgcccatcgccaacatcagccggatcatgaagaaggccgtcccggccaacggcaagatcgccaaggacgctaaggagaccctgcaggagtgcgtctccgagttcatatcattcgtgaccagcgaggccagcgacaaatgccagaaggagaaacgaaagacaatcaacggtgacgatttgctctgggcgatggccactttaggattcgaggag

SEQ ID NO: 11556 - DNA, 441 bp, Zea mays
  Clone ID: LIB3150-073-P1-N1-D6
tctattatgccttatacccctactacattggggtcgggtcttggatattttgagctggtcataaagatgtatccccaagggagaatgtcccatcatttccgcgagatgaaagttggtgattatttgtctgtgaagggacctaagggccgattcaagtaccacgttggccaagtgagggcatttggaatgctggctggtggatcaggcattactccaatgtttcaagttgccagagcaattcttgagaaccctaatgacaacaccaaggttcacttaatttatgctaatgtcacatatgaagacattcttctgaaggatgagctggacgacatggccaaaacctatcctggccgctttaagatctactatgtgttgaatcagcctcctgagaactggaacggtggtgttgggtttgtgtctaaggaaatgatccaatctcat

SEQ ID NO: 11557 - DNA, 197 bp, Zea mays
  Clone ID: LIB3150-073-P1-N1-D9
caaaacaacaaaactagcaaaccccgcgcctttattaaaacctaacgccgcccctaacaaaaccactactaccttaccctattctaccatttccaccatcactatctatcccaaaaattaattatcctatattaccatttccaaaacacactcctcacaactacaatacatcttcttcacccaaccaccacaacttt

SEQ ID NO: 11558 - DNA, 424 bp, Zea mays
  Clone ID: LIB3150-073-P1-N1-E1
ctctcgcggagatcgaagagaagctgaggcctagcgccgcacccgccgccgcatgagccatcagccatggcgctggccgctcgcctcgtctcacgctcccgtcagctacattcggttcaagcagcttttgcgaatggaggtgtcactcaagttcgctcctttgccaaggatgcagctccagctgaccgtcctcctgttagtggggatgatctcctgaagggcatattctttgaggtaaagaagaagtttgagacagctcttggcgtccttaaaaaggaaaagatcactattgatccagacgacccagcggcagtttctcaatatgcccaagtcatgaagactgtaagggaaaaggcggatcttctttctgattctcaaaggattaaatataccattgagaccttcaccaggggcatccctgatg

SEQ ID NO: 11559 - DNA, 326 bp, Zea mays
  Clone ID: LIB3150-073-P1-N1-E10
tctgcgctccgtcgacgttgcttaccgcctatctgggcaagcaccgccgcatgagcgaaggatcgtaaagatggcggtgccgctgatgacgcataagatcgagaagaagagggtcacgcatttcaagaggccctattttgaccggtacaagtgccttaagccaagctggctcaagcccaacggtattgactccggagtgaggcgtcagttcaagggatgcacctggatgcccaacactggatatggctgcgacatgaagaccaggcactaccttgctaacaagttcaaaaagttcagttgtttacaatggattctaactggagctt

SEQ ID NO: 11560 - DNA, 423 bp, Zea mays
  Clone ID: LIB3150-073-P1-N1-E2
tacgtcgtcggccgtcctccaccgccctccaggtacgtcgccggccccctcctccctcctccctccgccgccacccccaaagccgccgctgccgccagctactgcctctcccgtaccgccgccgccgtcgtacgagcaggccgtagggtttcgagtttggagttctgcctcttcctactgcctctccccaaggtccccactcgcatccaaggttgtacgagcaggccgccagctactgcctctccccaagtgtatttgctctctgctgcatataaacaagatttttgaagtaggaatatcagagcatctggcaattaagttgcaacatatgaacattgatttgattggaaaggcaaattcttctattacagcagagctggattacatgtcagacctggttcatatggcctgtgtaatgcaagg

SEQ ID NO: 11561 - DNA, 426 bp, Zea mays
  Clone ID: LIB3150-073-P1-N1-E3
tgtatctataccaccgaaggcgaggagggggggccaaggacgagcgccttttcgtgcccgctggccattgccactgctcacgagcctcccgcctcgcgctgccctgccctctgcggctctgccccaacgagccccaggagagccagccagccagttaaaggagccgtcaaaagcccccgtcgaggagagcacgcaaggtcagacatggcgtcaaccgttaccttcagcccagttagcacccaagctgggttgatccataagccaaggaaccttggagccacaagctacgctggcttaaaggtgccgagctttggctatgagtcatcattcttgggtaggaacgcatcccttcgggcggctgttactacaaggattgtgcccaaggcaaagtctggattctcagatatctccacaggcattttacaa

SEQ ID NO: 11562 - DNA, 219 bp, Zea mays
  unsure at all n locations
  Clone ID: LIB3150-073-P1-N1-E4
ttgctgntaggttctaccaggagaccttcggcccgccctttttttcactgcgagtctcgggcgaaatggtcttcccacaaggtttccatctagtaccacggttggtggttttataattgatttattcttttcttatttttttttcttgccttcttttatatattattttttattatatctttcatttctcttttttaaatattaatcttttatttttat

SEQ ID NO: 11563 - DNA, 178 bp, Zea mays
  Clone ID: LIB3150-073-P1-N1-E5
tctgtatcctaaggatcaacagtatatgaagatgaccttgtaccagctgcttggcgagttggatggttttaagcagaaccaggggataattgtcattgctgcaaccaactttcctgagtacactagataaagccctaattagacctgtgcgttttgaccgccatattgttgtttccat

SEQ ID NO: 11564 - DNA, 227 bp, Zea mays
  Clone ID: LIB3150-073-P1-N1-E6
acttcaggcattcgcgcaatgtcggagggtgaatcattcgaagtttgagaaactggaaaagatgtaaaaacgccatctaagctagatgagcatcttaatcctgggttggacggagatgaagctgagaaacacagcttagactgtggtacatacaccagtcctgtgttgagcaagagaacccttttttcaccaggatcaggaccatgcctgtagtttgtatatgaaag

SEQ ID NO: 11565 - DNA, 389 bp, Zea mays
  Clone ID: LIB3150-073-P1-N1-E7
tctacttgttacacgtcaccggaaacatacagataaccagatgccacatattgtcaactgtgcaatcaaaatatcaaaacaaagcatccatttaagtaaactcgactctctccccaatcggattgtttcattggcatttgatgtgatttctcgagttttggaaacaggaccgggatggcgactagtttcaccacatttttcttcactttttgattcaacaatttttccagcattagcattggatgagaaggatatagaagaatgggaggaggatactgatgagtatatgcaaaagaatcttccttctgaacttgatgacgtttctggatggactgaggatttgttcactgccagaaaaagtgcaatcaatttacttggtgttatagcgc

SEQ ID NO: 11566 - DNA, 426 bp, Zea mays
  Clone ID: LIB3150-073-P1-N1-F1
ggactgcttgctccctgttgaccattgggtattctgaaccatcgagccatggctgccaagctgactcgcctccacagtcttcgcgaacgccttggtgccaccttctcctcccatcccaatgaactgatagcactcttttccaggtatgttcaccagggcaagggaatgcttcagcgccatcagctgcttgcggagtttgatgccctgtttgatagtgacaaggagaagtatgcaccctttgaagacattcttcgtgctgctcaggaagcaattgtgctccccccatgggttgcacttgctatcaggccaaggcctggtgtctgggattacattcgggtgaatgtaagtgagctggctgtggaggagctgagtgtttctgagtacttggcattcaaggaacagctggtggatggacaatccaacagc

SEQ ID NO: 11567 - DNA, 398 bp, Zea mays
  Clone ID: LIB3150-073-P1-N1-F3
tgagaaggagaacctcttcttccttgagacctccgcgctgcaggcgaccaatgtagaaaatgccttccagaccgtcttgacagagatctttaagatccacagcaagaagaacatggcagcggacccaagggccaatggggccgcaccatcgctggcagggaagaaggtcatcgtcccaggcccagctcaggagatccctaagagcaagtgctgcagttccatgtgacatgttgcctgaattttatttgggtttgttcgtgtccgaggtattctcagcatctttgtggatgtatatctatactggaataggcttagatttgaattgctggttaacttgatgtgcggttttgaagggaccgatttcgtaatttagatttgtcacccgacttcaagattac

SEQ ID NO: 11568 - DNA, 385 bp, Zea mays
  Clone ID: LIB3150-073-P1-N1-F4
ttccgtcgccactcccacgcccgcagccatgccggccaagctcgacccgtcgcaggtggtggaggtgttcgtccgtgtgaccggcggcgaggtcggcgcagcgtcttcgctggcccccaagatcggcccgctcggtctttcccccaagaagatcggagaggacatcgccaaggagacggccaaggactggaagggcctccgcgtcaccgtcaagctcaccgtccagaaccggcaggccaaggtctccgtcgtcccctccgccgcggcgctcgtcatcaaggcgctcaaggagccagagagggaccgcaagaaggtcaagaacatcaagcacagcggcaacatcagcctcgacgacgtcatcgagatcgccaggaccatgaggcac

SEQ ID NO: 11569 - DNA, 297 bp, Zea mays
  Clone ID: LIB3150-073-P1-N1-F5
tttttattctattgccctcgcgccaccgtcggcggcgtcgtcgctgcagcgagccaccgtcccgccgtcgcttgaggtagacaccaatccaccgccatggggcgtatgcacagccgcgggaagggtatctcttcatcggcgctgccgtacaagaggactcctacgatctggctcaagacagctaccactcgggtggaggagatgattaccaaggctgcgaagaagggccagatgccgtcgcagataggtgttctgctccgtgaccagcaccgaatcccgtttgtcaagagcgtcact

SEQ ID NO: 11570 - DNA, 402 bp, Zea mays
  Clone ID: LIB3150-073-P1-N1-F6
ttcttgaccgtgtagcaccaggctcggtggacgtgattctatcttattgtcactacgggatcaatgacacctcccttgttgatctgctcccctacttgaagagcaaaggtgttggggttatcagtgcttcgcccctctccatgggtcttttaacagataatgggccaccggagtggcaccctgcaccagaagaacttaagtcagcatgcaaggctgcagcagatcactgtagaaagaaggggaaaagcattacgaagctagctatgcagtacagcttaatgaacaatgaaatctcgacagttcttgttggaatgaactctttggaacaggtggaggagaatgtggcggctgcactggagttgtcaacatcaggcatcgatgatgaacttctgcgtgaagttg

SEQ ID NO: 11571 - DNA, 350 bp, Zea mays
  Clone ID: LIB3150-073-P1-N1-F8
tcggtagcgatgactgcaatagtgatacgaaccggatcatctgcggccaggggtaactccggacccttcgtgaacatgggcaccgacactaggcgaaattcgaacccgtccttcctcgacgacaaggacgccaaggtggtggagaacgagcaccggcgcactggcaggatacggcatagtgacggcgactactgtcggtaggctgcatcaccgctggaacgcgaaaccacggcgcgctcgacatgactagtaaggccgacttggaggtcttcttgaccgccgaacgctccggctacgaggcactggccgacgccaaggactggggagtccacgcaaactataccttagtc

SEQ ID NO: 11572 - DNA, 103 bp, Zea mays
  Clone ID: LIB3150-073-P1-N1-G1
aaggtcaggaaggtggacatgcttgatggcgtgaccatcctccggtccgagaaggtcaaggatgagctcatccttgacggaaacgacgtcgagctcgtatctc

SEQ ID NO: 11573 - DNA, 358 bp, Zea mays
  Clone ID: LIB3150-073-P1-N1-G2
gtcttttgttcgttcctcgcgctcggcaccaggcaccaccacacacattccaatctcgcgagggcaagcagcaggggtctgcggcggaagtcaggctggcttaagaagtactgcgtctgctaccagggaggggcaggatgctccatcaactgtaaatgcgatgattgtagaaacccatttgggagaaaagtcggcgttattttggacggtaaaagcagtcttactgcacctatactgcacgaaagaaacgggactgaagttgactcaagcgactaggaagacgacttttacatgaaatcgacagcttttcccaataccttcgtcttcggtgtttagggagtctttgttccaacaggag

SEQ ID NO: 11574 - DNA, 433 bp, Zea mays
  Clone ID: LIB3150-073-P1-N1-G3
ttttaccacaacaagaagaagcgtagtcggcggcggaaggaaaggcgcggagcaagatgtcttggcaggcgtacgtcgacgagcacctgatgtgcgagatcgaaggacagcatctcagcgccgccgccatcgtcggtcacgacggcagcgtttgggcgcagtccgagagcttccccgagttaaagcctgaggaggttgctggtatcataaaggactttgatgaacctggtactcttgcaccaactggtcttttcgttggaggtacaaagtacatggtgatccaaggtgaacctggagttgtcatccgaggaaagaagggcactgggggcattactatcaagaaaaccggcatgtccttgattattggtgtctacgacgagccaatgacttcagggcaatgcaacatggtggtggagaggctcggtgattacct

SEQ ID NO: 11575 - DNA, 342 bp, Zea mays
  Clone ID: LIB3150-073-P1-N1-G4
tagttctcaaaacaccactcaaggagatggtgggtgtgcatccagacaatgactttcttgaagacataactggtaaactaaaagagtatgtcatggaggaaatcaatgttaagactgtcactccatgcaatgaccccttgatgtatgcttctctgcgagctgaacctaatttcagtgtgctgggaaaaagacttggaaaggacatgggcaaagtatcaaatgtggtgaagaagatgactcaggaacagatcttagacttcgaaaaaagtggagagatttcattcttcggtcattgcttgaagctagatgatattaaggttgtccgacaattcaagcgttctg

SEQ ID NO: 11576 - DNA, 352 bp, Zea mays
  unsure at all n locations
  Clone ID: LIB3150-073-P1-N1-G6
tctttgtttaagcaaaangcaaagactcaagaaaagcagttccaatcactagattgggagagactaccattgagacctaggaaggaagaaggagctaaggagataggccgcatcgagaacaacaccgccgttctcgtccaccccctcgacgacgctaaggtacaagaagaggatgaagcacacaccttcttcccctggtcctactacttccccgctagtcggatctctcgctccatcgtcgctgccaaacgacaccatgtgctctcccttttcaccgcatcttagaaccttaacacccccacctacgctgtgtgcgggatccgagggcacaagcaagaggatccgatcaatg

SEQ ID NO: 11577 - DNA, 433 bp, Zea mays
  Clone ID: LIB3150-073-P1-N1-H1
ggctgcgctcgcggacgcgcgacctgttcgcgcgccccttccgcaagaagggctacatcccgctcaccacctacctccgcacctacaagatcggcgactacgtcgacgtcaaggtgaacggcgccgtccacaaggggatgccgcacaagttctaccacggccgcaccggtcgcgtctggaacgtcaccaagcgcgccatcggcgtcgagataaacaagcaggtgaatggtcgcatcatcaggaagcgtatccatgtccgcgtggagcatgtgcagccgtcccgctgcacagaagagttccgcctgaggaaggtgaagaatgatcagctgaaggcggatgcaaaggagcgcggcgaggtcatcagcaccaagaggcagccgttgggtcccaagcctggcttcatggttgaggggactaccatcgagaccgtcac

SEQ ID NO: 11578 - DNA, 433 bp, Zea mays
  Clone ID: LIB3150-073-P1-N1-H2
gcatgccgccggcggcgaccagaccgaccacctcgcgcactagccttgctcgcttctcgtcgccggctcgttgccggctcgtcggcacgatgtcgtcggagcctccacccgccccttctgccgccgccgcagagggactggctgctgacctttccgccgccaccctcagcaagaagcagcagaagaaggacgccaggaaggcggagaaggctgagaaggcggcgcagcgccagcaacagcagcagccggccgacgtcgaggacccatttgcggccaactacggtgatgtccccgtcgaggagatccagtcaaaagccatttccggccgcttgtggtcccagatcggcgacctcgacgactcctctgcggggcgttctgtgcttatccgtggagccctgcaggctattcgcccggtcagcaagaagatggcttt

SEQ ID NO: 11579 - DNA, 434 bp, Zea mays
  Clone ID: LIB3150-073-P1-N1-H3
tctttttgtaacctttcaataggcgtcctccaagaactagtaaacatggcaaaactgttgagcctgttcttagccctctcctttgtagcagctatgtttgccataggctctcatgctgatggagactgtgagaatgacctccaaagcctgataagtgactgcaagacatacgtgatgttcccagctaatccaaaggtccctccttcggatgcttgctgtggtgtcatcaagaaggcaaacgtttcttgcttgtgctccaaggtcaccaaagaaactgagaaggttgtgtgcatggagaaggttgtgtatgttgctgagcagtgtaagaggccatttgagcatggctttcagtgcggaagctacaaggttgcagcaaactgatgataccataagagggaagcgtttggcgtagtctatatgattcaattgttgca

SEQ ID NO: 11580 - DNA, 375 bp, Zea mays
  Clone ID: LIB3150-073-P1-N1-H4
ccctatatctctagccaacacacacataatactctccattccattccattccatctcaaaggatagaataatgggcggtctctccaccaagcttttcgtggtcctcctcctgctcgtttgttacaccgggacgcaaggcgggccggtgactatggtgtcggcgaggaagtgcgagtcgcagagcttccgcttcaagggaccttgctcgagggacgccaactgcgcaaacgtctgcctgaccgaaggtttcaccggcggcgtgtgcaagggcctacgccaccgctgcttctgcaccagggactgctagtactgcctcgcctcgtgtcctgcgtgtgcatatatagccgcagcggatcagtaaaacatgcatgcatg

SEQ ID NO: 11581 - DNA, 231 bp, Zea mays
  Clone ID: LIB3150-073-P1-N1-H5
tttatcttaacacacacataatactctccatgggcgtgccatttcatctcaaaggatagcataatactcaatctctccaccaagcttttcgtggccctccttctgctcgtttgttacaccgtgacgcaaggcggtccaatgactatcgtgtcctttaggaagtgcgattcgcatagcttcctctttcaagggaccttgctcgagggacgccaactgcccaaacgtcttcct

SEQ ID NO: 11582 - DNA, 371 bp, Zea mays
  Clone ID: LIB3150-073-P1-N1-H7
tctttcgccaccaggtgcagagtctttcgtcatctcttctccggcgaagaacccccagtcgcccaccagatcacttgttaaactttgttgaggggtgatggcggtttctttcgcaaacctcaacaccgaggcagggcttaaaaagcttgatgagtaccttctcactcgcagctacatcactggctaccaagcttccaaggatgacttggctgtctacacttcgttttcgtctgctccctcgtccaagtatatcaacgtagcaaggtggtttaatcacattgatgcgctcgtgaggctgagcggaattactgcagagggccaaggtgtgaagggtgaatcctcaagagttccttcagccccaacttcagatg

SEQ ID NO: 11583 - DNA, 280 bp, Zea mays
  Clone ID: LIB3150-073-P2-K1-A10
cctttttttttttttttttttttttttttttatttttttttttttttttttttaattttttaaaatgtttgtaaaatttaaaaaaatttgctaaattaaaaaatataatatttttttttttctttttattaattattattttattatttattttaatcaaaaaataatatttttatttttttttaaaaaaaaaattaaaaaaatatattttttaaataatataaaaaaaaaaattataaaaaaaaccaaaataaaaaaaaaaaaatttcatattatatat

SEQ ID NO: 11584 - DNA, 408 bp, Zea mays
  unsure at all n locations
  Clone ID: LIB3150-073-P2-K1-A11
ccaaaaccaattnaatcntctttttcaactttcaaaatataaaaatcatcccgtaatattatacaaacagtgttcgccaataatatcatccnaaatcnacaaaacttcantaaatgtnaaaactctnttnctacttntaaacatgtctaacctctnncctttaacatttccttctctaaaaaatatttcccttaaccttttttaaaattacaccctcttactttaccttaaaccatttcataacatcctcctttntcaccctatacttaatcccaacactttacttccaccttctccctttatctacacttttcccaactccctcaataaccactttaaaatccattccctatatacccctttaaacatcatacctcatcccaaaatcaattttctcctttattccca

SEQ ID NO: 11585 - DNA, 186 bp, Zea mays
  unsure at all n locations
  Clone ID: LIB3150-073-P2-K1-A2
atatataaaaacattactcaaccggncttgttaaattaaaacactggcttgtcnccnnaacctcaaacaacaaacacttatacaatataactttaacatacatttaactaatatcatcaactctttttncacctatcatctctaaattattctacaaaccaatctcttttttctttccatttttta

SEQ ID NO: 11586 - DNA, 324 bp, Zea mays
  unsure at all n locations
  Clone ID: LIB3150-073-P2-K1-A5
tttaaaatttnnanaaataaaatttttttaaaatttttttttttaatttttttaaaaaaaaatcgtctgtaaaatttaaaaattcctgccccaaaaaaannacccaaaaaatttttaaattttccactttttttttccctcttcaacttaaaaaccactttttaaaattaccttttttcaccatattaaaaaaaaaaattccaaaccccttttccaactatttctttttttaaacccttttttcttttcaatatcttattaactttttatcctcctaaaaaactctatttccctttatttctttttttttttcaaacttttttc

SEQ ID NO: 11587 - DNA, 303 bp, Zea mays
  unsure at all n locations
  Clone ID: LIB3150-073-P2-K1-A6
atatataaaatttctacaacatctctttttaaaattgcataaatnnnnnaaccccgcgantataaataaatagcatggtccnaaaacatataaaacattaataatctnctaccaatgggaaaacaaccataacaacattaacttaattaatcagttcccacgactatttaaaaacaaacatcctttaacaagaagtttctaattaaatcatttctgcttctgtgcaccattattatcagaataaacattcattttctactacttcccactccccttcaataacaacattcaccttttatcaac

SEQ ID NO: 11588 - DNA, 387 bp, Zea mays
  unsure at all n locations
  Clone ID: LIB3150-073-P2-K1-A7
cggaanttgaataaccggggcgggcgcccttttttttttttttttcggcacaaaaaaggggtacataagcaccattattgatacgtccagaggtaaacgagtattagcaagctcaggctgggagttgggggcaggcaaaacagtctctgctcctgcgcaaaagctactagcttacatagcacagttgagcaaaaaaaaagtatgttcgtcttcagcgtaacatcttaagcggacttcacggtggccgcgttgatgatgtcgatgaactcaggcttcaaagaagctccaccgacaagaaacccatcgacatcaggctgtgctgctagctctttgcagttcgcggcagttacagagcctccgtaaatgatcctagtagattcagcaacc

SEQ ID NO: 11589 - DNA, 453 bp, Zea mays
  Clone ID: LIB3150-073-P2-K1-A8
gggcgcccttggccttttttttttttttttttttgaacaaaatcgaccaaacttttcattcaccagctaaaaaatgtgttcgggtatgattggcagaagggtgggaccttttaccatattatactgtcacaaactgttaccgaacacttaaaacaaaaactagatgttccccaaaactgatgacaaagcacaggtcctcagtacttgataggggcaagaatttccaactgagaccccaacttgtcctcggctgccttctcggccttgacacgcaacttggccaattgcttcttcctctcgtaggcaaccttggccttctccttcctcttctcctcaaggtccctgatggtgtcatggtagttccaccctacctccttagagagctcgccgaggaggcattacttgtgtccaggcttgtaccttacaaccttaagagcgtcagggatgaccata

SEQ ID NO: 11590 - DNA, 73 bp, Zea mays
  Clone ID: LIB3150-073-P2-K1-B1
caaatcaaaataccaccccacacaatttaatagtgtcaaccaatcatttcccaacctcgtatacacatatttc

SEQ ID NO: 11591 - DNA, 281 bp, Zea mays
  Clone ID: LIB3150-073-P2-K1-B11
aattccccgcgccgccgcccttttttttttttttttttttttttttttttttttttttttttttttttttttttttttttttttttccgttatatttaaaaaacccccgccctccattttacacctcaaattttttttatctttccctccttcttacccccccacactaatatcttctccccatactcctcaccccccccccccactctacccctattaccaaaaaacacaaccacccccctctctccaaaaaaacccccccctaacacaacaaccccccc

SEQ ID NO: 11592 - DNA, 69 bp, Zea mays
  Clone ID: LIB3150-073-P2-K1-B7
ccgccctttttttttttttttttttttttttaaaaattttttttttaaattaacgtgaaaaaatataat

SEQ ID NO: 11593 - DNA, 462 bp, Zea mays
  unsure at all n locations
  Clone ID: LIB3150-073-P2-K1-C3
accggacttgaattcccggggcgggcggcctttttttttttttttgaagcaaagcaagccaataatgattcattcattcagtaggagaaaggagatgagggcggatacataggtgattcggggtgcagacataagacatgatcagaaattcataatgcagcagcctatgaccaggcccttctcttgagtcagtcacccccacttcctcgcgcaagcaggctgacaaatgttggaacactagccacacagtggctggctgtctaacgcaaacaccactcgagagtcgagaagaccgcgatgcatcgcaccctgcctcttttatttggggatcgccgcagccagcagaattattattagggtaccagctagtagtttctttcgttcgttcaccaagggaggatcttccagcgcttgttgtcgccctcgcaccacttncaaagcacgatctcgggaccgtcatgg

SEQ ID NO: 11594 - DNA, 359 bp, Zea mays
  unsure at all n locations
  Clone ID: LIB3150-073-P2-K1-C4
attcccgggcgggcgcgcatctgtccctacaacnccaancatactggttctatgattgtatttatatgatccactcacgcatcatataatgtcggcaaccattggagggacgtgtggagagcctaaaaaaactatcanctacatggcacatacatttgtggtaactgcatcattcttaatcgttttccacgcaaaatgtctgtagactgatgatactgttgctatcaacaaatttttgcactacaagctctacaagaacatgtagcttctaatcatgcgatccatatatcactataattctctctccttcaatcattatttattatccaccacaatcaacatatgaactttctcttaac

SEQ ID NO: 11595 - DNA, 314 bp, Zea mays
  unsure at all n locations
  Clone ID: LIB3150-073-P2-K1-C5
ccgcccttttttttttttttttttttttttttnggcacaaatgatttgtaaactagccatgcaattctgttgcgggaggagacaactttgtgaatgcggggacttccttaaatacaaaaagtttttctgttgcaaatacaaactatgaactttttaaatatttggagaacccgacaacttaatttttttcttcaaccacctttgtccccatccctttcaagccctcttcaaggattcttcctactgtgacaatgtaatttattttctccttttcattctttttatcgattcctttttctggctataccttaaaa

SEQ ID NO: 11596 - DNA, 343 bp, Zea mays
  unsure at all n locations
  Clone ID: LIB3150-073-P2-K1-C7
cctgaccaaatttcggggcgggcgccctttttttttttttttttaaaattcgaattcaaatttctttacaaaactatggcaaaatcacctgctggtgcatataaacatgaggggtgcgctggcttnnannaaccctacaaatttncggtgccccaccantcacaaatctccaaaacccatacaccgttttaagatctccgcttatttttcttctccttcaaaaggttcatgaggtaaactccatatacctttacgaccttgaaaccgacacctttaatatttcccacaccatggcccttaccacctaatccagcaatcatcaccttaattttctcctccattt

SEQ ID NO: 11597 - DNA, 391 bp, Zea mays
  unsure at all n locations
  Clone ID: LIB3150-073-P2-K1-D11
ccggacctaaaaaaccggggcgggcgcgccttttttttttttttttagcaaaatactattatagcttattttgttcatagaaactggangancatggcgggtaatcacacacgagcggctgtcccaantttttacanncacaaaactaccaccnacactcattcttnanctaccnacnaatctananctacttacaatattacnattttatcaaaatccattaaaaannnnaatctatanncnnaatttaannnnnaatctcnccaacnacaaancaancaaactacttctttnccttccttaccacacccttcctnncctnancnncaacaacaacaaccttcttcnnnntttccaccttcttaaaaaccccccctacctttcccttctt

SEQ ID NO: 11598 - DNA, 61 bp, Zea mays
  Clone ID: LIB3150-073-P2-K1-D2
ccccttttttttaaaaaattaaactttatattattctaactttttttttttatacaccaac

SEQ ID NO: 11599 - DNA, 321 bp, Zea mays
  unsure at all n locations
  Clone ID: LIB3150-073-P2-K1-D6
aataattaaataaaacacttttttacccacccncactcancattcctgctcgataaaaaaaaaatttttggtcgtaactntacaaaaaaatttnatncactttnttccaacatcaacaccattttttcttcatctttttcattgactattctaaaaactttttaaaatccacccactttaatatttccattcaacttattttcaccttaattaccctttttcccttcctactccatcaataacttctcatacaaaattttttccactcaacccaactttttattactttacttccttttctccccacttaaccttactttt

SEQ ID NO: 11600 - DNA, 255 bp, Zea mays
  unsure at all n locations
  Clone ID: LIB3150-073-P2-K1-D7
cccgccctttttttttttttttttttttttttttttttttttttttttttttaattttttaaaaaaaaatttttctttaaattacccactttttgcttcccnaaaaaaacccaaaaaaaaaaaaatttaatttctatctttttcttccttctctaattttttttttcttttccccatttttttttttatttttccccccttatatccttttttttttcctttcccctctttttcctttctctttcttcctttttt

SEQ ID NO: 11601 - DNA, 98 bp, Zea mays
  unsure at all n locations
  Clone ID: LIB3150-073-P2-K1-E1
aaacaatacaaatttcccccttctcatttaaaaatatttcctgcccaaccttaaaatacctnaaaaaaattccaaattttcattacatcttttttacc

SEQ ID NO: 11602 - DNA, 451 bp, Zea mays
  unsure at all n locations
  Clone ID: LIB3150-073-P2-K1-E10
cggggcgggcgccctttttttttttttttctcttctctgttttaactttatttaaaaaaaaagggtctatggaaagttaaatggaatgaaacaagaacgggttgggcatntcaaatncnanacctacacaagccaccaccaccgcaaccaggaagggctcgctccgctaacctaggcgcaagggcaaccacaaacgacgaaaacacacatccaaactgggtttgctgagccgcttcagcttcgtacttctcttctgcccagctgttcaagccgaagatgcaacaccgaacccaggcaggagccatccactcttcttcgcgcgctgcacataggaaaggaacttctccctggcatcaggaatgtcgagagccagatcgtcaagcccgtccctgacccttgagaaccccttggtcatctggttgatggttatgatcccttcaccaaaacactc

SEQ ID NO: 11603 - DNA, 467 bp, Zea mays
  unsure at all n locations
  Clone ID: LIB3150-073-P2-K1-E12
aaattcccggggcgggcgcgcctttttttttttttttttttttttatctcctttcctaattttaccttctatttgttaaatcaaaaggccggaactaatttaacacggtggggcatcatactctacaaattacattcttgaccaacancaaaaccttttctcaccaaaaggaaccatctatgcaattccagaaagtcacccagtgatgttaatcctataacatcaaggaaaaaggaagagaaagtgtatatgaaacagtaggcaaaccgagctgcatcggtagtgatttacaacaaaataaatcacatgatgctctcgaggaacatgtctctgtttctaatgtccattattttcatggctctcctgttcctcctctgcatcctcaaaacgttggtccttgatttgaagctcaaatactgaacgactaaggtcatatccaccattttgacctatccgattggcattta

SEQ ID NO: 11604 - DNA, 198 bp, Zea mays
  Clone ID: LIB3150-073-P2-K1-E2
aaccacaaacataattcgctttaatttctccatggtacactgataacagcgttcaagtaacttataacattgctggcgaaaaaataaccatccaacaaaaataccaaatactatcaaagcatgcatgaagtaggttccacaatagcataacattaagttgtatttgctcaacagtaacttcttaactaaatttttttt

SEQ ID NO: 11605 - DNA, 368 bp, Zea mays
  unsure at all n locations
  Clone ID: LIB3150-073-P2-K1-E5
cgaaccgaaattcccgggacgggtgcgtggggcaccttggcgccggttgggtccttcttctccacattctttatgactccaacagcaaccntctgcgtcatggcgcgtacggcaggcctagcaggggaggatacacggagaatgtctccaccaccatatgcttggtgggaatcatcttcaccataccagcatcaccgttcttcaggaacttgggctccttctcgagctccttgccagatcgcctgtcgatcttggtaatgagctcagcaaacttgacggcgatgtgggaggtgtggcaatccaacactggggcatagccgttgccaatctgcctcatggttgttcatgaatatgtcctgcgaatttta

SEQ ID NO: 11606 - DNA, 225 bp, Zea mays
  unsure at all n locations
  Clone ID: LIB3150-073-P2-K1-E6
ctacctaatcattttttttataacaccaacacatacatacaatgtccgaaataaaaaaaataccgctctcaaacacaanaattttacaccacaancaanttaaataaatttcactccttaacttctttacctttccctacctataacaataatttttttttatttccacctacataccattcaaaccttattttctttataaccttatatccactttatatttat

SEQ ID NO: 11607 - DNA, 415 bp, Zea mays
  unsure at all n locations
  Clone ID: LIB3150-073-P2-K1-E7
gccgccctttttttttttttttttgaagcaaagcaagccaataatttttcattcattcaataagaaaaagggggtgggatctcatacataggggggtgggantacaaacataanacatgatcagaaattcataatgcancancctatgaccaggcccttctcttgagtcagtcacccccacttcctcgcgcaagcaggctgacaaatgttggaacactagccacacagtggctggctgtctaacgcaaacaccactcgagagtccagaagaccccgatgcatctcaccctgcctcttttatttggggatcgccgcaaccagcaaaattattattagtctaccacctattactttctttcgctcgttcaccaaagaagtatcttccaccgctttttgtcaccctctcaccacttcc

SEQ ID NO: 11608 - DNA, 334 bp, Zea mays
  unsure at all n locations
  Clone ID: LIB3150-073-P2-K1-E8
ccaaaattcccggtccggccgccctttttttttttttttttttttttttaaaaaaattttttttttttttattaaacacaaaaaaacggcacgaaataaataatcgcttggttcggggancanncacaaaaaactatcttaaacattctaacctaaaaaatacacatcacattcctttttttctttcaaaaaatatcttatcaaacaaccccttttaaataaaaacatccaacaccaccatttttttcgcacaacccattaagtctttattttcttttaattcataatttttcggcccaagtaaaatttatttttacccattttacctattttt

SEQ ID NO: 11609 - DNA, 360 bp, Zea mays
  Clone ID: LIB3150-073-P2-K1-E9
aaaaaaaaaaggcggtaatttttaccaaacggggggtcatttccataaaaccatcaaggaaaacctatgcctcctataaatcagtgctataaactacagggctgacaaactttatcataacatttttaaggaaaaatcccacccaatgggagtaataatatggtacccacaaccctcctttaataaaatttgacaaattgcaaaaccatccccaagtgaaactttaaaaaaagtttttttaagaaaaccattttccctttcccccacaccattaatttattcccagaggttaaccaccggaactccaccgactcttcccctttatgacttgttcagacttttcccgttaaaggtgaattc

SEQ ID NO: 11610 - DNA, 236 bp, Zea mays
  unsure at all n locations
  Clone ID: LIB3150-073-P2-K1-F1
cgttcgttaaaataaaaaaccctcgcccccnncacaatttcctattaaacttatacaacaaaaaaaacatcccctttcccccccaaatattatactacaacctatcctctttttttataaaaaaattcttcccccccctaatcttacacaccccccccccaaccaatttccttttacacctccccccacaaattttcaatcaatctcttcatactattaaaaactctccccccctt

SEQ ID NO: 11611 - DNA, 262 bp, Zea mays
  unsure at all n locations
  Clone ID: LIB3150-073-P2-K1-F2
actaacaatcaatgtgttctctttttatatacttttattttgcaaattgcaatggacggcgacacctaagcgatcggtcggtggaaaanaatagagaatcaatttctggaaacaaggagttgatcccgccgacgaggaagatacgctaggcctggactgcacgctctctcgcttggccacgtgcccgcaccgccgcgagccattgccaccagatcggctgcgcgcacgccatggccgctgaggctcgcctaggctgtgcccc

SEQ ID NO: 11612 - DNA, 186 bp, Zea mays
  Clone ID: LIB3150-073-P2-K1-F3
cgttaaaaaaaaaaaacccgcccgcaaaaaacaaaaaaaacaacccctttctcccccctctccaacccccataaaaactccttaaaatccccccccaaaaccaaatttttttcctccctttacacaccaacccccccaaaaaaccccaaaaaccccaacttaaacccctccaaaaaccaccccctt

SEQ ID NO: 11613 - DNA, 219 bp, Zea mays
  unsure at all n locations
  Clone ID: LIB3150-073-P2-K1-F4
aaccgtctctatattacttccccccgccccccntttaaaatttttttttttttacccccttcatctctttttttctttccctatcacccccccctccccccccccttaattttttttttttctccccctaccccctccccctcttcccttctttttaaaccctttacccccataacccccccccttctcctctcctcactttctttccctcttacaccc

SEQ ID NO: 11614 - DNA, 379 bp, Zea mays
  Clone ID: LIB3150-073-P2-K1-F5
aaacactaaccattaatttggtgggaatacaaccaaattgcgtttggttcataacatatcctccataattgacttctaacattaaaagtgctaaaaacacaaatagcaaaacttttaaaattcaaccaaaaacacccacccttttttttttaattggaaattatccgacagtgtcattatccaaccaccccacaaacttttcaactgtacctccctaagaaaaaggtctttttccccttccaagttgttttcctttaaggccttttcttttggtgtgtcatgcccttatcacccaattcaataatcttttttccttttttatttttcccccccaatctctttttctctcttttaactcactttttctatttctcccttt

SEQ ID NO: 11615 - DNA, 340 bp, Zea mays
  Clone ID: LIB3150-073-P2-K1-F6
atcacaacaattgaacaatctcacacgttgggacttttccctaaacgggccggcaatcaccttccccaacacaaggtgcgacttccaaacacccgtgctttttaatgaccatcaagttaacccttaaatccaacaggcttaaaaatgcacacacaaaaaaacaatttactcaatccaaaataggattcatcgaatgcctgaatcgattgaattcaggctaaaattataacaaattctttttttctcaggtcaactcatatcaaatagcaaaccgattgtgcggcgccccctcccattcaaccttttaaaatttatcatcaacttgttcaattttcggggt

SEQ ID NO: 11616 - DNA, 477 bp, Zea mays
  Clone ID: LIB3150-073-P2-K1-F7
ttccgaattccccggcggccgccctttttttttttttttttttttttttttttttttttttttttttttttttttttttttttttttttgttggttaaaaaaaaaagatgtgtggttttttttatttttttttttttttttttttttaaaaaaaaaattttaaaattttttacaaactgggaaaaattttccctttcaaaaataaaaaaaaaaaaatttttttttataaaaaaaaaaaaaaccccccttttaaaaaatttaatttttaaataataatctttcccccttttttttgaaaaaaaaataaaaatattttttttttaaaaaacaaaattaacaaaaaccccctataacatatttatttttttaacaatctataacacaacaaaaaaacctccctctccaaaaaaaaaattttttttttatactcctaaatacttatatattaaaaaatcaaaaaaaatattttatctataa

SEQ ID NO: 11617 - DNA, 463 bp, Zea mays
  Clone ID: LIB3150-073-P2-K1-G3
ccggacttgaattcccggtgcgggcgcccttttttttttttttttttttggtggacgaaacagtccaatggaggcgactgtaccgaaattcgcattacactgggttactgattcatctggtatggaaaacatgatgggatcaaaatctacccccaaaacacgttcaagcatcacagatcccgcagctcttgcggcaaaacccgagagtgtctttggtcccaaccatgtacgtcgggttcctgtggcactccccgatagcagcccatctagggcagagctccttgtcgtcggagcacggcgcgtccgtcctcacgtctggggggttgtcgaacgacctgacgtggatccatttcgtcgccgaccatttctcgccctcgatcaccgggcagctcccgtggagactgcctgtatcggctgtggcgttgacgtggaggttgaaaaacagtaacgcgtctcctttctt

SEQ ID NO: 11618 - DNA, 460 bp, Zea mays
  unsure at all n locations
  Clone ID: LIB3150-073-P2-K1-G7
cggacctanattccccgggcccccgccctttttttttttttttttttttttttttttttttttttttttttttttttttttttttttttttcccccgcttttaaaaaccccccccccgtccctctattttttttttttttttttttttttttttttctttctcttttttttttaaaccaccccccctccccccccccttctccccccacacattttttttttcccccaaccccctcttctttccacccccccccccccaaaaaaaccccccccccccccccaaaaaccccccccttttttctccccatcccaacaccctcttccccccccccccctttcccccctttctttaacccccctccacccccccccctctcttttccctcttttccaaccccccttcctccctttccaaaaccccttcccctcccccaatttttaaaaaacccccccccccccc

SEQ ID NO: 11619 - DNA, 323 bp, Zea mays
  Clone ID: LIB3150-073-P2-K1-G8
aattccccgtcggccgcccttttttttttttttttttttttttttttttttttttttttttttttttttttctatattttaaattctttttttttaaaaaaccttgcctaaaacaaaaaaattttataatctcctctaaccctttcttttaccacccttattccaatatatttctccttaaaattccccacttttcctcaaaattactttttttatttcaacaccctttttcacttcactttcccccctctcacccatcaataattcataacctctcctttcttatccacccttatttttttctctttctcttcccttttttt

SEQ ID NO: 11620 - DNA, 283 bp, Zea mays
  unsure at all n locations
  Clone ID: LIB3150-073-P2-K1-H1
ccgaaatacccggggcggccgcgccttttttttttttttttttttttttttttttaaactgaaaagcttaaaccacttcgaggttcnaccaaacagggcaaaacaaatgatctgggccgcgttgncaatacaatcatggcggcatgtattagggatagataaaccagtgatgacagaacaaagtaccaaaccatactactaaacaaaggctaaggatgtccctcaacaatggcacaaggagccagagcatcacaagttccttaaaaagactttttcccttttg

SEQ ID NO: 11621 - DNA, 464 bp, Zea mays
  unsure at all n locations
  Clone ID: LIB3150-073-P2-K1-H10
ccggaattaccgggacggccgcgcgttgtttttttttttttttgacaaaaatagctgcgaacaaaaaccttgctcattcttctctcatctaatttcatggcggaagcaaccaaggggggcggcangnntaccaacacctaatccaaaggtagaacggacactaacacggtgacagaagcgaacggtaacacgatactatagatagataagataactcggccgaagccaggatgggcccacacatcaatccctccagccgccgccgccgccgccgtagccgccaccaccaccctcgcgccgaccgccgtagccgccaccgcctccgtagccgccgccaccaccctcgcgccgaccgccgtagccgccaccgccgccataaccgccgtcacggcgcccgccaccataaccgccgccgccgcgaccgccgncgtagccaccgncgncaccgtcaccggcacgggact

SEQ ID NO: 11622 - DNA, 424 bp, Zea mays
  unsure at all n locations
  Clone ID: LIB3150-073-P2-K1-H11
gacaaaacaactaatttattatcttcaacatgcggtccaccaaaccnaaacagcgccttnccttaattgggggttgatattcaaaacaacaaagtgcttcatactacatccattttttttaactagacgctccacatcatactaaaggaaccaggtgaggaagtcccgttatgtcaaacatgcgaaggggtaacgactcctgagctcgtttatccaagaacaccctacttctgcctcttgtagatcttgtgcaagaaggatttcagcactttctgaaccgcaatgcttggcttggcttcaatgtctgcaatcaacttcttgtaactctcattctcgtactcctgaaataccgcctctaagtcaagttctttgtaaaagttcttcacttttgccacacaagctggatctttcttgccataatttt

SEQ ID NO: 11623 - DNA, 327 bp, Zea mays
  unsure at all n locations
  Clone ID: LIB3150-073-P2-K1-H12
actattgaactcttctactttttattttccaaacaatttaattcttactaaaattataaaaattctgggttggttcaccttacaaacgcggggggtgatcncatccatccaaatcacaatacaaaaaatctgaagatttcattttatcacccaaaacgtactgattaggtctctcacaatacttaagggaactaaaacagacaataatatcccatttacgtgcaggaacttcatttgaaacaaaacaccactttgatattgtccgatgatttatacttgtataccctttaagcttatgggatctcgaccttaccattatccatctcc

SEQ ID NO: 11624 - DNA, 142 bp, Zea mays
  unsure at all n locations
  Clone ID: LIB3150-073-P2-K1-H4
aaaaaccttcgtaaattatacaacaccccccgcccntcacattatattccaaaactttcatccaaccccatatcatttttcaaataacataaaacctttatcacataacaattnttttcttttactaaacaaattaccaaaa

SEQ ID NO: 11625 - DNA, 358 bp, Zea mays
  Clone ID: LIB3150-073-P2-K1-H5
aaataaaaaatttttttgtttttttttttttttttttttttcccccaaaacccttccaaaatttttcccaaaaaaaacaccccccccattcctattaaaacttttttttttttacccccctaccccccaaaaaaaatttcttttccctttttttccccaaactttttaataaaaaaacccccccctttccccaaaaaatattttttaactaaatcaaaaaaaaacctctttcacccttttattaacccctcttatttaattttaacacttttcccccacaccccccctttacaaaatttttcttttttttttttaaccccccacatattctttttcttttaccccccccataattttt

SEQ ID NO: 11626 - DNA, 231 bp, Zea mays
  Clone ID: LIB3150-074-P1-N1-A10
tatctaacccacttcctgtggtcttcggtagcgtccttttcgccgccgtcggggccgtctttcatcacactgtccctcttgttgtgatatctatgagagagagaaacagctcgatcgatcaagaacaccaacgaggctctagctccagatcgacaatgccgttcgcagcctcttggacgttacagcagctatacagccgtgtggccaccaacgttaggcccttatctgtgt

SEQ ID NO: 11627 - DNA, 359 bp, Zea mays
  Clone ID: LIB3150-074-P1-N1-A11
ttgtgtttcacccaggcaaattctgaggtgtcggctcttcttggacgtatccgagctgctgtgttataccagccaacccttgccactgatcttggaggactgcaagagcgtattacgacaacaaagaagggttctattacgtctgtccaggctatatatgtgcctgctgatgacttgacagatcctgcttctgctactacctttgcccatcttgatgctacaactgtgttgtcacggcagatctctgagcttggtatttatcctgctgtcgatccactggattccacatcaagaatgctttctccccacttgctgggtgaggatcattacaatactgctcgtggtgttcagaaagttct

SEQ ID NO: 11628 - DNA, 345 bp, Zea mays
  Clone ID: LIB3150-074-P1-N1-A12
tccaaaaccccaatcgcacaggagagaccgagagagaggttttccatccatggctcccggcgtcgcttccgtgctggtcccgcaggagcccgtcctcctcaaggacatcctcgcctcaccgtccccctgcgggaacaccgctgtctccgcccgccacctcttcggcaacggagtcgcgccgccacgctcctcggacgacggcatcaaggacgccgctgccgaccgccacggtgaccgcgacctctccatccccaagatcttcaccggagacgtgctggacctgctcgaccatgctgcgaggctggacctgatgctggcgctgacgggggacggcggtgcggcgtc

SEQ ID NO: 11629 - DNA, 308 bp, Zea mays
  Clone ID: LIB3150-074-P1-N1-A2
ttaagcttcgagttctttttccttttggctgacgtgcgcaagaagggtaacgagaggacggcggccatggccaagaggctgctcccgtctctgaaccgggtgctggtccagaagctggtgcagcccaagaagaccgccggcggcatcctcctcccggaaacatccaagcagctgaatgctgctaaagtggtggctgttggccctggtgagcgcgacaaggcaggcaatctgatcccagttgctctgaaggaaggtgacactgttctcctgccagagtatggtggaactgaagttaagcttgcagctga

SEQ ID NO: 11630 - DNA, 166 bp, Zea mays
  Clone ID: LIB3150-074-P1-N1-A3
tcgcgcgcgtggaatctggctgtccctacccgcaggctggtgccagccacctgcctcggcatcgtcaagctgcccgctccgtgccggctcccgcgccctcgcgcagaccgcgccgggtggcgctaactgcctgaggcgccgctggacgtggcatccccggcggggg

SEQ ID NO: 11631 - DNA, 253 bp, Zea mays
  Clone ID: LIB3150-074-P1-N1-A7
ttatacatcggactaaatataggcttgtaagatggttctcattggatcaggagatgagactacatgtgcagagaatatggaaaaggaatatgtgaagagatgataggtgcatctctgatcatggcaaggaggcccgtttcccatttcttgacgagaacgtgataaaaactttgttggaaattacattatgggaaattgctaagcttgatgaacctgttggaaggggtgacaagaagatcttgagagaggttgc

SEQ ID NO: 11632 - DNA, 385 bp, Zea mays
  Clone ID: LIB3150-074-P1-N1-A8
tctttccaaattgccctggtatcattaagcgtggggagtgtaaaattggaatgatgccaggttacatccacaagcctgggcgtattgggattgtatctcgttctggtaccttgacatatgaagcggtgtttcaaacaacagctgtaggcttggggcagtcaacttgtgtaggcattggtggtgacccattcaatggcacaaattttgttgattgccttgaaaaatttgtcgatgaccctcagacagaaggcattgttctcatcggtgaaattggaggtaccgctgaggaggattctgcaacgttcatccaggaaagcaaaacacaaaaagcctgttgttgcattcattgctggacttacggcacccccaagccgtcgcattggtc

SEQ ID NO: 11633 - DNA, 125 bp, Zea mays
  unsure at all n locations
  Clone ID: LIB3150-074-P1-N1-B1
cttaaccttgattcctttaaattcgacccacccttccgaataataaaaaaaaaaaaaannnnaaaaaaaaagaaatatattaaaaaaaaaaagtgaaaaaaaaaaaataacctaaaaataaaaat

SEQ ID NO: 11634 - DNA, 434 bp, Zea mays
  Clone ID: LIB3150-074-P1-N1-B2
ttgtttttgaggtcaaagcaacaaatggtggtgggttcttgtgtggtgaagatggtgataatacactattggagttcttggtgagtgatttcaagaaaactgagggcatagatctgtcgaaagatagattggccctgcaaaggcttcgtgaagctgctgagaaggcaaaggttgaactttcgtcgacttctcagacagaaatcaatctgccattcataacagctgatgcttcaggggcaaaacatttgaacatcacactgacaaggtcaaaatttgaatctcttgtacacgatctgattgagagaactagagatccatgcaagaactgtttgaaggatgccgtaatatctactaaaaaggtggatgaagtacttcttgttggtggaatgactagggttccaaaggtgcaggaaggtagtcttttaaaatttttg

SEQ ID NO: 11635 - DNA, 412 bp, Zea mays
  Clone ID: LIB3150-074-P1-N1-B3
tttttccgctcttggatcactagctagctgtggctcgtcgcaacaagcgaagagcttggtcgttttggttatggcggtgatgaagagcaggacggtcatcgtcgccgccgttctgttggcggttgtcattctgtcctcgctgtgtccatgctacgaagccggcggctgcatcgggaagccgcccaagacgccggcgccgaaaaggccctgcttctcgccctactccgaggaccactgtgaccgccagaactgccgcttcgtctgcatgtcgcacggttacagtgacggtggctggtgtgactagagggaggtgcgcaaaatgtgctgctgctaccattagttagaataataacaatagcagcgtgtagtgttgtgtgctggtgcatgtttatggatcatccatctctgtctg

SEQ ID NO: 11636 - DNA, 147 bp, Zea mays
  Clone ID: LIB3150-074-P1-N1-B4
tgctacctttctatgccttgctacacatcgggggttgcattcggacagagagcgcttcacacctcggtatatggctgatcacagacgccccatgttgcagttgaggcaccaaccctagatgtcggagagccaacggaccatgattac

SEQ ID NO: 11637 - DNA, 361 bp, Zea mays
  Clone ID: LIB3150-074-P1-N1-B5
gtactctgcgctgagcacaatgttcaccttgtcactgttcctgccgcgaaggggcttggcaagtgtttccgggctttgcaagattgactctgagggcaaggcaaggaaggttgtaggctgctcctgtgtcgtcgtcaaggactactgtgaagaatctgagggccttaacatagtgcaagagtatgtcaagtctcactagatgtgtgacatgtttcaatgatactcttgatttggacctgggcttaaaataatgcttttgcatctggggcttgcctaggagattagaacaatttactagaaaagccgaataggatatgtatgaacaatttggacatttgaattttttatgttatgggcctgt

SEQ ID NO: 11638 - DNA, 187 bp, Zea mays
  unsure at all n locations
  Clone ID: LIB3150-074-P1-N1-B7
tcttaagagagttgtgtttcttccccggaaatgcgtccgagaataaattttggttatctgattgtctaaaacctataacgggtgtatcgtagtggttgttatcgttaaacttttaacggtcattctatttcaaaagttttgcattttgcatanntataaattattattaaaaaaaaaataatatttt

SEQ ID NO: 11639 - DNA, 117 bp, Zea mays
  Clone ID: LIB3150-074-P1-N1-C1
gtcactcggatcggtgtgcgtggctccgcagtccctttcttcgccagtccggcggctcaactccagccgccgtgtgccccttctctccccacccgttgcgggccctctcgcgcgccg

SEQ ID NO: 11640 - DNA, 383 bp, Zea mays
  Clone ID: LIB3150-074-P1-N1-C2
ctttaaccttggggagtccggacctcccgaagccgccgaacagatggcacccaaggcggagaagaagccggtggccaagaagcccgcggaggaggagcccgcgacagagaaggtggagaaggctccggcggtgaagaagcccaaggccgagaagcgcctcccggcgggcaagtccaaggagggcggcgagggcaagaaggggaaaaagaaggcgaagaagtccgtggagacctacaagatctacatcttcaaggtgctgaagcaggtgcaccccgacatcggcatctcgtccaaggccatgtccatcatgaactccttcatcaacgacatcttcgagaagctcgcggccgagtccgtcaagctggcgcgctacaacaagaagc

SEQ ID NO: 11641 - DNA, 440 bp, Zea mays
  Clone ID: LIB3150-074-P1-N1-C3
cgtccgaaaaaccctagcagccgcccggggctccctgtgtgcagatctcccttcgcagccgccgaggaaccccttcacagcgcggaagatggctgaacaggaggccccagtcgtggttgaggcaccaaccccagttcttggggagcctatggacttgatgactgctctgcagctcgtgatgaagaagtcaagtgctcatgacggacttgtgaagggtctccgtgaggctgccaaggccatcgagaagcacgccgctcagctttgcgtgcttgctgaggactgtgaccagccagattacgtcaagctggtgaaggcactctgcgctgagcacaatgttcacctggtcactgttcctgccgcgaagactcttggcgagtgggccgggctttgcaagattgactctgagggcaaggcaaggaaggttgtaggctgctcctgtg

SEQ ID NO: 11642 - DNA, 401 bp, Zea mays
  Clone ID: LIB3150-074-P1-N1-C4
tttggcagaactcatcagacctagcctgtatggagcatatcagcatatcgaattggtctctccccccactcctggtgctgaagtagcgaccttcgatattgttgggccagtttgtgagtctgcagatttccttggaaaagatagggaacttccaacacctgatgagggagctggactggttgttcatgatgcaggtgcctactgcatgagcatggcttccacctacaacctgaagttgaggccgccagagtactgggttgaagaggatggttcgattgttaagatcaggcatgaagagaagctcgatgactacatgaagttctttgatggtcttcctgcttagatgtttatttgtgactgctaggggcgaatgtttcttggagataattgaatttttcttt

SEQ ID NO: 11643 - DNA, 267 bp, Zea mays
  Clone ID: LIB3150-074-P1-N1-C5
ttcggttggcggcggtgcagatgcgcgcgcggggtctcggggtccgcgggggctccgcgctgcgggtcacgtgcgagaaggtggtggggatcgacctgggcaccaccaactccgcggtcgccgccatggagggcggcaagccgaccgtcgtcaccaacgccgagggtgcgcgcacgactccctccgtagtggcgtacaccaagacaggggagcgcctggtggggcagatcgctaagcgccaggccggcgtgaaccccgagaacacct

SEQ ID NO: 11644 - DNA, 413 bp, Zea mays
  unsure at all n locations
  Clone ID: LIB3150-074-P1-N1-D1
cttaaaagcggaccaacccgtccttgtttgcgctgaagcctgatctccaccgggggggcagcaggggcgcaggacctcgatcacgaggaggcaggggagcagcatccacaaccacaagccatggcggtgagggccaacatccccactaacaactccgccctcatcgcaatcatcgccgacgaggacaccgtcactggcttcttgatggccggcgttggcaatgttgatctgcgcaagaaaaccaactacctcctcgtcgacaacaagacgacagttaaacaaatcgaggatgcgttcaaagaatntactacgagggaggatattgctattgtgctcatcagtcagtatattgccaacatgataaggtttctggtggatagctacaacaagcccgtccctgctattctggagat

SEQ ID NO: 11645 - DNA, 388 bp, Zea mays
  Clone ID: LIB3150-074-P1-N1-D10
atcgggagctacacattcctttggggggctgtagttattgctccgggggttgctcctgcagtgacagtgcaatcaggggctccaacatattctggggttccactacccagtaacatggcctatcctattcccccagcaaacggtggggcattttacagtggttatggggacatttatccccaagcaactccgttgcagcagctggcattcacactcaagcatgcctcatcgtcggcaactcaagctgttccagtgacgtccacaccaacaagcatggctacaaaggggaactcaatcttggatgcggagatggataaacgatcccgaaggaaattccaggaactaccggttttgaagggcccaaccacagaaagtcagaactcacaac

SEQ ID NO: 11646 - DNA, 263 bp, Zea mays
  Clone ID: LIB3150-074-P1-N1-D2
gtccctccttgagtcgcgtggcgttgcaatcggacgatccaaagctgtgtgtgcgcgcacgttggagccatggtgaagaactacccgaccagtggcgccgagttcagcgtggctgtatacagggccaggctcaagctccgagccctcatatccgagaagagctgtgcacctctgatgctccgcctcgcgtgggactccgcggggacgttcgacgtgggccacaggtaccggcgggcaccctggacgacgacacatgagcatga

SEQ ID NO: 11647 - DNA, 87 bp, Zea mays
  Clone ID: LIB3150-074-P1-N1-D3
gacttgtgtctactttccagcagagtgacggtcgacaactaattgacgctgacaggctggacttgagagagctgctacacgagctac

SEQ ID NO: 11648 - DNA, 421 bp, Zea mays
  Clone ID: LIB3150-074-P1-N1-D4
tatcaatactagtttttggtcacttagtacagggatatggcacaagaggataccaactctgcggtggataagatgggaacatctcaagcaccaaggcagcacttgtcacaaaatagggcctcactgaccagcaaggtgacagcaaaaattaggaagattctgttgaaagctaaggcacccaggaagaagaaaactactatgtatccggtcctagcagctgcactcaaatttcataaagatgatgacgtttatcctgcagctgctggagtgaagcagcagcagcagcacaacaaggagatgtagagatctattatgaatgcacctcatgccaacatcgatctaccttagttatgtattaatttcctagtacctattgtcatctcaagctatctatctttacattatatcgtgtcatcatgtc

SEQ ID NO: 11649 - DNA, 209 bp, Zea mays
  unsure at all n locations
  Clone ID: LIB3150-074-P1-N1-D5
tgaccattagctttatctactccagagcgcgagaagaacccgatcgacaccatgagggtgttgctcgttgccctcgctctcctggctctcgctgcgagcgccacctccacgcatacaagcggcggctgcggctgccagccaccgccgccggttcatctaccgccgtcggtgcatctgccacctccggttcacctgccacctncggtgca

SEQ ID NO: 11650 - DNA, 206 bp, Zea mays
  Clone ID: LIB3150-074-P1-N1-D6
atattttcttcacacagaacctatcaagcgacgagggtcattctgcgctcctgagggtgttgaccggtaaaataattcttctcactttgtacaggccattcctggagcatcccacaagctgcagtttggaatcgacctaactttcaaggaagcatgtctcgccaactcgataatcaacctcttgtgtaatgatacactttcatctt

SEQ ID NO: 11651 - DNA, 84 bp, Zea mays
  Clone ID: LIB3150-074-P1-N1-D9
tcctgcttatcaaacaagtatctacagctctagaaagattttttagagtgatgcgggcgcttataaaatatggctaatatcgcc

SEQ ID NO: 11652 - DNA, 425 bp, Zea mays
  Clone ID: LIB3150-074-P1-N1-E1
gcttcaagctccaccagagaagacagcccgccgaggcgcctacggccgcagccgcgggcggactcgtgagtcgcgagtacgccgctgcagttcccaactcagggtgcctgcccgtaacctacccaagagcggtcccgccatgcgcgcggaggtcacccagatcagcgccctaaccgccgtggccgcgcacgtgctctgctctgcgggccttgctgccgcccacgccctcgctggccgcggcgcgctcgtctccgaccccgcgctcgcccttcgccttctcatggtctgtgaagcgcccatagtcatcgcagtgttcagctacctccggcgtgatgctaaaagttgctcgtttttcagggctgttgcaagaggattgatcggcttgcccgtgggagcgttccttaatgcatttggagcaatcattc

SEQ ID NO: 11653 - DNA, 208 bp, Zea mays
  Clone ID: LIB3150-074-P1-N1-E11
ttttctcatgactccgcgttacgagacaatgacgcgcctgtcaataagaaatagtgcaaaacatgttgcatagaaaagagactttcgacttggttttccggtgtgctgctcgaaatatagcaccaatactgaagggctcattcgattaggtacttatcattaaaagtttgacgcacaaagaatataatgccgtgataaaagaacttac

SEQ ID NO: 11654 - DNA, 360 bp, Zea mays
  Clone ID: LIB3150-074-P1-N1-E2
tttctcacactcacaaccagatctcccccaagtgcggcctttataacctcagcttgaagatgcatatctttgtgaaaaccctgaccgtcaagactataaccatcgaggctgagtcgtatgacaccattgacaacgttaaggtcaacatccaggacacggaggtcatccccccagaccagcagcgggtcatcttcctttgcaaacagtttgatgacgggcgcacgcttgctgactacaacatccagaatgagagcaccctccaccttgtgctccgcctcatgggaggcatgcagatctttgtgaaaaccctgaccggcaagactattcaccctcgaggtggagtcctctgacaccatttac

SEQ ID NO: 11655 - DNA, 373 bp, Zea mays
  Clone ID: LIB3150-074-P1-N1-E3
ttttcttctccctccgccgccactcccctgggattcaccgccaccgccaattccataccgtgctccgccacctctgctgagagcgagaagagatggcaggcaagggtgatgggccggcaatcggcatcgatctcggcacgacgtactcttgcgtcggcgtctggcagcacgaccgtgtcgagatcatcgccaacgaccagggtaaccgcaccacaccctcgtacgtcgccttcaccgactccgagcgcctcatcggagatgcggccaataaccaggtcgccatgaaccccatcaacaccgtctttgatgccaagggtctcattggcaggaggtttagtgacttctttgtccagagtgatattaagctgtggcc

SEQ ID NO: 11656 - DNA, 417 bp, Zea mays
  unsure at all n locations
  Clone ID: LIB3150-074-P1-N1-E6
tttctaccacctcgcctgcgatctccgtagcctgcgtcgcgtcgagcatcgatcatgtcggcctactgcggaaagtacaaggatgagctcatcaagaatgctgcctacattggcacccctggcaagggtatccttgctgctgatgagtccactggcaccattggcaagcgcctttccagcatcaatgtcgagaacgttgaggagaaccgccgtgccctccgtgagctcctattctgctgccctggtgctctccagtacatcagcggtgtgatcctcttcgaggagaccctgtaccagaagaccaaggatggcaagccttttgttgatgtcctcaaggagggaggcgtnctccctggcatcaaggttgacaagggcaccattgaggttgttggcactgataaggagaccaccacccaa

SEQ ID NO: 11657 - DNA, 389 bp, Zea mays
  Clone ID: LIB3150-074-P1-N1-E7
tcttttttcctccgtcccgcagcatctcaacccggtggccaagatcaagatcgggatcaatgggttcggcaggatcggaaggctggtggccagggtggccctgcagagtgacgatgtctagctcgtcgccgtgaacgaccccttcatcagcaccgactacatgacctacatgttcaagtacgacactgtgcacggacagtggaagcaccatgaagtcaaggtgaaggactccaaaacccttctcttttgtgagaaggaggttgctgtgtttggctgcatgaaccctgaggagatcccgtggggttcggttggtgctgaatatgttgttgagtctactggtgttttcactgaccatgagaaggctggagctcacttgaagggtggtgcca

SEQ ID NO: 11658 - DNA, 377 bp, Zea mays
  Clone ID: LIB3150-074-P1-N1-E8
tctttgacaactttgccttgtactatgtgggggggccctgtgctgtgctagcgctacttgttcatccttcaacatcgcacaacattgtgaacagaatctgctgggccttctgtgtttatttggaagcagtttcagtgttgccccagttgcgcttgatgcaaaataccaagattgtggagccgttcacagctcattatgtgtttgcgctgggtgttgcaaggtttcttagctgtgcacactgggtccttcaggttttggacactcgatgcggatagatgactgcgctgcgctactgtctgtggcccttaatggttctcccttccgaaatcgttcagacattaatccttgcagatttttgctactactatttaaagagt

SEQ ID NO: 11659 - DNA, 423 bp, Zea mays
  Clone ID: LIB3150-074-P1-N1-F1
attagctttatctactccagagcgcagaagaacccgatcgacaccatgagggtgttgctcgttgccctcgctctcctggctctcgctgcgagcgccacctccacgcatacaagcggcggctgcggctgccagccaccgccgccggttcatctaccgccgccggtgcatctgccacctccggttcacctgccacctccggtgcatctcccaccgccggtccacctgccgtcgccggtccacctgccaccgccggtccatgtgccgccgccggttcatctgccgccgccaccatgccactaccctactcaaccgccccggcctcagcctcatccccagccacacccatgcccgtgccaacagccgcattcaagcccgtgccagctgcagggaacctgcggcgttggcagcaccccgatccctggc

SEQ ID NO: 11660 - DNA, 260 bp, Zea mays
  Clone ID: LIB3150-074-P1-N1-F11
tttgtcttccatacacccgctctgattctataagtcaatttttataatgttccaagcgtttcaccttacaaagaccgtcccaagcaactatgattctttaagcgatttcatatataaaattgaatgggctgttttccttgatgttctcttcaactagttgtataggtgtgacaccaattattttatttattatttttgaaataaaacatgtcaactaatggtaggttggaaactttaatacctgtttgataaatttcata

SEQ ID NO: 11661 - DNA, 376 bp, Zea mays
  Clone ID: LIB3150-074-P1-N1-F2
tattccttcaagcgcaagctgcctcctcctcgtcgtccggtcgtgagaagggatggcgggccgtggcaaggctatcggcgctggcgccgcgaagaaggcaacgtcgaggagctccaaggccggactccagttccccgtcggcaggattgccaggttcctcaaggcgggcaagtacgcggagcgcgtcggcgccggcgcccccgtgtacctcgccgccgtcctcgagtacctcgcggctgaggttctcgaacttgccgggaacgccgcgagggacaacaagaagacccgcattgtgccgcgccacatccagcttgctgtgcgcaacgacgaggagctgaccaaactgttgggtggtgccaccatcgcgagcggaggt

SEQ ID NO: 11662 - DNA, 380 bp, Zea mays
  Clone ID: LIB3150-074-P1-N1-F3
ttcttctgccttctgcgcctccatttcgggcggtgtcccttgcaagttcagtctcgcctccaaccatgggtaaagagaagtcccacatcaacattgtggttattggccatgtcgactctggcaagtcgaccaccacaggacaccttatctacaagcttggaggcattgacaagcgtgtgatcgagaggtttgagaaggaggctgctgaaatgaacaagcggtccttcaagtacgcctgggtgctcgacaagctcaaggctgagcgtgagagaggtatcaccattgatattgctctgtggaagtttgagaccaccaagtactactgcacggtcattgatgcccctggacaccgtgacttcatcaagaacatgatcactggt

SEQ ID NO: 11663 - DNA, 365 bp, Zea mays
  Clone ID: LIB3150-074-P1-N1-F4
ccctcgcgtccgtcttcctccacaagcagcgagggccaatctagaagcgcccctgtccctctctctctctctcttcgccgtccgaagctccgcaccccaatctaatcgacacctcgccgagatgggccgcaagttcttcgtcggtggcaactggaaatgcaatggaaccacagatcaggtcgagaagattgtcaaaaccctgaatgaaggacaggttcccccttcagatgttgtggaggtcgttgtcagccctccttatgtcttccttcctgtggtcaagagccagctgcgccaagagttccatgttgcggctcagaactgctgggttaagaagggtggtgctttcaccggtgaagtcagtgctg

SEQ ID NO: 11664 - DNA, 401 bp, Zea mays
  Clone ID: LIB3150-074-P1-N1-F6
tttctttcagagtctgcacctcctattccgaaaggaggctgctccttctaaggagccaaaggcaaaggatgtcaagaaggaggctccaaaggaggcccccaagccaaaggtggttgaggcaccagcagaagaggaagcaccaaagccaaagccaaagaatcctcttgacttgctgccaccaagcaagatggtccttgatgactggaagaggctatactcaaacacaaagaccaacttccgagaggttgccatcaaaggtttctgggacatgtacgacccagagggctactctttgtggttctgtgactacaagtacaatgatgagaacaccggcttctttgtgaccctgaacaaggttggtggattcctgcaacggatggacctgttcctcaagtacgcct

SEQ ID NO: 11665 - DNA, 259 bp, Zea mays
  Clone ID: LIB3150-074-P1-N1-F7
aggcaaaagcattgcgaccacagagagggcgcgcttcaaggccttgggttttttgagataacaaggaggagaggaggagatggcggtcacgatcacgtgggtgaaggcgaggcagatcttcgacagtcgcggcaaccccaccgtccaggtggacgtgggccttatcgaccgcagctacgcgaggggggccgtacccagcggcgcattcactggaatatatgaagcctttgagttgaggtgaggaggatctgattatctt

SEQ ID NO: 11666 - DNA, 420 bp, Zea mays
  Clone ID: LIB3150-074-P1-N1-F8
ttgctctctctcttcattcgttcccggcctgaccccgagccagtcgtctcgctagggtttcgccgccgccgccatgcctcgccgcagctcaggaaggtctgccccacgcccagctccccgtgctgcttcactgaggaacccgccacagccagcacgccaggctcctcctccagctcctgttcgagatggtggtggctccatgtttggaggaattgggtccaccattgctcaaggtatggcgtttggcacgggtagtgccatggcacacagggcttgtgactctgtattatgtccccggaccatccaacatgagactcttgccacagaagctcctgctgatgtccctgctggttcagcgataaatgctgatgcttgcaacttccaatctaggcttttcaagattgtctcaacaactatggc

SEQ ID NO: 11667 - DNA, 384 bp, Zea mays
  Clone ID: LIB3150-074-P1-N1-G1
ccctcacagaaaaccctagccgccgccaccgaagcggcctcccaggtaagcaggatcgtccagcccgccgccgccatgaagcgcaatccccgcgtcacgagctcccgccggaagtgccgcaaggcgcactttacggccccgtcctccgtccgccgcgttctcatgtccgcggggctgtcgacggagctccgccacaagtacaacgtgcgctccatcccgatccgcaaggacgacgaggtgcatgtcgtgcgcggcacctacaagggccgtgaggggaaggtggtgcaggtgtaccgccgccgctgggtcatacacgttgagcggatcacccgcgagaaggtgaacggctccaccgtgaacgtgggcatccacccctacaaggtg

SEQ ID NO: 11668 - DNA, 356 bp, Zea mays
  Clone ID: LIB3150-074-P1-N1-G2
ttctttcggtggccgctgcaccgtaaccaaggggcgtcatcttgagcccatgggactggccagaaattatccaagggggaacaaggagctccgaggatccttctttacggctcacggtccgcaggataccatgcgttggttcacagatcacggtgtaaagcttaagacggaggacgatggcagagtcttccctgtcactgacaattcactttaagttgtagactgtctactgaacgaagcaagaaggcttggggtttctctgcatgccggcaaaactggggctagtgcatctgttgctcaagacgggaagtttggtctcaaggtggagatacgtactgccgatcttgttgagtata

SEQ ID NO: 11669 - DNA, 357 bp, Zea mays
  unsure at all n locations
  Clone ID: LIB3150-074-P1-N1-G4
tttctagtgctgtttaggtctggtctggatgtggatcgctattctagatacgggtacaacttacacgcaaaaaagacattaaccatgcgagctttgttttattctgatgtgttatcctaagttgtgaatgccgaataaatcaacatctcgtcatctctaataatgttgtgatatgttatgcctaacggctgtattccaatcaatattgatttattttgcnnataaaaaaaatatataaatttaaaagttttaataacatgtacaaataaaaaaaagttggtggggggaatattaattaatatttatttgttaaaaaaaattataatttaaggggggggcgccctggtaattttggac

SEQ ID NO: 11670 - DNA, 257 bp, Zea mays
  Clone ID: LIB3150-074-P1-N1-G8
ttcttcttttcagccgcctccatcactcttaccgatcatttttagacaggatggcgggcttccacttccttctctctctgacacgctaccttttctctcgccccttccgcatataatggctacatccttctcaccacctaccttcgcacctacaagatcatttattacttctatgtcaaagtgaactattccgttcacaaagttatgccctacatgatttaccacttccttacccgttctcttctgtaacttaacca

SEQ ID NO: 11671 - DNA, 391 bp, Zea mays
  Clone ID: LIB3150-074-P1-N1-H1
tcctcaaaagccgacccacccgactgttaattcaaatagagggagctcgtccatggcgtgctgttttcaatagtcgatggggggagtacccaaccgttgataatctatctagccagcctttccatgccttgccagaggaccctcgcctccgctgcggctgacggtcgtctgctgctcgtggaggcagcggtcctgctgtgcctgtccgttcctccggggcgcgcggcacccccggtcgcggaggttccggatttcctttttttcactagcaaacttcctttcaaacacttctcctgttacgtaacaatttgttctacatgatcaaccaaagaaacacctgttccactaccctgccgcctctttataagaaccccaaactttgatccctgtg

SEQ ID NO: 11672 - DNA, 404 bp, Zea mays
  Clone ID: LIB3150-074-P1-N1-H2
ttttcgaacgacgcagcccaacccgttcccaccagaccagcggcaccacccatggcttcggcggcggcgagatccggtctccggtcgctggcggtgcgcgccgccccgttgaggcgccgcatgtcctcctccgtccacgacgacgcctatgagacggccaagtgggagaagatcacctacgccgggatcgtgacctgcaccctcctggcggcgtacaacctgtccaagggccacccccacttcgatgagccgccggcgtacccctatcttcacatccgcaacaaggagttcccatggggtcctgatggcttgtttgagacgaaggaccaccactgagccctgattagcacaccttcaggagctggtgcacgcttaaaagagttatatggttggttcagtgattt

SEQ ID NO: 11673 - DNA, 398 bp, Zea mays
  Clone ID: LIB3150-074-P1-N1-H3
ccacccgtccgtttcttatggtggttcgcctatgttcccggggggggctgttcgtatgagcaaggagatcacttcccttgcaccaagcagcatgaagatcaaggtcgttgcaccgcctgagaggaagtacagtgtctggataggagggtcgatcctagcctcgctcagcactttccaacagatgtggatatcgaaggaggagtacgacgagtctggcccggcaattgttcaccggaagtgcttctagggtttcacaagttcctcgtcgttacctagtctcaaattatgtcccctccatttctcgagatatgtgtggcagatttgcatgatacgtttgtttgtttccatcggacctgaagtctttttgggataggctcccccctttgtatgttgtggct

SEQ ID NO: 11674 - DNA, 200 bp, Zea mays
  Clone ID: LIB3150-074-P1-N1-H6
caatcctctgctctcccgaccggagtgaggcggtgcatctatcgaccacggatcgttgacagactcgacgtcttctactttctccatcatggacgaggaccacaccctcgccaactccgccagattcgtcctcaaccagtacccaaaggtagcattttttggatataccattcctcattcttctgagaagaaagtgaaca

SEQ ID NO: 11675 - DNA, 109 bp, Zea mays
  Clone ID: LIB3150-074-P1-N1-H7
taactacaccaccgccaccattatcatggagcttattttaaaaacaatccaggccctcccaactacctcaaccttcactcatacaaacttaatctactactaccaacca

SEQ ID NO: 11676 - DNA, 376 bp, Zea mays
  Clone ID: LIB3150-074-P2-K1-A1
ccgcccttttttttttttttttttttttttttttttttttttttttttttttttttttccttttttttttcgctgcagcacatcgcacaggacaggacaccactatcacattccgaagggtccagaattcgaccacactttcacaacccaccacaccaaattacgaggggcacagctccagacgacgagcagagcaaaccgtcactcggcgctttcacgatgcatttcactaccccttgacaggcacaaccttgacctggtccagcacggggccgtaaagcgagactccttcggtgaccttgttgtggaattaggagctgtaaaaggtgaggccgtttctgtccctcttcttctattatctatactcctatttttt

SEQ ID NO: 11677 - DNA, 284 bp, Zea mays
  Clone ID: LIB3150-074-P2-K1-A11
aatcgatcaatcctttagttgttttcataatggcgccatttttcctcctcaatgcggggtttaagaacatgtcgggggggccaaaaccactttaccaccttttttgaatcactcctttcaccacatgcccacttcttgtatccttgccggctagtcccttataatcttattccacaattctttataatattttttattattttcaactccatctaattcatctcttacatacctcattatatatctactttttttttttatttattatacatctacttcatttt

SEQ ID NO: 11678 - DNA, 399 bp, Zea mays
  unsure at all n locations
  Clone ID: LIB3150-074-P2-K1-A2
accgaactgccgagcggctcccccttttttttttttttttttttttttttttttttttaggacaaaactcataaccatgtatgccttacattcgatggtccataaaaaaaattgagtgttaatagcatcacggtttcaacgaaagtaataatacttcatgaccaggcaaacattgccatcatagattacttgttcacgcgacaactgcaaggatgtcaacaagacgagatattttaagcttccacgaggtaaccaacaagcaagcacagcaccagccagatagatcatttcttcttggcagcagccttcgtcaccagccagatagatcatttctttttggcagcagccttcgtcaccttggctccagntgggtccttcttctccacactcttgatgact

SEQ ID NO: 11679 - DNA, 219 bp, Zea mays
  Clone ID: LIB3150-074-P2-K1-A7
ctaaaaaaaggcggcaattcatgaaatagagggcgcgaacaaattttaaacccccaaaccaaaatgaatttctcatgccccaacatataccttttcaaataaaaggataccactttgttcctcttctcaataattcttttacttcaccttaaaactaaatcctatttcttaggcttatatacctgtgcctccttttccttttatatctatcaacttccc

SEQ ID NO: 11680 - DNA, 279 bp, Zea mays
  Clone ID: LIB3150-074-P2-K1-A9
cttttatcttcttttttttttatttttttttttttccatatgaaccgaaacaacatatatccatggtcgggaaacaggataggaacggtggtctaatcaagcatatactctcaaaaaaaaaaggataagaatcgaacatgattgctttagccgatcgacgtcagattcactgctaatatgtccaaagacacctgtcaggacacgtcactatatccaggtcctcaactatgcagcactcaaactcaatcaaatcagccggaagcagttagacccttttca

SEQ ID NO: 11681 - DNA, 243 bp, Zea mays
  unsure at all n locations
  Clone ID: LIB3150-074-P2-K1-B3
atataccgtcttgatttaataaaattccgcccgcgccccaactttttacatcatatttactttaaaaactctcacaaccccccccctatttaaattaaacccctttcnaaatttataaaaaacataccccccaattattacaaattaaacattttttttataaaaaaaaattctntcccaccccccctcttttttttttccctataaaaaaaaaacccccaatccccccccctcctttttttt

SEQ ID NO: 11682 - DNA, 245 bp, Zea mays
  Clone ID: LIB3150-074-P2-K1-B7
aaacgccggggaacttttccaatgccgtaggaaacaaaaatcttcttcttttcacccatgttaacttttataatttttgctcttcccatatcctttgaacccctcactactgttattaccctcctccccttttattaatctcctccttatcccaactaatttttacccctcttcttccacccctttcttttttttttttctccatcaaaatatacaatatcgcctccactttttttttttttctt

SEQ ID NO: 11683 - DNA, 384 bp, Zea mays
  Clone ID: LIB3150-074-P2-K1-C11
cggggcggtcggcccttttttttttttttttttttttttttttttttgggaaaaaagttcattttttttccatacacatttaggtcgaaacaacaaaactgcatggatgttcatccacttcctaataatgtaaaattgggagagcacaaaaagttttttagaacacaatgagcttggtcgggaacctaattcatccttttgatgagctcgttgatgtaattctcacggttaccggcatcaccaccctccacatagtggttcctctttttcttcagacctcccagcggggccttcagcttaaaaggccaaaggaagttgttcgcctccttgaagtgtgggccaacagtcatgatctcgtgaacaagatcctcaatacagatgatg

SEQ ID NO: 11684 - DNA, 283 bp, Zea mays
  unsure at all n locations
  Clone ID: LIB3150-074-P2-K1-C12
aagnaaaaacccagcccgctttttaccaaaggggggggggtgttcaactaaatccatccattttctaattttttttaacatcagcagttttaaacaaaaagggaggaagtctgggggtttgggaaccaaaacaaaccgggaaaatacttcagcttttcattacaaaaggcattacggaaaaccctataataaataagttgactcccagcggattcataacaacaaaaccggttcatttattttccccaccattaccacatcatttttttacattacaaacaaa

SEQ ID NO: 11685 - DNA, 340 bp, Zea mays
  unsure at all n locations
  Clone ID: LIB3150-074-P2-K1-C2
ggaagcagcaagcaatatactaatactgataaacatgttcctcgtcatgcattcataagacaaaagtagtgcttcctttggcagaaatcatgctggaataataaataacctacttgatattgaagcattcatagcttgttcttgctcttgctaactatctatttctaatacctctgctgcttcatgttgggtataattgcacatcgtgtaactgtagccctgtataagcacttcggatgatggagtgtgaggaagcgccnaggatggggaatgggacaagatcacgggggctggggtggcatctctgctgttaacacgaggcaacaagtgggggtgagga

SEQ ID NO: 11686 - DNA, 412 bp, Zea mays
  unsure at all n locations
  Clone ID: LIB3150-074-P2-K1-C6
accggtcctngaaaaccggtgcggccgcccttttttttttttttttttttttttttttttttttttttttttttttttttttttttttttttttggggggggaacaaatagaactgcgggctggtttcaactgcaatcagtgttcaaaacacgaaaatccgtccagattcacacaggggaagcaggggggttcgacggcccaatggaaataagggtggcagcaaagggactaaaacgttcagcagttacagttagtccggttttttcacgggaagaaggaaacaagacctgcattgcattgccttactaatatgcaacgcacggtttcctccttccgagcggggttactataccattaccgaaggctttactcacttggccattatgaccttgacaaactccttgtagttga

SEQ ID NO: 11687 - DNA, 297 bp, Zea mays
  unsure at all n locations
  Clone ID: LIB3150-074-P2-K1-C8
cgcccttttttttttttttttttttttttttttttttttttttttttttaannttttatttttaggggggggggttcaaacacgctcaaagagtgggttaactttccatcatttctttgtacatataacctttcaattccattaaagatgatttattttgaatgatcatataaattctattattaaacatccattctattcaaaaacttatttgagggctctttttttgtcctattatcaagtttcttcaaaaccaaatgaaattaacctattcctccctcaaaaatcttgtttttt

SEQ ID NO: 11688 - DNA, 327 bp, Zea mays
  unsure at all n locations
  Clone ID: LIB3150-074-P2-K1-D10
atgaaacaacatcattgcatcaaggggggcaatatacatgtatgcacggtggcaaactacaancaaatactaatattaaacccacaccatatattacccgttccaactcataattcctcatctattcttaacacctgttcttcaaccactcctccttataacctcttcattacttatctcttctgataatcacctactcctctttttaaaatatttttcctttactatatatttttttatatttttatttcatacattatttttttcctatcttatctatatatatactttcctccctattatcactataataatatctatatacaa

SEQ ID NO: 11689 - DNA, 128 bp, Zea mays
  Clone ID: LIB3150-074-P2-K1-D3
cctttttttttttttttaatataatattttattattttttttttttttaatattattatttataaaaaaggaggggattaaaaaaaaaagggggggaaaaaaaaaaatatataaaaaaatatatttat

SEQ ID NO: 11690 - DNA, 409 bp, Zea mays
  Clone ID: LIB3150-074-P2-K1-D4
ggccgccctttttttttttttttttttttgccgtagcaacgcacggtcaccctactagtatgtcattatgttcttagactgtctccagcatgtagggtgaaataggggacatgaaactatagatgatactgtttgcaaagtgatgtttgaaataggggatgagaaaaggaatgtgatataaatctgctggaggtagcctttgagctcactactcgcagttgagctttgagctgagctgttgaacatgtctggtgagtaggctaatctgtgctagctgagtggtccccagagaaggcgcttccaccgcccgagaaagaaaatgccgaggacccagactgcgaaacggcggcaccacccacacccaggccacggctcctctgaatctgccgaagcctgaagatgtctcgtg

SEQ ID NO: 11691 - DNA, 208 bp, Zea mays
  Clone ID: LIB3150-074-P2-K1-E1
ggccttaaaatcggagggttactcgtttcagtgggtggcaccatcaaagtctaggaaaaccaacaaagggtcccacaattcaagcctaagggctcaacattgacaaatttattaccagaaagacaattccacaatctgtttgttcacatttactccagatgcaaaaaaccacattcaccagaatgtttcactccaggatagggtcttt

SEQ ID NO: 11692 - DNA, 378 bp, Zea mays
  Clone ID: LIB3150-074-P2-K1-E11
cggattcccgggccggcgcccctttttttttttttttttttttttttttttttttttttttttttttttaattttttttttttttttttggtggaaaaaccccaactggggccgggcttatttaaactcggccttttatttttagcaaagtgaacaaaaccaatgggggggcatttgtcatttaataatcttaaaaatcttgtaaacagatttaaaggtcccctaaaaaccagttgtcccttcaagatccaagaacaatttaacctcttgaaaagactaacccttttataataactgtccacaaaaatgttttccttttcttcaaaagagtggttcacttttttttaaaaattacttttttgaggaaattttgttttt

SEQ ID NO: 11693 - DNA, 290 bp, Zea mays
  Clone ID: LIB3150-074-P2-K1-E2
gccgcggggtccggcgacgccaggtgcagcggccccacggttaagaccgggcggccggacagctcgcggccggatcttggccagcgccgggccggcgatgccctcgaacgtgttcagcaccacgcccgacgacgaggcctgcacggcctcggcgttgcgggtgatgaaacggagcaccgtctcgtcgtcgctgccgtccacgcggatcaggtcccgcacgcgcaggggctccaggcccggcaccacctcgtccagccgctcttttttgatggggaggtagccgtcggcgc

SEQ ID NO: 11694 - DNA, 359 bp, Zea mays
  unsure at all n locations
  Clone ID: LIB3150-074-P2-K1-E3
ttagaacctccgggattgcggacccgatgccggccttgcctttccaaccggccttcttggccagcaccgtttgatgaatgttgggcaacacacgtccggcggcnatggtgacagctccgagcagcttgctgagttcctcgtcgttgcgcacggcgagctggatgtgacgcggcacgatgcggttcttcttgttgtcgcgcgccgcgttgcccgccagttccaacacctctgccgcgagatactcgaggacggcggagaggtagacgggcgcaccaccgccgacgcgctcggcgtacttgccggccttgaggtagcgcgcgatgcggccgacggggaactgcagcccagccttggtcgac

SEQ ID NO: 11695 - DNA, 135 bp, Zea mays
  Clone ID: LIB3150-074-P2-K1-E8
ccctttttttttttttttttttttttttttttttttttttttttttttttttttattttttttttttggttgttaaataaaaaaaaagggttggttaaaaaaaaaaaaattataataaaaaatatataatttatt

SEQ ID NO: 11696 - DNA, 143 bp, Zea mays
  unsure at all n locations
  Clone ID: LIB3150-074-P2-K1-F11
gaacaaaacatatcatacaaatccacgttttgtgttcgaagncccaaattaccgaatgccattcttttaacccacagcggcaacaatataaacccttattccacgactcatctatcaaaacacggttgcaagcctatccccaa

SEQ ID NO: 11697 - DNA, 230 bp, Zea mays
  unsure at all n locations
  Clone ID: LIB3150-074-P2-K1-F3
ctttgccgccggtggggtccttcttctccacatttttgatgactccaacagcaaccgtctgcctgaggtcncggacggcaaacggacgcagggaagaatacccggagaatgtctccaccaccataggctgggtgggaatcatcttcaccataccagcatcaccgttcttaaggaacttgggctccttctcgagctccttgccagatcgcctgtcgatcttggtaatgagc

SEQ ID NO: 11698 - DNA, 128 bp, Zea mays
  unsure at all n locations
  Clone ID: LIB3150-074-P2-K1-F8
ccgcnccaccaccaactacttccgcacgtcatttttaaattccgggcagaacattacaaaacaatntatntatctataaatcaatatccatcatccacacattcctaatataattcacaccaccattc

SEQ ID NO: 11699 - DNA, 253 bp, Zea mays
  Clone ID: LIB3150-074-P2-K1-F9
taccggtctctgattcccggtgcgccgccctttttttttttttttttttttttttttttttttttttttttttttttttttttttttttttttttttggggaacccatgggtcggggggggaaaatccaatcttacttacccttccattcaacataatatcttttttatagtgccacctaaattaaatccactggccctctttttaaaacttctatactggaaaaaccctttctttacccaactaaatctcct

SEQ ID NO: 11700 - DNA, 52 bp, Zea mays
  Clone ID: LIB3150-074-P2-K1-G12
cctttttttttttttttttttttatctattcatatactttttttttttttat

SEQ ID NO: 11701 - DNA, 270 bp, Zea mays
  Clone ID: LIB3150-074-P2-K1-G2
cgccgccgccgcggtgtccggcgacgccaggtgcagcggccccacggttaataccgggcggccggacagctcgcgccggatcttgtccagcgccgcgccggggattccctcgaacgtgttcagcaccacgcccgacgacgaggcctgcacggtctctgcgttccctttgatgaaacggagcaccgaatagctgtcgcttacgaccacacctattatgttctatactcgctggtgctccagatccggtaccacattattcagacgcttttt

SEQ ID NO: 11702 - DNA, 497 bp, Zea mays
  Clone ID: LIB3150-074-P2-K1-G4
ggccgacatttttttttttttttttttttttttttttttttttttttttttttttttttttttttttttttttgtggcaaaattttttaaaaaggtgggcccaaaccttcaaaaaaaatattaattttttttaataaaaatttattttaaaatataaaaattgaatttatttttattgattatttatattttatatataaaataaatatatattattattttatttattacaaattttatttataataatttatatttttaacttaatataattatttttatatcttattaatttatattttatttatttcttatatttattattttatattaataatacttattttttttttatatttaataataatattaatatattatatttataatatttctttttatattattttttattatatattaaatttatttatttaattttaattattatttatattatttaattatttttattttattattatttttatttatta

SEQ ID NO: 11703 - DNA, 405 bp, Zea mays
  unsure at all n locations
  Clone ID: LIB3150-074-P2-K1-H11
gctaaaagccggcgtgaactgattcttgtgctacggaatcaagtttctggggctgggcataacagaaacagggagagagtacacaccccntgtcgctaagacaagatttttacgatgatgaaactacccgatggatgaattacaatgaaatgactgcgatatggtggcagtctatcatatagaaatctaaaacgggtattcatgggtccatctccacgggttctgtggctgaaaaaattggtgccttgcccataatcactgcagtcatcatcaatttaccagcatctggaaaattctcgggctggatcaacacttcttcaactgacaaacatttactcttcaaacctctcaaatgtacatcctctttctttacaagcaaaacatcctcaaaggtgccgtcataca

SEQ ID NO: 11704 - DNA, 439 bp, Zea mays
  Clone ID: LIB3150-074-P2-K1-H12
ccggcgcggggcgactagtgagctcttttactcaaggcgtgccatcgttttatagataatatagcaaggataaccatgtctcaacacctattccattttcaaccaggataaacaaaactgcaatcttatcaccaggcttactactctcaagacagggtcacagaagttcaaacatagcacaaattcgaagacaccaaagaccatacaagagcccacaaagaacgctagggcttcagcgcagcctcctggcctccctctcggactcgagcagggtgaggatgtcaccctcgcgaacgggccccttgacattcctcatgatgagccggttctggtcatccaagaacttcactctgacctgggtcacctgacccctggagccggtcctgcccatcaccttcaccacaacagcaagcttcacctgggtgtccatgctctcgct

SEQ ID NO: 11705 - DNA, 241 bp, Zea mays
  Clone ID: LIB3150-074-P2-K1-H4
aaaattcatacaacatttattcatgaataaaccatatgcggtttcacaatagttgggcgtaactataacacaacttatccattaaaccacctcattcaccacttacgacacaaaccatacaaattcttttaaagacatcaccatccattgtctaattcatatacactagataacccatttacacacagtatcttcaactactgatgtcttaataaccacctttaatacttatcaccaagtt

SEQ ID NO: 11706 - DNA, 396 bp, Zea mays
  Clone ID: LIB3150-075-P1-N1-A11
tgaagagatgaagtcccaggaggaaattttggatggtctaattgaggatatgggcaaggccacagaggataaagaaaagcagtttgagaagttgttgcaggaagagcgctcaaaggccagacgctttgatgttgattctggaactatgaaagatcgtcagctaaggaaggaatatgtgcagaagttcattgattgccaagtcaaggatgtggcagagtttgaagttgagcgagatgagctgatcaaagtccacgaggacaagaagttgaagctcaagaaagaatacatggatctggagctggagctggagaaggagtttgacgcagccctgacgggcctgatggagaagcataagccagataccttcgaggccttcagctcgtaagggggcttcag

SEQ ID NO: 11707 - DNA, 396 bp, Zea mays
  Clone ID: LIB3150-075-P1-N1-A2
tcgcagttgctccgatgggcaaggactcgaagccgaatgacgccaaggggaagggcaagcatgctgccggctcctctggcggcgacgacggcggcggcaagggaggcaagggcaagggcaagggcaagggcggcaagtccgctgacggactcggcacttgcacctacgtcaaagctaggcacgtattgtgtgagaagcaggggaagatcaatgaagcttataagaagttgcaggatggatggctgaataatggggacaaagttcctcctgctgagtttgctaaggtagcacaagagtattctgaatgcccatcaaggaagaaaggtggagatcttggttggttcccgcgtggcaagatggctggtcctttcccagaggttgctttcaacacacctg

SEQ ID NO: 11708 - DNA, 405 bp, Zea mays
  Clone ID: LIB3150-075-P1-N1-A4
ctgaagctgcgggcaatgataattgtcctgtgaagattaagctagttgctcgtccactttatgttctgaccacacagacccttgacaaggaccaagggatttcagttctcactgatgcagtcaaggcttgtacagcagagattgaaaaatacaaaggaaagttagtagtgaaggaaccaccaagagctgttagcgagcgggaagacaagctattcctcgaccagattgattccctaatggaacaaaacgcagaggtcgatggtgacgtggacagtgaagaggaggaagatacaggaatgggcaacgttgatcttacaaattctggcgtcactgcttactaaggcaacactggttgatttgaatgagatttgctgtatagcaccagctatgatctaaatcgttctg

SEQ ID NO: 11709 - DNA, 298 bp, Zea mays
  Clone ID: LIB3150-075-P1-N1-B1
ctcgtcctctgttctcatcttctgctcgctggtgggccctctctctcacccatggcttcggcggcggcggcaactcaagtggggacttacttcctgcggaactactacaacctgctgcaacaaacccccgatgtcgtccaccagttctacagcgaagccagcaccatggtccgcgtcgacgacctcaccggcacgaccgcggctgccaacaacatgatggacatacactcactcatcatgtctttgaacctcacccaaattgagatcaagactgccaattttgtgaactcatggggcg

SEQ ID NO: 11710 - DNA, 385 bp, Zea mays
  Clone ID: LIB3150-075-P1-N1-B2
cgattcctcaaccatcaaagcctcaggaaccttccactagcactcctagtgtccgggaggtcttacctacctctggccccactaaagatgctgataatatatctaactgcagcgaacgaaggaatgtggtcaaaattagggtgaagcttactgcgtcttccagtaaagcatctgatgctgaccacagaggccattttcatggtggaagaaatgaaaatgaaccgggtccatgtagctcaatgtcagaggatgcccctatggttgggactgcaaatgaaccatttaatgtaagcaatcataacattgaggaacagaactcatgtcatgaccgcgaatcaaagatgtcggcaagcgttagcactgttaagctattggacaggcatga

SEQ ID NO: 11711 - DNA, 338 bp, Zea mays
  Clone ID: LIB3150-075-P1-N1-B3
ttccccttaacaagcagagtgactatgttaactcgatgagagctgcccgggacttgagttctaaaatgtccagagatttgcagatgaaaattttcccatattccgagttctatatattttttgagcaatacctgagcgtgtggaagacagctatcatgaacatatgtgtttgccttggtaccatttttgttgtttgcttcatagttaccagcagtttatgggcttcagcaataattttaactgggctagcaatgatagtcttggatatgatgaaggtgatggccatccttggtattcaactcaatgcaacctctgttgtaaaccttgttatgtcgata

SEQ ID NO: 11712 - DNA, 378 bp, Zea mays
  Clone ID: LIB3150-075-P1-N1-B5
ttgcttttcgctcttgcctccaaaattcacggggggcgattgccgccgtgggcgcgggcgatttctttgcggacgcctcgtaccacctccgtcgcattctccgctgactcccccctcggcggcgtcccaatacgctcctcaacagcctgctccgttcccacgccacctcctctcgctccgctgtgaccaccgaggaccaccagagcgggacgctgcggaactcgtcggccacgtcctggccgtcgcgcatgctgacgactaggctgttgccctcccgggcgccctctgctcggagctcgcacgcgtcctgcgagcgcgcggcgccgctgaggcaccgggcgcgccggcggaggaacaagttgaagtatgtccggaaca

SEQ ID NO: 11713 - DNA, 295 bp, Zea mays
  Clone ID: LIB3150-075-P1-N1-B6
tacggtttcggcagctgctactggaaggtggctgggagtaacaaactcctggggctcgacacgcgttccatggtgttctcctctttcgatatcccgtctggttacggccagcaagattctgtcgttgtggaggcagcggaaggcagattcagaatgttcactctccacaacagcatgatttctgctgcatcttacctggttcatgctgttcgggtaatccgcgaagaaggcaacaacctttggcaggttaagaggagagtcaggttgccgtcccaatatattttcagctttgcag

SEQ ID NO: 11714 - DNA, 141 bp, Zea mays
  Clone ID: LIB3150-075-P1-N1-B9
atacacagcacgcacgcgtacttaatctctcttcctctacaccatcccactttttttttttcaacaatcggtattctaagtaggtcttaatcaaaaagaccaaggcctatttctttccttctttctccaacatacgattct

SEQ ID NO: 11715 - DNA, 399 bp, Zea mays
  Clone ID: LIB3150-075-P1-N1-C1
ggagcttcttgcaaggaactgtaaatcattgatttgtctgaagatgagcgactgcgatctttcggatttgattggttttctccaaacctccaaggcactgcaagaattcgctggaggcgcttttttcgaagtcggagagtacaccaagtacgaaaaggtcaagctcccacctaggctatgcttcttggggggtcttaccttcatgggtaaaaacgagatgcccgttatctttccgtattctgcgtcgcttaagaaactggacctgcagtacactttcctcaccactgaaaatcactgtgagcttatcgctaaatgccccaacctaatggttctagaggtgaggaatgtgattggggatagaggacctgcagctgttgccgaatcatgcaagaagctacg

SEQ ID NO: 11716 - DNA, 122 bp, Zea mays
  Clone ID: LIB3150-075-P1-N1-C2
gttcattggacccgggattgggatcgggtgtcggtggcggctgcgggttcggcgtcgggtgggggttcagaggaatgcctcttaacatgttcggcttgggtatcggtgggggttgtggatct

SEQ ID NO: 11717 - DNA, 410 bp, Zea mays
  Clone ID: LIB3150-075-P1-N1-C3
gtcgccttctctcttcggtggctctacccgtggggcgaatctaagggacctggtgtcgagggaatactacggccacaagaagaaggtgcactctgtagcatggaactgcctaggcacaaagcttgcttcaggatcgatcgatcataccgcacgtgtctggagcattgatccacatgtccattctaaggttaaagatattgaactgaaaggccacacagatagtgtagatcagctttgctgggatccaaatcatcctgatacagttgctactgcagctgctgacaaatctattcgtctttgggatgctcgaagaggaaaatgtcaagttgttgaacttagtggagaaaacatcaacatcacatatatacatgattgcactcaaatagcttgtggaaacaaggagggtgagc

SEQ ID NO: 11718 - DNA, 402 bp, Zea mays
  Clone ID: LIB3150-075-P1-N1-C4
ggcggtgcggaaggcgaaagagtagcagcagcaggcggcgccgagtagcggctccccacctcgagcttgccaccatggctagaggattgaagaagcatttgaagaggctcaatgcgcccaagcattggatgctggacaagcttggcggagcttttgctcccaagccatcttctggacctcacaagtctagggagtgcctgccactgatcctcatcatcaggaacaggctcaagtatgctcttacataccgtgaggtcatttccatcctgatgcaacgccatgtacttgttgatggcaaggtcaggacagacaagacctaccctgctgggttcatggatgtcatttccatccccaagaccaatgagaactacaggctgctgtacgataccaagggccgctttc

SEQ ID NO: 11719 - DNA, 411 bp, Zea mays
  Clone ID: LIB3150-075-P1-N1-C5
ctgcttaagcctgacaaggataaggagaccaaaagctcatggaaggttcttataatggacaaattcacggtgaagatcatggcttatgcttgtaagatggcggaaattaccgatgcagggatttcgcttgtagaagatctgttcaagagaagggagccaatgccttcaatggatgcaatctactttcttcagccactgaaagaaaatgtcataatgcttctatctgacatgtctgggagatgcccactttacaggaaggcatacatcttcttcagctcaccgattcctaaagacttggttacttacataaagaatgacagtagtgtaataccacgcatcggtgcactaagagagatgaatttggaattcttcactattgacatgcatggcttttgtactgaccatgatact

SEQ ID NO: 11720 - DNA, 251 bp, Zea mays
  Clone ID: LIB3150-075-P1-N1-C9
tttcgcttttttcttcggtggctctacccgtggggcgtatctaatggaccgggtgtcaagttattactacggccacataataaaggtgcactttgtatcatggaactgctatatcacacaaatttggtttaaatctattgatcttatcccacatgtttgtagaacattaacacatattccttctaaagttaaagatatttaactgtaataccacacacatatagtttattcatctcttctgttatccaaaa

SEQ ID NO: 11721 - DNA, 160 bp, Zea mays
  Clone ID: LIB3150-075-P1-N1-D1
ttgtttttcaagatgtacaccgcgaggaagaagagccagaatgagaagggtggtgagccctcctagttcgaggactccgttgcccaggctttctttgatctggagaacgggaaccaggagctcaagagcgacctcaatgacctgttcatcaacaatgcta

SEQ ID NO: 11722 - DNA, 395 bp, Zea mays
  Clone ID: LIB3150-075-P1-N1-D2
tgcgcttatcgggggctgctgcaggacaagtccaagcactatcagggccagacacagaactcttaaccaaggctgccacaagcatcagttacctgtaggctgtagcatagatctgtgctccactcctgatgctctcctgccagcagtacctagagctgtatccccgagattccttaaccagcgcgaaccaatatactgttgcgtgttctcctgcaaatgagatgttctgcacctatgtttagaatgtggtatttctgggtttttaagctatccaacttggagatacaaccggtgaggaagcagcaacaataggtagttctacttctgagtgaggaaaaacaacttgcggctgagttaatgaagcttagtagctaccaacgttgtatgacagttgc

SEQ ID NO: 11723 - DNA, 406 bp, Zea mays
  Clone ID: LIB3150-075-P1-N1-D4
tccacccggtcaagctcgcgcctttcagcgcggaccaggaggacgcgtcggtgctgtggacggagagcaaggacgtgggcaagggcttccgctgcatccgcatggtcaacaacacccgcctcaacttcgacgccttccacggcgacaaggaccacggcggcgtgcacgacggcaccggcgtcgtgctctgggagtggtgcaagggcgagaaccagagctggaagatcctgccgtggggtcccgaggccaacttcgccgcggcccacgcgggaggcccgcacgccgtgcgcgtcttctgcaaggccggcggcgaggactacagcctcacggtgcgcaacggcacggcgtgcctggcgcccaccaacccgcgggacgagtaccagcactgggtcaaggacatgcgcca

SEQ ID NO: 11724 - DNA, 280 bp, Zea mays
  Clone ID: LIB3150-075-P1-N1-D5
ttccatttatcaagctcgaccctttcagacgggagctggatgtctcgtaggggctgcggccccataccccgtacctcctcactaccttccgttctatcttcatcctcaacaacacccagctcaactcgtacgccttccttcattacaaccaccaccccttcgtccacgacagcaccgtggacatcctctgttaaaatggattagccgattaccacaactattatttccggttttgtgcctactgagcccatcttattctgcgtcctctagcatatggcca

SEQ ID NO: 11725 - DNA, 385 bp, Zea mays
  unsure at all n locations
  Clone ID: LIB3150-075-P1-N1-E1
gatcagcaaagcggcagtgcgtagagaggatcgtcgaacagaacagcatgaagatggtcatcgttctcgtcgtgtgcctggctctgtcagctgccagcgcctctgcaatgcagatgccctgcccctgcgcggggctgcagggcttgtacggcgctggcgccggcctgacgacgatgatgggcgccggcgggctgtacccctacgcggagtacctgaggcagccgcagtgcagcccgctggcggcggcgccctactacgccgggtgtgggcagacgagcgccatgtaccagccgctccggcaacagtgctgnccagcagcagatgaggatgatggacgtgcagtccgtcgcgcaacaactgcagatgatgatgcagcttgagcgtg

SEQ ID NO: 11726 - DNA, 393 bp, Zea mays
  Clone ID: LIB3150-075-P1-N1-E12
tcaaaaaccctaaccgccgccgccggcggcggcgctcttcctcgagatgggaggcaagtgcccgcaccgcaaggtaaagaagcgccgcctatcccacaagacggctcgccgcggcaagttcctcctgaaggccgacgatgccgtctatgacgagctcgtcaagcttgccgaccagggcaaggacgctgaaaccaaggagctccccgtcgatgaggacctcccaggcctgggacagttctactgcctccactgcgatcgctactttgcaagtgaaagcgtgaaggatgatcactatcgttcaaagcgccacaagaaaagggttaaggtaatgtctggaccggccccgcacacgcagcttgatgcagaactcgctgcaaggatgggaaagcctga

SEQ ID NO: 11727 - DNA, 325 bp, Zea mays
  Clone ID: LIB3150-075-P1-N1-E3
tcacactcgcgaactccatttcgatcccatgtgagatcaacccatcctcgtttcctccgtctagcagcctctcaccctcatggccaagatcaagatcgggatcaatgggttcggcaggatcggaaggctggtggccagggtggccctgcagagcgacgacgtcgagctcgtcgccgtgaacgaccccttcatcagcaccgattacatgacctacatgttcaagtatgacactgtgcacggacagtggaagcaccatgaggtcaaggtgaaggactccaagacccttctctttggtgagaaggaggttgctgtatttggctgcatg

SEQ ID NO: 11728 - DNA, 306 bp, Zea mays
  Clone ID: LIB3150-075-P1-N1-E4
gccgcccttttttttttttttttaataatttctcactgtttgtgttgtaagaaagatactggatacatgatattgcatctctactgtgactcgcccagagccgcgcgcgcgcgccctgtgcatacacatacatacacacgcactccattaccatcttctctcccacggaggatgatggagacctgccaaagatgtatagttgccctacatggccgatcgaacgcttacaagctgcccgcgccccgcgtgccctatcgtcaacagggcacgcaccaccgtcggagctagcaccctatgtttttttac

SEQ ID NO: 11729 - DNA, 277 bp, Zea mays
  Clone ID: LIB3150-075-P1-N1-E6
ttcctttattgcccagacattgatgttggcggaggggtcattttcatgaacgggaaggtggcttggatctccttcaccctcccaacctacgagccctgcctcgatgatgttgcgaagcagcgcaagagcaggaacctctacttcagcactgatgttgagaagcacgtccctgacgctgacatcatcttcgtctcggctaacacccccaccaaaacccgttgtcttgaagctgtcaagggtgccgacctcacctactgtgagagcgcttcttgtatga

SEQ ID NO: 11730 - DNA, 268 bp, Zea mays
  Clone ID: LIB3150-075-P1-N1-E7
gtcatcgatctcgtttcaaatccatgcaggctcgtttcctccgtccggcagcatctcaaccccatggccaagatcaagatcgggatcaatgggttcggcaggatcggaaggctggtggccagggtggccctgcagagggccaatgcctagctcgccgccgggaccaacccttcatcagcaccgactacatgacctacatgttcaagttcgacactgtgcacgggcaggggaagcaccatgaagtcaaagggaaggactccaaaaccct

SEQ ID NO: 11731 - DNA, 348 bp, Zea mays
  Clone ID: LIB3150-075-P1-N1-E9
tatccctcacagcaaccatggctggcgcgcgaggagtccctctctctggtgggcacgatgcgcggccacaacggcgaggtgacggcgatcgcgaccccgatcgacaactcgccgttcatcgtctcctcctcccgcgacaagtccctgctggtgtgggacctgcccaaccgggccaattcaacccggaattccgggccaaccgccaattccgcgttccctttcgccgccttaccggccactcccactttgtccaggacgtcgtcctcagttccgacggccagttcgccctttccggctcctgggatggagagctccgcctctgggacctcttcaccggccttaccaccc

SEQ ID NO: 11732 - DNA, 389 bp, Zea mays
  Clone ID: LIB3150-075-P1-N1-F11
ccccgtcatcgatctcgtttcaaatccatgcatcctcgtttcctccgtcccgcagcatctcaaccccatggccaagatcaagatcgggatcaatgggttcggcaggatcggaaggctggtggccagggtggccctgcagagtgacgatgtcgagctcgtcgccgtgaacgaccccttcatcagcaccgactacatgacctacatgttcaagtacgacactgtgcacggacagtggaagcaccatgaagtcaaggtgaaggactccaaaacccttctctttggtgagaaggaggttgctgtgtttggctgcaggaaccctgaggagatcccgtggggttcggttggtgctgaatatgtttgtgagtctactggggttttcactgaccagg

SEQ ID NO: 11733 - DNA, 175 bp, Zea mays
  unsure at all n locations
  Clone ID: LIB3150-075-P1-N1-F4
ttacggttggcgagcaggggcacggcggcctggtacgccgcatttgaacaggcaggggcacatcnaccgtcatcccaggctgctctaattatgcccatagcaagtccctatagtatattattatccgcttacaattccacactccttacaatccataatcataaaatttaaattc

SEQ ID NO: 11734 - DNA, 313 bp, Zea mays
  Clone ID: LIB3150-075-P1-N1-F5
tcttgtattctcaaggaaacctttatccatggcgtggaggtatcatactactggtgcttgtcatccccctcgtcgtgagaattgaagggagtgtcatgggggagagatccaactcgttctcacaggactccaataattctagccctgctgaaaacaaactccaaccaggtgaaaagtcctttgcatcggaagcatatgcggtgtactggaacgaaccaccatacctgcaaatgcaagactccttcgagcgacctgtgctatatctgaagcaatcatggctaggtgaaaagttcttcgctttttatgcattttc

SEQ ID NO: 11735 - DNA, 155 bp, Zea mays
  Clone ID: LIB3150-075-P1-N1-G1
agatcagcaaagcggcagtgcgtagagaggatcgtcgctcagaacagcatggagatggtcatcgttctcgtcgagtgcctggctctgtcagctgccagcgcctctgcaatgcatatgccctgcccctgcgcggcgctgcatggcttgtacggcgc

SEQ ID NO: 11736 - DNA, 400 bp, Zea mays
  Clone ID: LIB3150-075-P1-N1-H1
ttgtttacagtccctccgccctgataacatcaagatgtttgttcttgacgaagctgatgaaatgctttctcgtggtttcaaggatcagatttatgacatcttccagcttctgccatccaagattcaggttggagtcttctctgctaccatgccacctgaggcccttgagattacccgcaagttcatgaacaaaccagtgagaattcttgtgaagagagatgagctgacccttgagggtatcaagcagttctatgtgaatgtggacaaggaagactggaagctggacacactgtgtgacctgtatgagaccctggccattacccagagtgtcatctttgtcaacacccgcccgaaggtgtactggctcactgacaagatgaggagcaggtaccacaccgtt

SEQ ID NO: 11737 - DNA, 353 bp, Zea mays
  unsure at all n locations
  Clone ID: LIB3150-075-P1-N1-H2
taaaaccctaacccctagccagcggctaccgccgccatccgacggcgagatggcgctgcacctgctgttcaagtcggactccggctacagcctattccatgcgtacgggatcgatgagatcgggcagagcgttgaggccgtgcgctcctacgtgctggacctcgaccgtttcggcaaggccgtcaagctcactgccttcaatcctttctcctctgccgtcgacgcgctcaaccagtgcaacgccatctctgaaggaatcatgaccgatgagttgaggagcttcctggagctgaacctgccgaagcctaaggaggggaagaaggccaaatacagncctggcgttgtcgagccca

SEQ ID NO: 11738 - DNA, 300 bp, Zea mays
  Clone ID: LIB3150-075-P2-N2-A11
ttgtatgactggggtgttgatgacgtgaaactgagagaagcatttagcagctggggagaggttactgaagcgagggtgatcacagacagggagactgggaggtcaagaggctttggctttgtgaactactccgacagtgattctgccaaggaagctatttctgcaatggatggcaaggaaattgatgggcggcaggtacgtgtcaacatggctaatgagagacctgctgggaaccgtggtggtggtggctatggcggcggcatgctatggaggtgatggctggggtggtttcttctgtta

SEQ ID NO: 11739 - DNA, 380 bp, Zea mays
  Clone ID: LIB3150-075-P2-N2-A12
ttcgccgtctgccttctgcgcctccatttcggcctctgtcccttgcaagttcaatctcacctccaaccatgggtaaagagaagtcccacatcaacattgtggttattggccatgtcgactctggcaagtcgaccaccacaggacaccttatctacaagcttggaggcattgacaagcgtgtgatcgagaggttcgagaaggaggctgctgaaatgaacaagcggtccttcaagtacgcgtgggtgctcgacaagctcaaggctgagcgtgagagaggtatcaccattgatatcgctctgtggaagtttgagaccaccaagtactacttgcacggtcattgatgcccctggacaccgtgactttatcaagaacatgatcac

SEQ ID NO: 11740 - DNA, 441 bp, Zea mays
  Clone ID: LIB3150-075-P2-N2-A3
ggaatctttaaaagtgaaccaacgcgtccgctttgcttgcaatctccgaagcctccgtcggggggagcatcgatcatgtcggcctactgcgaaaagtacaaggatgagctcatcaagaatgctgcctacattggcacccctggcaagggtatccttgctgctgatgagtccactggcaccattggcaagcgcctttccagcatcaatgtcgagaacgttgaggagaaccgccgtgcctctcgtgagctcctattctgctgccctggtgctctccagaacatcatcgttgtgatcctcttctaggtgatccctgttctataagaccaagaattgctagtcttttcttatattatacataaggacgttgttatttattctattttatttatttctatctttttttatcctttctatctattttacttatatctttccaaattt

SEQ ID NO: 11741 - DNA, 259 bp, Zea mays
  Clone ID: LIB3150-075-P2-N2-A6
acctcacaaacagggtgttaaacacgcgcttaacttgcaccgccatcacgggggccgacctaaacaagattgagccatgggacctcccgagcaaggcgaatatgggcgagaaagagtggtactttttttaccagaaggaccgcatgtacccgacggggctgagggcgaaccggtccaccgaggccggttactggaaggcgacgggcaaggacaaggaggtctacaacgccgcggaaggggtgcggtactggtcggcatg

SEQ ID NO: 11742 - DNA, 289 bp, Zea mays
  Clone ID: LIB3150-075-P2-N2-A8
tcttatgggcactcgatgctaccatctagagagacatctaaaagagaactgcgagcacaaacacttggttttcttgctaaataagtgtgatctaatccctgcttgggctacaaaaggatggttaaggaccctttcgaaggactatcccaccctagcattccatgcaagcatcaacaagtcatttggcaaaggatctcttctgtcagtattgaggcaatttgctcgtttgaagaatgacaaacaagctatttctgtcgggtttgttgggtaccccaatgttgggaagtta

SEQ ID NO: 11743 - DNA, 374 bp, Zea mays
  Clone ID: LIB3150-075-P2-N2-B10
ttcgcctcgccaagcgcagcagccgccgcagcacatcgctctcttgatctcagccatggcggaggtggagcagcaacaggacacgccgaagctcttcaaccgctggaccttcgatgatgtccaggtgaacgacatctcgctgaacgactacctcgctgtgaacgcgacgaagcacgcgatgtacctgccgcacaccgcggggcgctactccaagaagcggttccgcaaggcgcagtgcccgatcgttgagcgccttacaaactccctcatgatgcacgggcgcaacaacggcaagatggtcatggctgtccgcatcatcaagcataccctggagatcattcacctgctcaccgatgccaacctcattcaggtcg

SEQ ID NO: 11744 - DNA, 440 bp, Zea mays
  Clone ID: LIB3150-075-P2-N2-B11
tttcactggtgtgggccgtggctgtacgccgcagagtgaagcgagacgagacgacgatgcgcaagtgggcgctctcctgcgcgctcctcctcctcttcctcctcaccaccctccccgacccagctaagaagctacaggtgaatgcggaagagagcagcgatgacttcgctaacccacccaaggtagaggagaagcttggtgctgtccctcatggcctgtccaccgactctgaggttgcccagagggaagctgagtctatctctaggaagactcttaggagctccgccgagaagtttgagttccaggctgaggtgtccagactcatggacatcatcatcaactcactctacagcaacaaggatatctttctgagggagctcatatccaatgcctctgatgcattggataagatcaggttcctttcccttactgataaggaa

SEQ ID NO: 11745 - DNA, 422 bp, Zea mays
  Clone ID: LIB3150-075-P2-N2-B12
ttcgcctcgggccaaaccctacgcagggagttgattgatcgattgcagccatgagtaagttgcattccgagcttctcaaggattgcatctcccagatagttcaggatgccaagaagaataggaagttcactgagactgttgagcttcagattagtctgaagaattatgatccacaaaaggacaagcgtttcagtggctctgttaagttgcctcacatccctcgtccaaagatgaaggtgtgcatgcttggtgatgcccagcacgttgaggaggctgagaagatgggacttgactacatggatgttgatgccctcaagaaaatgaacactaacaagaagcttgttaataagctcgccaagatgtaccatgctttttgggcattatatacctttctctattctatttcctatatttctctggtc

SEQ ID NO: 11746 - DNA, 314 bp, Zea mays
  Clone ID: LIB3150-075-P2-N2-B3
ttgtcgaggcaaaagcattgcgaccacagacagcgcgcgcttcaaggcctttttttttgagataacaaggaggagaggaggagatggcggtcacgatcacgtgggtgaaggcgaggcagatcttcgacagccgcggcaaccccaccgtcgaggtggacgtgggccttagcgacagcagttacgcaaggggggctcgtacccagtgggccatgcacttggaatatatgatgccttggagttgagggatgttttacttcttttttgacaactgaattttttagggcgaccgggtttgtttttttattatgtgtgct

SEQ ID NO: 11747 - DNA, 162 bp, Zea mays
  Clone ID: LIB3150-075-P2-N2-B6
gggtcacagccggaacgcggggcagccaaccaagcggacacgatgcaggcccacggaatcgccatccgcgcccgggggccggtggcggagacgcaggcccccgcgcgccgacggcaatgccgcgtgtctgcggcggcggtcggcgcgcccgccgctcgagcc

SEQ ID NO: 11748 - DNA, 381 bp, Zea mays
  Clone ID: LIB3150-075-P2-N2-B7
tgttcagagtacgcagcgaagttgttccgcagaagctcctccgaaagagggtgagtttccagaattctcttttcggcgtcatctcttcgtcccacgcccaccaggacaccggccgtctgctctcgaaaggcctcgctggaacagagggtccaaattgccgtcacgactccctcatcagggtgacaatcagctgccctgagaacgggaggaacgccgcagggaagctcgtgcgcctaccgcggtcgatggccgagcttctcggactaggtgcaaagaagttcggcatcaagcctgccaaggtcctgacagttgggggtgctgagattgatgaggtggagcttatcagatacggtgatcatattcttcttcgcagtgatgaat

SEQ ID NO: 11749 - DNA, 158 bp, Zea mays
  Clone ID: LIB3150-075-P2-N2-B8
gtccacgcccgcccacaggccacaccgtccatcctcttcctcccgtgccgcgcatctgtcggctgccgcgcgcggcaagctaatccatggatctgcactacggcgcccgggtcggggaggccatggcggcgggctaggatatctacaacgtcaccgcg

SEQ ID NO: 11750 - DNA, 446 bp, Zea mays
  Clone ID: LIB3150-075-P2-N2-B9
ttccgccccagcgcatcgcccgccgccacagcgtaccgcgacctcatcgatcaccttcagctttcaatcatggccgacgtcgatgtcgaaccggaggttgccgccggcgctcccaagaagaggacgttccgcaagtacagctaccgcggcgtcgacctagatgcgcttctcgacatgtccacggacgacctcgtccagctcttccccgcgcgcgccaggagaaggttccagaggggtctgaagaggaagcccatggcgctcatcaagaaactgcgcaaggcgaaaaaggatgctcctgctggtgagaagcccgagccagtcaagacacatcttcgtaacatgatcattgtccctgagatgattggaagcattgttggggtctacaacggcatgaccttcaaccaggttgagatcaagcctgagatgatcggccactaccttgctga

SEQ ID NO: 11751 - DNA, 445 bp, Zea mays
  Clone ID: LIB3150-075-P2-N2-C10
ttcctgtggatgggcagactcgtccagctgatgtttgtgttattgaattgggaggcactgtaggtgatattgagtcgatgccattcattgaagctttgcgccaattatccttttctcttggcaaggaaaatttctgcctcatacacgttagccttgttccagtattgggtgtagttggtgagcagaaaactaaaccaacacaacatagtgtacgagaactgagagccttgggtctgactcctgatcttctagcatgccggtcagcacagccactaataggatctgttaaagagaagctttcacaattttgccatgtcccggtcgagaacatacttaacatccatgatgttccaaatttatggcatgtcccacttattcttagaaaccaaaaggctcatgaagctataatcaaacaactaaaccttgctagatctgctggaccacc

SEQ ID NO: 11752 - DNA, 180 bp, Zea mays
  Clone ID: LIB3150-075-P2-N2-C11
ttaaaaccctaaaccctcgctacccggcggcggctacaagctcttcgtcggttcagcaccatgaggccaccggctagaggaggacgtggtgggaggggtggcaggttcgatggcggcggccgtgggggcggcggcggcggccgtgggtttggcggtggttgaggcgtgagaggggacagg

SEQ ID NO: 11753 - DNA, 296 bp, Zea mays
  Clone ID: LIB3150-075-P2-N2-C12
tgcgcgcggagagcgagagcccgggagaaacagcggccggcggcaaaatggtgcagcggctcacctaccggaagcgccacagctacgccacaaaatccaatcagacccgcgtggtcaagacccctggtgggaggcttgtgtaccagtacaccaagaagcgcgcgagcggaccgaaatgcccggtcaccgggaagaagatccaaggaattccacacctgagacctgctgagtacaagaggtccaggttggcaaggaaccgcaggactgtgaaccgtccatatggtggtgttctgtct

SEQ ID NO: 11754 - DNA, 264 bp, Zea mays
  Clone ID: LIB3150-075-P2-N2-C3
ttaaaagtccaaccaacccttccgctgtttcctaatcggcatgagcggcttcttggcggtggtcgacaaggtcggcacctttctgctgtgggtgctgttcctggtctagcataccgccaccaggatcgtttgcaagactacttgacagctcatctaaacaacattatgaccaccatcaataatcttcgattgttcttctcacatggatataattctaatcatattcataccttttctagccgagatcttcataatcctttcaaa

SEQ ID NO: 11755 - DNA, 439 bp, Zea mays
  Clone ID: LIB3150-075-P2-N2-C4
cccgtccgttccgccactgcggcctacagttgaaggccggtaccttttgccttcctttgggctgtgcctctgcatttaatcgctgcggttcttaatcctcgccaccggacctttgtcgctcacctgttgcccccaagtccaaatgatgaagtccctcctcttctccgcccaccccacgtcgctgctcctccccgctccccgccttcgcaggctcctccgcctccgcgccgcctcctctgcctccgcctccgcgccgcctcgagccgaccgccgctcccccgggacgccttcgcgccgaccatcctcctccctctacgcgcgccccagcctcctcgacatggagcgggatcgcgccacccgccgcgtcgatgtcgacgccttcctcaccttccttggcgtttacccgggcgaactcgtggtccttgagctcccattcact

SEQ ID NO: 11756 - DNA, 372 bp, Zea mays
  Clone ID: LIB3150-075-P2-N2-C8
tttcagaccattagctttatctactccagagcgcagaagaacccgatcgacgccatgagggtgttgctcgttgccctcgctctcctggctctcgctgcgagcgccaccttcacgcatacaagcggcggctgcggctgccagccaccgccgccggttcatctactgccgccggtgcatttgacatttttggtttatttgtcatcttttttttattatcttttttttgttttttcttcttttgtcttgtacttttttattcttgtctatctttttcctttttgggggtgggggtgtctgtattttttctttcttttactctctattattctctgtcttttatttctttttattttttttctattctttcttttt

SEQ ID NO: 11757 - DNA, 450 bp, Zea mays
  Clone ID: LIB3150-075-P2-N2-C9
tatggctcagaaaatggcaactgttgagcgagtagaagagcttctcgagaagctgcgtgctgcttcctgggatcatgctgtcaaagatatggaagatctgaaagtttttgcgaaagattctgtatcctcttgtagctaattatttgtctcattgtgaccttatcttctgtagtgaacttctgatagagtcttaattttatctttatgtggatgaatcattgtctatttttatttcttctcttgttttttattctctttttaatatttattctattttagagtggagtatttttaatattttattttatatctttactttttctatttcttacataatttgtttatttttctttaaaatacattactttttcttaatttttcattttcttactttttttctctttctattttttttatttttttatattctattattattctttttatctt

SEQ ID NO: 11758 - DNA, 349 bp, Zea mays
  Clone ID: LIB3150-075-P2-N2-D1
ctgctctccgaccccgagctccgaaggccgcagcatcaggcgcggcccccctcgcgtgtgaccgagatggcgctgccgaatcaggggaccgttgattaccccagcttcaagctcgtcatcgtcggcgatggtggaactggtaaaactacatttgtgaagaggcatctcactggagagtttgagaagaaatatgaaccaaccattggtgtaggaaggtcattcgttggatttcaccactaactgtggtaagttctgtttctactgctgtttatactgtagggcaggtgttgttagttgttcttttttttgattattatatttatggttatgttttattttatttcttttt

SEQ ID NO: 11759 - DNA, 321 bp, Zea mays
  Clone ID: LIB3150-075-P2-N2-D10
ttcctctccagcgcacacatcactagggaattcgatctatatatcctcttcttctcatggcggtgttcaagacgacaatcgtcctagtcctggtttttgcggtcctgtcttcaacgtctccgtgctacgaagccggacgaagctcatgtgcaggcattggtggctgcgatcagcagctagatgcgacaccgtgcgtggaccctctcaagaatgacgcggaccactgcacgaccgtgacatgcgccttgcaatgcctgtccgccaagcacaagaccaagtctgcctactgcaagcttgagggcagtatattcgagtgctgct

SEQ ID NO: 11760 - DNA, 272 bp, Zea mays
  Clone ID: LIB3150-075-P2-N2-D11
ctccctctagcccgagcgaagaagaaaggagggtgctctgccggcggcggagcggagatgtccgagaggaggcgcggcgccggcaccggcacccgcaaggatgaggtggtgacccgcgagtacaccatcaaccttcacaagcgcctccacggatgcaccttcaagaagaaggcaccgaatgccatcaaggagatcaggaagttcgcccagaagaccatgggtaccaccgatgtccggatcgatgtgaagctcaacaagcacgtctggagcag

SEQ ID NO: 11761 - DNA, 296 bp, Zea mays
  Clone ID: LIB3150-075-P2-N2-D12
gtaccaagaaatccatcgagaggccgtcgacaggggaattaatggcgtcgtcgtctagcagcagccaccgccgcctcatcctcgcagccgccgtcctgctctccgtgctcgcggctgccagcgccagcgccgggacctcctgcgtgccggggtgggccatcccgcacaacccgctcccgagctgccgctggtacgtgaccagccggacctgcggcatcgggccgcgcctcccgtggccggagctgaagaggagatgctgccggtagctggcggacttcccggcgtactgtcgttgc

SEQ ID NO: 11762 - DNA, 440 bp, Zea mays
  Clone ID: LIB3150-075-P2-N2-D2
ccgtcgtctctggctcactcgctcgttctctccatccagatcggagcgctcggttcggataggggcgtctcggaggtgaaggcgggcgcgtcagccatggcggacgaggagcacccggagaggagggaagaggcctccgagcttgccccctttgatccaaccaagaagaagaaaaagaagaaggttgtcatccaagagccttctgatgaagtggacaagcttgcagagaagacagaatcactagcagtcgcagaacctgctgaacttaactttactggaatgaagaagaaaaagaagaagcaggtggatcttgattcatctattgatgaccttgtagatggtgaggacactcaaggtgatcaagttgtagaggaacaaggtgacggtattgtgctttgaggtggccctacatatccctgggaaggaactgatcgggatta

SEQ ID NO: 11763 - DNA, 406 bp, Zea mays
  Clone ID: LIB3150-075-P2-N2-D3
tcgtgccgctctaccgacgtcgcttgagctctctcgctggcggaccgcccccctcatccctgcggtcacgcgcgacctccatgacctccaccgctgcagaaggtgcaggaagcggtagcttgaaccctccgcattcgaaccctagcggcgatggcggccctaggatccggtcgccgccggggaaagggaataagcccgtcgctctcgccgacatcactaacactgggaagcccaacgccgccagatccatcaccgttcccgacctcgttaaggagaacaccaagttgctgactctgctcaacgagaagacaaagattattgacctcagcagggttgagtattacaagctccgacttgccctgcaagcatcaaagcaacagaatctacaccttacacaaaccatatc

SEQ ID NO: 11764 - DNA, 394 bp, Zea mays
  Clone ID: LIB3150-075-P2-N2-D4
gtcgccgccatgcaaatgcgcttctctcgggactgcgacgcttgcgacggcgacggctcctgcgagtactgctccgtcgagtttcacctctccgtgcacgccaccgactccgaccagacgctcgaggtcacatccaacgacctgagatccatggaccccaaggtctgcccagtcgaccaagcacgcgcctaccagcacgcgctcggaggcaccgacccctttggagccaatgcctcgaacgaaaacaggggcatacttattgtaaagctgcgtcgggggcaagaactaaggcttcgtgccatagctaggaaaggatttggcatggaccatgctaaatggtcaccagctgttaccgggactattatgtatgagccttgacttacgtattaatgaa

SEQ ID NO: 11765 - DNA, 348 bp, Zea mays
  Clone ID: LIB3150-075-P2-N2-D5
tttacgcgtggggtcgggtggactcgtacgccagaagatgaagtacctccgctttctccgcaagcggatgaacaccaagccatcccatgggcccatccacttccgcgccccgtccaagatcctgtggcgcaccatccgcgggatgattccgcacaagaccaagaggggggaggcggctctggcgaggctcaagacgtacgagggcgttccgccgccgtacgacaagaccaagcgcctggtcatccctgacgctcttaaggtcctgaggctgcaacctggacacaagtactgcctccttggtgagcttactaaggaggtctgtttgatctaccatgacaccatcaagtt

SEQ ID NO: 11766 - DNA, 264 bp, Zea mays
  Clone ID: LIB3150-075-P2-N2-D6
tgtacttcgttatgttatggagagtggtgccaagggttgtgaggtgattgtgagtggaaagctcagggcccaaagagccaagtccatgaagttcaaggatggctacatgatctcatctggtcagccagtgaacgagtacattgactcggctgtgagacacgttcttctcagacagggtgttcttggcatcaaggtgaagatcatgcttgactggtaccctatgggcattgttgtctctatctctctttttactgacttgttgac

SEQ ID NO: 11767 - DNA, 423 bp, Zea mays
  Clone ID: LIB3150-075-P2-N2-D8
tttgcaggcacccatgtgcacagtccattcttttccacacaacattgaccattgcttgacatgggcccgttcagagtttgagggtttgctagagaaaacaccaaatgaagtaaactcttttctgtctaatcctgctcaatatgctgctgtcatgaggaaggcaggtgatgcccaagcaagggaattacttgaacgtgtctccgaatgtcttgacaaggagcgatgcaatacatttgaggactgtataacttgggctcgattgagatttgaggattatttttcaaactcgcgtaagcagtttacattcacttttcctgaagatgctttttactagcacaggcattttttttttggtatgcttctaattgtttttccctctctttgttattttttaatcctgatttatcttatattaattttttt

SEQ ID NO: 11768 - DNA, 255 bp, Zea mays
  Clone ID: LIB3150-075-P2-N2-D9
ttcaccacgtcggtgaccgcggtgtcttcgccagggcctctggggactacgccatcgtgatcagccacaaccctgacaacggcacctcgaggatcaagctaccatctggtgctaagaaaattgtccccagcagctgccgtgccatgattgggcaggttgccggtggtggcaggactgagaagccgatgctgaaggctggcatcgcctaccacatgttccgtgtgaagagtaacagttggcccaaggtccgtggtg

SEQ ID NO: 11769 - DNA, 439 bp, Zea mays
  Clone ID: LIB3150-075-P2-N2-E10
gctgagggtcgcgggcaggcgcctctcgtccgctctcgcctggcgccccgccgccgccgcctcaggctcccggggccctctcgccggtacactacccggccgcgacgacgacgacacacgcgactgcagggcgcgtttcgccatcgaatctcccttcttcgccgctgccagagggttttctgcagagactcttgctccaagaaaccaggatgtgggcttatccgagctcccagcaactgtggcagctgtgaagaatccaagtggaaaaatcgtgtatgatgagtataaccatgagcgctacccgcctggagaccccagcaagcgtgcatttgcctactttgtgctgagtggtgggaggttcatttacgcatctttgctgcgacttctcgtcttaaaaattgtcctgagcatgtcaacaagtaaggatgttttcgcgctt

SEQ ID NO: 11770 - DNA, 261 bp, Zea mays
  Clone ID: LIB3150-075-P2-N2-E11
tatggacaaggacaggaagaaggcccccgtgtcgcgctcctcccgcgccggcctccagttcccggtgggtcgcatccaccgccagctcaagtcgcgtgcctccgcgcacggccgcgtcggcgccaccgccgccgtctattccgccgccatcctcgagtacctcaccgccgaggtcctttagctgaccgacaactccagcaaggaccttaggggcaagctcatcacccctcgccacttgtgtctcggcatccatgattacaa

SEQ ID NO: 11771 - DNA, 385 bp, Zea mays
  Clone ID: LIB3150-075-P2-N2-E12
gccttccatgaggaaattcttgctggctgggggcttcagcaaggggcagacccacttagccgcgaacatcttcaaagggatcgacgccagggtcctgagcgaagacctgggcgtcagcatgcacgtcgcacgagaagctgcagagccggcgtgaccagcgatggcgagatcgtgcgcgtggagccggagcacggctttcaccagctgaatccggctccgccgtacgctgggcctcctggccatcgccctatacctcatatcgaagccgcccatgaccgcgggcacggcacactctgtctcccactgccaggtggcgctgtgcgtttcgttcacgctcggctacggtcttaacgtcatcatgacggtgcgcaacctcaacacagcg

SEQ ID NO: 11772 - DNA, 401 bp, Zea mays
  Clone ID: LIB3150-075-P2-N2-E2
gccaacaagggccgccaggggccagggccgaaccttcttccgttggccggggcggaccacgcccttccaggccagcttccaccggagcaggagctaagtcgcctcgaattcttcccagctagtagcgtgtgccgtaccccgtcgctcaaccgggatggcgtcgagtggggatccgcccggatctgctgatgagaagaaaactccaatatccgaagggtcttccgacgaacgtcaagggcttcctccagcaggcttttcaaatccttttgattttggttctatgcaaagtttgctcaatgatccatctattaaggagatggcagatcaaattgcaagggatcctgcattcaaccggatggctgagcagctacagaaaagtgcttcaagcaccagagaacagg

SEQ ID NO: 11773 - DNA, 191 bp, Zea mays
  Clone ID: LIB3150-075-P2-N2-E4
gtaccatttccccatctcccagatccaattggcgagttcttcctcctctgccgccatggcgctctctgtggagaagacctcgtctggacgggagtacaaggtcaaggatctctcgcaggcggacttcggtcgcctcgagattgagctggccgaggtcgaaatgcccggcctcatggcgtgccgcgccgagt

SEQ ID NO: 11774 - DNA, 308 bp, Zea mays
  Clone ID: LIB3150-075-P2-N2-E5
cttcagtctcggaagagaactatccagaagcgcaagactccaaagccgtcgccttcctatccatcccttcctcgccacgggggtcgcctgagatcacataaacaatggtgaaggctgttgctgtgcttggtagcagcgatggtgtcaagggcaccatctttttcacccaagtgggagatggccctaccactggcaccggaagtgtctctggcctcaagcctggcctccatgggtttcatgtgcatgcgcttggtgacaccaccaatggctgcatgtcaactggaccacactacaattctgcgagcaag

SEQ ID NO: 11775 - DNA, 344 bp, Zea mays
  Clone ID: LIB3150-075-P2-N2-E6
tttagcctttccaatataacttttgttgggccgttggtcttctgcggtcgccgggtctccgtgccactaaccctttaagggggtttctttggcacaggggctgagccaatagaattccctgttcgaaccaatcagataccaagagaaatccctacgaagaagtactcattgctcttcatacttggtgctggaactctaccttttggaacactcttcatcgagctcttcttcattctttctagtatttggcttggaaggttctattacgtgtttggcttccttctggtcgtgcttcttttgctgattgtggtgtgtgctgaggtatcagttgtttttacctacat

SEQ ID NO: 11776 - DNA, 312 bp, Zea mays
  Clone ID: LIB3150-075-P2-N2-E7
ttaaattgcagcttaccaatgtcgccagtatctggttcatggcacttttcatctgcatctccgtgaccggcatcctggaaatgaggtggagtggcgtggccatcgacgactggtggaggaacgagcagttctgggtcatcggaggcgtttcggcgcatctgttcgcggtgttccagggcctgctgaaggtgttcgtcggcatcgacacgagcttcaccgtgacgtcgaaggccggtgactactaggagtttttagtgcttttcatgtttaagtggtccaggctgttgtttacctcctatttacttcttcttt

SEQ ID NO: 11777 - DNA, 58 bp, Zea mays
  Clone ID: LIB3150-075-P2-N2-E9
ttttgaaggaggttgctgtgtttggctgcaggggcccttatgagatcccatggggttc

SEQ ID NO: 11778 - DNA, 437 bp, Zea mays
  unsure at all n locations
  Clone ID: LIB3150-075-P2-N2-F1
tagaagagctacgacgccggatcgcacgcgtacgatagacgtctgggactctctatagagcgccaccacaccgcctcgcgttagagaagcgtgtctctcgttcaagaatgaggggatggaacaataaagtcgacatacagggggtgtcggaactctcctatccgtatccaagggctcggctgctnnngctgtgctttgnngtggtgtctgaccaacccatctgtgattgcttcctgggtacccacgtgtgcctgtatttcttggtgctgctttctggcacccaactgtatctcaaatgtgtctganntattgtaggnngccggatgagtctggtctttacgctnngttgagttcttctcacnatgatgtggagagtagacctcttgtcaacattggcataagtaagagggactcaatgggtgatccctcaattattg

SEQ ID NO: 11779 - DNA, 426 bp, Zea mays
  Clone ID: LIB3150-075-P2-N2-F10
gtaaatttcagacgtattagtgaagagatttactgccaatacagaacagataatttgtttatacactaaaatagctaggagaaatccacgcctcaagaaccaccagcaccaccacctaggccctcgttagccggtttgcggttcaagtatcttataacggcgtcttcaacccatggttggttatagaagtcggcacgtctttctttctcaatgttcctattcgcctcgccagcaaccagctttaaatttttgctctgggaagctatcagagcattgatgaactccactgtggactggctgtaacccatgaagaaggcccttcttctgcgatgcttatggatctttttgattgaagctaatatcttctagttctatgccttaatgttcttgttcttttttgtgattatttagtatatattatttttt

SEQ ID NO: 11780 - DNA, 436 bp, Zea mays
  Clone ID: LIB3150-075-P2-N2-F11
aagaactgcgacttccaggtggagcgctacgtgtacaagcgccgcactgatggtatctacattattaaccttggaaagacctgggacaagcttcagttggccgccagggtcatcgttgccattgagaatccgcaggacattatcgtgcagtctgctaggccctatggccagagggctgtcctcaagtttgcgcagtacactggtgcccatgccattgctggcaggcacactcctggtacattcaccaaccagttgcaaacctccttcagtgagccacgccttcttatcctgactgacccgaggactgatcatcagcccattaaggagtctgcgcttggaaacattcccaccatcgccttctgtgatactgattcccctatgcgctatgttgatatcggcattcccgccaataacaaggggaaacagagcattggtt

SEQ ID NO: 11781 - DNA, 364 bp, Zea mays
  Clone ID: LIB3150-075-P2-N2-F12
gccgctccacgtggtctcccccgccgagatcttcgccatctgcggcctcgtcgcgtcgctcatctacctcctcagcttcttcgggatcgccttcgtgcagtccgtcgtctccagcagcgacgacgacgaggacttcatcgtcgactcccgccacgcgcgggcgcgggcgccgccgacgcctgcgcagaccccgtgtgcgctgctggggagccccgccgccgcgacggagaaaatgccggaggaggacgaggagatcgtggccgcggttgtggcagggaagatcccgtcctacgtgctggagtctaggctgggagattgccgacgggccgccggcatcaggagggaggcgctgtgccggatcacc

SEQ ID NO: 11782 - DNA, 203 bp, Zea mays
  Clone ID: LIB3150-075-P2-N2-F2
ttgtcaacagcactacgtctatttactctagagggcagaacaacaggaatgagatcatgagggcggggcggggcccaataggcttacggcgattggcacagacgccgatgcagagccatatacgccagcctttagtggctgcccccaccggcgacgggtcatctaccggcgccggtgcatctgccacatccggtttacctggc

SEQ ID NO: 11783 - DNA, 229 bp, Zea mays
  Clone ID: LIB3150-075-P2-N2-F3
gttgctctccaaagccactcccaaacccccgttgccagaaccttctcgaagctccccgccgcctcctccactcgcaccgatggcgaaggaaccaatgcgcgtgctcgtcactggcgccgcaggacaaatgggatatgccctggttcccatgattgctaggggtgttatgcttggtgcagaccagcctgttattctgcacatgcttgacattccgccagcagctgaagcc

SEQ ID NO: 11784 - DNA, 262 bp, Zea mays
  Clone ID: LIB3150-075-P2-N2-F4
tagaaggaaaaatatccccaaaccctagctcccgatctcgatggcgaaccctcgcgtcttcttcgacatgaccgtcggcggcgccccggcgggccggatcgtgatggagctgtacgccaacgaggtgcccaagaccgcggagaacttccgcgcgctgtgcacgggcgagaagggcgttgggcaagtccggtatgccgcttcactacaagggcttcaccttccaccgtgtcattcctgtgttcatgtgccagggcggtgactt

SEQ ID NO: 11785 - DNA, 265 bp, Zea mays
  Clone ID: LIB3150-075-P2-N2-F5
aggggatagcatcgtcatcgcaaaatgcaggctctcctgctccccgcgcgggccgcgccgccgacgccggcgatgcttcggcagcgtgcggtttctgcctccgcgtgtgcgtcgcaggtctgccgccccctattcggtgccgttagttgcatttcttgtggtgttcatggaagcgtttttctgtaaccttatagttgtctatctgtttattattctcattattttcatttatttattatgtgttattttaatttttttttatatt

SEQ ID NO: 11786 - DNA, 396 bp, Zea mays
  Clone ID: LIB3150-075-P2-N2-F6
cttcactcttcactagccctctgctcctctgaaatggcggcggcgacttcctcttccacctacctcgccatcggccgcaaaaccctaaaccccgccccctccgtagccacagccgccacctccgtctccttccccgccacgcagcatccatgcctcgtcgccgcctccgcggaccgccgccgcgccgtggctgcgaaggtctcgtcgccgtcggtcatcggcaccgccatgccgtcgctcgacttcgagacctccgtcttcaagaaggaaaaggtgtccctggccggccatgaggagtatattgtgaggggtgggagggatctgttcccgctgttaccggaggccttcaagggaatcaaacagtacggtgtaatcggttggggctcgcagggtcct

SEQ ID NO: 11787 - DNA, 194 bp, Zea mays
  Clone ID: LIB3150-075-P2-N2-F7
ttttgcgacgacggcctactgtcactgcgcatgcttggtatgcatggcacagtgtatgcaaattatgcagtggataaggccgatctgttgcttgcatttggtgtgcggcttgatgatcgtgtgacagggaaaattgaggcttttgcaggcagagctaatattgagcacattgatattggtccttctgagattgg

SEQ ID NO: 11788 - DNA, 277 bp, Zea mays
  Clone ID: LIB3150-075-P2-N2-F8
tgtgtccacctgcgcttcgcctccttcctgtgaatggcggcgccccagcaatccgctcccctgtccgggtcggcgcccaagaggcatgaaggcgatggccacagtacgcactggcaccgcaggacacattggatatgatctgggtcccatgaatgaaggcggagtttgccaagcacgccgagtaccttaacaccctgaatgacaagagagaaaggcttgtgaaagctagtctgtatattacaatgaacagcataaaggttatttttcatgtccacag

SEQ ID NO: 11789 - DNA, 191 bp, Zea mays
  Clone ID: LIB3150-075-P2-N2-F9
tttcttgcaaacaatgtcctgggattggctttctgtattcaggggattgagatgctgtcattgtgatcatttaaaactggagccattctcttgtgtggactttttgtgtatgacatttactgggtgttttttattccattttatggtctttgttgttaattctttctatgctttcatttttctttcttttt

SEQ ID NO: 11790 - DNA, 227 bp, Zea mays
  Clone ID: LIB3150-075-P2-N2-G1
gggtccgggtccgggaggtcctccggggttcggtttcgtgggtgagcggaccaagatggcgccgtcggatgttgagtaccgttgcttcgccggcggcctcgcctgggccacggccgaccactcccttcacaacgccttcagcacctactgcgaggtcctcgagtccaagatcatcctcgatcgtgagacgcagaggtcccgcggcttcggcttcttcaccttctcca

SEQ ID NO: 11791 - DNA, 448 bp, Zea mays
  Clone ID: LIB3150-075-P2-N2-G10
aaaagacacaagagggggaagagagaggagcagcagagagaagaaggggaggcagtccagtgtccacgcacgtacgctccacagaagagagatggcgatgcggatggcggcggcggcggcagtggcgctggtggcggtgatgggcgtgctggcgccccgagcggcggcgcagacgccgaactgcgcggagaagctgatcccgtgctcgccgtacatgaacacgacggggacgccgccggatacctgctgcggcccgctcaaggacgccgtccagaacgacctcaagtgcctctgcgacctctacgcctcgccggagatcttcaaggccttcaacatcagcctcgaccaggccctcggcctctccaagcgttgcggccttagcgacaccaccgtcgtctgcatgggcctttctcctacgcagtctcctccaggttcgccgccatcaggc

SEQ ID NO: 11792 - DNA, 343 bp, Zea mays
  Clone ID: LIB3150-075-P2-N2-G11
tttggatggaagcagcgttggtttcgtggagaccctagagaatgatcttttggagcttctaggcaagggtattgatgcacagattgcatctggtggtggaaggatgtatgttaccatggaccgttatgagaatgactgggatgtggctaaacgtgtctgggatgctcaggtgctcggagaagcactctacaaattcaaaagtgcacttgaggctgagaaaacactgaaagcacagctcaaggttaatgatcaatttttgtccccatttgtgatagttgttgacatgcttaaaatgttgctggacctgtattagatgatgattcagatgttaatattatatttt

SEQ ID NO: 11793 - DNA, 237 bp, Zea mays
  Clone ID: LIB3150-075-P2-N2-G12
ttactcaggtctcaggtcactgtctttgtgactgaaaccaccaagccctctgcatctttaaccctccccgtcgtcacgctgacctaaccatgatttgcctcaaagccatctcatcccctctccaccttccgacccttcgccgccttacccccacctcctccctccgcgccgtcgccgccatgtcctcctcctcgtccgctgtggccgtcccgatcgagcactttgtgctcttcaagg

SEQ ID NO: 11794 - DNA, 217 bp, Zea mays
  Clone ID: LIB3150-075-P2-N2-G4
ttcgcaagccactccgaggccaagtctagggtttgggaatctgtaggaggggagaggggagcgcgctcagggtcagggaggcgaagatgatcgaggtggtgctgaacgaccggctggggaagaaggtgcggctgcagagcgacgaggtctaccccatctacgtccccgaccccctcatcacctcctcataccttacttacctctataagtactacac

SEQ ID NO: 11795 - DNA, 307 bp, Zea mays
  Clone ID: LIB3150-075-P2-N2-G5
ttaacaagtaatcatggggctgaaccaaaaaaagttcttggttcttatggagggccagaacgagcacactgcagctattattatggacatagaaggtgttgcgcatggtcaggcccatttgccatgtactcatggcggcgttcaacatggtcccgcacttagcggcctttctgatctcgactgcacgtagattgctgatcctgtgcttgccttacttgaacacgacggggacgctcgcggattcctgttgcggcccgctcaaggacgccgtacagaacgaccttaagtgcctttgtgacctttacgt

SEQ ID NO: 11796 - DNA, 130 bp, Zea mays
  Clone ID: LIB3150-075-P2-N2-G6
tttcggttgtagatgcagaggcgggccggcatgagaggaggggcggccggcggcgtgaggactgaggggcggccagtggcgtgaggattgaggggcgggcggctgcatatgagggttaggttatggttta

SEQ ID NO: 11797 - DNA, 424 bp, Zea mays
  Clone ID: LIB3150-075-P2-N2-G7
tgtcctctgttacttctccctccgccgccactcccctcccattcaccgccaccgccaattccataccgtgctccgccacctctgctgagagcgagaagagatggcaggcaagggtgatgggccggcaatcggcatcgatctcggcacgacgtactcttgcgtcggcgtctggcagcacgaccgtgtcgagatcatcgccaacgaccagggtaaccgcaccacaccctcgtacgtcgccttcaccgactccgagcgcctcatcggagatgcggccaagaaccaggtcgccatgaaccccatcaacaccgtctttgatgccaagcgtctcattggcaggaggtttagtgactcctctgtccagagtgatattaagctgtggccctttaaggtcattcctgggcccggtgagaagccaatgatagtc

SEQ ID NO: 11798 - DNA, 364 bp, Zea mays
  Clone ID: LIB3150-075-P2-N2-G8
gtagtggtggctactatggaggtagcggttgcggttcatattactaagatttggcattataggacgttggtgtaggccctgcattttgtggagctccttgatttaagccctacagatctggaaaagaaatcccaagcacccaagtgaggcaatgatttcaaataagacatttcaacgaagccagatcattaagttggttgaagcagtagtcccgaggatgttctggcttgcttatgtaatgtaaggatttgctttatctgatcaagagttatgaacataagagccagatattggtgtttaagttgttctactggtgttttaagtgtttcgacatgtttacttccagtgtttttatatcgttatt

SEQ ID NO: 11799 - DNA, 433 bp, Zea mays
  Clone ID: LIB3150-075-P2-N2-G9
gtaaattcgtgatgaaattctggaccaccagtacatttttcaggatctgaaactaacagaggcagaagaaaaggagttgagatacaagatgaagatatatgatcttgtcaaggaacatgttgagactcctgatgatgttggtgcgtacaaaatgcctgaagcttatgacatgggcgaaaatgtcaatcaagagaagagattcgctgtggccatgcaacggtacaaagatcctaaggccaatgataaaatgaacccttttgctgaacaggaagcatgggaagaacaccaaataggaaaatcgaaactgcaatttggatccaaagataagaagccgtcttcagatgagtatcagtatgtatttgaagatacgattgattttgttaaatcatcagtcatagaaggaacccagcctgaagatgatttatattaagat

SEQ ID NO: 11800 - DNA, 412 bp, Zea mays
  Clone ID: LIB3150-075-P2-N2-H10
gcactatgcaatgcagaaaagacaacagaggctattgatctactgcatatgatgcctgaaaaggggattactacagatgttggaatgtataatatgatattttctgctcttgggaagctgaagcaggtgtctttcatgagcagcctctatgatacgatgagagccaatggtgttgttcctgatgttttcacgtacaatattatgatttcaagttttggtagggttggcttagttgataaggcatctgaactttttgaggaaatggaggatggcagttgcaagcctgatgtcttcacctataatataatgataattgtcttgataaaaatggagatttctatgaagctcacatgtttttaaagatatgtatgataaaggatatgatcctgatgttttacttaaagtatattgt

SEQ ID NO: 11801 - DNA, 249 bp, Zea mays
  Clone ID: LIB3150-075-P2-N2-H11
tctgtactatgcaatgcacaaaatacaacagagactattgatctactggatagggggcctgaaaaggggattactacagatgttggaatgtataatatgatattttttgctcttgggaagctgaagcagttgtctttcatgagcagcctttatgatacgatgagagacaatgaggatgtttctgattttttcatatacatttttatgattctaagttttggtaggttttgtttttatttatgtgtaggg

SEQ ID NO: 11802 - DNA, 438 bp, Zea mays
  Clone ID: LIB3150-075-P2-N2-H12
cgaatctcagagcaagcatggtgagcacaattcttccagttcagattcgagccaatcaccttagtggtgattgccattacaaacgtgaattgttgcgtggtttcatgaagataaagggtcatgagcctgaatgtgtcaaaaggcgggctctgatgtctgtgaaaaacaacccatactgctcagagggtgctgcaaaagatgcaattgatgctgtatgggatatatgctacaatgacacacgcccatttgatagagccccatgaaatcttttcagaacctgggatacattagctattttgtgcacacctgcattgatgttctgatcccttcagaaacttgtacttcagcaacctttgtcagcaaagtacagaaattttctgctgtagccaaggcgtgctgcatggcgcgatgagtctgcacacactgtaacgatttaat

SEQ ID NO: 11803 - DNA, 446 bp, Zea mays
  Clone ID: LIB3150-075-P2-N2-H7
ttagctcaagaaggtgaagaagagcaatggcgcagatgcttgccatcaacgaggtataccgatcctttctcctctttctatggtatatgaataggtgtggatcgatagataattctcgcttgagttgccattgctgattacatgctgtcaaggttatgctctctttggccgtatcagcgatatattgtttttattacatgctttgttttgctattatttgaatagttttatttttattttcatttagttctatttttctttattagttattgatttttttatgttttttgatagattccttttttattatcgttattttattttatatttttttttttatattgtttattatctctatttattctatattaatttggtatatattatatttattttatatttttttctctatttatttaactattttttattttttttcatatatt

SEQ ID NO: 11804 - DNA, 403 bp, Zea mays
  Clone ID: LIB3150-075-P2-N2-H8
gtgatcacagacagggagactgggaggtcaagaggctttggctttgtgaactactccgacagtgatgctgccaaggaagctatttctgcaatggatggcaaggaaattgatgggcggcaggtacgtgtcaacatggctaatgagagacctgctgggaaccgtggtggtggtggctatggcggcggcggctatggaggtggtggctacggaggtggcggcggctacggaggtggtggctatggtggtggcagccaaagctatgatgcttgaggggggcaggatcctattaggtgcattatcaaccaagatatttgaaataatgaactttaagacttggtatgacggtttatgttaagcgttgttaggtttttcttattcgtgttatgcctgaattgttggaaac

SEQ ID NO: 11805 - DNA, 411 bp, Zea mays
  Clone ID: LIB3150-075-P2-N2-H9
ttgacgcgtgggcctcaagctgctggtgcaattcacactgattttgaaaggggtttcatatgcgctgaggtaatgaagtttgaagatctgaaagaactgggcagtgaatctgctgtaaaggctgctggaaaatacaagcaggaggggaaaacctatgtggtccaggacggggacatcatctttttcaaattcaacgtgtctggtggcgggaagaagtgaagaatgtatgaagatggtagcatcacagtgttttacgtcttaccccgaatttctcattcaacagtgtttacaccttgccccgtattttcacatttttgaggttgtttgctagtagctctaggtaccggtatttataactagtacaacaaggcttcagactgtttaaggatttgttttaataacatgcacaat

SEQ ID NO: 11806 - DNA, 264 bp, Zea mays
  unsure at all n locations
  Clone ID: LIB3150-076-P1-N1-A1
tttgagcctgagatccttgttgatggccaggatgacattgatcgctgcgcgtgacccactganaccatgcttgctgccttctacaaggcgctcaacgagcaccatgtactactggagggtaccctactgaagcccaacaaggtgactacaggctccgactccaagaaggtgactactgaggtgattgctgagtacaccgtgcgtacccttcagaggacacttcctgctgatgatcctgccgaagtatttctctctgcaacacag

SEQ ID NO: 11807 - DNA, 415 bp, Zea mays
  Clone ID: LIB3150-076-P1-N1-A10
ctctctctaccgtccgagaccccaagcaccaccgcggcggcggcgaccatggctgtcggaaagaacaagaggatctccaagggaaagaagggcggcaagaaaaagaccgtcgaccctttctctaagaaggattggtatgacatcaaggcaccgtcggtgttcagtgtgcgcaacatcgggaagactctcgtatccaggacacagggtaccaggattgcttctgagggtctgaagcacagagtctttgaggtttgcctagctgatcttcagggcgacgaggatcaagcttacaggaaaatcaagctccgtgctgaagatgtgcagggcaggaatgtgctcacaaacttttggggtatgaattttaccactgacaaactcagatccctagtgaagaagtggcagacattaatcgaag

SEQ ID NO: 11808 - DNA, 371 bp, Zea mays
  Clone ID: LIB3150-076-P1-N1-A12
gcgcgagcaaccaacgccgccccgctgtgtccgccggtccgcccccgtgcgtcccctcccccgaatcgcgtcgtcccgtctcctgctgccgcggaaccctcgccatggcggaggcgcccgagaccgccgaccccacccagccgcctcccgcgccggcggcttcgtccccgcctcccaagtcggagatcccgccgcggtacgacctgaacgccaagtgggacgcgtgcctcgacctcttcatccgccggggtcgctactcctacctcggcggggccttcgcgggcctccttctctttcgtaaccctactacttggtgagcaataagtgcccttggagctggtgaggggataggggctgcttacacttaatgc

SEQ ID NO: 11809 - DNA, 398 bp, Zea mays
  Clone ID: LIB3150-076-P1-N1-A2
caagcgtgtgatcgagaggttcgagaaggaggctgctgaaatgaacaagcggtccttcaagtacacgtgggtgctcgacaagctcaaggctgagcgtgagaaaggtatcaccattgatatcgctctgcggaagtttgagaccaccaagtactactgcacggtcattgatgcccctggacaccgggacttcatcaagaacatgatcactggtacctgccaagctgactgtgctgtgcttatcattgacttcaccactggtggttttgacagctgtatctccaacggtggccataccccctaacattctcttctttggttaacccttgggatgaagctattcatttgctgctggaacaagatgtattcaccctcttgcaatttcttcatggttcgttttt

SEQ ID NO: 11810 - DNA, 392 bp, Zea mays
  Clone ID: LIB3150-076-P1-N1-A3
attctttactgtagagtaaaggaatgcaaggatactataggcttcaacctggccgcaatggatcatataaaagaattgttggcgttgagatcagatgcacctttccgtgatgccaaggcgaaactcatggaaatcaagaaggagcagtcgaagcggtcaagtagtaggcttgacggagatgaaaaaaggaaaaagaagagaaagaaagcgtccgctgaaagctgagccaacaaacaaaaacaaaagaatgttgtattggtgttcttaccttctgcaactactacatggacgtgctcgtttccttggttcacgagcacgcagaatttttgttagatgggtgtaatcggaaagtgcgtggacataaagatttctagaggttcgtcttgcgttta

SEQ ID NO: 11811 - DNA, 420 bp, Zea mays
  Clone ID: LIB3150-076-P1-N1-A4
gtttttgttgtttacctggcgccaccacccgagtgagtgacccatcccctgcatgggactctccactcccaccgtcccacgaccacgaataccgacggccccgggcctttcctcggctcctcctcctcctcctcctttcatcgccaccatcggcgtcggtgcgccttgcatgaggtgcgagaggtcggtcgtaaagcacagccatggcggcggtcaaggtggacaagggcaccaacgagctgctgctgggccccgactggaccctcaacatcgatatctgcgacgccggcaactccgatcacgggcaaggaaaggaggtgattaaagctttgaaaaaacgtattcaacacaagaatgcaaatgttcagtttcttgctttgacgctattagagactctaataaagaactgtggggatcatg

SEQ ID NO: 11812 - DNA, 305 bp, Zea mays
  Clone ID: LIB3150-076-P1-N1-A5
cgcattcccatggaggccaccgcggtgccgcgggctctgtccctccttgggccatgtctgtcgacggcgccgctgctgccttggatgcgtatgaacttcttgcgcgtagccgttggaggaggtgtcaggcggcaggggggcgtagtctgggcgaagaagacgagaaggggccgggacgacgtggcggaggagcgggtggacacgcacagctttgcgcgaaaggcgggcgagtctgccgagctgttccccgaggccgtcctgcttagaaagggaggccagccgagtgggccgctcaaggcctggtg

SEQ ID NO: 11813 - DNA, 223 bp, Zea mays
  Clone ID: LIB3150-076-P1-N1-A6
ttcgtcccatcttcctctgaagaagccacaggggggcgctactttctctatggcgggccgtatcttcggcgtctcgctgcgagttgccatcatatccgtccccctcgccaccaagttcaacctgatgtttggcgtttgagagcgatttgctgcatcttatgaggaactgcatttccccgctcctgtgactgtctcatcgaccgtctgggttacctagcaacac

SEQ ID NO: 11814 - DNA, 423 bp, Zea mays
  Clone ID: LIB3150-076-P1-N1-A7
tccgcacataccctccctacctcggcgtcgccgtcgcatctgccatgggggcgtacaagtacgtctcggagttatggagaaggaagcaatccgacgtgatgcggttcgttcaacgcgtgcgctgttgggagtacaggcagcagccggccatcgtccgcctcacaaggcccacccgccccgacaaggcccgccgcctcggcttcaaggccaagcaggggtatgttgtttaccgcgtccgtgtgaggcgtggtggcaggaagaggcctgtgccgaaaggtattgtctatggcaagcccaagcaccagggtatcacccagctcaagttccagaggaacaagagatctgttgctgaggaacgggctggacgaaagcttggtggactcatggttctcaactcctactgggtgaatgaggatagcacct

SEQ ID NO: 11815 - DNA, 397 bp, Zea mays
  Clone ID: LIB3150-076-P1-N1-A8
gcggagtcgtcagtcgtgcgtgccggtgcccgtcccgttctgccccgactcccctcccccgactccctcactcttcctctttccgttccattcaagatccctgcagccgtccgtccatccatccatccatccatccgttaagaggagaggggaagccggccggccggccggccggtggagcggagatgagggggcagacagagacaggccggtggcgaggaggcgacggcgttgcggcgtggtgggtggccgtggtggccctgcagctgggccattcactgagccgcgcgcgggcggggctgctggagtccaacccgggcctggcctacaacttctaccagagcagctgccccagcgcggagtccatcgtccgcagcgtcacctgggcgcaagtcgc

SEQ ID NO: 11816 - DNA, 329 bp, Zea mays
  unsure at all n locations
  Clone ID: LIB3150-076-P1-N1-B1
tggagagaaagcaaaccctagtccccgtcgtcgcgcggcggcaacccttcggatctgcggngagcgccacagcggttagatcgaatccacccagggggagattgaagcccctttgtctgggaatttcgcggggaagcaagcggttggtgatttggtggtgaaggaggctatggggtcgtcgtcgaatgtggtgcggccggaggaggtgctggagtcgcttaaaaacgactgcagcatcgacgcgctccgtatgaagatcatctcccaactcaatgccatcgaagatatttagaataacacttttttgatggtggagcaaatcaaggtac

SEQ ID NO: 11817 - DNA, 388 bp, Zea mays
  Clone ID: LIB3150-076-P1-N1-B2
gccggtcgactcgacgcgatgtgaccatgacccggcagtcagcagtacagggtggggatgatggtggatcctccgaatggaatcgggaaccaaggaaagcattactactcaatgtggcagaccttatttgagatagacaccaaatatgtaccgatcaagcccattggtcgaggagcttatgggatagtttgttcatccattaatcgtgaaacaaatgagaaagtagcaataaagaagatacacaacgttttcgacaaccgtgtggatgcactacggaccttgcgggagctgaaactccttcgccatcttcggcatgagaatgtcattgctttgaaggatataatgatgccaatacacaggagaagcttttaagatgtgtacttggttt

SEQ ID NO: 11818 - DNA, 423 bp, Zea mays
  Clone ID: LIB3150-076-P1-N1-B3
agagaaggaaaaatatccccaaaccctaggtcccgatctcgatggcgaacggtcgcgtcttcttcgacatgaccgtcggcggcgccccggcgggccggatcgtgatggagctggacgccaacgaggtgcccaagaccgcggagaacttccgcgcgctgtgcacgggcgagaagggcgtgggcaagtccgggaagccgctccactacaagggctccaccttccaccgcgtcatccccgagttcatgtgccagggcggcgacttcacccgcggcaacggcaccggcggcgagtccatctacggcgagaagttccccgacgagaagttcgtgcgcaagcacacctgccccggtgtgctctccatggccaacgccgggcccaacaccaacggctcccagttcttcatctgcaccgtcgcgacccctt

SEQ ID NO: 11819 - DNA, 297 bp, Zea mays
  Clone ID: LIB3150-076-P1-N1-B4
gccggtttgaagacaaaacacttggggtttcacaaagcactgtgtgttctgatggggtggaattggcatgttgctccagacacatctaaatcacatcactccattccatctgaggaagtaaatgccatgaggggagacctcatgctgtggcctccagttgttgtgatacataacagctcgactggtcatgaggcaaaggatactgatgcaaagattgtgtccatagaagaaatcgaaggtgtattggcagatattggagtagcgcatgagaaggctagggttagccatggaagatca

SEQ ID NO: 11820 - DNA, 255 bp, Zea mays
  Clone ID: LIB3150-076-P1-N1-B5
ggcgtcggtggtgcgggtgccgagaaggggagcggcgatctctctctcggcgtcggtggtgcgggtgccctccctcctcgagcgagatctgtctggtcacagatctatctgacaaaatggtgaagatctgctgcatcggtgctggctatgtcggtggcccaaccatggccgtcattgccctcaagtgcccagacattgaggtcggcgtcggtgacatcttcaagccccgcattgaggcctggaacagtgacaccc

SEQ ID NO: 11821 - DNA, 330 bp, Zea mays
  Clone ID: LIB3150-076-P1-N1-B6
tggcgaggcaaaagcattgcgaccacagacagcgcgcgcttcaaggcctttgttttttgagataacaaggaggagaggaggagatggcggtcacgatcacgtgggtgaaggcgaggcagatcttcgacagccgcggcaaccccaccgtcgaggtggacgtgggccttagcgacggcagctacgcgaggggggccgtacccagcggcgcatccactggaatatatgaggccttggagttgagggatggaggatctgattatcttggcaagggtgttcttaaggcttgcagcaatgtaaataacattattggaccagcaattggtggaaagg

SEQ ID NO: 11822 - DNA, 250 bp, Zea mays
  Clone ID: LIB3150-076-P1-N1-B7
gggaggtcatccccaaacagttcacagaccgcgttgggaccttgattagagaattctgagctcacaccgactctatggtcaagatgctagccgacctctcatactctaaccgtgtcacttccgtcatgtggggaagctactctgcaagtggttcctccaaggcttggctggccgacaagatgcatcacatttgcaccgcctgagaaactagcttagaacggctacactgctcttctataccgggcaggct

SEQ ID NO: 11823 - DNA, 159 bp, Zea mays
  Clone ID: LIB3150-076-P1-N1-B8
tcagcaccgactacatgacctacatgttgaagtacgacactgtgcacggagagtggaagcaccatgaagtcaaggtgaaggactccaaaacccttctctttggtgagaaggaggttgctgtgtttggctgcaagaaccctgatgagatcccgtggggtt

SEQ ID NO: 11824 - DNA, 253 bp, Zea mays
  Clone ID: LIB3150-076-P1-N1-C1
caggccacggacaacggcggccgaggcttccgtgcggctcttggcagattgaacgcccactcaagctgcgccggctgctaggtcaacgcggcttagatagaccctgctttcctcccgggcaaatccaagttggccaaatgccgacaccagagaagccagagctgaccgtagtgctcctcgagtgcggcgagagtggccggtacctactgcggcacatagtgtcctgacagccactacacgccaaccagggcgt

SEQ ID NO: 11825 - DNA, 349 bp, Zea mays
  Clone ID: LIB3150-076-P1-N1-C2
tcgggccgtcactccctgacatcgagaccgggtgcccgaccccggtccggcgaggcctctgcacccctttctttgcgctgccagccccaatctctcgcatccctgtcaaccatggcggcgtcagcaggcggaggcgcggtgcgcgcgctgtcccagaaggagcaggacatacagatgatgctcgcggccgacgtccacctcggcaccaagaactgcgatttccagatggagcggtatgtctttaagcgtcgcaccgacggcatctacatgatcaacctgggcaagacatgggataagctccagctcgcggcgagggttattgttgccattgagaacccacaagacatca

SEQ ID NO: 11826 - DNA, 386 bp, Zea mays
  Clone ID: LIB3150-076-P1-N1-C3
gtcgtgcgccaaggcgcgaaccctagccgagatcagatcggaggcgagcgccaccaccggccggaggaagaggacgacacgatgctgcgggttgcggggagaaggctctcgtcttccctctcctggcgccccgccgcggcggtagccaggggtcccctcgccggcgctggcgtccccgaccgggacgacgactcggctcgcggacggagccagccgcggttctccatcgactcccccttctttgtcgcttccaggggtttctcttctactgaaacagttgtcccaaggaaccaagatgcgggcctagctgacctcccagcaactgtggctgctgtgaagaatcctaaccctaaggtggtttatgatgagtacaaccatgaaagata

SEQ ID NO: 11827 - DNA, 399 bp, Zea mays
  Clone ID: LIB3150-076-P1-N1-C4
gcgagcgccgccctttttttttttttttgataatcatgtgcaagatacaaatattgatcatcaccatttatgaaaaccagccattcaccatagatgtagaacattctttttgcaatatgcaaaggcgcacggcatcatcactgtcgttggcctaattattgcaataaagcataagaatacgtttatcaaggaaaagtgaaacgagaagggttgaaactgagcctccggaagaaaagaagccttcatgtgagaggaacgcaaatggggaaaaagggaaaagtccacatagtctcttcacctatcctttaagggctggtgcaccagatataatctcagtaagctctgtggtgatggatgcttggcgtgtcctgttgtaaagtagcgtgagacgatcaagca

SEQ ID NO: 11828 - DNA, 261 bp, Zea mays
  Clone ID: LIB3150-076-P1-N1-C5
ttctagctccgccctttctttcttttttcgagaagaatgttctagatacaaagatggatcatcaccatttatgaaaaccagccattcaccattgatgtataacattttttttgcattatgcaaatgcgcacgtcattattactgtcgttggcctaattattgcaataaagcattagaatacgtttatcaaggaaaagtgaaacgagaatggttgaatctgttcctccggaagaaaagaatcctttatgtgtgaggaactca

SEQ ID NO: 11829 - DNA, 401 bp, Zea mays
  Clone ID: LIB3150-076-P1-N1-C8
cgctgctcatctcacatccctcgagaagacgcctgctcctcgccgatcgatacgatggccgtcttctccgacctccacaccgccgacggcctcaagtccctcgaggctcacctcgccggcaaaacctatgtgtctggtgactccattactaaggatgacattaaggtcttcgccgcggtgccgtcgaagcctggcgctgagtttcctaatgccgcccgctggtacgagaccgtctctgcggctgtagcctcaagattccctggtaaggctgttggtgtaaatctgcctgcgggatcagctcctgcggcagctgctcctgcggatgaggctgaggatgatgatgaccttgatctttttggtgatgaaactgaggaggacaagaaggcagctgatgagcgtgc

SEQ ID NO: 11830 - DNA, 290 bp, Zea mays
  Clone ID: LIB3150-076-P1-N1-D1
gatggattagccagctgctgctcagtagaaacattgctctgctggctaatctatcattgaatgatggcgtcgtctccagctgaacgttaatgtttctgatgtttcggaagtgctgccagtttttgcttgaatactaccctatctagagtgtaatgactttgtttacttggtttgttggagttttagctgctcctattactaggggttggttttgtcttgactttgttattttggttgcatggataatcgtttcgtttggatcaaataaaaaaaaaataataataaatagg

SEQ ID NO: 11831 - DNA, 316 bp, Zea mays
  Clone ID: LIB3150-076-P1-N1-D2
atcggctcgcccgcgccgaccaccgcgccgcttcccctcgccgagatcgcgtgaaaaggcaagcgaggccagcccgatccccctccccgcccccctcaagaaccaaaaaagggtgtcatttcgtcctatgatcgcagctcgagctcggtcgctctcgctcacctcgctccctactcgcctgctttccacttcctccgcgctcccgatttcctctccgattccttcgccgactcgtttcttcttggcaattcgttgcgcgggccatcgccccgacggcacctgggtacatcagctacaggacgggacaggtccctct

SEQ ID NO: 11832 - DNA, 385 bp, Zea mays
  Clone ID: LIB3150-076-P1-N1-D3
gcggcgcgggcggacaaggagcaggcggaggaggagttgtgccaagccacaatgggtatctcgcgtgactcgatgcacaagcgccgagccaccggtggaaagcagaaggcctggaggaagaagcgaaagtatgagcttggtcgccagccagccaacaccaagttgtcaagcaataagacagtgaggagggtccgtgttcgtggaggtaatgtgaaatggagggctcttcgccttgatactggtaactactcatggggaagtgaagctgttacccgcaagacccgtatcctcgacgtggtctacaatgcatcaaacaatgagcttgtgaggacacaaacccttgtgaagagtgccattgtgcaagttgatgcttgcccattcaagc

SEQ ID NO: 11833 - DNA, 272 bp, Zea mays
  Clone ID: LIB3150-076-P1-N1-D4
gtggatgtcgtaccggacgttcactacagtgactcctgcacacacacgtccggagattacggcccaagtgcaaaccctatccatgcggtggtagatatggccgccacagagcgcgacgcattctctgacgaggcggcgcccaggttgaccctcgacgagttcatggaggacatcatggccgtgatgctggaagcggactaggcgctaaacgatgaccctggcgatgagaagacctaccccggcaagtcacatatgcgccacagcgatcattg

SEQ ID NO: 11834 - DNA, 424 bp, Zea mays
  Clone ID: LIB3150-076-P1-N1-D5
ttgtattgtatacctctgtcatctctccagcgacggtcttttacgacggtgacgcgaatgcgaaccggagtagtggaagcagatgcggcattcatggccgtgatggagaagctcaagatctttgtcgtttaggagcccgttgtctagtgcttcttccttatatgtggattttagttttcctcttccaacataacctccttatctatgctatttttattctttttctttgtattattgttttttccaacatattattaatttatcgtataattcatcatttttctctattttattttatttttttttttattaaattacttttatttattattatttttcatttatgtttttctctttattttgtttttttttttcattttatattttttttatttttctttatcttttatcttttttgtttttt

SEQ ID NO: 11835 - DNA, 409 bp, Zea mays
  Clone ID: LIB3150-076-P1-N1-D6
ccgtcatcgatctcgtttcaaatccatccatcctcgtttcctccgtcccgcagcatctcaaccccatggccaagatcaagatcgggatcaatgggttcggcaggatcggaaggctggtggccagggtggccctgcagagtgacgatgtcgagctcgtcgccgtgaacgaccccttcatcagcaccgactacatgacctacatgttcaagtacgacactgtgcacggacagtggaagcaccatgaagtcaaggtgaaggactccaaaacccttctctttggtgagaaggaggttgctgggtttggctgcaggaaccctgaggagatccccggggggttgggttggtgctgaatatgttggtgagtctactggggttttcactgaccaggagaaagctggagctcacttga

SEQ ID NO: 11836 - DNA, 416 bp, Zea mays
  unsure at all n locations
  Clone ID: LIB3150-076-P1-N1-D9
gtcgggtttgcttgcttacttcctttagtgaacatggaaataaggacaacagtgaagctacattcatcattcctgacgtgaagagtttgtcaacctcccgtgcttgcaaccatgatattatctttattagctgtgggcaagttggacaaagtaatggtgaagataactgctctgggaaccatgtggaagattcttctctccaaatgcttgaagggaaatgctcctggggtaaaataccaactaatttacttgcttcatctttggagagttgtgtcaatttaagtttgggacatattgtggagttggcatctaaagttacaatgagaccaagcttcttagagccaaaatttctggagcaagacagttgcttgacattntgctctcataagggtgatgctgtgggttcatataaacta

SEQ ID NO: 11837 - DNA, 385 bp, Zea mays
  Clone ID: LIB3150-076-P1-N1-E1
atcccgtcgcatcccatcccactaccacccatctcgtcgtccgccgattcgatccggttcttccaacccaggtgatggcgacgaagaggagcgtgggcaccctcggcgaggcggatctgaaggggaagaaggtgttcgtgcgcgccgacctcaacgtcccgctcgacgatgcccagaagatcaccgacgacacccgcatccgcgcctccgtccccaccatcaagttcctcctcgagaagggcgccaaggtcatcctcgccagccacctgggtcgtccaaaaggtgtcaccccaaagtacagcttgaagcctcttgttccacgcttgtctgagctccttggagttgaagtcgggatgggccatggttggattggggaaaaaagtga

SEQ ID NO: 11838 - DNA, 293 bp, Zea mays
  Clone ID: LIB3150-076-P1-N1-E2
tttctaggaacggttcaataagcgcaccgcgagaactaggaaacatggcagatctgctgagcctactcttagccctttcctttgcagcacctatgtttgccatacgctgtcatgctgatggagactgtgagaactgacctacaaagccggataagtgactgcaagacatacatgatgttcccagctaatgcaaaggtgcctccttcggatgcttgctgtggcgtcatcaagaaggcaaacgtttcttgcttgtgctccaaggacaccaaagaaactgataaggccgcgtgcat

SEQ ID NO: 11839 - DNA, 401 bp, Zea mays
  Clone ID: LIB3150-076-P1-N1-E3
tgtaaaacgaccacccctcacgcggaagcggagactggaaatcgggagggagaccggagacgagaccgccggagatggagccgagatctgcaatctacagatccggcgccttccttctcctcgccgccatccttgcggaggtcgtcatccctgcatccgccatcggagacaagtgcgccgcctgcaaggccgttgctgcggagctagagattggaatttcgagtgagaagccgagaaatcacttggacttgcgcaaccgcttaaattctaaaggccagagggaggggaaggtcattgattatagggtcagtgagcttcgggttgtggaacttctggatggcctatgcgataagatgcaagattataccttaaagaagttggaatcaggcgaaaagggatgg

SEQ ID NO: 11840 - DNA, 337 bp, Zea mays
  Clone ID: LIB3150-076-P1-N1-E4
tttatcaccactacctatatctactacagagggcgtcataacccgctctgagacacgacgctgtcgctcagtaccaaagcctctaccgactctcattgcgagcgccacctgcacacatacatacggagttttgcgcttcgatccacccacgtctgcccattttccaccatcgtggcatcggccatctactgatcacctgacacgttattggcatgtcccaccgacagaactccttacctcggcatatcacctggcaaaccacgaccatgtgcccacaatctgtttcatccaaaaaacgccaccattacgcttccgatagacacccatgaacattctc

SEQ ID NO: 11841 - DNA, 379 bp, Zea mays
  Clone ID: LIB3150-076-P1-N1-E6
gccgctcgcgcatcctattgccctcgcgccaccgtcgccgccgccgccggtgcagcgagccaccgccccgccgtcgcttgaggtagacaccaatccaccgccatggggcgtatgcacagccgcgggaagggtatctcttcatcggcgctgccgtacaagaggactcctccgatctggctcaagacagctaccaccgaggtggaggagatgattaccaaggctgcgaagaagggccagatgccgtcgcagattggtgttctgctccgtgaccagcacggcatcccgcttgtcaagagcgtgactggtagcaagatcctccgcatcctcaaagcccatgggttggcgccggagatcccggaggatctctacttcctcatta

SEQ ID NO: 11842 - DNA, 385 bp, Zea mays
  Clone ID: LIB3150-076-P1-N1-F1
tgcaagttcaatctcacctccaaccatgggtaaagagaagtcccacatcaacattgtggttattggccatgtcgactctggcaagtcgaccaccacaggacaccttatctacaagcttggaggcattgacaagcgtgtgatcgagaggttcgagaaagaggctgctgaaatgaacaagcggtccttcaagtacgcgtgggtgctcgacaagctcaaggctgagcgtgagagaagtatcaccattgatatcgctctgtggaagtttgagaccaccaagtactactgcacggtcattgatgcccctggacaccgggactttatcaagaacatgatcactggtacctcccaagctgactgtgctgtccttattattgactccaccact

SEQ ID NO: 11843 - DNA, 53 bp, Zea mays
  Clone ID: LIB3150-076-P1-N1-F12
tctcccactcgtccgaaagataaagtccaccatcctttcctactcatttgggg

SEQ ID NO: 11844 - DNA, 111 bp, Zea mays
  unsure at all n locations
  Clone ID: LIB3150-076-P1-N1-F2
cctagctttcgctccatggccgacggcgatccggagccggcgccagcgccggcaccggcactggctaacgagaagctccatgtgcgggcgggggnctacgttgattatact

SEQ ID NO: 11845 - DNA, 307 bp, Zea mays
  Clone ID: LIB3150-076-P1-N1-F3
gttaaaggatgggtacaggagctcatctgggcaggcagtgaactagtgcattgactcaggttcaagacactttcttcttatacacggggctgttgcgacataagggaagatcatgcttgactggaacccgaatggcgacaggggaccgatcactgctgtttccaacctagtgaccatgcacaccccaagagaggatgacgagccgctcacttctgtcttagcacctgctgaggttgaaggaacaaactgcagtccttgaatgaggaggtgatcatggactacataggcttgtatggtacgatcatga

SEQ ID NO: 11846 - DNA, 333 bp, Zea mays
  Clone ID: LIB3150-076-P1-N1-F4
gcagcgccgccgctccatcttccgctgatccgctcgctcccgcctctcgccacgcaggcggcggcgctcaagcccgtgatttcagcgacggcgtcagcggcttcccctcccgtctcttcccagtcgcctcgcgccctcgcctccggtcctccgcacaccggccggtgaccctgcatccaccatgactggtgtcagcactggattgttgacgggcttgaggagggtcatggaacagcaaaggatttcaaccgctttctgcagacaatcacgagtttcgagctctactgtttctttctctgacctcgatgagaagggtgacatggaatatgatga

SEQ ID NO: 11847 - DNA, 319 bp, Zea mays
  Clone ID: LIB3150-076-P1-N1-F6
tgaaagaaccaccaccatcaggccaacaatcgcaagactctttcgagccagaggcatatcgggtgaaatggaacaaatcaccaccaccacaccaacaatcgcaagactccttcgagccagaggcatatcgggtgaaatggaacaaatcaccaccaccactccagcaatcccaagactccttcgagccagaggcatatcgggggaaatggaacaaattaccaccaccacaccaacaatcgcaagactccttcgagccggaagcatatcgggtgaaatggaacaaattaccaccaccactccaacaatcccaagacttctt

SEQ ID NO: 11848 - DNA, 294 bp, Zea mays
  Clone ID: LIB3150-076-P1-N1-G2
gcagcttctgcttgctctggggggaaggagagagagagagagcgagagagagatctagtagagaggctagtaggtggtcctcgaacgaagatgttggcggtgttcagcgggcaggtggtggaggtgccggcggagctggtggcggcgggcagccggacgccgtcgcccaagacgaaggcgtcgcagctggtggggcgctttctggccgcgttcgagccggtcgtgttcgtgcagcttggtgaccacggtcaccttggctacttccacaccaaccaggcgcttctttcgcccaag

SEQ ID NO: 11849 - DNA, 302 bp, Zea mays
  Clone ID: LIB3150-076-P1-N1-G3
tatttttatcccatttgaaatcaacccatggggggtttcttcgtctagcagggtctgaccctcatggccaagatcaagatcgggatcaatgggttcggcaggatcggaaagctggtggccagggtggccctgcatagcgactacgttgatcttgacgtcgtgaacgacccctttatcagcaccgatttcatgacctacatgttcaaattttacactgtgcacggacagtggaagcaccattaggtttaagtgaaagatttttaaaacctcttttttttgtgtaaaaagtagattcttggttt

SEQ ID NO: 11850 - DNA, 262 bp, Zea mays
  Clone ID: LIB3150-076-P1-N1-G4
ctttcattcgacgacaacgcctagctctctgctgccactcatcatggggagaaggcctgcgagatgctatcgccagatcaagaacaagccataccccaagtccaggtactgccgtggtgtccctgaccccaagatcaggatctacgatgttggcatgaagagaaagggtgttgatgagttcccctactgtgtgcaccttgtctcttgggagaaagagaatgtctcccgagaggctcttagaagctgccgtattggctgcaac

SEQ ID NO: 11851 - DNA, 363 bp, Zea mays
  Clone ID: LIB3150-076-P1-N1-G5
gggggggggaaagctgttcctttatagttgtcccacgcgttctttctcccgcagcgaaagagggtgctcgcgcggggctacgcacacacagcagagggtggtcttcgatactcgcggtggtctgcggagctggcgcttgccgcaggcacggccatcgccgtggcgtccatggcggagcaggcgacatgaacgcggacaagacggagtgcgcggaccatctgttgggcctggcgccgtgcctgctgtacttgctggggcaggcccgcgcgccgccacccgactgttgttgtgggctgcgccaggtgctgaggaagagccccaagagcctgtgcctgctcatcaaggacaaggtctacctcaacc

SEQ ID NO: 11852 - DNA, 203 bp, Zea mays
  Clone ID: LIB3150-076-P1-N1-H1
cacaagtgcaacatggcttgaaaggccgctggtggtactcgtggcgggggcaggatgacttgcaaccttaaaacttcttgcgccaaggcaacttgtgtggcaaattccagtctttgtgggaaggaaccccttcttcctggggccgagaaccttccggggttatattccggggggaacttttcaacaaggggccaaatttttgc

SEQ ID NO: 11853 - DNA, 367 bp, Zea mays
  unsure at all n locations
  Clone ID: LIB3150-076-P1-N1-H10
tccttgtttaccattcctccccaaaacacatcctgcgatcctcgaagcctccgccgagcatcgatcatgtcggcctactgcggcaagtacgcggatgagctcatcaagaatgctgcctacatcggcacccctggcaagggtatccttgctgctgatgagtcaactggcaccattggcaagcccctttccagcatcaatgtcgagaacgtggaggagaaccggcggctctccgtgagctcctgttctgctgccctggtgccctncagtacatcagcggtgtgatccttttcgaggagaccctctaccagaagacccaaggttggcaagccttttgtcgatgtcctcaaggagggaggcgtcctccctg

SEQ ID NO: 11854 - DNA, 360 bp, Zea mays
  Clone ID: LIB3150-076-P1-N1-H2
tacatgtgcaacatggctggaaagcctgggggaggttctcatgtcgtggagagcatgactgacaacctcagacctactcgcgcagaggcaactgatgcggcaaatgcagttcttgatgggagtgacgccattctccttggtgctgagactctccgtggtttatatccggaggagactatttcaacagtgggcagaatttgcgctgaggcatagaaggtatttaaccaagatttatactacaagcggactgtgaaggatgtgggagaacctatgacccacttggagtctattgcttcttcaacagtgcgagctgcaataaaagttaaagcattatgcatcatttgcttcacctcttttgga

SEQ ID NO: 11855 - DNA, 423 bp, Zea mays
  Clone ID: LIB3150-076-P1-N1-H5
tatcacaccatccccactctcttctgtccggccggcgagcggacactgccctgtcctcttgacccgatcccgtccccgcccgcccgccccgccgccgcgcgcgctggtccggacgctcgggcgctggtgatccggttgatgcagcagcggggcctcgcccacaactgccgctcccgcggcttctcccgctcccgccgcgcagtcgagggcgcctgaaacgcacccgccccacgcacgcagggcaaccgaaaacccctcgatccggctctcctcgcgctgtagcttttataacgccgtagacgacaacgaaagagaacggaaagaaataaaacccaccacacctaccgtcgtccgtagaggaaggaaggactcgagatggacaccgtcagcgtccccgtggtggccgttgcgaatgggatcggg

SEQ ID NO: 11856 - DNA, 353 bp, Zea mays
  Clone ID: LIB3150-076-P2-N2-A1
gcccaccaattgatcatccccaagaaagaactcgcaatgaggatctgcaagtaccctcttcaaggagggcgtgctgtatgccaagaaggactacaacctggcgaagcacccacagattgatgtgcccaacctccaggtgatcaagctcatgcagagcttcaagtccaaggagtatgtcagagagaccttctcctggcagtactactactggtacctcaccaacgatggcattgagcacctacgcaactacctgaacctcccgtctgagattgtgcctgccacgctcaagaagtctgccaggccactgggccgtccatttggctctggccctccggtgactcgcaaggggccct

SEQ ID NO: 11857 - DNA, 236 bp, Zea mays
  unsure at all n locations
  Clone ID: LIB3150-076-P2-N2-A10
tgtgtccgcggatcggacggctgccaccgggggccgcatgttaacctgccggcgtaaatccacctcnaccatcctcgctgtccaacccttgctcgctgcgccgccgtctccgacatcgttccttcgtccccacgagcaacctataatccgccgtcgttgagatgactctttatcaggatcttctatctgtcgactagctactgtcagattcatacacctacaaggagctcgagaac

SEQ ID NO: 11858 - DNA, 321 bp, Zea mays
  unsure at all n locations
  Clone ID: LIB3150-076-P2-N2-A11
ttaggttcgtgaggcaatcgagaacatctggattatgatgggattcactgggaggccaaccaacaatttcgtcgaaagcagcttctggaatttcgatgcactgtttcagcctcaacagcatcctgctcgggattcacatgatacatttttcctgaaagctccagcaactacaaaacagttgcctgacgactatcttgagaaagtaaagcaagttcatcagtctggtggttatggctccaaaggatatggttatgattggaaacggtatgaagcggagaagagtcttgctcgnactcatacaactgctgtttccacgagaat

SEQ ID NO: 11859 - DNA, 151 bp, Zea mays
  unsure at all n locations
  Clone ID: LIB3150-076-P2-N2-A12
tgttgttttttttttcaatttanaacatggtgagcatttataaaaacatgggggggcctacaaacatttttttttaaattaactttttattatttttatacactttattaaccttatctactttcttctcataatacacattatatttttt

SEQ ID NO: 11860 - DNA, 189 bp, Zea mays
  Clone ID: LIB3150-076-P2-N2-A3
cgatccactcgagcgccaagcctagggaaggtgaggagcgatggcgcgcggcgtggtgtcggcgaagggcggcgcggtcgcgggcaagaagaaggggtcggtttccttcacgatcgactgcaccaagccagtggaggacaagatcatggaggtcgcctcgttcgagaagttccttgaggagcgcattaa

SEQ ID NO: 11861 - DNA, 406 bp, Zea mays
  Clone ID: LIB3150-076-P2-N2-A6
ttcatagatcatctcgcacccacactactactgcggtcctcactgcctacctcgagtgcaacaaggtgggggcaccaccggaggtgtcggcgaggctgacggagatagcgcaggaggtggaggcgcggcagcgcacggcgctcggcggcctggccgctgcgacggagccggagctggaccagttcatggaggcgtaccacgagatgctggtgaagttcagggaggagctgacgaggccgctgcatgaggcgatggagttcatgctaagggtggagtcgcagctgaactcgctttccatctccggaaggtcgttgcgcaacatcctttcatatggctcttcttaggaggatctaaaaggttgcgtatgattatccttcctttcttatattgtttcacaatggtttct

SEQ ID NO: 11862 - DNA, 311 bp, Zea mays
  Clone ID: LIB3150-076-P2-N2-A7
tctttataatgtacgtcaaagagtaaacgtgggggtgatccctagaatagatctacgagctttaactagtaaacttgaaggggagtctgtaaagaagaaagcatttgtcccaccaccacgattcttcaatatcgatgaggcgagggagatgcatattcgtgtggaacggaggcgagataaagaatctggggagtactttgagtgggttgataatttgaagttcaaagatggtttcttgtacaaatctgtcttcactaaatcgatccacacaaacaatattcaagcgagtggagactaacttgagaagttta

SEQ ID NO: 11863 - DNA, 414 bp, Zea mays
  Clone ID: LIB3150-076-P2-N2-A8
ataacgagttcatgttgcttgcaaggaaatgattacattggaaaaacagacggggctacttgaggaagaagagaaagaaaaacgtgaagaagaagagcgcagggataggaggagaacaaaagaaagagaaaagaagaatagaagaaaagagaggctgaaaggaaaagacaaagataaagaaaaaatattggttcggtcaaaaaaaccaggtctttcaacattttctccgagcagccaagcagcaccaagtagtaatgagtctcaggatgttctagacttgagatattcagatagcgaagaggaagacaatgttgtggtcagggaacactatcctgattcttcagctgatcaatcttcaagcaaggatactgatgaacgaagcaatgagcatgaatgcagtgcaacagcagaatt

SEQ ID NO: 11864 - DNA, 148 bp, Zea mays
  Clone ID: LIB3150-076-P2-N2-A9
tcttccacgcgtccgcgcacacacacacaagcgcggatctcccccaaatgcaccgctgcggcacctccgcttcaagatgcatatctttgtgaaaaccctgaccggcaagactatcaccctctaggtggaggccttttgaccaccattt

SEQ ID NO: 11865 - DNA, 120 bp, Zea mays
  Clone ID: LIB3150-076-P2-N2-B1
gcctactaactttgcagatgtatgcattaagtgagtgagaaactaagatgatgaaggctatggtggacttttgacctgcacaagagggccacagacacaggttctactgcagagaggatt

SEQ ID NO: 11866 - DNA, 187 bp, Zea mays
  Clone ID: LIB3150-076-P2-N2-B10
atatgccagaccagggttccgaggcaccaggtgcccagcgatctgcttgctgcggctcataagcagatgcacgatggccatagcctttggttatttgacattatttatttcccgcttggctgttataggaaggatttgaagaagccacttatgatataccgatgtggttgtactcgtggtttttttt

SEQ ID NO: 11867 - DNA, 294 bp, Zea mays
  Clone ID: LIB3150-076-P2-N2-B12
ttatctcgtttcaaatccatccatcctcggggcctccgtcccgcagcatctgaaccccatggccaagatcaagatcgggatcaatgggttcggcaggatcggaaggctggtggccagggtggccctgcagagtgacgatgtcgagctcgtcgccgtgaacgaccccttcatcagcaccgactacatgacctacatgttcaagtacgacactgtgcacggtcagtggaagcaccatgaagtcaaggtgaaggactccaaaacccttctctttggtgagaaggaggttgctgtttt

SEQ ID NO: 11868 - DNA, 396 bp, Zea mays
  Clone ID: LIB3150-076-P2-N2-B3
tatggctggggccagctggagctttcctcggggaaagaggaataaagatgaggaagaccacacatgtgctgttagagaagttctagaggaaactgggtgtgatgtttctagactattaaatctggatgattacattgaagtttcaattggacaacaaagggttcggctctacatcataacaggggttaaaagagacactgtgtttgcacctcaaaccaagaaggaaattagtgaaatttcatggcacagaattgatgacctcttaccagctagtgatgatgcagtatcttgtgcagtgaatggaatgaagctgtacatggttgcgccatttttgacgggtcttaaggcttggattgccacacattctccaccactgtattagaaaccatagtcatt

SEQ ID NO: 11869 - DNA, 376 bp, Zea mays
  Clone ID: LIB3150-076-P2-N2-B4
cattccaccgccggggccctgccccgccggccgggtccaccgcggtccatgtgccgccgccggttcatctgccgcgccaccatgccactaccctactcaaccgccccggctcagcctcatccagccacacccatgcccgtgccaacagccgcatccaagcccggccagctgcagggaacctgcggcgttggcagcaccccgatcctgggccagtgcgtcgagtttctgaggcatcatgtgcacccgcggcgacgccctactgctcgcctcagtgccagtcgttgcggcagcagtgttgccagcagctcatgcaggtggagccgcagcaccggtaccaggcgatcttcggcttggtcctccagtccattctgcagca

SEQ ID NO: 11870 - DNA, 400 bp, Zea mays
  Clone ID: LIB3150-076-P2-N2-B7
ctggtgtgtctgagtctggatctgcttctgagacacaatcttctttgctttgtgggtcatcataccaacagatctatgatggaaacagtggtccaggtctgcatgtgcacaacggtttccacaactgttcaagccaagagtcctccaaccttcttaatctctcaagaagtggacaattcatggcatcagagggatggcctttgaagaggttggctgtggaatctctttctggtcatgagctccaacctatgcagtacaagtttgagatagtgaatcaccaaagtaatgtgtatcacatttatagcaccttgccttcactgtcagcaagtgacagttatagtgcccatgctagcgttacatatgatcagagttactctgcttttatgataatttgcattcc

SEQ ID NO: 11871 - DNA, 319 bp, Zea mays
  Clone ID: LIB3150-076-P2-N2-B8
ttcgaggcaaaagcattgcgaccacagacagcgcgcgcttcaaggccttttttttttgagataacaaggaggagaggaggagatggcggtcacgatcacgtgggtgaaggcgaggcagatcttcgacagccgcggcaaccccaccgtcgaggtggacgtgggccttagcgacggcagctacgcgaggggggccgtacccagcggcgcatccactggaatatatgaggccttggagttgagggatggaggatctgaatatctagtcatgggtgtcatttgtggcggtcagttttgtattttacattatttgtttctgtaa

SEQ ID NO: 11872 - DNA, 53 bp, Zea mays
  unsure at all n locations
  Clone ID: LIB3150-076-P2-N2-C10
ggcggnttnaggaggggaacagatacagggggggttttataaggggggggggg

SEQ ID NO: 11873 - DNA, 400 bp, Zea mays
  Clone ID: LIB3150-076-P2-N2-C11
ttcacatctggtttatagccatgctcatgaaactgcaattgaggactggacgtggtctgtgggttgtaatccctcagctgtgacttctgaaggttcacaactttcagagttccagcaagatgtgattgctcgtaactatattattacttcagtggaggaatccattcaagtaatcaattcagcaattcagcaattggtaatagagcggactactgaaaaaggcttcaaaattttcaaggctcacgaaagtaagatggttgagaagtacaatgccgttgttagcttgtggagaagagtatcggctatgtccaagggattgcgatatggtgatgcagtaaaacttatgtcaatgcttgaggatgcttcaaatgggttttctagtgctgtgaacttcaccatt

SEQ ID NO: 11874 - DNA, 122 bp, Zea mays
  Clone ID: LIB3150-076-P2-N2-C12
aagtaggctttttagtttgtactctagtgtggttttttttttttttattattatatttatttttgtttttatgctacaaatattaactcttttcatgccgttattattgatcctcttaattt

SEQ ID NO: 11875 - DNA, 197 bp, Zea mays
  Clone ID: LIB3150-076-P2-N2-C3
ttttgttaccgccgccgccgccgaaagacttggtcgggcactttgccggcgacgatttcccaccagctatttctactcggatccgatctatttacaagcccaacaggatcagaggaggtgatggcgaggagtgacagctgcctggcgcgcgtgggtgccggaattgctatcggtggcgcggtcggcggatccttccg

SEQ ID NO: 11876 - DNA, 403 bp, Zea mays
  Clone ID: LIB3150-076-P2-N2-C7
gtgtgttccagtggatcatgcagaacgaagggtggaccggcctgttccgcggcaacaccttcaacgtcctgcgcgtcgctccgagcaaggctatcgagcatttcacctatgacacggtcaagaagttcctaacccccaagggcgacgagccgcccaagatcccgatccccactccgctggttgccggagctctagccggattcgcctcaaccttgtgcacctaccccatggagctgatcaagaccagggtcaccatcgagaaggacgtatactacaacgtcgcgcacgcgttcgtgaagatcctacgcgacgagggcccgtcggagctgtaccgtggggttgacacccagcctgatcggcgtggtgccgtacgcggccttgaacttctacgcctacgagacgc

SEQ ID NO: 11877 - DNA, 401 bp, Zea mays
  Clone ID: LIB3150-076-P2-N2-C8
gccaccgccacctacgcaacaccaggcgctgcagcagaacagcactcggagctcgcctgcccgacggcccaccatgatcatccccaagaagaaccgcaatgagatctgcaagtacctcttcaaggagggcgtgctgtatgccaagaaggactacaacctggcgaagcacccacagattgatgtgcccaacctccaggtgatcaagctcatgcagagcttcaagtccaaggagtatgtcagagagaccttctcctggcagtactactactggtacctcaccaacgatggcattgagcacctacgcaactacctgaacctcccgtctgagattgtgcctgccacgctcaagaagtctgccaggccactgggccgtccatttggctctggccctcctggtgacc

SEQ ID NO: 11878 - DNA, 292 bp, Zea mays
  Clone ID: LIB3150-076-P2-N2-C9
taaaccctagcacacgcaccatggcggcgcagcagaagatccggtggggggagctggaggaggacgatggcggggacctcgatttcctcctcccgccccgcgtcgtggtcggacccgactagaacggctctacgaaggtcatcgagtaccgtttctacgacgacggccacacggtttgggttactaccactacctgcgttcgtatactagctcgggcgctcctttaccgtattgccatcttgcgccttctgtggtctaagtttgttgtcgcccttaaggaggtcgtgttctt

SEQ ID NO: 11879 - DNA, 372 bp, Zea mays
  Clone ID: LIB3150-076-P2-N2-D10
attaaactgatgatgctgaggcctcgttaagtaatctgggtttggagatatataaaaatatgggtgatccggaatcattggacgctcttttccctttactgctctatctacatctttggctgccaatacttccgtttgctatggcagatatagccttcgagaagcaagcactctttgcttttgcctctgcagtctaccatggcaacaagctgaattggagccaaaatatcccagtgtgctcatggcatggtgtgacatgctcactggatcgatcatgtatattggcccttagggtgccaggtgctggtttgattggtaccattcctgctgatactcttggcaggcttgtgtccctccaagttttaagcatga

SEQ ID NO: 11880 - DNA, 285 bp, Zea mays
  Clone ID: LIB3150-076-P2-N2-D5
ctctgtcttaacggcccctgatttttttgcgagacctctgtcctaaacgcagccggtgggcggagccggtaactatcactcgcccctcctcaatcctgctccggtcggaaccctagcccttcctgccagcggtgggcggcgcttggccatgtatccgtcaggggccatggtgggggcggtgcccgcggcgcgccctagcgcgttgtctcggttgtagaaggccttgagccactttgctcatggggcccgactggtccgtttcctttaaatttgtttcgtgggggg

SEQ ID NO: 11881 - DNA, 334 bp, Zea mays
  unsure at all n locations
  Clone ID: LIB3150-076-P2-N2-D6
gtgtcaggaggaagcccttccactgttccatgtctttcccggagtaggtggtgggcacgacgaangcccctcgcccccaccagattcgtgcaactcggcgcctcatccgatcggcaccggccgcccaacgcgctacagacgcgctgccgcgtcgggactctggaggacacggcggcggcttggtggattgtgggagggagggccttctcttggatttttgttgtcgaggacagggtcttgtattagctagctattcactggatgttggcgatggggacaggagagtgggagctctatccttgttcctacagcggctcacaggtgatagagtaca

SEQ ID NO: 11882 - DNA, 402 bp, Zea mays
  Clone ID: LIB3150-076-P2-N2-D7
ttttgagagctccacaggccaggtccccagggcctctgcgcttgccccacctgtcccccgcccggtagtagcctcgccgccgttgccgagatggggttcgtgtccttcgtcgggagggtgctcttcgacgccgctttcctcctctgcgcctaccaggagtttaatgaattcggtgctgatggtggaccagcagctaaggcccttcggcccaaattcaacgtgtttgtcaaaaatgtatctgctcatctgggagtagctgtgccacacattgagttgaagcatgtgattgctgctacaattggtcttaagggtcttggaagcctcctttttattttgagcagctctctcggtgcttatctcctgctgctgtaccttgctttgatcactcctatcatacatgac

SEQ ID NO: 11883 - DNA, 311 bp, Zea mays
  Clone ID: LIB3150-076-P2-N2-D8
ttcacaccacacctcctcgcttccactccggtcgtctgacatctcgtcccgtcctttcgtttcgaagcctcgcgagccccgacgatggccaccgccgcggtgtcggtcgacgagaagctcgacaagcttcgcgccgaggtcgccaagctcgaccagatcagcgagaacgagaagtccgggttcatcagcctcgtgtcacgctacctcagtggggaagcggagcagatcgagtggagcaagatccagacccctacggatgaggtggtggtgccctacgatacgggggggtgtcctttcgaagatttttgagg

SEQ ID NO: 11884 - DNA, 396 bp, Zea mays
  Clone ID: LIB3150-076-P2-N2-D9
gtttaccattcctccccaaaacacatcctgcgatcctcgaagcctccgccgagcatcgatcatgtcggcctactgcggcaagtacgcggatgagctcatcaagaatgctgcctacatcggcacccctggcaagggtatccttgctgctgatgagtcaactggcaccattggcaagcgcctttccagcatcaatgtcgagaacgtggaggagaaccggcgggctctccgtgagctcctgttctgctgccctggtgccctccagtacatcagcggtgtgatcctcttcgaggagaccctctaccagaagaccaaggatggcaagccttttgtcgatgtccttaaggagggaggcgtcctccttggcatcaaggtcgacaagggcaccattgaggttgt

SEQ ID NO: 11885 - DNA, 388 bp, Zea mays
  Clone ID: LIB3150-076-P2-N2-E1
ggcttccgcccccgtttccggtgagatcagctccggcggcacgcggatatgactacttcaaggcgtctggctgccaggaggagtgaaaagttccagaagaccatcacaaagaggggttctgtgcctgagaccacggtgaaaaagagcattgactaccctgttggacctatagttcttggattcttcatttttgtggtcattggatcatccttgttccagataatcaggacagcgacatgcggtgggctggcctgaattcactgagctaaaaccagaaatttatctgtccgtgagctgggaggcagtatctgtgttgtgtagcaaacttgttcatggatatgtagtgcgaatgtcactacttgtctgtttgcagtatcaaaaggagttt

SEQ ID NO: 11886 - DNA, 310 bp, Zea mays
  Clone ID: LIB3150-076-P2-N2-E10
gtcgaggaggtggacgaggagatcaccgtcgagtccgatggggtcccgatccgccacgtctccggggggtactcgccctcgccgttctcccccgagctcgagcccaacggcggcgacggcccgatcctaccgccgcccaccgagatggggcgggacgagggaatcctcctccgcgagtggcggagaaaaaatgctatggaacttgagaaaaaagaacagaaggagagggagctacttgcccaaataattgctgaagccgaataattcaagaaagccttttttgagaagaggatacagatctgtgcttcaa

SEQ ID NO: 11887 - DNA, 404 bp, Zea mays
  Clone ID: LIB3150-076-P2-N2-E11
tttagcagccgcagtcccaccgaccccgccgccggtcgccctccatctcctcgccgctgcctctcgtttctcttttcaataatcaagatgagccgtggtggtagtgccggtggtggtcaaagttctctgggttatctctttggaagcggtgagccccccaaaccagcagtggcaccagctgcaagtgctccacctgttgagaaaccatctgctgcaaagactgatgcggccaagcaggttgctgctggggttaccagccaaaccaataactaccacagggctgatggtcagaacactggcaacttccttacggaccgtccttcaaccaaggtccacgctgctcctggcggtggctcttccctgggctacctgttcggtggcaactgatgcccgtgctggtgcgc

SEQ ID NO: 11888 - DNA, 84 bp, Zea mays
  Clone ID: LIB3150-076-P2-N2-E12
tacctgcgccgcccctccggccacgcgagctcgccgaaatggtcgcccacaggttccatcagtaccaggtggtgggtaatactc

SEQ ID NO: 11889 - DNA, 187 bp, Zea mays
  Clone ID: LIB3150-076-P2-N2-E2
ccgcgccttctccccaatctggggggatatcagatccggcggggcgcgtatataactactttaagtctatcttgctgacatttagagtccaaagttccaaaataacatcacaaagaggggttctgttccagttaccactgttaaaatgagcaataactaccctttttttacctattattccttgtat

SEQ ID NO: 11890 - DNA, 378 bp, Zea mays
  Clone ID: LIB3150-076-P2-N2-E3
gacaaccgtgctcttggaaagctgaggagggaagccgagcgcgccaagagagccctcagcaaccagcaccaggtccgtgttgagatcgagtccctctttgacgggaccgatttctcggagccgctgacccgtgccaggtttgaggagctgaacaacgacctcttccgcaagaccatgggccctgtcaagaaggccatggaggatgctggccttgagaagagccagatccacgagatcgtcctggttggtggaagcaccaggattcccaaggtccagcagctcctgcgggactacttcgacggcaaggagcccaacaagggtgtcaaccctgatgaggctgttgcctttggtgccgctgtgcagggaagcattttgagc

SEQ ID NO: 11891 - DNA, 408 bp, Zea mays
  Clone ID: LIB3150-076-P2-N2-E4
cggacgcgtgggttcagtagcaatcttagaacagttctttggcaatgttttatcgaaaagcggcagcaacctaccaacttatgttgagaaccagccattgaaaactgatgatgacatgatcacttctgtgccagaatcatccaaatttgctcattggtttcttgatgaagacttgaaacctgcagaagacttatcttcaaagagcctgctctccatgattgtcaaaaatgaaaattcagagcttatctcatttacatcctctacgcctgccaatggagttcttgaacaatacatccattctgatgttccagaggcagttcctattatgacatgtgaggatcttgagcagacgatgttagcacaggttagcaatagcagctcaactcagataaatgctacaaaggagca

SEQ ID NO: 11892 - DNA, 255 bp, Zea mays
  Clone ID: LIB3150-076-P2-N2-E5
cccccgtgcccgagacgcaaccccgcgccaggagtaagtttgttcttttatcgatattatcgatatggcgagggaggagaatgtctacatggccaagctggctgagcaggccgaaaggtatgaagagatggttgagtatatggagaaggtggctatgactgtagatgtggaagagcttactgttgatgagcgtatcctcttgtctgtagcatactcaaatgtgattgttgctcgctgtgcttaatggcaccttgt

SEQ ID NO: 11893 - DNA, 397 bp, Zea mays
  Clone ID: LIB3150-076-P2-N2-E6
ttgtaaacaagcttgccatgcaggagttcatgatcctcccaactggtgcctgctcgttcaaggaggccatgaagatgggagttgaggtgtaccacaacctgaagagcataatcaagaagaagtacggtcaggatgcgacaaatgttggggatgaaggtggttttgcacctaacattcaggaaaacaaagaaggccttgaactattgaaggcagccatagaaaaggctggctacactggaaaggtggtcattggaatggatgttgctgcttttgagttcttcggtgagaaagacaagacttatgatcttattttcaaggtggagatcaacgatggcttaaacaaaattttaggcgtcagcctgaaagatctgttctagtcctttttttttgagttcct

SEQ ID NO: 11894 - DNA, 404 bp, Zea mays
  Clone ID: LIB3150-076-P2-N2-E7
gatcgatcgagtctctccggattccagagaggcccaactgccgaagccatcgatcgccgacacctcttcgagcagaatagttgagaatggctgacgaggatatccagcctatcgtatgtgacaatggcactggaatggtcaaggccggtttcgctggtgatgatgcgccaagagctgtcttccccagcattgtgggaagaccacgccacaccggtgtcatggtcggcatgggccaaaaggatgcctacgtaggtgatgaggctcaggccaagagaggcatcctgacactgaagtacccgattgagcatggcattgtcaacaactgggatgacatggagaaaatctggcatcacaccttctacaacgagctccgtgtttcgcctgaagatcaccctgtgctgctg

SEQ ID NO: 11895 - DNA, 358 bp, Zea mays
  Clone ID: LIB3150-076-P2-N2-E8
tttaaatcctttttcattatgaggttaccaggcttaagttatttgttgcaaaatttatgagccttgatcaaaatgtataatgcttccccctttatgtccttaaaaatgaatgcatcgaaatcatttctttaaattacttgatgcatatctttagggggagtccattattatattttgattatgttgagactattgctttatcttagtaatttcatatagtctcttgcatgagaataatgtttctcatatagtatgctgcttcacatcaatcaaacttgttaaagtaatatcgcttttgtcaaggattgttgcttttatttctaaaagtagcatgcttattggattcttctatttttaa

SEQ ID NO: 11896 - DNA, 359 bp, Zea mays
  Clone ID: LIB3150-076-P2-N2-E9
tcgtccccgatcatcgcaccacctgtagcccacctcgctctcgagtctcgacccagcgacgagatggccgcggtggatctgaccccaaggacgcccaagaaggcctacggcggcgacggcggcgcctactacgagtggagccccgccgacctgcccatgctctccgtcgcctccatcggcgccgccaagctctcgctcgccgccggcggcctctccctccccagctactccgactccgccaaggtcgcctacgtcctacaaggcgcgggcacctgcggcctcgtcctgcccgaggcgactaaggagaaggtggtggcggtgaatgagggctactctctggcgctgatctatggcgcggt

SEQ ID NO: 11897 - DNA, 316 bp, Zea mays
  Clone ID: LIB3150-076-P2-N2-F10
tttcatttccacatcaacatcaacacgagggcgcgtgccgccgccgccgcccgggcgccccctcctaaaccccgcgacgacactgagcgagccgagccccggcgaccaaccatggccttctccgctaaaccccactgctcctgctccaccaccaccaaaccccccacccccgtcgcccacctctctccacccccgtccctctccgtccgcgccgccgcctgcgccccgcgctccgcctatggcctctttgccgacggcgtgggctgaggcaaggcgttccccagcactggtcgacttctcgcttgttcccagcgca

SEQ ID NO: 11898 - DNA, 389 bp, Zea mays
  Clone ID: LIB3150-076-P2-N2-F11
tatgcaaccaccgcctccccgatctcgtcgagaggaagcccaatcccgaaaccgtcgccgtattccaatggcgcccaaggccgagaagaagcccgccgccaagaagcctgcggaggaggagccggcggcggagaaggccacggcggggaagaagcccaaggccgagaagcggctccccgcgggcaagtccgcaggcaaggagggtggcgagaagaaggggaagaagaaggcaaagaagtcggtggagacgtacaagatctacatctttaaggtgctgaagcaggtgcacccggacattggcatctcgtccaaggccatgtccatcatgaactccttcatcaacgacatcttcgagaagctggcggcggaggcggccaagcttgcgcggt

SEQ ID NO: 11899 - DNA, 406 bp, Zea mays
  unsure at all n locations
  Clone ID: LIB3150-076-P2-N2-F12
cttatttcctggtccatcaaacaatgccatgcttcggcttcatatggaattgaagggtccattccctaagaagatgcttcgaaagggtgcctttactatgcaacacttcgatcaagatctcaattttcatgctaccgaggaggatcctgtgacaaaaacggctgtgagaaggttaattttgaacattaaaccaaaggatgttggttctttgtttccgaactttcctggcgaggatccaaaaatgctatccagttttaaggatcttcttgataaaatatttacattagatccagaaaagaggataactgtatcgcaagcacttagccatccatttatcactggcaagtgacacangatgacgattcctcttgaccttgaacttagcatcttcactgtaaaatacatt

SEQ ID NO: 11900 - DNA, 406 bp, Zea mays
  unsure at all n locations
  Clone ID: LIB3150-076-P2-N2-F6
ccgaactccgaactacaagtttcgcttctcgtcgcgacgactgggcgagaccgccgccgccgcctgagttctttagaaatggctgatggtgaggacatccagcctcttgtctgcgacaatggcactggaatggtcaaggctggttttgctggcgacgatgcaccaagggctgttttccctagtattgttggccgtcctcgccacactggtgttatggtagggatgggacagaaggatgcgtatgttggcgacgaggcacagtccaagagaggtattctcacgctcaagtatccgatcgagcatggtattgtgagcaactgggatgacatggagaaaatctggcatcacactntctacaacgagcttcgtgttgccccagaggagcaccctgtggtgcttactgagg

SEQ ID NO: 11901 - DNA, 407 bp, Zea mays
  Clone ID: LIB3150-076-P2-N2-F7
tgcacacacacacaaccagatctcccccaagtccacccgtcggcacctgcggttcaagatgcagatctttgtgaaaaccctgaccggcaagactatcaccctcgaggtggagtcgtctgacaccattgacaacgttaaggccaagatccaggacaaggagggcatccccccagaccagcagcggctcatcttcgctggcaaacagcttgaggacgggcgcacgcttgctgactacaacatccagaaggagagcaccctccaccttgtgctccgcctcaggggaggcatgcagatctttgtgaaaaccctgaccggcaagactatcaccctcgaggtggagtcctctgacaccattgacaacgtcaaggccaagatccaggacaaggagggcattccttcagaccagc

SEQ ID NO: 11902 - DNA, 383 bp, Zea mays
  Clone ID: LIB3150-076-P2-N2-F8
ggcctgcagcgccagcgcagcgcctctctggtactgtgctggctgacgccggtggggtgtgagcgaactgcgagctgctgccacccctgctgccgcggtcgaccgccggccccggaccgagatggacgctcggtgggcggtgctgctcgcgctgctggtcgccagcggcggcgtccgtgtctgcgccgccgctggggccaagggcgccaactggctgggcgggctgagccgcgcgtcgttccccaaggggttcgtgttcgggacggcaacgtctgcgtaccaggtcgagggctcctttgtacaccaacggtcggggccacttcatctgggattcattcgcgcacggtccaagaaatattgctggggataaaatggattctttt

SEQ ID NO: 11903 - DNA, 408 bp, Zea mays
  Clone ID: LIB3150-076-P2-N2-F9
cgccagtttctcttccgtgactggaacattggacagcccaagtccacagttgctgcaactgccgctatggcaattaatcccgagcttcatgtggaggcccttcagaacagagcaagtcctgagactgaaaatgtgtttaatgatgccttttgggagagcttggatgctgttgttaatgcattggacaatgtcactgcaagaatgtacattgactctagatgtgtatatttccagaagccacttcttgaatcaggtactctgggtgccaagtgcaacacacagatggtcattcctcacctaacagaaaactatggggcatccagagatccaccagaaaagcaggcacctatgtgcactgtacattcatttcctcacaatattgatcactgcctgacttgggccagatct

SEQ ID NO: 11904 - DNA, 237 bp, Zea mays
  Clone ID: LIB3150-076-P2-N2-G10
ttttctttgccagttctccttcacaaggagcggcaaccttacaatgcagggcggcttcttaaaatttttctaccaacgaaggatgcggcttcttaccttcctattcttatggcaaaagatcgaaagattctatgcatccatgactttgctaaattcacaactgtatgccttcaagtttacattttgattcaacaacaaaaccatgatgcatttgctttaaaatacccaagattcttt

SEQ ID NO: 11905 - DNA, 334 bp, Zea mays
  Clone ID: LIB3150-076-P2-N2-G12
tcgttcagatctgcagcgcagggctgttcttggggctgctactattgcgggggtgcggccattgcgattgttccatgagacgacagccactgctctggcatatggtatttataagactgatctcccagagaatgaccagctgaatgttgcatttgtcgatatcggtcatgcaagcatgcaggttagtgttgacggttacaggaagggacagctcaagaggttgtgccatacatacgaccggtctgttggtgggagggacttctatgaggccctgtttaagcactgtgcaggttaattcaaagaggaatataacattgatgtgtaccataatgcg

SEQ ID NO: 11906 - DNA, 177 bp, Zea mays
  Clone ID: LIB3150-076-P2-N2-G3
ccttcctttgcgagcccggttttccttcttccaattcaattgttccgggcttttttttttttttccttctcctccccccgtccggggccggagatccacggtttccattttccagatcgcagttcattcagttgctctgttacctttacacggtctgcatgcctttattgggtctgc

SEQ ID NO: 11907 - DNA, 409 bp, Zea mays
  Clone ID: LIB3150-076-P2-N2-G5
cccacgcgtccggtatcaatcagcatggagaagaagctggaacaccagcgagtcttcaccccttcggtcgtcgagccgtcattcggcataggacggatcatctactgcttgtttgagcactcgttttacacaaggcctagcaaatcagaagaggaacagctgaatgtcttccggttccctcctcttgtggcccctatcaagtgcaccgtgttcccccttgttaagaatcaagagtttgacgatgctgccaaagtaatcgccaaggcattaacaactgctggtatctcccacattattgacactactgcaatttctattgggaggaggtacgccaggacggatgagatcggtgttccatttgctgtaacagtggattcggcaacgaacgtgacgatccgagagagggaca

SEQ ID NO: 11908 - DNA, 410 bp, Zea mays
  Clone ID: LIB3150-076-P2-N2-G6
gacttctgctgcagcgcctccgccgccgctgccgcatctaacgcagttccctccgccgcagcccgaggcaagatggttctccagaacgacattgatctgctcaacccgccggcagaactcgagaagctcaagcacaagaaaaagagactcgtccagtcgcccaactccttcttcatggatgttaagtgccaggggtgcttcagcataaccactgttttcagccactcccagactgttgttgtgtgccctggctgccaaactgtcctctgccaacccacaggaggaaaggcaaggctcactgagggctgttctttccgcaggaagggagactagagcggatgtggtcttcaagttttgctctatgccagatactagcgtcatgaactgcctttagcttagaatttccataa

SEQ ID NO: 11909 - DNA, 386 bp, Zea mays
  Clone ID: LIB3150-076-P2-N2-G7
cgccgccgctccgcctcagcgcatcgcccggcgcgacctcatcgatcaccttcagctttcaatcatggcggacgtcgatgtcgaaccggaggttgccgccggagctcccaagaagaggacgttccgcaagtacagctaccgcggcgtcgacctagatgcgcttctcgacatgtccacggacgaccttgtccagcttttccccgcgcgcgccaggagaaggttccagaggggtctgaagaggaagcccatggcgctcatcaagaagctgcgcaaggcgaaaaaggatgctcctgctgatgagaagcccgagccagtcaagacacatctgcgtaacatgatcattgtccctgagatgattggaagcattgttggggtctacaacggca

SEQ ID NO: 11910 - DNA, 324 bp, Zea mays
  Clone ID: LIB3150-076-P2-N2-G8
ctaccgccgccggtgcatctgccacctccggttcacctgccacctccggtgcatctcccaccgccggtccacctgccgccgccggtccacctgccaccgccggtccatgtgccgccgccggttcatctgccgccgccaccatgccactaccctactcaaccgccccggcctcagcctcatccccagccacacccatgcccgtgccaacagccgcatccaagcccgtgccagctgcagggaacctgcggcgttggcagcaccccgatcctgggccagtgcgtcgagttcctgaggcatcagtgcagcccgacggcggctccctac

SEQ ID NO: 11911 - DNA, 388 bp, Zea mays
  Clone ID: LIB3150-076-P2-N2-G9
caactgcacctgcgcgcctcgactggtagcccgaaccctagctagcaggtcggaggcgagagagcagccatggcgcggtgcctcgcgctcgtctccctccttctcctcggcctcgcctccgccgcctccgctgccgatgcgccctttgtcgtcgcgcacaagaaggtttcgctctcccgccccaagccgggcgttgagcgcgtcgacgtcttcctcgacctctacaaccagggatccgcgactgcctatgatgtgtcacttaatgacgacttttggccaacacaagcatttgagcttgtcactggagagaaatcgaagacattggaaaggctcgaccctggtgccactggtacacacacatatgttctggagaccaaaacccagggca

SEQ ID NO: 11912 - DNA, 354 bp, Zea mays
  Clone ID: LIB3150-076-P2-N2-H10
cgccgccttgccctgccctcccctcccttgccccgattaccctcgcggggggcgctcgccaatccggtcccgcctccgtataaatccgcccttctcgcccccgctccgaccacaaaccctagcggcgcgccccggcatgggctagggttcccgcggcgatggagtgggacagcgattctgacggcggcgatgacgaggaggaagaagaggtccgccccgggggtggggacgcgggcccggggttctcgctggccatcgagggcgtgctgggcgcgtgcggcatggtggtctccgacgcgctcgagcccgacttccccatcatctaacgtaaccgggggttctagaggttcactg

SEQ ID NO: 11913 - DNA, 355 bp, Zea mays
  Clone ID: LIB3150-076-P2-N2-H11
cgtcacgcgtcagacccacgcagcgcacctggtcttctacgccgcgtcggcggcgaacatcagcatcggatcgatggagggctgggacaaggggaccaagagcacggtgggcgagatcccgctgctgtcgacgcgcgcgggtccgcgggacggcgaggcgtggcggcagcggctcaaggaggagtaccgcgcgctcatcgcctacacatcggtgaacaaggccaaggacaacgactggttccgcatcgccgccgtcaacccggagggaacccgctgggaggggacctgctggtacgtccacaacctccgacgctatgagttccctctccagttcgacattcctgtccctaccccc

SEQ ID NO: 11914 - DNA, 389 bp, Zea mays
  Clone ID: LIB3150-076-P2-N2-H12
agcacgacgatgcacgcacgcgtacagcaggcgatgcgctctagagagagaccgcacccacgcgtccgacatcctccaaagccactcccaaacccccgcttgcagaaccttctcgaagctccccgccgcctcctccactcgcaccgatggcgaaggaaccaatgcgcgtgctcgtcactggcgccgcaggacaaattggatatgccctggttcccatgattgctaggggtgttatgcttggtgcagaccagcctgttattctgcacatgcttgacattccgccagcagctgaagcccttaatggtgttaagatggagttggttgatgctgcgtttcctcttttgaagggagttgttgctacaactgatgttgtggaagcctgcactggg

SEQ ID NO: 11915 - DNA, 149 bp, Zea mays
  Clone ID: LIB3150-076-P2-N2-H3
acaacaccggtactccgctccgacgctacgagggggccgagtcggaagactatagcgtccgcgagtactatgggcgtcacggcggccgggactacgctgtgcccagtctgttttcagatattttccgtgatccgcttagtgcgtcgtac

SEQ ID NO: 11916 - DNA, 408 bp, Zea mays
  Clone ID: LIB3150-076-P2-N2-H4
gctttggagagaagaatataagtttgatggtgttccgttttgatggtgtgacctgcatgatgtacactcaccacggattacaagtaacatttacggggaacttcaatgagtattttggctttgccaccgatgtagatgcagtggtttacttgatgctggtaaatgatctaattcatggactttatcctgaggctgtaaccattggtgaagatgttagtggaatgcctacatttgcccttcctgttcacgatggtggggtaggttttgactatcggatgcatatggctgtggctgacaaatggattgaccttctcaagcaaagtgatgaaacttggaagatgggtgatattgtgcacacactgacaaataggatgtggttagagaaggttgtaacttatgctgaaagtt

SEQ ID NO: 11917 - DNA, 215 bp, Zea mays
  Clone ID: LIB3150-076-P2-N2-H5
tttttgttgagaagaatataactctcattagtgcggtttttatacagtgaccgggggtgatctacactcaccaccaattacaagtaacatataccgtgaacttcacactgtattcaaaatcctccaccgatgcatatgcattggtactcttgacgcttacaaatgatctaattcatggactttatcctgaggctctcacaatgtataaaaatttt

SEQ ID NO: 11918 - DNA, 420 bp, Zea mays
  Clone ID: LIB3150-076-P2-N2-H6
gatcctttctttaaagcccacgcacccgttttacttccgtgttccctcggatctttggccacgaggctggaggtatcatagagagtgttggagagggtgtgactgacgtagctccgggcgaccatgtccttcctgtgttcactggggagtgcaaggagtgtgcccactgcaagtcggcagagagcaacatgtgtgatctgctcaggatcaacaccgaccgcggtgtgatgattgccgatggcaagtcgcggttttcaatcaatgggaagcctatctaccactttgttgggacttccaccttcagcgagtacaccgtcatgcatgtgggttgtgttgcaaagatcaacccttaggctccccttgataaagtgtgcgtgctcagctgtggtatttctaccggtcttggtgcatcaattaatg

SEQ ID NO: 11919 - DNA, 398 bp, Zea mays
  Clone ID: LIB3150-076-P2-N2-H7
gttagacataacccgagccaactcgaggaaaaaaaagaagttactgcaaataaattctggaggatatagtgtatctgaacaagataaaattaaattctcaatgcgtatcgtgcactttttgcttccttggctgaaacaattccatcaagagcagatgcaagagaaaagtgccgaggctgcaactaaaggtattgatgcagacaaactggaggtccctctaaccatttgtggaaaaaaggaacggatatactgcaacaactgcaggacatctattgttgacttccacagaacctgcaataaatgtaactatgatctctgtctccagtgctgccaggagcttcgtcgaggccttgtttttggtaatgatggcaaggttgatggtggaggcatgcaagatt

SEQ ID NO: 11920 - DNA, 374 bp, Zea mays
  Clone ID: LIB3150-076-P2-N2-H8
tggaacttttctattgatgaaaaatggaggtacaaggttctgaagagcgatgtcctaatgaagattgttggttacctggatgaagaagacatacaagtcaaagaagccgctggtggtatcatatcaaatttagctttgagttcctttagccatggatctaggaggcgagatcccaaaattgcatcatttttttcattccaaagaagatgactataagattattagaaaggaagctaaaagttcactaatacagctggccactgatgattgttactacagccttataataaaggagggtctagttcgggttcctttggttggctcagctgcatataaaagcctttaaacctttcccttatttatggccctttttt

SEQ ID NO: 11921 - DNA, 274 bp, Zea mays
  Clone ID: LIB3150-076-P2-N2-H9
tccggccctctctagtttctaccccggccggcaacattggcctgatgctggggccatgtagcccagcgctcccccctcggcttcaccggcggcggcggcaacgacggtgaaaactacatcgggtgctagctccgacggtggtgcgtgccctgttgacgatagggcacgcggggcgcgggcagcttgtaagcgttcgatcggccatgtagggcaactatacatctttggcaggtctccatcatcctccgtgggagagaagatggttatggagtgc

SEQ ID NO: 11922 - DNA, 401 bp, Zea mays
  Clone ID: LIB3150-077-P1-N1-A1
gcaaaagggcgtgtttgagactagcggaccgaccttgaagttgaagttgaaaaggccggcctgcgcggcgatggatgtcaagtgccggcgtctggaggggaaggtggccatcgtgacggcgtccacgatggggatcggcctcgccatcgccgagcgcctcggtctggagggcgccgccgtcgtcatctcctcccgcaagcagaagaacgtgaacgaggcggtggaggggctcaaggccaagggtatcaccgcggttggtgccgtctgccacgtcttcgacgcacagcagcgcaagagcctcatcgagacggccgtcaagagctttgggcacatagatattcttgtctccaatgctgccgcaaatccttttgtagatagcatactttgaaatgaaagagtct

SEQ ID NO: 11923 - DNA, 387 bp, Zea mays
  Clone ID: LIB3150-077-P1-N1-A10
ttaaactgaatgatctcttggacgctcttgatttcaaccaagttgtgatattcgtgaagagtgttagcagagctgccgaactgaataagttactttgtgaatgcaacttcccatcaatctgcattcattctggaatgactcacgaagaaaggctaacaagatataagaacttcaaggaaggccacaagagaattcttgtggctacagatttagttggcaggggcattgacattgagcgtgtcaacattgtgataaactatgacatgccagactcagctgatacttatttgcacagggttggaagggctggacgttttggcacgaagggacttgcaattacctttggtttcctctgctttggattctgatgttcttaaccaggtgcaa

SEQ ID NO: 11924 - DNA, 394 bp, Zea mays
  Clone ID: LIB3150-077-P1-N1-A11
cgccacttgctcgcctttgccccttctgtgtcccttcgtccgtagcagaccaggaacgcccaaggcgctagcgtctccaagatggtgctgcaaaacgacattgacttactcaatccaccggcagagcttgagaagctaaagcacaagaagaagcggctagtccagtcccccaactccttcttcatggatgtcaagtgccagggctgtttcagcataaccactgtgttcagccactcccagactgtggttgtgtgcccaggctgccaaactgttctgtgccaacctaccggtgggaaggccaggctcaccgaggggtgctccttccgtcgcaagggcgattaggtcctgcttctcttaacgtgagaagagataaatttggtgttttgcaactttc

SEQ ID NO: 11925 - DNA, 397 bp, Zea mays
  Clone ID: LIB3150-077-P1-N1-A12
ttttccaataaataaactatacccctggctggcggcctaaatacagaggggacggggaacacccaaaagcgctagcgtctccaagatagtgctgcaaaacgacattgacttactcaatttaccgtcataacttgagatgctaacccccaagaagaagcggctagtccagtcccccaactccttcttcatggatgtcaagtgccaaaactgtttcagcataaccactgagattagccactcccagactgtggttgtgtgcccatactgccaaactattctgtgccaacctacacatggtaaggccaggctcacctaagggtgctccttccttcaaaaagtcgattaggtcctgcttcccttaacctgagaagagataaacttggcgctttgcaacttt

SEQ ID NO: 11926 - DNA, 396 bp, Zea mays
  unsure at all n locations
  Clone ID: LIB3150-077-P1-N1-A2
gaacattcaggaatacaaggnccctannngggctggtggcattgtggattactggaagaagcaggttggccctgcgtccaaggagatcaagtcaccagaagatgcgacggcccttatcgatgacaagaagatctacattgttggtatcttcgctgaattcagcggcaccgaatttacaaacttcatggaggtcgcagagaagctgaggtctgactacgactttggccacactttgcatgccaaccaccttccacgtggtgatgcagcagtggaacggccattggtcaggctgctgaagccatttgatgagcttgttgttgacagcaaggattttgatgtcgctgcactgatgaagtttattgatgctagcaccatccctagagttgtcacttttga

SEQ ID NO: 11927 - DNA, 406 bp, Zea mays
  Clone ID: LIB3150-077-P1-N1-A3
acgggtgccacaactccctgccgatccagtgccccggcaaattcccacccggcgcacagcaagtcagcaacaccagcggtcggatcgggggagaaacggaagggcaacagcagagcgcgaattcctccgacaaatccaaggtttcgagcacagacacaggcgaaactcgatggcggaggggtccaagccggacgtgccgctgttccagctcctcagcgatcttcttcagcaggtggagtcaatgagcaatcaggaagaagtagagctgcgcgctaagattgaagcattaggattagaagtcactaaggtaccagagcagcccgctaatcatctcagcgagctagaaatagctgcagagttggacaagctgtcatcgcggcttgataacgtcgacaagatgatatca

SEQ ID NO: 11928 - DNA, 156 bp, Zea mays
  Clone ID: LIB3150-077-P1-N1-A5
ttatctaacgaagtacctacacgtgtacgggagggggcctattgccagtgcgatatgccatacactcatcatgacttcactgtgtcagtgcatgcacttgcaggggcacactgccatacatctggcgtggctataacgcatatgaacaggcccaaa

SEQ ID NO: 11929 - DNA, 94 bp, Zea mays
  Clone ID: LIB3150-077-P1-N1-A6
ttatcttaagaagtacctacacgtgtaccggagggggcccattgccagggcgatacgcgctacactcatgaagaatttcctgtatcagtgatgc

SEQ ID NO: 11930 - DNA, 386 bp, Zea mays
  unsure at all n locations
  Clone ID: LIB3150-077-P1-N1-A8
gcccgctgaaaaacaaactcaccaacaaagtgacctgaaactgggagcaagcaaccgaaggggagagccatggcgaagcatcgcagcggcggcggcggcggcctcctggacttagaggggcactacgccttctacggcgcctaccacagcaaccccgtcaacgtgggcatccacgagctcttcgtctggcccatcttcctcaccgcgctcatgctcctccacctaaccgncccctccacgcacgccgncggcatcagcgccgcggtctacgcggcctactacttnctnctcgaccgccgcgcgggcgcgctcgccgncctcctctgctacctctgctgggccgcaagcggcgccctcgctgcccgcctcggtttctctgttggatg

SEQ ID NO: 11931 - DNA, 411 bp, Zea mays
  Clone ID: LIB3150-077-P1-N1-B1
ggaacaacagttgctggaagtgaggaaggaactggatggtgcctaccacaccatagcaaatcaggaagaacaggcttctgtgagggagataaagtgggacgcttttaggaagtacacggaggatcgtctggaagctgagcagcagcgtgctgaggagctggaactacaagtagcagctcttaaacaacagctccaagaagctgagatccattataagcaaaaggaagaacaagtttctctaagggaggttcaatgggaagcggatcaaaaccattcgctggatgagcttaacgctcagcgtcagtatgccacagacttggagaaacaaatcgaagatctgacacagaagttaacatcagctgatgcacactacaagcagaaggtgacagaagagagggacaaacttggtga

SEQ ID NO: 11932 - DNA, 406 bp, Zea mays
  Clone ID: LIB3150-077-P1-N1-B2
aaggccgccatggtctccggttcgggcgtgtgcgcgaagcgcatcgtggtggacgcgcgccaccacatgctgggccgtctctcctcgatcatagccaaggagctgctcaatgggcagaaggtggtcgtcgtccgctgcgaggagatctgcatgtcgggcggcctcgtccgtcagaagatgaagtacctccgcttcctccgcaagcggatgaacaccaagccgtgccacgggcccatccacttgcgcgcccccgccaagatcctgtggcgcaccatccgcgggatgattccgcacaagaccaagaggggggaggcggctctggcgaggctcaagacgtacgagggcgttccgccgtcgtacgacaagaccaaacgtatggtcattcctgacgctcttaaggttctga

SEQ ID NO: 11933 - DNA, 404 bp, Zea mays
  Clone ID: LIB3150-077-P1-N1-B3
tgccatcgtctccaatctcgtatactttcgtgctcagcatcatggacggctgccccaagagcgtcggcggtggcggccctaacattccggcgggatcccaccccgcaggcgggagccaggcggcggcaggaggaggcgcgacgcatcggacgcagtatccgtatgtgactggtaattcagtcattgccttgaaatacaaggatggtgtgatcatggcatgtgacactggagcctcttatggatcaactttgagatacaagagtgtggaacgcattaaggcagttggcaagcatagcatcattggagcaagcggagagttcagtgacttccaggagattttgcgctatttggatgaactaactctgtctgatcatatgtgggatgatggaaactcgctgggcccc

SEQ ID NO: 11934 - DNA, 323 bp, Zea mays
  Clone ID: LIB3150-077-P1-N1-B6
ttatatccatccacagatgtgaacgtttccgtctgcggctcacaggacgtccagcatagctgactactgatgcctgacttgtggtgagctcatctagcatgatgtcttcgcttggacgagatggctggtgatgcatgttgttgatctagatcctgacccgaattgcatgatcctgacctacatgaacaggcccttcagtttatctagcactggtgcgcatctagtgtctatatatatacgacgtgctgataggcgacgcattttccatgccatcttttgcgcactacaacctttcataagaactagacaaggtgagatctcta

SEQ ID NO: 11935 - DNA, 385 bp, Zea mays
  Clone ID: LIB3150-077-P1-N1-C2
ggaccacactgtttctgccactcatggtgacatggaccagaacactagagacatcatcatgagggagttccggtctggctcctcccgtgtgctcatcaccaccgacctgcttgctcgtggtattgatgttcagcaggtgtccctggtcatcaactatgatctccccacccagccagagaattacctgcatcgcattggtcgtagtggtcgtttcggtaggaagggtgttgccatcaactttgtgacccgcgacgacgagcggatgctgttcgacatccagaagttctacaacgtgttgattgaggagctgcctgccaacgtcgctgaccttctgtgatcattttgaagaaaaacagaactaacagaacggtggtgggggtgatct

SEQ ID NO: 11936 - DNA, 400 bp, Zea mays
  Clone ID: LIB3150-077-P1-N1-C3
ttgcctcactgccccacactttagcccaaggagggcggcctcgactcgactcgtcttgcttaatacgcccgtccgtccgtccttgccgatccatacacccaataaagcgcctgtacagatccaacccttaggatccggatcgccttacccccccgcgacaatttgcgcgactcgattcgattatatcctccgattttccccgttttttgtaggtttcctctatttttcgatcggtgagctatggtttgcgcgcgcgcaggcgtcgcatttcagggtaatcattggttccaccggctagggtgctttctcacccgccgaacggaagcgaatccagacgatggagaagaagaaggcggcgataccgctggtgtgccacggccactctcgggcggtggtggac

SEQ ID NO: 11937 - DNA, 78 bp, Zea mays
  Clone ID: LIB3150-077-P1-N1-C4
gttgatggtacggtcagacttttcatgcgcaggatacatcttgaaccgggcgcgaccaagacataatttttcatctac

SEQ ID NO: 11938 - DNA, 390 bp, Zea mays
  Clone ID: LIB3150-077-P1-N1-C5
tttcattcagcagcctgagcaccctaggagactccgtgcgaccgaagccagagccagcggaacctaacggaagcgagacccccggcggctagcgagatggacggcggcgccggcgaggaggggaagcaggagcggcacctggtgctggcccacaagctctaccttctatcccacccctccgttgatgacctctccaaggacgccctccgcgccggagtcctcgacaccgagaaatccgatgatatggcgacgctgtttgagccgctggtcgccgcgggtgtgctggagggggacgccgcgctgctggccgagatgcgtgggaggattgactaggagatccgcacgctagatgagaaaattgctgatgctgaggagaacttgagtgagagc

SEQ ID NO: 11939 - DNA, 372 bp, Zea mays
  Clone ID: LIB3150-077-P1-N1-C6
tttcattacagcagcctgagcaccctaggagactccgtgcgaccgaagccagagccagcggaaccgaacggaagcgagacccccggcggctagcgagatggacggcggcgccggcgaggaggggaagcaggagcggcacctggtgctggcccacaagctcttccttctatcccacccctccgttgatgacctcttcaaggtcgccctccgcgccgaagtcctcgacaccgtgaaatccgatgatatggcgacgctgtttgagtcgctggtcgccgcgggtgtgctggagggggacgccgcgctgctggccgagatgcgtgggaggattgactaggagatccgcacgctagatgagaaaattgctgatgcgga

SEQ ID NO: 11940 - DNA, 346 bp, Zea mays
  Clone ID: LIB3150-077-P1-N1-C8
tttcgccctgaacgaccagagaggcggggagaacatgtacttcggtgggttgtgctacgtggtgaagccgggggtcttctccgggggagcggtgctggccctcgccagcgtggcgctagccatagtctactacgtcgcgctgtcatcatccaagggccctccgccggcgttcgcagccccgcagaaccagggcatcgcgatgggccagcccgtgatcatcccgcagcagagcagcgagccggtgttcgtccacgaggacacgtacaatcggcggcaacaggtcccgtgacctgaccacacagaggtctatggttggctcggttggtcgtgcttggtctgtataggt

SEQ ID NO: 11941 - DNA, 394 bp, Zea mays
  Clone ID: LIB3150-077-P1-N1-D1
tgcccacctgttctgctctgccgccgccggcgctgccgctcccgctgccggaggaaccctagaccacgctgagcaacccccggcctacacggcgtagctttgcaggaaatggaatacggcgccgtcctcgccgccgcgccgctcgtcgcacggccgaactggctcctcctctcgccgccgccactggcgccgtctattcagattcagaatcgtctttattcgatctcgtcattcccactaaaggctggacctgtaagggcatgcagagctttagcaagcaactacacgcaaacatctgaaacagttgatttggactgggagaacctgggttttgggattgtgcaaactgattatatgtatattgctaagtgcgggacagacgggaattttctga

SEQ ID NO: 11942 - DNA, 397 bp, Zea mays
  Clone ID: LIB3150-077-P1-N1-D2
atgctgttgatctcactgatgggctgacagatttggaatcctatatgagggttcttatggatggcggtgcaagtgattcaattgatagccttctgaaccttgatggatcacaggatcttggtagcaatatggacctctggaccttcgatgacatgcccatcgctggcgatttcttctgaggaatttgaagcttggccataggactatgtacatagggactagggaataaagactgggagattgggaagcacctgcttggcaccttggggtagcatatgctcgtgtctagctcagatgcagaagtcgcattctgaaactctttggttatcgacctgttccctattttaactatctctgtatgagagccatttatgagactgaaccattttaccatttt

SEQ ID NO: 11943 - DNA, 401 bp, Zea mays
  Clone ID: LIB3150-077-P1-N1-D4
tcgtcatcgatctcgtttcaaatccatccatcctcgtttcctccgtcccgcagcatctcaaccccatggccaagatcaagatcgggatcaatgggttcggcaggatcggaaggctggtggccagggtggccctgcagagtgacgatgtcgagctcgtcgccgtgaacgaccccttcatcagcaccgactacatgacctacatgttcaagtacgacactgtgcacggacagtggaagcaccatgaagtcaaggtgaaggactccaaaacccttctctttggtgagaaggaggttgctgtgtttggctgcaggaaccctgaggagatcccgtggggttcggttggtgctgaatatgttgttgagtctactggtgtttcactgaccaggagaaggctgcagctc

SEQ ID NO: 11944 - DNA, 244 bp, Zea mays
  Clone ID: LIB3150-077-P1-N1-D5
ttgctttctaacacaacaggttgcactccactctggcacctccactgcgctggccggctgcctttataacgcggcgagcccagtgcggggaggcagagaacccaaggacgcgcctcgcctcttctcgcctcgagaaccactcggagggccaccgcgaccgctccggtcggttccggcgaggtgccgcgcggtcgttacagcatatacagggcagacaaagctgcgattttgggggggggggctg

SEQ ID NO: 11945 - DNA, 280 bp, Zea mays
  Clone ID: LIB3150-077-P1-N1-D6
actaacacaacaggttgcactccactctggcaccttcactgcgctggccggctgcctttataacgcggcgagcccagtgcggtgaggcagagaacccaaggacgcgcctcgcctctcctcgcctcgagatccactcggagggccaccgcgaccgctccggtcggttccggcgaggtgccgcgcggtcgtaacagcatagacagggcagacaaagctgcgattttgggggggggggctgttggttcatcaatagttgttgctggagatatatacttgtagg

SEQ ID NO: 11946 - DNA, 386 bp, Zea mays
  Clone ID: LIB3150-077-P1-N1-E3
cgcggcagccgcaaacgccttcgccgtcgcgtcccgctcctccgcccgcccgacgcgacccctggacctggagagagaggtcggcatggctgccgcggtggtcgacgacgctgggatggacgccgtccagaagcgcctcatgttcgaagacgaatgcattttggtggacgagcaggacaatgttgttggccatgagtcaaagtacaactgccatttgatggaaaagattgattctgagaatctgctacatagggcatttagtgtgttccttttcaactcaaaatatgagctgctacttcagcaaaggtccgcgacaaaggttacctttcctttagtttggaccaatacctgctgcagtcaccctctgtaccgtgagtctgagctta

SEQ ID NO: 11947 - DNA, 340 bp, Zea mays
  Clone ID: LIB3150-077-P1-N1-E4
tcgtaaaactcatggctcaggggaaagaatactgggaacggaaaattaatttattgaagtcaaattttgatgaattggttgaggtggctacgaaaaagaaagccatagcagacgatatgggtttgctactacaagccaagctgaggcaagcgtcaccgggcccaagttcatgagagctggatgcacacctcgtctcttctacctatgttgtatcaaacatcatttagttattttgaagttggagtcacgcaccagcgtacattatattctttggcatcttctgtcgcacagcacactatttgaatggtttaattctgctccaaggtataaaattattacc

SEQ ID NO: 11948 - DNA, 317 bp, Zea mays
  Clone ID: LIB3150-077-P1-N1-E5
tcttttattccctagccgcctcctgcaagtttgggagggtatgaatatgcgccagggcgagtgagacggacacctttgtatttcaggctgtgatcaaccagctgctctcactcatcatcaacaccttttactccaacaaggagatctttctccgctagcttatctccaactcttctcgatgcgctgtacaagatcaggtttgagagtttcactgacatgagcaatgctcgatgcgcaaactgttcttttaattcaccttgtcccacacatggccacgatcacgctctttaccattgatagcggctttggaatgatca

SEQ ID NO: 11949 - DNA, 400 bp, Zea mays
  Clone ID: LIB3150-077-P1-N1-E6
tttctttccctagccgcctcctgcaagtttgggagcggatgaatctgcgccagggcgagtgagacggacacctttgcatttcaggctgagatcaaccagctgctcttactcatcatcaacaccttctactccaacagggagatcttcctccgcgagcttatctccaacttttccgatgcgctggacaagatcaggttcgagagtctcactgtcaagagctagctcgaatcgcagcctgagcttttcatccaccttgtcccagacaaggccaccaacacgctctccatcattgacagcggcatcggcatgaccaagtccgaccttgtcaacaacctctttaccatcttcaggtccgtgacgaatgagttcatggaagcccttgctgccggcactgatgcgt

SEQ ID NO: 11950 - DNA, 486 bp, Zea mays
  unsure at all n locations
  Clone ID: LIB3150-077-P1-N1-E9
gataaatataaaaaaataaaaatttttttttaaaaataantataataaaaaaataatgtggtagggtaaaaaaaaaataaaaaagagtatggaaaaaataaatataaatatataaataaaataaattaaaaaaaaataaaaaaaaaaaaattaaaattatataataaaataataaaaaatataaaaataataataaaaaatatataataataaaaaaaaaaaaatgaaaaaattttaaaaaaaaaaataaaataaaaaaaaaaaaataaataaaaaaaattaaaaaaaatatagaaaatataaaaaaaaattaaataaataataaaaaataatataaaaatttataaaaaaaaaaatattaaaaaaaaaaaaaaataaaaatataaataataaaaatataaaattaaaaaataaatataaaaaattaatataaaaatattattataaaataatataaaaaaatttatttaataaaaataataatat

SEQ ID NO: 11951 - DNA, 370 bp, Zea mays
  Clone ID: LIB3150-077-P1-N1-F1
tgagaagagtgggaagcttggatacactaagaagcaagaggagagacattttcgaggtgtcattgtcctggaggaatgtaacctggaagagatagaggaggaagagatatcgaagagttctaaggattcgaagaaggcaaatggacaagagaaaggcccaagtcttgtttttaagattactaacagggtttcctacaaaactgtcttaaaagctcacagtgccgttatattgaaggctgagagtatggctgacaaaattgaatggatcaagaagataaaaggtgttattcaaagcagagggggctctgttaagggttcccactgaagatggtcctatgagacaaagccgttcagatggatcccttgatac

SEQ ID NO: 11952 - DNA, 323 bp, Zea mays
  Clone ID: LIB3150-077-P1-N1-F2
tttgtttctcaaaagatgctgataagatcagaacgaaaatggctgttgcctagggagtatgacgtgtctgggttggacaaaacagtcttatgtctactcctgctgtatctgctgtcatgcgcgagagaattggcgcgaatggatacaacgggtactggtgcctctatgttcacagcgagccatctcccatgtggtcctacggaggactataggctgcaatgctatatgactaataggggacctgaccgtgaatgcgggaccgacgagactatgtctaatacaacgactatctctgaatacctcatctctgaagacctttccag

SEQ ID NO: 11953 - DNA, 399 bp, Zea mays
  unsure at all n locations
  Clone ID: LIB3150-077-P1-N1-F3
tgaggattcaacatatcaatacnactggagatcaaagtgtttggcgcccattttttatgttcgtagagcacctacgtgacaaacatgcaaagaatgaggttttgcatggtgtgttgttaaactactctttgtgaactgtgctcgtctttctgtctagagttgtgtctgatactctgattttcttgatccatatccagaggaagaggaaaaacctgtgaggaaacggggccgtccaagaaaagttagagaggtaccagatgtaccagatctacgcggtgctcggcatgtacgtgggaagaaactttttagagatgatgggcacaactctagtggtgaggaatctattggtgcatctgaccatcaggatcacggtgaagatgacgacagcaacggcgatgc

SEQ ID NO: 11954 - DNA, 355 bp, Zea mays
  Clone ID: LIB3150-077-P1-N1-F5
tattattttacctacagcatctttccactgaaagggtttttatccgcaaggggaagagtacttaatgcccccaagttcgatcttgggaagctcatggaggttcacggcgactacatagaggatgttggtgtgaagcttgagaggcctgtcgagggagaagaggctgtgcaggaagttgctgctgccctgtttttagtttgctagttctatttctatgcgagaatggacatgaatgcaggctattaccagaacttatatagatgtctaggctatatatattcgtctgccctaatattttgtcttggaacaaaattttaaaatttactattattttgcaacaaatttactaaatatt

SEQ ID NO: 11955 - DNA, 354 bp, Zea mays
  Clone ID: LIB3150-077-P1-N1-F6
tttatttctacctacagcatcttcccactggaaagcgtcttcatccgcaaggtgaggatacttaatgcccccaagttcgatcttgggaagctcatggaggttcacggcgactacaaagaggatgttggtgtgaagcttgagaggcctgtcgagggagatgaggctgggcaggaggttgctgctgccgagtagtttgtttgctagttctatttctaggcgagtctggacatgaggttgcttatgacgtgaacttatagagttagcttggctatgtgttttcgtctggccctaacaatttgtcctgaaacaagtttaaaaataaaattatttcgaacaagtgcctaaaattaaaaa

SEQ ID NO: 11956 - DNA, 144 bp, Zea mays
  Clone ID: LIB3150-077-P1-N1-G1
tttccttgcgccgacggcccgagcagccagggccggccatcatgcgagccgggccggctccgcgcctatatccgccgtccgctcgtcccgaggccgcgagccgctccgcggctactaccctccgtccgccgtctgcccgtccag

SEQ ID NO: 11957 - DNA, 123 bp, Zea mays
  Clone ID: LIB3150-077-P1-N1-G12
cgacgtaagctgtttccttagagtctcccacttttttgtatttaacaactcctcccaaatgcagggttcacttacttacgggctgggcgccaaacaccaaaactcctatttccgcactaaaca

SEQ ID NO: 11958 - DNA, 399 bp, Zea mays
  Clone ID: LIB3150-077-P1-N1-G2
ggtacaactctcctgtacaaaaacaaaaggaaggaacagaagccatgactagcaacaagaacactgccggggcgacagcgacggcggcggtgttggtactagtagcggcgacgctcctggcaacggtggtgaatgcacggacttgcttggacggcgtgctgcctccgtcgacgacgtcacatggcgtggttggggatctgctgccgcgcaagatcatcccgccctctgggcccagcgacttatggagccccgacgacgagccgtcgccgccaccgactgcggaggcgacagtcgaccgcggtaattgagcgtgaggaggagtggtgatgaatgagaaatgctgatgtataatgccatgtgcaagaacgagcttgaataatcaacaagagggcagggtct

SEQ ID NO: 11959 - DNA, 328 bp, Zea mays
  Clone ID: LIB3150-077-P1-N1-G3
ttttgttttctccccaacctagccacccagggggagagaggccataagtagggggagagtcacttcatggcttacattgacgcttacagtagggccgctactatagttcgcgctcttgagaagcttatcgcatccacctcctttctcggaactggctccgccttcaggcccgacgcaacattccgtggcctccgatgttacaacacccacgctcatctccgactctacgaggaggccctgtcggaagacgattgactacccgagtacgataggcggtacggaggccacaactaccctgtgcccatgctgtttttaaaatatttttcgt

SEQ ID NO: 11960 - DNA, 398 bp, Zea mays
  Clone ID: LIB3150-077-P1-N1-G4
gtccttcctcggcctcggcatgaccacctacaccggctggtacctcaccatcgccgcggccgtccacggccaggtcccaggcgtcacccactctggccccagcaagctcgtgccctacttcaccggcgccaccaacatcctctacaccttcggcggccacgcgatcactgtggagatcatgcacgcgatgtggaagcctcgcaagttcaagtacatctacctgctggcgacgctgtacgtgttcacgctgacgcttccgtcggcggcggccatgtactgggcgttcggcgaccagctgctgacgcactccaacgccttctcgctgctgccgaggacgccgtggcgcgacgcgcggtggtgctgatgctggtccaccagttcatcaccttcggcttcgc

SEQ ID NO: 11961 - DNA, 380 bp, Zea mays
  Clone ID: LIB3150-077-P1-N1-H1
tgttctttttacatcaaccgcaagggcccgctgatcgtgtacggcaccgagggcggcaaggtcgtcaaggccatccacaccgggaaggttgcggaaggccggacgcgtgggtggtgagcggcgggctggtggtgcgggtgttgctgctggcgccagtgagatgcgcgggctagatctggggcagtgggttggtgctcggcttgcccatctgtgctccgacctcccttcccgtgggcacgttccggcgccggcatcttggcggatccggccgaggaggatgacgagggtgtcgctgccgggggcaggcacaacggcgtgtttggcgggccgcaggttagctcggcgcgcggccatggatgcgttcgcttggagcggcggtg

SEQ ID NO: 11962 - DNA, 364 bp, Zea mays
  Clone ID: LIB3150-077-P1-N1-H10
taccgcctccccgatctcgtcgagaggaagggcaatcccgaaaccggggccggattccaatggcgcccaaggccgagaagaagcccgccgccaagaagcctgcggaggaggagccggcggcggagaaggccacggcggggaagaagcccaaggccgagaagcggctccccgcgggcaagtccgcaggcaaggagggtggcgagaagaaggggaagaagaaggcaaagaagtcggtggagacgtacaagatctacatctttaaggtgctgaagcaggtgcacccggacattggcatctcgtccaaggccatgtccatcatgaactccttcatcaacgacatctttgagaagctggcggcggaggc

SEQ ID NO: 11963 - DNA, 380 bp, Zea mays
  Clone ID: LIB3150-077-P1-N1-H2
ttatgttgtcaaggtaagcagcaatcgcaggaacggtagctcctccgaacccgcaggaatgggtatcgacctcgtcgccggtgggaggaataagaagaccaagcgcactgcgcccaagtctgacgatgtctacctcaagctcctcgtcaagctctaccgtttcttggtcaggaggaccaagagcaatttcaacgctgtcattctcaagaggcttttcatgagtaaaaccaaccgaccaccaatctccatgcgccgccttgtcaagtttatggaaggaaaggagaagaacattgctgtcattgttggcacagtcacagatgacaaaagggatccaggtggttccagcattgaaggttactgctctgaggtttacggagaca

SEQ ID NO: 11964 - DNA, 384 bp, Zea mays
  Clone ID: LIB3150-077-P1-N1-H3
ctgcagttacttgattggttatttagcataaacgaacaatatgtgcctccaaataaggcttgaattgtttatttgtgtaagagaatgcaggcataaatacaaccaatcacagagaggggggccctggggatggtaacaataacgttagatacttgaggggcaccttaaacattcaaggattttggaaacccctctcgtagcactaaggactgctccttcgacacttgggcttgtacagaaatctccacaaatcgccaagttcgtgctcttgtcccaaacgcacttatcatctccactaattgcaatggctgggaaagcagcaccccatctgtgagctttcataaaaattggccgtggaatgcttaatccagtcgcctggaattt

SEQ ID NO: 11965 - DNA, 408 bp, Zea mays
  Clone ID: LIB3150-077-P1-N1-H5
tcggcctccctccgcagggctctcctccggcacttgtccgtgggtcccgcctggactccgcgcgccgtctcccgggtcccagatttccaggttcctcagtctattatgtggaggcatttcgcaacgtccaggcctaattctcttgcaagacgcgacaactttggtctgatggcctgtttgcacgctcagatacgatgcgcttcgcaggctgctgctgtgaaagaaaccgaatccagtagcagcaagataagcatcgggcccaaaccaaaacagatcaaggaggatgacgaggatgctaacctggtataccaagggccaatatcatcgaccataaagaaagtgaagcttctctccctgtccacctgctgcctctccgtgtcgctggggccagtggtaacattcatgact

SEQ ID NO: 11966 - DNA, 408 bp, Zea mays
  Clone ID: LIB3150-077-P1-N1-H6
tcggcctccctccgcagggctctcctccggcactggtccgtgggtcccgcctcgactccgcgcgccgtctcccgggtcccagatttccaggttcctcagtctattatgtggaggcatttcgcaacgtccaggcctaattctcttgcaagacgcgacaactttggtctgatggcctgtttgcacgctcagatacgatgcgcttcgcaggctgctgctgtgaaagaaaccgaatccagtagcagcaagataagcatcgggcccaaaccaaaacagatcaaggaggatgacgaggatgctaacctggtataccaagggccaatatcatcgaccataaagaaagtgaagcttctctccctgtccacctgctgcctctccgtgtcgctggggccagtggtaacattcatgact

SEQ ID NO: 11967 - DNA, 238 bp, Zea mays
  Clone ID: LIB3150-077-P2-N2-A1
tcgacctggaccgcccgcgccgctactttcggttcgtctactccaacgacgtcgtgccgcgggtgccctacgacgacgccgcgctcctgttcaagcacttcggcctgtgcctctacttcgacagcttctacagggcggcggcgattgctgaggagcccaacaagaactttttctcgccgctcttcttggcgcccatgtacgccaacgcggcctgggtgctgtttcgcggcttcctcat

SEQ ID NO: 11968 - DNA, 259 bp, Zea mays
  Clone ID: LIB3150-077-P2-N2-A10
cctcgcgccgccgccacagcaaccctggcagccccaatcccccacggggaccatggccggcgcgcaggagtccctctccctggtgggcacgatgcgcggccataacggcgaggtgacggcgatcgcgaccccgatcgacaactcgcctttcatcgtctcctcctcccgggacaagtccgtgctggtgtgggacctgaccaacccggttcactcctcccctgtattcggcgttaccgttcgtctatctggttgtcttctt

SEQ ID NO: 11969 - DNA, 272 bp, Zea mays
  Clone ID: LIB3150-077-P2-N2-A11
tcttctcgctggtgtcccctctctctcacccatggcttcttcggcggcggggactgaggtagttacttacttcctgcggaactactacaaccttctgcaacaaaccccctatttcgtccaccatttctacagctaatccagcaccattgtccgcttctaccacctcactttcacgaccgtagcttccaacaacatgatttacatacactcactcatcatgtttttgaactttacccaaattgagatctttactgccaattccttttactcat

SEQ ID NO: 11970 - DNA, 405 bp, Zea mays
  Clone ID: LIB3150-077-P2-N2-A12
gtataaaaccccaccccatctgcgtcgaggggtttcctcgaagcctcggatcggcgccgagaaagcatctccagggggatttttgggaagaagtagtggttgagccatgggcaaccttcacgccaaaggtgctggtacgggcgccaaaggtgctggagcagcaaacacttccatctcgaattctggggactcgatgtccaatgccgctacaccttctcccgtagagcaggcaaccttcaagtgggtcattgatggcttttcctccctgcttgacaaggatcaaggatggacatactccaacgtatttgagctcatgggtgtagaatggtatctgaaactgaatccaaagttcgaagtcagtaatgaggagtgtgtttctctcatgcttgaactgtcgcagagttc

SEQ ID NO: 11971 - DNA, 409 bp, Zea mays
  Clone ID: LIB3150-077-P2-N2-A2
ctttctcagtcccctctagccgccgcctaccgctcgcgctctcctcgcgttcgggaaggtcgtttcgccatggcctcggagacggagacgttcgccttccaggcggagatcaaccagctgctctcgctcatcatcaacaccttctactccaacaaggagatcttcctcagggagctcatctccaactcctccgatgccttggacaagatcaggtttgagagtttgacggacaagaccaagctggatgcacagccagagctgttcatccacattgtccccgacaaggccaacaacacgctgacaatcatcgacagcggcattggtatgaccaagtcagaccttgtgaacaaccttgtaccattgcgcggtcaggcacgaaggaattcatggaggcacttgcttgctgggc

SEQ ID NO: 11972 - DNA, 240 bp, Zea mays
  Clone ID: LIB3150-077-P2-N2-A3
tttttatttttaacaactatattattcaaattcttggggattactatcagaaagagaagggagacttcttccatactctaatcctgctttctacattacccaagagaaacactaatctctcgaccagtgtgtagattcatccttcttcaatgccaccatcaacttccattctttatgctccatcatgccttccttctgctgatatcattcctttacctaacaatactattatacacaaaa

SEQ ID NO: 11973 - DNA, 252 bp, Zea mays
  Clone ID: LIB3150-077-P2-N2-A4
tttctctttcccctgtacccgcgtggtcttcggtcttgccaagtttcacgtgggggctcgcttccccccaaaacttttttcgtttgcagatcggctcatttttgttctgcaattgctttttcattcttatataatatctatttattttttcatttctttagttattattctttagtttttttattctttaacttgttttctatttcattattatttttataatctttattcattttctttatactttatttt

SEQ ID NO: 11974 - DNA, 270 bp, Zea mays
  Clone ID: LIB3150-077-P2-N2-A5
gttcctgcggaggatcctgaccggctgtggcgggctggcggccctgagggcggggcgcgccttgaaggagacgacggggatcgtgggccttgaggtggtgcctaacgcgcgagaggttctggtagggctctacgagcgcacgctcaaagagatcaaggccgtccccgaagactagggttaccgcaaggccgttgaattcttcaccggtcaccgtctccagatctgcctggaggtggtggactggaagctcattttggaccgaatcatttt

SEQ ID NO: 11975 - DNA, 380 bp, Zea mays
  unsure at all n locations
  Clone ID: LIB3150-077-P2-N2-A6
cttcacttccgctacataccgtcnaggagacgaaaggagggagttttgagaagcgtgggtggctcctaaagccgctcctgtcaagaagggtgatgccaaggcccaggccttgaaggtggccatggctgtgaagtctggggcaggcaagaagaagaccaagaagattcgcacatctgtaacatttcaccagcccaagaccctgaataaggccagggtacccgaagttcccaagaatcatcactactggaagaaacaagctttatcagtaccaaatcctcatgttccctctcaccacataatctgtattgaagaagattgtagataacaacactcttgtctttattgttgacctcaaggcagtcaatttaaaagattaaggc

SEQ ID NO: 11976 - DNA, 406 bp, Zea mays
  Clone ID: LIB3150-077-P2-N2-A7
catttctatcctgatgcaacgccatgtacttggtgatggcaaggtcaggactgacaagacctaccctgctgggttcatggatgtcatttccatccctaagacaatggagaactacaggctgctttatgacaccaagggccgcttccgtcttcacccaatcagggatgaggatgccaagttcaagctctgcaaggtgaggtccgttcagtttggccagaagggcatcccctacctgaacacctacgacggccgtaccatccgctaccccgacccgctcatcatggccaacgacaccatcaagatcgattctggataccaacaagatcatggactttattaagtgtgacgttggcaacgtggtcatggtgaccggcgggaggaacaccggtcgtgtaggtgtgatcaa

SEQ ID NO: 11977 - DNA, 425 bp, Zea mays
  Clone ID: LIB3150-077-P2-N2-A8
accgcatccacctccacctccaccgcgccgcggcgagagaggggaggagggtggccgatggagaacggcgaggagacgttcgcctcccccaccgccgccgccgtcgcggacttcgagatctccatcaacggcgaggacagcacgcccaagctccacaatttggcggacgagatggaggccctccgcgcggcgaagcgcgacctggaggagaagctcgatgccgtgggacacgagaaccggttcctgtcctctgagtcccggcgcctcgaggtcctcgtgtcccaggcccgcgaggaggtcttctctgccgagcaagtctccgccaccaactagagcgaggtcctcacgctccgtgccgaggtcgagcgtttccatggccttctagccgcagagaatgccagtcatgatgaggagatgctcatggt

SEQ ID NO: 11978 - DNA, 415 bp, Zea mays
  Clone ID: LIB3150-077-P2-N2-A9
cgacgcacgcagagccgcagagatccgtcacgctgcaagttttgaaaactgagctgtaagatggcatcagcagagctttcccgtgaggaaaatgtgtacatggcgaagctcgccgagcaggcagagaggtacgaggaaatggttgagttcatggagaaggtagcgaaaactgttgactcggaggagctcactgtggaggagcgcaacctcctgtctgttgcatacaagaacgtcattggagcccgccgtgccttatggcgcatcatcttctccatcgagcagaaggaggagggtcgaggcaatgaggaccgtgttacactcatcaaggactaccgtggcaagattgaaactgagctcaccaagaactgtgatgggatcctcaagcttttcgaattttaacttgtgccgtttttca

SEQ ID NO: 11979 - DNA, 443 bp, Zea mays
  Clone ID: LIB3150-077-P2-N2-B1
ctcgtccacccgtcgtcctcctagctcctctactcgccagtcgccatgggcaagattaagatcggaatcaacggcttcggaaggatcggcaggctcgtggccagggtcgccctccagagcgaggatgtcgagctcgtcgccgtcaacgaccccttcatcaccacggactacatgacctacatgttcaagtacgacaccgtccacggccactggaagcacagcgacatcacactcaaggactccaagacccttctcttcggtgacaagccggtcaccgtctttggcatcaggaaccctgaggaaatcccgtggggtgaggctggcgctgagtatgtcgtggagtccaccggcgtcttcactgacaaggacaaggcttgtgcacatctcaagggtggtgccaagaatgttgttatctctgccccaagcaaagattctcccatgtt

SEQ ID NO: 11980 - DNA, 415 bp, Zea mays
  Clone ID: LIB3150-077-P2-N2-B12
atcttcttcttgtcctccgcctccatgtcgcgttcccttcgttgcgtcttgaaaggggagagagagagagagaagagagagagaagagagagagagagagaggagtgggagacccgcgagaggctgccgtgtagggaccgtagactcagcgactgcgaaggagggataaggggatggccgggatcggaccgatcaggcaggactgggagccggtcgttgtgcggaagaaggcacccaccgccgccgccaagaaggatgagaaggccgtcaacgccgcgcgccgcgcctgtgcggatatcgataccatgaagaagtacaacgctggtactaacaaggcggcattcagcgggtcatccctcaacaccaagcgccttgacgacgacacctattacctcgtccattgagcgagtttcaa

SEQ ID NO: 11981 - DNA, 197 bp, Zea mays
  Clone ID: LIB3150-077-P2-N2-B2
cccaaggtcccttttttttctcgatctggaagcgcgcgcagtagcagccatggacgtgagcggagcatgcgggaaggcgaagaagggcgcggccgggcgcaaggccggcggtccgacgaagaagtcggtgtcgcggtcctccagggtcggtctgcagtttcccgtcagccgagttgggcggtacctcataaagggcc

SEQ ID NO: 11982 - DNA, 248 bp, Zea mays
  Clone ID: LIB3150-077-P2-N2-B3
gtcgtctacaactctctctaccgtccgagaccgcaagcaccaccgcggcggcggcgaccatggctgtcggaaagaacaagaggatcttcaagggaaagaagggcggcaagaaaaagaccgtcgaccctttctctaagaaggaatggtatgacatcaaggcaccgtctgtgttcagtgtgcgcaacatctggaagactctcgtattcaggacacagggtaccaggattgcttttgggggtctgaagcac

SEQ ID NO: 11983 - DNA, 384 bp, Zea mays
  Clone ID: LIB3150-077-P2-N2-B4
gtcactttcggtccaactggcctgactactgaggtgaagtctgttgagatgcaccaggaggctcttcaggaggcccttcctggtgacaatgttggcttcaacgtgaagaacgttgctgtgaaggatctcaagcgtggttttgtggcctcaaactccaaggatgaccctgccaaggaggctgtcatcttcacgtcccaggtcatcatcatgaaccaccctggccagatcggtaactgctatgccccattgctgtactgccataccttccatattgctgtcaagtttgcttagcttattaccaaaatcgacattgcgttctgttaaggagcttgataatagtcccttgttcttgaatatctgctattcttttattttttatatttt

SEQ ID NO: 11984 - DNA, 181 bp, Zea mays
  Clone ID: LIB3150-077-P2-N2-B6
gttacttgaaagagaggatactggaattcagagcagttgggaagttaagagagacttcacaaggcatgatcatatgtctttctgggccaccaggagttgtgaaaactagtattggtcgttcaattgcacgtgcactgtaccgccatttctacaggttttttgttggagttttggctgatgt

SEQ ID NO: 11985 - DNA, 112 bp, Zea mays
  Clone ID: LIB3150-077-P2-N2-B7
ctgacgcgtgggctcgcctcgagatcttagcgagcagctccggagagcgccagcgagccccctgatccctcctcgccgccgccgccaaccgaccgggggaggagaggagggg

SEQ ID NO: 11986 - DNA, 318 bp, Zea mays
  Clone ID: LIB3150-077-P2-N2-B8
gtgcgctcggtgcagctgctcaagattgacggctacagcgccaccgctgccatgagcgagttggatttcatcaaatccagaaggaacctcgctggccacgagtgggaggtccttttctatcctcagttcagccgttacggtggctgcatagctttgaagctcgtccttgtcagtgaacccccgagggacatggacaagctgttgagggcgagcctgagatgccgccttggttgccctagccagccgcattttcatgcctccatagagaagagcgtgttccatgtatttaccagtgacttttagatgctcgtctgttgt

SEQ ID NO: 11987 - DNA, 278 bp, Zea mays
  Clone ID: LIB3150-077-P2-N2-B9
gttgatatctcatctagccagcccagctctataagaactgggaattcagaagctgtgtatcaattaattggtatgtttgctgcactagctgcacaaggtgacagagcagctggatcactgcatatcctttcatacagtatcgctagtgacttactagcggtggtggtaatggttaacatgcaacatcttccaatcttttgttctgaagttgtccaacagtagtttccttctacgtgctcttgagatggacttccactttccatggttctcctttttgc

SEQ ID NO: 11988 - DNA, 391 bp, Zea mays
  Clone ID: LIB3150-077-P2-N2-C1
caacagctaagcctctcccacaagacagcaacatggctgaggaggaggccaagaaggtggaggtggaggtcaccaaggagcccgaggcggcggcgaaggaggacgtagccgatgacaaggccgtcatccccgcgaccgacccgccgtcgtcgtcgccgccggccgacgactccaaggccctggccatcgtcgagaaagttgcagatgaacctgctcccgagaagcctgcccctgcgaagcaagggggctccaatgacagggatctcgctcttgcaagggtggaaacagagaagaggaactctttgatcaaagcttgtgtagagaatgtgaagtcaaaagctgataacaaggctgcttagaaagtattcgctattttttcatgggaaaacac

SEQ ID NO: 11989 - DNA, 337 bp, Zea mays
  Clone ID: LIB3150-077-P2-N2-C10
tcgtctccgtgctgaagatgtgcatggcaggaatgtgctcacaaacttttggggtatgaattttaccactgacaaactcagatccctagtgaagaagtggcagacattaatcgaagcccatgttgatgtcaagacaaccgacaactacatgttgcgtttgttctgcatcggcttcaccaagaggcgccctaaccaggtcaagagaacctgctatgctcaggcatcccagattcgtcagatccgccgtaagatggttgagattatgatcaacctggcgtctacatgtgacctgaaagaacttgtttcgaagtttattccataagttattggtaattga

SEQ ID NO: 11990 - DNA, 339 bp, Zea mays
  Clone ID: LIB3150-077-P2-N2-C11
tttgtcttcaagccacaccaaaccacactgcgacacacagtaggcgaggcgaaggagaggcaaggcggcgcggcgggcaagatgtttgacgatcaagacctgggcttttttgccaatttcctgggcatcttcatctttgtcttggttattgcgtaccacttcgtgatggcagacccgaagttcgaaggaaactgatgtcctctagtgcaaagatcctattatctgcaggccgaaatagggctattctgttagctaatgctagtgagatcgcttgacactttgagtgcatatcattgatgcttgacatgcagtttctggcattttgggttttcccatgtt

SEQ ID NO: 11991 - DNA, 435 bp, Zea mays
  Clone ID: LIB3150-077-P2-N2-C12
tctagcagcaagaccagctgccatggcaccctgaaaaatctcgcagccgagctcctcttccggtcgccgctcctccctgcgagctccctgttcctgtcttcctcacggctgcgcgcaggagtttcctcccagccatggccgccagcccccggcgagctcgggttcttctccctggccgccctgctccctgtccacggcgcccaggaattccagcagcagcagggagtcgtgctcccctccatggcgagcagcaagccggcgccctctccatttttcccctgctccatggcgccccctgctcctccctcggcgcgctgaagcttcccccatggcagcgagcttgcagttgccgatggccagcgccctgcacattgtccgatcccctcttcttcccaaacagcgggcgacgttcatcttcctgcttccagatgggct

SEQ ID NO: 11992 - DNA, 287 bp, Zea mays
  Clone ID: LIB3150-077-P2-N2-C2
gcggatcgagatggcggcgtcggatgttgaggaccgctgcttcgtcggcgggctcgcctgggccacggacgaccactccctccacaacgccttcagcacctacggcgaggtcctcgagtccaagatcatcctcgatcgggagacgcagaggtcccgcggcttcggcttcgtcaccttctccacggaggaggcgatgcggaacgccatcgagggcatgaacggcaaggagctggacggtcgtaacatcaccgtcaacgaggcccagtcccgcggcggccgtggaggcg

SEQ ID NO: 11993 - DNA, 306 bp, Zea mays
  Clone ID: LIB3150-077-P2-N2-C3
attggtgagacccttgagcagagagaggcaggaacaacattggatgttgttgctgcacaaacaaaggctattgctgaaaaaatatcagattggacaaatattgtgttggcatatgaaccagtttgggctattggtaccgtcaaggttgcaactgctgctcaggctcatgagggttatgatggtctgagaaatgtggctccactccaatgttagcactgcagtagctgcattgacaaggatttttcatggtggggctgttaatggaattatacttaaataacttgcaggttaaccagatgttgttgg

SEQ ID NO: 11994 - DNA, 308 bp, Zea mays
  Clone ID: LIB3150-077-P2-N2-C4
ttcgaggcaaaagcattgcgaccacatacagggcgcgcttcaaggcctttgtgtttttgagataacaaggaggagaggaggagatggcggtcactatcacgtgggtgaaggcgaggcatatctttgacagccgtggcaaccccaccgtctaggtggacgtggtccttagttactgtagctactcgaggggtgccttacctatcgttcattcactggaatatattaggccttgtttttgttggataggtggatcttattttcttttcattgttatttttattgtgggatttatttgataattaattttt

SEQ ID NO: 11995 - DNA, 266 bp, Zea mays
  Clone ID: LIB3150-077-P2-N2-C5
gtcgagttcaaatctcacaatcttcttgtagcacaccactgtcttcgtccaactcggcggcgatgtctgggcgcggcatgggcggcaaggggctgggcaagggcggcgcgaaacgccaccgttagggtctccgtgacaacatccagggtattacgaagccggcattcctgaggctggcgaggtggggcggcgtgaagcgtatcttcgggcttatctactaggaaacccgcggcgtgcttaagatctttcttgagaatgtcattctt

SEQ ID NO: 11996 - DNA, 312 bp, Zea mays
  Clone ID: LIB3150-077-P2-N2-C6
gttgcttcatcagcctcgacgacgtcatcgagatcgccaggaccatgaggcacaggtgcatggccattgaattggccggcaccgtcatggagatcctctgtacctgctttagctttttttgcacctgtgtcggtatgtaccccatggacctgcatcatgagattgacgacagtttggtggtttttccgttcgttaattaagtgatgttgtttatatactgtgttttctattgtttcagtaaatattttttttatatcttatatttatttctattaatatttctatgttaaactttataattatttattattt

SEQ ID NO: 11997 - DNA, 361 bp, Zea mays
  Clone ID: LIB3150-077-P2-N2-C7
cagcttttacctagagatctttctgttgttgaaggcaagagaggctttagggtgatggcgcaaactagcctgcctcctggttttcgtttccacccaaccgatgttgagctcgtttcctattacttgaagaggaagatcatgggaaagaaacatatcgtggatgctatagcagaggttgatctgtacaagtttcctccctgggatctatgtgacaagtcctctctttgaagtaaagatcttgaatggttctttttttgtcctcgtgacaagaagtttcctaacgtgtctaggacatatcgtgccacaccatatggttactggatgacttgtgtaaaggtttgaataattttgcttatcttcc

SEQ ID NO: 11998 - DNA, 310 bp, Zea mays
  Clone ID: LIB3150-077-P2-N2-C8
cttgggatgcattttacaaagctgttgacccaagtgggattgaggagggccttcaaagtctgcgtgtaggtggtgtgccaccaaggtttctgattatagatgagggtttgcaagaaactggtgactaaatcaaggaagtgttttaagccctccttgtgcatactgtgtttgtgcttaggctggcttttcttaaagtgtttcattatttcattggttatatctatgtgtttcttttaatccttgttttttcttttatatatttttatgtgtattacttcgttatgcatcttgttttatttttttttttatt

SEQ ID NO: 11999 - DNA, 302 bp, Zea mays
  Clone ID: LIB3150-077-P2-N2-C9
ttatttaaaaaaaaaaataaaaaaagagatagggaaaaaaaaaaaaagaagaagaataaaataaaataaatatataatattataaattaaaatataataaaataaataaataaaaggggcgtccccccctggatttccggcccgttcccttttgttttcccaatttcccctattggtagtcttttttatacctcgtgctaacatagtctttttcttttccctgggttaaattattatcccttaacttttcccttcacctctcttcccgattccttatactttattcttctgttgtcccttat

SEQ ID NO: 12000 - DNA, 440 bp, Zea mays
  Clone ID: LIB3150-077-P2-N2-D1
gagaaaccacggctgccggcccccatcgagctagagagagaaaccaaggccaaggagcacagcaccccgtccgtccccagcaggagagcgagagacagaaggctgtgcgaagggaaagaagagacggtgggagaggagggcgacatggagaggccggcaccggtgaggaagtctcacacgtcgacggcggacctgctgatctggccggagggggcgccgcaggagtcgcccgccggggccacgccgtcatccaaccgccggccgcatcagccgtcggaggcgctcaggaaggtggtgttcggcgggcaggtgactgaggaggaggccgagagccttaacaagaggaaaccatgctctgctcccaagtggaaggagatgacaggtagcggcatatttgctgctgggggcgaggctgaagaagatgaatctggcaatgcctt

SEQ ID NO: 12001 - DNA, 310 bp, Zea mays
  Clone ID: LIB3150-077-P2-N2-D10
tcgtaccgctccgcatcttcttccatagcaagtcgagcgcggcggtcactgaaccccgtcccacactcacccgtccgttccgcgcgatcagccgagcgatgtcgtcgtcggcgcccgcaccggccgtcatggccgtggacgacgcggaggacgaccagctcgccttcatgtccacggaggagatcatcagggcctcccgtctcctcgacaacgagatccgcgtccacaaggactagctgcagcggtcgaacctggagctggagtctatcaaggagtagaccaaggtgatccaggtgttgattttgcttaa

SEQ ID NO: 12002 - DNA, 411 bp, Zea mays
  Clone ID: LIB3150-077-P2-N2-D11
gtgacccccggcgtcgcggccgacgtctcccacatcaactcccccgccctggtgaaggggttcatgggggacgaccagctcggggaggcgctcgagggctccgacgtcgtcatcatccccgccggggtgcccaggaagcccggcatgactagggacgacctcttcaacatcaacgccggcatcgttaaggggctctgcactgccatcgccaagcactgccccaacgctcttgtcaatatgatcagcaaccctgttaactccactgtcccgattgcggcggaggttttcaagaaggctggtacttatgaagcgaagaagctgtttggtgtgactactcttgatgttgttcgtgctaaaactttttatgctggaaaagcgggtgtgccagttacttgagtgaacctacctgtt

SEQ ID NO: 12003 - DNA, 363 bp, Zea mays
  Clone ID: LIB3150-077-P2-N2-D12
caaaatctcatttgagcgtgcaagctccttcgcctcgaaccctctcgcgcttggcttgctttcactctccagggccccactcccacctcgccgccgcagccatggcgatcacagcgccaactcccgacatcctcggcgagcgccagtccggccaggacgtccgcacgcagaacgtgatggcttgcggggcggtggccaacatcgtcaaatcctcgctcggccccgttggtctcgacaagatgctagtggatgatattggtgatgctacaatcactaatgatggagcaaccatacttaagatgttggaagtcgagcatccagccgtcaaggttcttgctgagttggctgagctccaagaacgtg

SEQ ID NO: 12004 - DNA, 372 bp, Zea mays
  Clone ID: LIB3150-077-P2-N2-D3
tcgagacctaaaacctcagaacattcttcttgttgaaaataatgaaaattctctgttgaagatcgctgactttggatttgcaaaatttttgcaaccttttgccctagctgaaactctttgtggttcgccactttacatggctccagaagtcatgcaagctcagaagtatgatgcaaaggcagatctgtggagtgtcggtgtcattctatatcaacttgttactggaagaccaccttttaatgggggcaatcagatccagttgcttaaaaatatactcaggacatgtgaaatacgcttcccatctgattgtgacttgagccatggctgcattgacttgtgcagaaagttgctgcggctcaattcagtggatcg

SEQ ID NO: 12005 - DNA, 189 bp, Zea mays
  Clone ID: LIB3150-077-P2-N2-D4
tgttgttgtgtggctgcgcagcgagctgcttgagcagcggcgtctctaggtagtcgtgtggcgtcccttccctacgagccccaccagctgtggtgggaccgtctggcgccgcgggccttggcaccgtcctccgtcgccaaccgcggcataggcttcgtggtggtcctccagatggcgctccatgggctc

SEQ ID NO: 12006 - DNA, 302 bp, Zea mays
  Clone ID: LIB3150-077-P2-N2-D6
ttcttattggacccagtcgttggtagacaagatcagattgagcgtgttactcagattgtgggcaggcggacaaagaacaacccctgcctaattggagagcctggtgttggaaagactgctattgctgaggggcttgctcagcgtattgccaatggggatgtttctgaaacatttgaaggaaagatggttattactcttgtcatggggctcctagttgctggttctaaataccttggagtgttttgatgagtgactaattgaatcttatgtatttatttttgcaacttgaatacatttatttt

SEQ ID NO: 12007 - DNA, 162 bp, Zea mays
  Clone ID: LIB3150-077-P2-N2-D7
ttcgtcgtcggtgaccaaggagagcccggagcagcatcttacccgggaccgggagcagcagcacgacgccggcgtggcgtggctgaacctcacgcttcgcgcgggcgagttgtcctcgccggacgcggctgctagctgtttcgtctagtccgggtccgggtc

SEQ ID NO: 12008 - DNA, 328 bp, Zea mays
  Clone ID: LIB3150-077-P2-N2-D9
accaagtactactgcacggtcattgatgcccctggacaccgtgacttcatcaagaacatgatcactggtacctcccaggctgactgtgctgtccttatcattgactccaccactggtggttttgaggctggtatctccaaggatggccagacccgtgaacatgctctccttgcgttcacccttggagtgaagcagatgatttgctgctgcatcaagatggatgcaaccactccgaaatactccaaggcacgttatgatgagattgtgaaggaagtctcatcctacctcaagaatagtgggtacaacctctgtaagattgactttattt

SEQ ID NO: 12009 - DNA, 392 bp, Zea mays
  Clone ID: LIB3150-077-P2-N2-E1
gctctcattggaccccaggaagcaatcgcgctgatcggggccgccgcctagcggtgccgtgcgggttagggcgcgaggctggcgctagctcgagctcgcggctgccgcaaggtgctggaaatgtgaggagtatgtcctcgatacgatttggatatgttagaagccagctcctctgttctggcaccatttgctaggattttgttatggtgtttattaggcagccatgaaaagtctgatatgcttcgaacagaagatggacatcaggcaatgggaaatgggtgcaactgcaaggagaacagattaacattacattagtggtcagcgacatgatccatttaacaccactcaaggtccacataagtccttagcggccatgggtgtttcgcagcgga

SEQ ID NO: 12010 - DNA, 225 bp, Zea mays
  Clone ID: LIB3150-077-P2-N2-E10
tcttctcgcgtcgcggtcgcacgcgtaccaccggcgtgggctctgggccatcaaggccaagaacggctgcgtcttccccaaggtcgagaagcccgccgccgccgcggaaccctagttctaccccgccgacgacgtcaagccttgcgttcccagcacccgcatgcctaatcccaccatgctcaggacgagcatcacgcctgggacggtgctgatcctctttgcggg

SEQ ID NO: 12011 - DNA, 336 bp, Zea mays
  Clone ID: LIB3150-077-P2-N2-E11
tcgttcgagtcacgataggaggaagactggaagaggaggctagcacgtttgcggtgcccaccctcaccgtccactccaaaaccccaaatccagttccgttccaatcgccgagaagggcagctaaggggagaaaaaaaaggaaaacgattgcggctgccgtcggctagaacagcggctcggtctagggcgagtgctagttttacctgcgctactactttggtcacatgggctagttcggtcacgagttcctcgagttcgagttccttcctgtcgtcatgcttcgttactcctacattcttaactacatgatctacaccattatccgcatggaggttt

SEQ ID NO: 12012 - DNA, 417 bp, Zea mays
  Clone ID: LIB3150-077-P2-N2-E2
tttacccgcagctcgctcccaccaaacccacagccgaacaatggcgtcggcgtccaaggaggatgttatcgggaagctcaacgtccgcgtggtgcggggcaacaacctggtcatcgccgacccgctcacccacaccagcgacccctacgtcgtcctccagtacggcgctcagaaggtgaagactagtgtccagaagaagaactccaatccagtgtggaacgaagtactgcagctctcagtaacacatcctacgaagccagtgcaccttaaatatggatggtatggaaccatgtctgccattggtccgctgatatcgccgtcacaaatacgaacaaattgaccgcatgtatttctaactacgaaacaaccaggaaaaccgactcttgatttctgaattgctccgctaatgccacacag

SEQ ID NO: 12013 - DNA, 376 bp, Zea mays
  Clone ID: LIB3150-077-P2-N2-E3
ataacaggcaggtcaaagccaagcaggttacgtttccacaggaagaagaatctgcagtactatgaaatttctgccaagagcaactacaactttgagaaacctttcctgtacctcgcaaggaagctggctggtgatccgaaccttcactttgttgaagctgttgctcttaagcctccggaagttaccatcgacatggctatgcagcagcagcatgaagctgagcttgctgcatcagctgcacaacctcttcctgatgacgatgatgatctgattgagtagaaaggatcatgagtcttgaacttgatcaggagttgagccttgcatgttttaagatagtcttatggtgaattcttgagtttcttatttgactggatca

SEQ ID NO: 12014 - DNA, 425 bp, Zea mays
  Clone ID: LIB3150-077-P2-N2-E5
gaaaaatatccccaaaccctagctcccgatctcgatggcgaaccctcgcgtgttcttcgacatgaccgtcggcggcgccccggcgggccggatcgtgatggagctgtacgccaacgaggtgcccaagaccgcggagaactttcgcgcgctgtgcacgggcgagaagggcgtgggcaagtccgggaagccgctccactacatgggctccaccttccaccgcgtcatccccgagttcatgtgccagggcggcgacttcacccgcggcaacggcaccggcggcgagtccatctacggcgagaagttccccgacgagaagttcgtgcgcaagcacaccgcccccggtgtgctctccatggccaacgccgggcccaacaccaacggtctccagttcttcatcttgcaccgtcgcgaccccttggctcgac

SEQ ID NO: 12015 - DNA, 198 bp, Zea mays
  Clone ID: LIB3150-077-P2-N2-E6
tcgtcttcgatctcgtttcaaatccatccaggctggtttcctccgtcccgcgaggatgtcaaccccatggccaagatcaagatcggtatcaatgggttcggcaggatcggatggctggtggccagggtggccctgcatagtgacgatgtctagctcgtcgccgtgaacgaccccttctttctgcaccgacttcatgtc

SEQ ID NO: 12016 - DNA, 277 bp, Zea mays
  Clone ID: LIB3150-077-P2-N2-E8
ttcggcgcgggcggacaaggagcaggcggaggaggagctgtgccaagcgacaatgggtatctcgcgtgactcgatgcacaagcgccgggccaccggtggaaagcagaaggcctggaggaagaagcgaaagtatgagcttggtcgccagccagccaacaccaagttgtcaagcaataagacagtgaggagggtccgtgttcgtggaggtaatgtgaaatggagggctcttcgccttgatactggttactactcatggggaagtgaagctgttacccgt

SEQ ID NO: 12017 - DNA, 304 bp, Zea mays
  Clone ID: LIB3150-077-P2-N2-E9
gctctgcgatctccgtagcctccgtcgcgtcgagcatcgatcatgtcggcctactgcggaaagtacaaggatgagctcatcaagaatgctgcctacattggcacccctggcaagggtatccttgctgctgatgagtccactggcaccattggcaagcgcctttccagcatcaatgtcgagaacgttgaggagaacctccgtgccctctctgagcttctattctgctgccctgttgctctccagtacatcagctgtatgatcctcttctaggagaccctgtaccagaagaccaattttggcaagc

SEQ ID NO: 12018 - DNA, 258 bp, Zea mays
  Clone ID: LIB3150-077-P2-N2-F1
gttccaactcctgagcactttctcctcgtcccagacaagccaatcgaagccgagatacgaccatggactccaccggcaccggagcagggggtaaggggaagaagggagcggccgggcgcaaggtcggcgggccaaggaagaagtcggtgtcgaggtccgtgaaggccggtctccagttccccgtcggccgcatcgggcgctacttgaagaagggccgctacacgcagcgtgttggcaccggcgcccccgtttacctag

SEQ ID NO: 12019 - DNA, 369 bp, Zea mays
  Clone ID: LIB3150-077-P2-N2-F11
tcgtcttaagcgcgaggcccgtttgaagggtggtttctatgtcagtcctgaggcagagctgctctttgtggtccgcatccggggtattaacgccatgcaccctaagaccaggaagatcttgcagcttctgcgattgaggcagatcttcaatggtgtgttcctcaaagtcaacaaggcgactattaacatgctacgcagggttgagccatatgttgcatatgggtacccaaacttgaagagtgttagggagttgatcttcaagaggggctatgggtagctgaacaagcagaggttccctttgttcaactaccaatgtattcgatgagggcttgggcttgcacatcataatctgtattgtggattttgttc

SEQ ID NO: 12020 - DNA, 282 bp, Zea mays
  Clone ID: LIB3150-077-P2-N2-F12
tcttacacggtctccctcttcctgtcagtagtagagtgagagtgaggcggcgagtgggatacatggggaaatgggtaagggagctcatgggagcgatgctatcttctttttactttctatggttattttttcttttcgttttttttttttttctttttctctattaatttctatttctttattttttattttttctctttttttttttttttatttttccttttttataacttattctatttacttattttcatttctcatgcattattttacttttttttt

SEQ ID NO: 12021 - DNA, 306 bp, Zea mays
  Clone ID: LIB3150-077-P2-N2-F2
ctagccctctgctcctctgaaatggcggcggcgacttcctcttccacctacctcgccatcggccgcaaaaccctaaaccccgccccctccgtagccacagccgccacctccgtctccttccccgccacgcagcatccatgcctcgtcgccgcctccgcggaccgccgccgcgccgtggctgcgaaggtctcgtcgccgtcggtcatcggcaccgccatgccgtcgctcgacttcgagacctccgtcttcaagaaggaaaaggtgtccctggccggccatgaggagtatattgtgaggggtgggagg

SEQ ID NO: 12022 - DNA, 224 bp, Zea mays
  Clone ID: LIB3150-077-P2-N2-F5
tgggggaaaaagatgctcgccagaaccatcggaggcgccgtccgaacccgcctggcgccgtcccttgcgagccttctctgccgcggctacgcgtcccccgccttctccgtcgacgaccttgtcatcgacgaggacccgccgcgcgccgtctcgacgtccgttgccgccaccaccgtggcggtcaccgtgccgaccctcctgcattcgcgcgtgctcatttacga

SEQ ID NO: 12023 - DNA, 304 bp, Zea mays
  Clone ID: LIB3150-077-P2-N2-F6
caaaaatgtgtagtgtggagcaggtcagggttgcacaagctctttatgtatctggtagcctgttcaatcactcatgtcagcccaatgtgcacgcatattttctttcacgtgcgttcgtgctgagaactactgaatttataaagtccgggagcccagttgaactgtcatatggtccacaggttggcgagatgcatatttcagagagacagaagtcacttcaagagaattactacttcagttgtcaatgttcaagttgttcagagctaaactcttcagagcttgttatgaatttaatctttttttc

SEQ ID NO: 12024 - DNA, 299 bp, Zea mays
  Clone ID: LIB3150-077-P2-N2-F7
ttaatgctaggtcaaaatgcatttgaaccttacaccattatacaagacagggcgaccaaacaattacactctagcgctatacaataccaaaacgatgaatgctagtttctagttattcactatacaagttatttattttatttgactactcgcaacattattcatcgtctgatgtctttgtatgaatatgggttcaggaaacaccggtctgagggttctttttggtgcaacaaatttgatggatctcttcacaggagaagcattatttacataaacttggtttccagaccatgctctac

SEQ ID NO: 12025 - DNA, 336 bp, Zea mays
  Clone ID: LIB3150-077-P2-N2-F9
cccgatcgacaccatgagggtgttgctcggggccctcgctctcctggctctcgctgcgagcgccacctccacgcatacaagcggcggctgcggctgccagccaccgccgtcggttcatctaccgccgccggtgcatctgccacctccggttcacctgccaccttcggtgcatctcccaccgccgttccacctgccgacgccggttcacctgccaccgccttgtcatgtgccgtcacctgttcatatgtcttcgtcaccatgccattactcttctataccgacgtgggcttaacctcattcttagtcacacccaagcctcgtgccaacagactaatt

SEQ ID NO: 12026 - DNA, 417 bp, Zea mays
  Clone ID: LIB3150-077-P2-N2-G1
ctcgggtatcggagtcggagcatggcgtctgcagtggtggtggacgccggcgacgcgccggagcccacggttcgtaacctcctggaccaggagtccctcaagtgggtcttcgtcggcgggaagggcggcgtcggcaagactacctgcagctccatcctctccgtcctcctcgccggggtccgcccgtccgtgctcgttatctccaccgaccccgcgcacaacctcagcgacgccttccagcagcgcttcaccaagttccccactctcgtccgcggattcaccaacctctactccatggaaattgacccaaaggtagaaaatgatgatttatccaatgaaggaatggaaggattcctgtcagaactgacaaatgcgatttcaggagtagatgaaactttgagttttgctgaaatgcta

SEQ ID NO: 12027 - DNA, 128 bp, Zea mays
  Clone ID: LIB3150-077-P2-N2-G10
tcctacttgcgttgtgtggcctgttttgtattggtttcctattttgtattcgtttttatttatttttttgttttcttttttaatttatttctatatttttgttcattatgtattataatttttatttt

SEQ ID NO: 12028 - DNA, 394 bp, Zea mays
  Clone ID: LIB3150-077-P2-N2-G12
caactatcaaaaaggaagattccagtgaaagtgagtcagagagtgattctgaggttgaggatgcaagtaaaactcagcctgctaagagagctgcttcaaaaatgaaagatgaatcaagtgatgactcagacactgatgaggatgaagaacctcctcaaaagaagcagaaggaagcactttcagctgcaaaaaaaagaaagcagcagtgaggatgaagatgacagtagtgaggaaagttcggatgatgagccaacaaaagttgaagaaaagaaggctccaaaagtatcagaaaacagtggatcggaggatgaatcttctgaagacgagagtgataaagacacgtgaagagcctgcttatacttcaaagaaggctgctttgcacgcctctgaaaag

SEQ ID NO: 12029 - DNA, 142 bp, Zea mays
  Clone ID: LIB3150-077-P2-N2-G2
aaaataaaaaaataattaatatgagatgttattaataaaaaaaggggtaaggaactaaaaaaattaatttattaataaaatggtctgttttccccagtttttcttttccgttacctttatttcttcctatttttcccaattt

SEQ ID NO: 12030 - DNA, 437 bp, Zea mays
  Clone ID: LIB3150-077-P2-N2-G3
gcttcttctcctcgccgtcgcgtgagactgcgctaaaacctaggctttgagacaccaatggcctccgcgacggcgacggcgcccacattcgctctcgcatcgtccttctcgcgcggcggcttccttccgctccctcgtcgcgccggccggcccatgcttcagtctctgcggctcgtcgcgtcagccgtgaagcggcggcgcagcgcggtcgtggtggcagcggacgcggcggcggcggccgggagcgcggagttcggcgacgaggagaacccgtatgagcttctgggcatcaggccgcttgatagcttcgatcacatgaaaatggcctacaagaagaagcgcaaggacgccgaggagactggagacgacgagttcctgccaagttggacagggcctatgacactgtcatgatgcagcagctacagtattcggagaag

SEQ ID NO: 12031 - DNA, 429 bp, Zea mays
  Clone ID: LIB3150-077-P2-N2-G4
tacagccctccgcctcgtgaaggcaaagcacgcgcaaagccaccacagcgtgggcctcttcgtctccagtccaagcaagcgaagagcacccctcgagatctctccctccccgcgccgccatggacgcagttgactcggtagtcgacccgctccgggagttcgccaaggacagcatccgcctcgtcaagcgctgccacaagccggaccgcaaggagttcaccaaggtcgccgcgcggactgcgatcggcttcgtcgtcatgggattcgtcggcttctttgtcaagctcatcttcatccctatcaacaacatcatcgtcggctccggctgatccgttcacctcaggctagtggctgccggagtggacaatggcgtcactaccttggaggcagcaccgttttcagctctgatttcctcaaagcaattccttt

SEQ ID NO: 12032 - DNA, 404 bp, Zea mays
  Clone ID: LIB3150-077-P2-N2-G5
tgaggcaatccccgctccgtctagcggccctgcgcaatcagtcagggttccatgggcaacagcaacctcccgcgccgaatcatcaaggagacgcagcggctcctcagcgaaccagcgccggggattagcgcgtcgccgtcggaagagaacatgcggtacttcaatgtcatgatccttggccccgcacagtcaccctatgaaggtggagttttcaagcttgagctattcttgcctgaggaatatccaatggctgccccgaaagttaggtttctcaccaaaatttaccatccgaacattgacaagcttggtaggatatgcctcgacattcttaaggacaaatggagtcccgctctttagatacgtacagttctgctcagcattcaggcacttctgagtgccccaaa

SEQ ID NO: 12033 - DNA, 409 bp, Zea mays
  Clone ID: LIB3150-077-P2-N2-G6
gcgccatggcggagaagtcgccggcagccgacgtggaagccggtctccttgcgcacctcaactcatcgggagaggtccccgactcacgctctttcgcttcctccctcggcgtctcccacctcgaacttgagggcgtcatcaagagcctctcagctttccgcatcgtcgacagcacagacatcatcaaggagacatgggtgctcaccgaggaggccaagggctacgccgccaagggctcccccgaggcacagctcgtcgccgcaatttcaccggagggtgcctctaaggacgcactcaaggcaatattgggagatgctttcgatgttggcatgaaggcagccgcgaggaacaagtggatagggttcgagaaggggaataaggacttagtccttaggaaggttgagagcgt

SEQ ID NO: 12034 - DNA, 302 bp, Zea mays
  Clone ID: LIB3150-077-P2-N2-G7
cactgcagctccgtcccggctgccccaatagttgcggcgaggatgaacgtgaagggctgcatcctgattccggtacccccgccggggggccagcgcgctggtcaaggtggccgtgttcggcggcgccgccgtgttcgccgtcatgaacagtctctacaacgtcttgggtgggcaccgcgccatcgtttataaccgtatccaggggatcaaggacatggtttaccctgttgggacttactttatgatatcatggtttgaacgaccaatcatttattacttctcgtgctcacaatttaattttg

SEQ ID NO: 12035 - DNA, 151 bp, Zea mays
  Clone ID: LIB3150-077-P2-N2-G8
tctcataaagtcgccggtgccgcctaccaccgggtacaccgagggcttggtgttgtgggagcccccaaggacggacacggagcccctgttgccgcggtggcggagcgagatcttggccgccagcaggttgtggagcccgtctaagctcgtc

SEQ ID NO: 12036 - DNA, 233 bp, Zea mays
  Clone ID: LIB3150-077-P2-N2-H1
tgcaaatctcacgcacagaaacaccaaagccggaaaggcccaaactcaccacggcccaatggagaacggcgactaaaccctcgcctcccccacggccgccgccgagacggacgcgctcaacggcggtgtcgcggaggaggagcaggtccccatcacccaccccgcaaagtcctacgtcacgctcgccgacgacaaccccgctcctaacggcggcgtcgtgaaagaggaggagg

SEQ ID NO: 12037 - DNA, 367 bp, Zea mays
  Clone ID: LIB3150-077-P2-N2-H10
ctgcggcggcggcggcggcgcatcagcggcagcagcatccgaagatggtgagaggtcctcaagcccggcaaggccgttatcctcctccagggccgcttcgccggcaggaaggcagttatcgtgcgcgtgttcgaggagggcacccgcgaccgcccctatggccactgcctcgtctcaggcctcgccaagtacccaaagaaggtgatccgcaaggactccgccaagaagactgcgaagaagtcgcgcgtcaagtgcttcatcaagctcgtcaacttcactcacctcatgcccacccgctacaccctcgacgtcgatttcaaggatgtcgccaccggtgggcccgacgcacttctttcccactacaaga

SEQ ID NO: 12038 - DNA, 376 bp, Zea mays
  Clone ID: LIB3150-077-P2-N2-H12
attcctcccaacaccacctcgcctgcgatctgcgtagcctccgtcgcgtcgagcatcgatcatgtcggcctactgcggaaagtacaaggatgagctcatcaagaatgctgcctacattggcacccctggcaagggtatccttgctgctgatgagtccactggcaccattggcaagcgcctttccagcatcaatgtcgagaacgttgaggagaaccgccgtgccctccgtgagctcctattctgctgccctggtgctctccagtacatcagcggtgtgatcctctccgaggagaccctgtaccaaaagaccaaagatggcatgccttttgttgatgtcctcaaggagggagggcgtctccctggcattaaagttgac

SEQ ID NO: 12039 - DNA, 246 bp, Zea mays
  Clone ID: LIB3150-077-P2-N2-H2
tagttctgttcctccccactcactcctgcgcttccgcgccgcgcggttccttcgtccctgatcctcctttggcttcgcggttcatggcgatgtggagggccgccgctaggcatctggtcgaccgggcgctcggcttcaagggccgcgcacacgtctacaggcagcaaatagatagtcggggtgttctacaaggccggggagtttgccgtctagaaccccaacttcgtctgatgcgttctagggtgc

SEQ ID NO: 12040 - DNA, 341 bp, Zea mays
  Clone ID: LIB3150-077-P2-N2-H4
acttgttacccggagtggcggccgcagtcgcaagcgcggacgcatggaggccaaagtcgagcgaaaccaacttgcggctgggattgaagcaatgtcgtcggacgacgaggtcagggaggagaaggagctcgacctctccttcaacgatgtcgtcaccaagtacaagactgtcgccgaaatcctgaacaacgctctgaagctggttgtgtctgagtgcaagccaaatgcaaagattgttgtcctttgtgagaagggtgactctttcataagagagcaaactgggaatgtcttacaagaatgcaaagaggaagtttgtaaggggcattgattttccatcctgt

SEQ ID NO: 12041 - DNA, 215 bp, Zea mays
  Clone ID: LIB3150-077-P2-N2-H5
tgttactagccgggatgcgcctgttcttcgtgaccatctctcctgtgcctgaggcgagggcttcttgactaaatccgatccccaacccacccgtggctgccagtgaggacgtgatgcgcaagtgctagagcatgggcaacctcgcggcccttgtcgctggcctttactgtggaggaggattcgcgaactgtggagttgctttcgactggtacctc

SEQ ID NO: 12042 - DNA, 161 bp, Zea mays
  Clone ID: LIB3150-077-P2-N2-H6
gtttcttcccattagccaggggtaaaacgggaaagacggagaacgaagaggaggggggcgacgtctccggcggtcggaggcgacggggatgagtcggaaggaggcggagccggcaggacaggatgggtcttcttcgtcggccactgatgggggaggaggaa

SEQ ID NO: 12043 - DNA, 414 bp, Zea mays
  Clone ID: LIB3150-077-P2-N2-H7
tcgttcatggcggaccatcatcatccacagcaggggccgcaggagatggaggttgatcgtaccggtggcctcgaactgccttcagggttccgcttccacccgagcgactttgagattgtcaacgactacctcacgaagaaggtgcacgacagggactacagctgcatcgccatcgcggacgccgtcctaaacaagaccgagccatgggacctcccgaaagttgcaaagatgggcgagaaggagtggtacttcttctaccagaaggaccgtaagtaccctacggggctgagggcgaaccgtgccactgaggcggtttattggaaggcgacctgtaagggacaaggaggtctactatccccttgcaacgtaagggctgctgttttacagcttgaaaaatacgctcgtgttctacat

SEQ ID NO: 12044 - DNA, 183 bp, Zea mays
  Clone ID: LIB3150-077-P2-N2-H9
tgcgtcgagttcctgaggcatcattgcagggggactgctactccctacgtgctggcctcagtgccagtcgttgcggcagcagtgttgccagcagctcatgcaggtggagccgcatcaccggtaccaggcgatcttcggcttggtccttcagtccatcctgcagctgcagccgtaaagcggtca

SEQ ID NO: 12045 - DNA, 408 bp, Zea mays
  Clone ID: LIB3150-078-P1-N1-A1
cgtctcgctcgcaagtcgcatcgcacgtacggtctcaggcgcatcggcctcgccgctgcacaacgccggagacgatacgacggcggctacgggatgacggtcttccacttcctcaactgcgccttcctcaccttcgggcctcacgtcgtctactactccgccacgcccctgtcagagtatgatacaatcggcacttctataaaagcagctgctgtttatcttggaactgcgcttgtaaagcttgtttgcttggcaacattgctcaaagtacctgagaatgatagctttgacccctatcaggagttaatgaaagtttttattggattcatagatgtagctggactgtattttgctttgacccagctgacccacagaaacatctctcagaatcataagttcccaggctgt

SEQ ID NO: 12046 - DNA, 407 bp, Zea mays
  Clone ID: LIB3150-078-P1-N1-A11
gtcgcatcccatcccactaccacccatctggtcgtccgccgattcgatccgggtcttccaacccagggtgagtctccggatccgtcgccgtctggtatccgtgtgctctcgtcgccgtcgccgtcgccgccgtctgactgcccccctcgcctcccgcggcgtcgggtctctggtgctgctgctgctgctgctgctgcgtgcagggcagcgatggcgacaaagaggagcgtgggcaccctctgcgaggcggatctgaaggggaagaaggtgttcgtgcgcgccgacctcaacgttccgctcgacgatgcccagaagatcaccgacgacacccgcatgcgcgccttcgtccccaccatcaagttccttctcgagaagggcgccaaggtcattctcgccagccacctggg

SEQ ID NO: 12047 - DNA, 414 bp, Zea mays
  Clone ID: LIB3150-078-P1-N1-A4
gtaagagcaagcgcgtcacgctgcggcagaagcacaaggtgctgcgcaaggtgaaggagcaccaccgcaagaagcgcaaggaggccaagaaggagggcaaggccggccagcggaagaaggtcgagaaggaccccgggatccccaacgagtggcccttcaaggagcaggagctcaaggcgctcgaggcccgacgcgcgcaggcgctccaggagctcgagctcaagaaggaggcgcgcaaggagagggctcggaagaggaagctaggattgctcgaggatgaggaaattgctaatttggcatctgcagcttccgcgcagggcagtgagtttgcagcaaaagatgcagcaaaggataaagctcctttaacagtggcaaagagcaatgatcattctgagagatctttctacaaggagc

SEQ ID NO: 12048 - DNA, 435 bp, Zea mays
  Clone ID: LIB3150-078-P1-N1-A6
taccgctgttaggttctaccaggagaccttcggcgtgcctccggccacgcgagctcggcgaaatggtcgcccacaggttccatcagtaccaggtggtgggtcgcgcgctgccgaccccaaccgatgagcaccccaagatctaccgcatgaagctctgggccaccaacgaggttcgcgccaagtccaagttctggtacttcctgagaaagctcaagaaggtgaagaagagcaatggccagatgcttgccatcaacgagatctttgagcgcaacccgaccaccatcaagaactatggcatctggctgcgctaccagagcaggactggttaccacaacatgtacaaggagtaccgcgacaccaccctgaacggcgcagtggagcagatgtacaacgagatggccttccgccaccgcgtgaggtccccctgcatacaga

SEQ ID NO: 12049 - DNA, 363 bp, Zea mays
  Clone ID: LIB3150-078-P1-N1-A7
ttgaagtctcatcttacctcaagaaagttgggtacaaccctgatgagattgcgtttgttcccatctctggttttgagggtgacaacatgattgagaggtccaccaaccttgactggtacaaaggcccaaccctgcttgaggctcttgatcagatcaccgagcccaagagaccctcagacaagcccctgcgtctccccctccaggatgtgtacaagattggtggtattggaactgtgccagttggtcgcgtggagactggtgtcatcaagcctggtatggttgtcacctttggtccaactggcctgactactggggtgaaagtctgttgagatgcaccatgaggctttttaagaggccctttct

SEQ ID NO: 12050 - DNA, 238 bp, Zea mays
  Clone ID: LIB3150-078-P1-N1-A8
ctatccagtcgacccactcttcctttaactccacggctcgacgagatggacacgatgatcttagggcgggctccgcttctgctcctggtctcggcactactcgttcagatccgagcctacgacccgttgctataccagccgtttgatgatgacttcaagggtagatcgatcgtctgcaagaacgatgaataccaaggtgtatggaagcatgccaagagtgatggacatgatgactatg

SEQ ID NO: 12051 - DNA, 434 bp, Zea mays
  Clone ID: LIB3150-078-P1-N1-B1
ggccgtcgccgccatggtgaagtactcgcaggagccgggcaaccctaccaagtcggctaaggccatgggcagggatctgagggtccacttcaagaacacaagggagacagcctttgcgcttcgcaagttgtctttgaccaaggctaagcgataccttgaggatgttattgctcacaagcaggcaattcccttccggagatactgtgggggtgtggtcgcaccgcgcaagctaagtcgcgccactccaatgggcagggccgctggcccgttaaatcagccaggttcatcctggatttgctgaagaatgctgagagtaacgctgatgtgaaaggcttggatgtggacaacctctatgtttcacacatccaggtgaatcaagcccagaaacagaggcgccgcacctaccgtgctcacgggcgcattaatccctacat

SEQ ID NO: 12052 - DNA, 437 bp, Zea mays
  Clone ID: LIB3150-078-P1-N1-B5
gcggcctgctcgttcgatctgtccagcagacttgaggttccgagcggccggaaaccagcggcaaacgtcggcatggcgctcgtattgcattctggggctggaaacaaaaatgccttcaaggcacttattgctgcagaatacagtggggtcaaggttgagttgaccaaggattttgagatgggtgtctccaacaagacccctgagtttctaaagatgaacccccttgggaaggttcctgttctggagactcctgatggccctgtttttgagagtaatgctattgcgcgctatgttgctcgcttgaaggatgacaaccctctttttcgggtcttcccgtattgaacaagcccacgttgagcagtggatggactttgctgcaacagaagttgatcctagtgttggatggtacttgtatccaaggcttgggtacattcctt

SEQ ID NO: 12053 - DNA, 215 bp, Zea mays
  Clone ID: LIB3150-078-P1-N1-B6
ttattcattttcctcagccgatgaatacatgcggaaggttccattttttgacgaggattgggcaagatagaggaaaaatgctgaatctgccggagaagttctgcggtatgttggagtggtggatgtggtcagtaagaaggagcaggtggagctgttagcctacacgagggaccacccgttcgtgctattatctggttccgacaacatcatagcct

SEQ ID NO: 12054 - DNA, 245 bp, Zea mays
  Clone ID: LIB3150-078-P1-N1-C1
ctgaaatgccatgggcgcctccaaaccgggggcggacgatggccacacgccggggatcaataaagctctcgcttactaccacactatgccacttcgcgaagctaagagcgcgagtgtcatgcacgagatccggctgaccgaagccagccgtacccgcgccaagaagaacagcgccctcaccctcagactggatgactgggtactttgccgactgtacaacaagaacaaccagtgggagaagatgc

SEQ ID NO: 12055 - DNA, 304 bp, Zea mays
  unsure at all n locations
  Clone ID: LIB3150-078-P1-N1-C12
aaaaaaaaaaanaaaaaaannnagaaaaaaaaattaaaaatttaaaaaaaaaaaaaaaagggagaggaaaaaaaaaaaagagagaaaaaaaaaaaaataaaaaaaataaaaaaaaaaaaaaaaataaaaataaaataaaaaaaaaaaaaattttaaaaaaaaataaannaaaaaaaaaatataataataaaattnaaatttaaaaaaaaattaaatttatttaaaaaaaaaaaaaaatttataaataaaaaaaaattaaaaaaaaaaaaaaaaaaaaaaaaaaatttataaaatgnnntttttt

SEQ ID NO: 12056 - DNA, 405 bp, Zea mays
  Clone ID: LIB3150-078-P1-N1-C2
ttctcttgctctcctcgctctcagaccacagttgccgccgccgccgccctaagccagggtgctgaggctttcgttggcctcttcgccggcagcgagcacccaccagcagttctgtagaaatggctgatggtgaggacatccagcctcttgtctgcgacaatggcaccggaatggtcaaggctggttttgccggcgatgatgcaccaagggctgtattccctagcatcgttgggcgtcctcgtcacaccggtgtcatggtagggatggggcagaaggatgcatatgttggtgatgaggcacagtccaagagaggtattctcacgctcaagtacccgattgagcacggtattgtaagcaactgggatgacatggagaaaatctggcatcacactttctacaatgagc

SEQ ID NO: 12057 - DNA, 426 bp, Zea mays
  Clone ID: LIB3150-078-P1-N1-C3
ttcacttaatttcgtccctctctcacaactgagatagacctctccgccgtacgccatggccttcagcttctccttggccgtctggagatttgcacacacacaccgcaggaccgccccgaccatgcttccttgtggcgctatggcccacactgttgtgctcaagggtgccatgtcctgtgagggctgtgttggagctgacaagcggccactgggcaagatggaaggcgttgagtcctacgacgtagacatcatggaacagaagggcaccgtgcagggcaatgtgacacctgacgccgacctgcagactgtttgcaagactggcacgacgacttcgttctgggaggctgaggccgtgacaagtgaatccgacacacctgccggtgccaccgcctgacaggttcgatgatcaggaagtgcccggcaggc

SEQ ID NO: 12058 - DNA, 370 bp, Zea mays
  Clone ID: LIB3150-078-P1-N1-C4
tgaaggatgacgggctccatggatctcccggccaagggcgggttcagcttcgacctgtgccgtcggaacaacatgctggagaagaacggactcaaggtcccgggattcaggaagaccgggacaaccatcgtcggcctcgtctttcaggatggggttgttcttggggcagacacaagggcaactgagggccccatagttgctgataagaactgtgagaaaatccactttatggcaccgaatatatactgctgtggagcaggaactgctgcggacacggaggccgttacagatatggtgagcttccagctacagcttcaccgttatgcaacgggccgcgaatcaagagttgtaactgctcttacactactga

SEQ ID NO: 12059 - DNA, 432 bp, Zea mays
  Clone ID: LIB3150-078-P1-N1-C6
tttcttacaatggtgcatctgtttgcggcatgacctgctgttgatggtgaacgtgttgaggtcaaacgaatccataactgccgcaggttaagccatgaatggcaagcatacatatcccgaacccattccctgaggaagacatttatttccgtgaagggcatatattatcaggctgaagttcaaggacaaaagatcacctggctaactccgcatgctcttcagcaagtattaactgatgatgttgatttcaatgtgatgctttcttttctagaattctatgagactcttctaggatttgtgaacttcaaactctatcattcaataaatgtaaattatccacctattctggatccacgtctggaagctttagctgctgagctctatgcattgtgccgatacatgtctgcttgtttcagaagaatgattgggaat

SEQ ID NO: 12060 - DNA, 372 bp, Zea mays
  Clone ID: LIB3150-078-P1-N1-C8
ttctgcgtacacggtctccctctgcctgtcagtagtagagtgagagtgaggcagcgagtgggagacaaggggaaatggggaagggagcgcaagggagcgatgcggcggcggcgggcggcgaggtggaggagaacatggcggcgtggctggttgccaagaacaccctcaagatcatgcccttcaagctcccgcccgtcggcccttatgatgtccgcgtgcgcatgaaggcagtggggatttgcggcagcgatgtgcactacctaagggagatgcgcatcgcgcacttcgtggtgaaggagccgatggtgatcgggcacgagtgcgcgggcgtggtcgaggaggtgggcgccggcgtgacgcacctgtccgtgg

SEQ ID NO: 12061 - DNA, 437 bp, Zea mays
  Clone ID: LIB3150-078-P1-N1-D1
ggcgtaggtagcggcggtctcaaccccaggcgagctcggctccggtcacccgtcgatccacgcaaccatgtcgaggaggaagaccagggagcccaaggaggagaacgttacccttggacccactgtccgtgaaggagagtttgtctttggtgttgctcacatctttgcatccttcaatgacaccttcattcatgtcactgatttgtctgggagggaaactttggttcggatcactggtggcatgaaggttaaggctgatcgtgatgagtcgtctccttatgctgctatgcttgctgctcaagatgttgcacagcgttgcaaggagctcggtatcaccgcgctgcacattaagcttcgtgcaactggaggcaacaagaccaagacccctggacctggtgctcagtctgctcttaaggcttttgctcgttctgggatga

SEQ ID NO: 12062 - DNA, 192 bp, Zea mays
  Clone ID: LIB3150-078-P1-N1-D11
tatctgatccagctcccctctcgtggggacgggagctataaggagggcacagagctctcatcaggctttttggctcggcccatggctctcgccacgagggacccaacgcgctatcctgtgtagctgctgctcctagtcatatgcgccgtccgttatcttggatactgatgtaaacgctgtcagcgctaatcc

SEQ ID NO: 12063 - DNA, 428 bp, Zea mays
  unsure at all n locations
  Clone ID: LIB3150-078-P1-N1-D2
agagcatcgtgctcccgagcgcctacatctgcaccgtcacgctggtgctgcacgtggtactcagctgggtcgtcgtctacaaggtcggcatgggcctgctgggggcctccctgctgctcagcctcagctggtgggtcatcgtcgccgcccagttcgcgtacatcgtgatgagccccaggtgccgccacacctggaccgggttcacctggcaggcattctcgggcctgtggggcttcttcaagctctccgccgcgtccgcggtcatgctttgccttgagacctggtactaccaggtcctggtgctcattgccgggttgctccccaaccctgagcttgcattggatgccttgtccgtatgcatgactgtcnaatgcgtggtgttcatgatcgcaangggattcaatgctgncgctagtgtgagagtgagc

SEQ ID NO: 12064 - DNA, 429 bp, Zea mays
  Clone ID: LIB3150-078-P1-N1-D3
tccgcgcgcgcgttctaacccgaccctgctctacggctcggctgctctaccaggctacctttaccccgcgccccctccgagatcggaatcgcggcgccccggcggcctcctccgtcatggcgccgactttgctcgggggcttcaccaagtcgctggccatgacggtgctctgcgaggtcggcgacaagaccttcttcgccgccgcgatattggctatgcgccatcccaggaaactggtcctggcaggctgcttgactgcactaatagtgatgacagctatatcagcttctctaggtcgggttgcaccaaatctgatttcgcgtaaatggactcatcatgtgaccactctattgctcttcgtatatggcatttggtcattgtgggaaggcttcaaggaagatggagattcacaagaattggctgaagttg

SEQ ID NO: 12065 - DNA, 441 bp, Zea mays
  Clone ID: LIB3150-078-P1-N1-D5
tctgctttcctgcaaccaagcgcatccgtgcgagcgggtggaggtccaatgcctgctgccaaggcacgtcgtctcactaacaatgcttgcgtggcttttatcccagctcccaccacattgacccagtcttcctcccacgcgttatacgccaacacctccccgtcccgcacctgatacgccaatacctacccatcccacgccttatacgccacagtcttcccaacccatgcattatactccacaccctccccttcctacgcataatacgccacacccttcccttacccttacgacaggccggatggacacgaggtgtactgcaccctgaaacccgtccttgatcaagcgagccaatatgtttacccaacatgaggagtgtatgtcaccgtcaacgattgcattctcatggtctacttcaccccttccatgagctaccctgct

SEQ ID NO: 12066 - DNA, 438 bp, Zea mays
  unsure at all n locations
  Clone ID: LIB3150-078-P1-N1-E1
cggcgcgggcggacaaggagcaggcggaggaggagctgtgccaagccacaatgggtatctcgcgtgactcgatgcacaagcgccgggccaccggtggaaagcagaaggcctggaggaagaagcgaaagtatgagcttggtcgccagccagccaacaccaagttgtcaagcaataagacagtgaggagggtccgtgttcgtggaggtaatgtgaaatggagggctcttcgccttgatactggtaactactcatngggaagtgaagctgttacccgcaagacccgtatcctcgacgtggtctacaatgcattaaacaatgagcttgtgaggacacaaacccttgtgaagagtgccattgtgcaaggtgatgctgccccattcaagcagtggtaccttactcactatggagttgccattggttggaagaagaaaacccctt

SEQ ID NO: 12067 - DNA, 437 bp, Zea mays
  Clone ID: LIB3150-078-P1-N1-E4
tcgttttcgctctcgcgggggtcgacttcctagggttcgaggaacgttcgtacgtccgtccggagaaggtgcatgagggaggcggagatgatctaggtggtgctcaacgaccgcctggggaagaaggtgcgggtcaagtgcaacgaggacgacaccatcggcgacctcaagaagctggtggcggcgcagacggggacgcgccccgagaagatccgcattcagaagtggtacaacatctacaaggaccacatcaccctcaaggactactaggtccacgacggcatgggcctcgagctctactacaactgagccggcgcccctctcttcctctcgtcaggttggtctgaattctgaagtcatgggtgcaattcgcttcgcggtgatcttttaagctcatcacatatataaaagcaacctcagggggctatgtaagacat

SEQ ID NO: 12068 - DNA, 430 bp, Zea mays
  Clone ID: LIB3150-078-P1-N1-E5
atagaccactgatttcacaatgaaaagggagacaatgccttcatggctagaactgttgcttgcaacacaattctttacgacttgtgctaaccatcttcttgctagtcgcaatgaatgtaacctattttgcacccagtgtgagaccaaaccagctgctttctgtaactattgtcgttcaagtgatcattccacccaccgtgtaatccagataaggcgttcatcgtaccatgacgttgtgagggtgtccgagattgaggatatccttgatgtcagcgatgtgcaaacttatgtaatcaatagtgcaaggattgtattcctgaatgagcggccacaactgcgtgcttctagtgtccccatttgtaaggcacccacatcatcaacacatagctgtgagacatgtagccgtgtgctacttgatgcatttcgcttc

SEQ ID NO: 12069 - DNA, 247 bp, Zea mays
  Clone ID: LIB3150-078-P1-N1-E6
gtccggttctcctgctctatggatctgcggggcacgggctccatcaaaagcgacctggtccgccgaaactacatgcactggaagcacgcactaaaggggatcgcgttgatgaatatacacacaatgatggtggcgctcatcattcactatggggtatttattgtggcacttacaacggactctacgaggataaacagtcgtacataataactgggcgaaaactccaacaatggcaggcgatctatac

SEQ ID NO: 12070 - DNA, 330 bp, Zea mays
  Clone ID: LIB3150-078-P1-N1-F1
tctggcttctcctccccctcttaccaagtcgtcttcgggttagggttacttagggttttgtggaggggcgatggcggcggctgatgtggagtaccgttgcttcgtcggcgggcttgcctgggccaccagcaacgagtcgctggagaatgccttcgcctcctacggcgagatcctcgacttcaaggtcatcaccgaccgggagacggggaggtcttgcggtttttgctttgttaccttcttctccgagaactccatgcttgacgctttctagaacatgaacggctaggtgcttcgacggtcgtaacattacctgctaacccaggccctagt

SEQ ID NO: 12071 - DNA, 362 bp, Zea mays
  unsure at all n locations
  Clone ID: LIB3150-078-P1-N1-F2
tcgtcgtcgccgccaacgccggtgaaggaagcggngctgcggaggagggcgtggagatcacttacgtgagctatggcggggagcagcatctgccgctggtgatgtcgctggtggacgaggagctcagcgagccctattccatcttcacctaccgctacttcgtctacctctggccgcagctcaccttcctggcgttcgatgccagggatggcaagtgcgtggggacagtcgtgtgcaagatgggggagcataggggtgcattcaggggctacatcgccatgctcgtcgtcctcaagccctaccgagggaggggaatagcaactgagctagttactagatcaattcgggcaatgatggaatct

SEQ ID NO: 12072 - DNA, 361 bp, Zea mays
  Clone ID: LIB3150-078-P1-N1-F3
gaaaccttcccccaccacacaacaaatgactgttcagcagcaaaaggagtgaggttgccaagcccgatggacgacaaaatgagatgccaaaaatccctagaaaaactgcaggtgcagaggatatgctggacggtttcctgttcctgatcacataggggacaacacaccgggtattgcaaccctctcctttgaagtctgtccgcagtccaacatttattccttatagccaaccaaaggaaaaacttgcatttaggcggagcccaagtcttccacaatcgtttccacggctcaaaggagatggaccccaagaagaaggcattataacaggactttgaggataacttgccagaaaccatgtgcc

SEQ ID NO: 12073 - DNA, 360 bp, Zea mays
  Clone ID: LIB3150-078-P1-N1-F5
gttggcttctcctccccctccggttcgggtgcgggtgtcgtgaggttctccggggttcggtttcgtgggtgagcggatcgagatggcggcgtcggatgttgagtaccgctgcttcgtcggcggcctcgcctgggccacggacgaccactccctccacaacgccttcagcacctacggcgaggtcctcgagtccaagatcatcctcgatcgggagacgcagaggtcccgcggcttcggcttcgtcaccttctccacggaggaggcgatgcggaacgccatcgagggcatgaacggcaaggagctggacggccgcaacatcaccgtcaactaggcccagtcccgcggcggtcgttgaggcgg

SEQ ID NO: 12074 - DNA, 305 bp, Zea mays
  Clone ID: LIB3150-078-P1-N1-F6
tttatatttttcccacagaactcatctctcgagcacagttgtaatttatagatagactggcgaaaaactactagaaatcattatacttcataaacaaacattttgtactctgttctaagttacttagtcacattatcaaacatctttttgacaaaaattacttattatcttatatataatttctaaactttaactataatttaattattatttcatcacaattcctattaatcaaacacaactatgtctttctcaaattcttaaattctgaattttctttttatattataattgtttattcaaat

SEQ ID NO: 12075 - DNA, 270 bp, Zea mays
  Clone ID: LIB3150-078-P1-N1-F9
aaaaaaaaaaatataaataatataaaagaaaaaaagggagggaaaaaaagggaagaaaaaaaaaaaaaaaaaaaaaaaaaaaagaaaataaaaaaataaaaaaaaaaaaaaaaaaaaaaaaaaaaaaaaaaaaaaaaaaaaaaaaaaaaaaaaaaaaaaaaaaaaaaaaaaaaaaaaaaaataaaaaaaaaaaagaaaaaaaaaaaaaaaaaaaaaaataaaaaaaaaaaaaaataaaaaaaatataagaaaaaaaaaaaaaaaaaaaaa

SEQ ID NO: 12076 - DNA, 295 bp, Zea mays
  unsure at all n locations
  Clone ID: LIB3150-078-P1-N1-G2
ttttatgttgtcgccgacgcccantcctttcgtgatggggcaaatgccgctggtgccgacaggatgttactcactaggactgagtactaccgcggggtgaacaccttctcttctgaggggcggctgttccaggtcgagtacgccatcgaggccatcaagttgggatccactgcgatcggtttgaagacaaatgatggtgttgtcctcgccgttgagaaacgtgtgacctcaccactgctggaaccatgcattgtgtaaaaaataatggaaattgtataacacatatgctgtgcca

SEQ ID NO: 12077 - DNA, 341 bp, Zea mays
  Clone ID: LIB3150-078-P1-N1-G3
ttgctttttctccccctcttaccaagtcctgggcgggttagggttacttaggggtttgtggaggggctattgcggcggctgatgtggagtaccgttgcttcgtcggcgggcttgcctgggccaccagcaacgagtcgctggagaatgccttcgcctcctacggcgagatcctcgactccaaggtcatcaccgaccgggagacggggaggtctcgcggcttcggcttcgttaccttctcctccgagaactccatgctcgacgctatcgagaacatgaacggcaaggagctcgactgccgtaacaataaccgtaaccaggcccagtcccctggcggtggtggt

SEQ ID NO: 12078 - DNA, 335 bp, Zea mays
  unsure at all n locations
  Clone ID: LIB3150-078-P1-N1-G4
ttctgttccgagatggacgacnagagcgaggcgagagcaatgccgcggcggcccacgccgccgtcgccacccccgtgggaggcgctccacctcgtcgcgccgttcctcgacgccgcatccctcgcggcggcgtcctgcgtgtccacctcgtggcacaccgccttcgccgcggacgacctctgggcgcggctctgcgcgcagcacttcccctccgcgctgggcctcctccccgacaccgacagcgaccggcggtgctcctcatcaccccaccgacgcctgttcaagctgttccgctccgcgtccgtccgctgtcgcgcgcttccggccccgcgcct

SEQ ID NO: 12079 - DNA, 181 bp, Zea mays
  Clone ID: LIB3150-078-P1-N1-H1
tttttattagcattcgggacatgtttggtgtgatgacgcggtgatgagccttaccaaattttggctcttccgaaccctgtgtgatgcgaagatgttggcaagttctagattttggtttcttgccaatttgccatgccaacttgtgggcaatcacagaagcggtagactcatgtaagtttgc

SEQ ID NO: 12080 - DNA, 401 bp, Zea mays
  unsure at all n locations
  Clone ID: LIB3150-078-P1-N1-H3
aaaaaaaacccggcaaccgcacccacacccggcgagtgctctctctgccccagccgggcgcccctcctactacaccgcccgtaccggcgccgccgccgtccggccgtatggtggcgatggcgtaccgggcggacgacgactacgactacctgttcaaggtggtgctcatcggcgactccggcgtccgcaagtccaacctgctgtcgcgcttcacgcgcaacgagttgagcctggagtccaagtccaccatcggcgtcgagttcgccacccgcagcatacacgtcgaggacaaggccgtcaaggcccaaatctgggacaccgacggccaggaaagataccgcgctatcacgagcgcgtactaccgcngagcgtgaggggcgctttgtcggtacgacgttacg

SEQ ID NO: 12081 - DNA, 418 bp, Zea mays
  Clone ID: LIB3150-078-P1-N1-H4
tttgccctcaatgtggatgtgaacgagttcgagaccagcctggttccttacgcgaggatccacttcatgctctcctcctacgcaccggtgatctcttctgcgaaggccttacacgagcagctgtctgtggcggagatcaccagcatcgcgttcgagccggcttccatgatggtcaagtgcgacccacggcacggcaagtacatggctcgctgcctgatgtaccgcggcgacgtggtgcccaaggacgtgaacgccgcggtggccaccatcaagacgaagcgcaccattcagttcgtggactggtgcccgacggggttcaagtgcggcatcaactaccaggccccaacagtggtgccggttgccgacctcgccaggtgcatcgtgtcgtgtgcatgatcttcaactccaccagcgttgt

SEQ ID NO: 12082 - DNA, 405 bp, Zea mays
  Clone ID: LIB3150-078-P1-N1-H6
aaaaaaaaaaaaaaaaagggaaataggtggaaaataaaaaagggaaaagagagaaaaaaaaataaaaaaaaataaataaaaaagaaaataaaatgaaatatataaaaaaataaataaataaaaaaaaaaaaaataaaatataaaaaataaaaaaaaaaataataataaaaaaaataaaaaaaaaaaacaaaaaaaaaaaaaaaaaaaaaaaaaaaattaaaaataaaaataaaaaaaaaaaaatagaaaaaaataaaaaaaaaaaaaataataaaaatgataaaaaataaaaataaaaataaaaaaaataaaaaaaaaaaaataaaataaaataaaaaataataaaataaaaattaaaaaaaaaaaaaaaagaaaataaaataaaaaaaataaaaataaaaaaaa

SEQ ID NO: 12083 - DNA, 288 bp, Zea mays
  Clone ID: LIB3150-078-P1-N1-H9
ctcaaccaactcattgaacatctcaataagcttctcaacgatcatagtgttgaaaatctatctaaagaacctcacgttgaaagagagctgattcttataaagctaaacttataacctgatcagcacccttaggatcatggttttagttgacattttcacagcaaaagaagttgatatatctgagaaaacacttaccatagaggtagctgcagatccatgcaaaatagctgcattgcacatgaaattaacgaaaatcgttatcaaataaattagcataacatgaaaaat

SEQ ID NO: 12084 - DNA, 292 bp, Zea mays
  Clone ID: LIB3150-078-P2-N2-A1
ttttctcctcttccgccccaccccggtgaggcgctgatccatcgcctcggacagcggcgtccagaacctccgcgttgcagtggttggggttggcttcgtgctattcagaaacacagtagcgagaactattcggtggggccgaatatggtgtcgctgaaggtgccaaagcgcctcgccgcaagcgttctcaagtgtgggaaaggcaaagtgtggcttgaccccaatgaagttagtgagatctccatggcgaactcccgccataacatccttaagttggttaaggatgggttta

SEQ ID NO: 12085 - DNA, 308 bp, Zea mays
  Clone ID: LIB3150-078-P2-N2-A2
tctcattcttcactagccctctgctcctctgaaagttgcttttcgactgcctcttgcacctacctcaccatcggccgcaaaaccctaaaccccgccccctccgtagccacagccgccacctccgtctccttccccgccacgcagcatccatgcctcgtcgccgcctccgcggaccgccgccgcgccgtggctgcgaaggtctcgtcgccgtcggtcatcggcaccgccatgccgtcgctcgacttcgagacctccgtctttaagaaggaaaaggtgtccctggccggccattagtagtatatttgtga

SEQ ID NO: 12086 - DNA, 355 bp, Zea mays
  Clone ID: LIB3150-078-P2-N2-A3
ttgatttcgttactgaagttctgatcttgagcagtgtgcaccacccgaatgggtgggaagctcgttggacattgcactagtcatgatcagaggattttagtttatgagtatatgcctttgggttcgctaaacagtcacatccatgatcttccccctggccagcagcctcttgactggagtacaagaattaagatactgcttggtgctgctaaaggtcttgagcatttgcatcacaatctcaaccctcctgtcatcaatcgtgatgtgaaatgtgcaaacattttgctcggatcggtgtaccacccgaagctgtctgactttggcttggcaaagctaggtccaactttttacaaca

SEQ ID NO: 12087 - DNA, 351 bp, Zea mays
  unsure at all n locations
  Clone ID: LIB3150-078-P2-N2-A4
gtgttgannttcctcgaggtcttcaacctggtgggcttccgtttgggcagcttcaatttttaaaactaagatgtcacaatagccaaggaagtganggtacaaactgcacggtctattacaaacctcctgctgataagaaatggcacttcaaaggtcgccttcctccaaagaagacgcagncccttcaaaggtcaacctccnaacctaagagtgcttcacnnggtccccaacgtccaaggggagtccaaagagacccgcagcacttcaaagggtctcctcctaaggggacgtggtagatcaaaggtcaaggggattaggagtcggtcccaggagccccagatgatagaaatc

SEQ ID NO: 12088 - DNA, 263 bp, Zea mays
  unsure at all n locations
  Clone ID: LIB3150-078-P2-N2-A5
cctctcaccatcggcgcgctactatagataattgtctggtgcctacaaaaacaccaccttntnttnattcctccattcttcacctnttgcttccttttacatcttcatttttaactaacatttttttttctttctaattcattacacttcaccctctattactccttctacttatataaatcctccttcaataactccttcttcatatattctcatccctttaatttcaccttcacctactattactttactttcctccactt

SEQ ID NO: 12089 - DNA, 71 bp, Zea mays
  unsure at all n locations
  Clone ID: LIB3150-078-P2-N2-B1
gcctctgaaagttcggagccgccggcccgtccggggncctatccgactcccgtgcgcaaggccaatagttt

SEQ ID NO: 12090 - DNA, 429 bp, Zea mays
  Clone ID: LIB3150-078-P2-N2-B2
ctgagatgcgttactctgtccatgggcaatggcgtggctacaatgcaggtgggtgccaagattatgactcgtggcaccaaaatccacagtatcgacttagagtaacaggacgtgatgcactataccctgttcacgtttttattacccttactcagggtgttggtttctctagaaagacgaatggttttcggaactaccaatctagccatgattcttcaatgttttacattggaatgaggatactcaagacacagggctgccgtgctgcttacaatatctacatgcatgaaagcgctggtggaacagattacgttaactcgagggagatatcatgcgaactggtcttggaatcttatcccaaagggtacacaattgttccaacttccatccaccctggggaggaagcacactttggtttgtcagtttttt

SEQ ID NO: 12091 - DNA, 299 bp, Zea mays
  Clone ID: LIB3150-078-P2-N2-B3
atttgttctctcttttctctagacaaataagcttgttggtttagaaggtgcaactaaatatacttttgaaattgctctgttttgtgacctgccttgtctcaatcatactattgttgtgtctgccgaatactattgggatattgataaatcaaattttctatcctgaatgtacagtatgctagctgcagtgccttttgttctgtgcccggtagatgcggtcaatgcaagattgtatttatcagtcatcatctgtggaagtttgtatgcttgcacttgggacacaatttcttcatttgctt

SEQ ID NO: 12092 - DNA, 125 bp, Zea mays
  Clone ID: LIB3150-078-P2-N2-B5
tcttctggttagtagctcttgctctagccttgggtggctaacattcaggggactgggcaccttccttctactctcctcctccctgcccagttcttaataaccccacctcagatttattagttcct

SEQ ID NO: 12093 - DNA, 414 bp, Zea mays
  Clone ID: LIB3150-078-P2-N2-B8
tccacacagaaaaccctagccgccgccaccgaagcggcctcccaggtaagcaggatcgtccagcccgccgccgccatgaagcgcaatccccgcgtcacgagctcccgccggaagtgccgcaaggcgcactttacggccccgtcctccgtccgccgcgttctcatgtccgcggggctgtcgacggagctccgtcacaagtacaacgtgcgcttcatcccgatccgtaaggacgacgaggtgcaagtcgtgcgcggcacctactttggccgttaggggaaggtgtttaatttttacttttatatttttcttattttctttatattttatttatatttattcttttatcttttcttcttttatctctattagtttttatattcatttataaatgtataatttgattatatttttttt

SEQ ID NO: 12094 - DNA, 134 bp, Zea mays
  Clone ID: LIB3150-078-P2-N2-B9
tcttctacacagaaaaccttagccgccggcgcggaatcgttctctcaggggagcaggatcttccagcccgccgcctccatgaatctcaatctctgtgttacgagctccctccggaagtgcctcatggtgcactt

SEQ ID NO: 12095 - DNA, 325 bp, Zea mays
  Clone ID: LIB3150-078-P2-N2-C1
gatgaccactgtccatgccatcactgctacccagaagactgttgatgggccctcgtctaaggactggaggggtggaagggctgctagtttcaacatcattcccagcagcactggagctgctaaggctgttggcaaagtgcttcctgtccttaacggaaagttgactggaatgtctttccgtgtcccaaccgtcgatgtttctgttgttgatttgactgttaggcttgagaagtcagcaacctatgatgagatcaaggctgcggtcaaagccgtggcagaaggtagcctcaagggcatcctgggttacattgaggaggaccttggt

SEQ ID NO: 12096 - DNA, 432 bp, Zea mays
  Clone ID: LIB3150-078-P2-N2-C2
ggcgactggtacttttttgtcgctgcggagacggggagtcttccgactcttccccaacgggaattcctcactcacatctctacgcacgaacggaaacgccccgtgctgcgctcgcagtctcgcatggagtccaccactgctgctgctaccgcggcggcggcgccggcaccggtgctgctggtgacgaacgacgacggaatcgacgcgccggggctccgcttccttgtcgaccgtctcgtcgccgcagggcgataccgcgtactcgtctgcgcgcccgacacagacaaatcgggtgtgagccactgcatcacatggcgccctgcactccgctgtaaacgtgttgatataataggtgctacagcatttggagtttcaggaacttctgctgactgtgcttctttaggcatctttggaaaactatttgatggtttg

SEQ ID NO: 12097 - DNA, 314 bp, Zea mays
  Clone ID: LIB3150-078-P2-N2-C4
gtcttctcgtcttccccggctcaggcaacctccagctgcagcggcggcgatgggggtgaagaacctctgggacatacttgactcctgcaagaagaagctcccgctccagcacctccagaacaagaaggtgtgcgcggatctttcctgctggctcgcgcagttctgcagagccaaccgctccccggccttcctcagggacaaggtgtaccttaagaacctcttccaccgcattcgagccctcatcgccctcaactgcagcctcattttcgtctcagatggggcgatttcttcagtcaaattggcttcttataggc

SEQ ID NO: 12098 - DNA, 93 bp, Zea mays
  unsure at all n locations
  Clone ID: LIB3150-078-P2-N2-C8
gcgcagatcatcgatggcaaggccatcgccgccgacgtccgccgcgaggtcgccnccnatgtggccttgctttcgtagtccacggctcgtgcc

SEQ ID NO: 12099 - DNA, 447 bp, Zea mays
  Clone ID: LIB3150-078-P2-N2-D1
cgccttcgacatcgtcccttcgtccccacgagcaaccgataatccgccggcgttgagatgttggtttatcaggatctcctatctggcgacgagctcctgtcggattcattcacctacaaggagctcgagaacggcgtcctgtgggaggtcgagggaaagtgggtcacccaaggtcctgttgatgtggacattggtgccaatccatccgccgagggtggtgaggacgaaagcgttgatgacacagctgtgaaggtggttgatattgttgacacattccgtctacaggagcaacctccttttgacaagaaatcatttgtgtcttacatcaaaaaatacatcaagaatctcactgctggtgtggagccagagaaagcggatgagttcaaaaagggtggcgagggtgcaaccaagtttcttcctaacaagctggaggacctccaatttttg

SEQ ID NO: 12100 - DNA, 351 bp, Zea mays
  Clone ID: LIB3150-078-P2-N2-D3
tagagagaaggaaaaatatccccaaaccctagctgccgatctcgatggcgagccctcgcgtcttcttcgacatgaccgtcggcggcgccccggcgggccggatcgtgatggagctgtacgccaacgaggtgcccaagaccgcggagaacttccgcgcgctgtgcacgggcgagaagggcgtgggcaagtccgggaagccgctccactacaagggctccaccttccaccgcgtcatccccgagttcatgtgccagggcggcgacttcacccgcggcaacggcaccggcggcgagtccatctacggcgagaagttccccgacgagaagttcgggcgcaagcacaccgtccccg

SEQ ID NO: 12101 - DNA, 357 bp, Zea mays
  Clone ID: LIB3150-078-P2-N2-D4
gtttcaacatcattcccagcagcactggagctgctaaggctgttggcaaagtgcttcctgtcctcaatggaaagttgactggaatgtctttccgtgtcccaactgtcgatgtttctgttgttgatctaactgttaggcttgagaagtctgccacctatgatgagatcaaggctgcggtcaaggccgaggcagagggtagcctcaagggcattctgggttatgtcgaggaggaccttgtttccaccgatttccagggtgacagcaggtctagcatctctgatgcgaaggctggcattgccttgaacggcaactttgtgaagcttgtgtcctggtacgacaactagtggggatacagca

SEQ ID NO: 12102 - DNA, 103 bp, Zea mays
  Clone ID: LIB3150-078-P2-N2-D5
tttttatacatcatacccagcatcactgtagcgggtgatgcttttggcaaagtgctgtctgtcctcaatggaaagtttactggaatgtctttccgtgtcccaa

SEQ ID NO: 12103 - DNA, 61 bp, Zea mays
  Clone ID: LIB3150-078-P2-N2-D7
cgtacataaacttccatcctctataatctacccactctttcttttcaacaccatcaccacc

SEQ ID NO: 12104 - DNA, 364 bp, Zea mays
  Clone ID: LIB3150-078-P2-N2-D8
tgtaagcaagaaaactagaaaaggctcctgcgggccgcaacgccccgcatgggggtcgaccccgacatccccgacccgatggcgcccaaggcggagaagaagccagcggagaagaagccggcggccgaggagaaggcggagaagacgaccgcagggaagaagcccaaggccgagaagcggctgcccgcgtccaagtcctccggcaaggagggcggcgagaagaaggggaagaagaaggccaagaagagctgggagacctacaagatctacatcttcaaggtgctgtagggaggtgcaccccgtcatcttgtatattctccaaggtcatgtccattattgacttcctttatcaactaactttttt

SEQ ID NO: 12105 - DNA, 330 bp, Zea mays
  Clone ID: LIB3150-078-P2-N2-E1
gctccacctccgacctcgcgcgagacgagcaagcccaagtatggccggagcagcagcagccgccgtggcgtccggggtctcggcccggccggccgcgccgatgagggcttctgcgggacgccgcgctcggctgtcggtggtgcgggccgcgatatccctcgagaagggcgagaaggcgtacacggtgcagaagtccgaggagatcttcaacgccgccaaggagctgatgcctggaggtgttaactcgccagtccgtgccttcaaatctgttggtgggcagccagtagtgttcgactctgtaaagggttctcgtatgtgggatgttgatgg

SEQ ID NO: 12106 - DNA, 359 bp, Zea mays
  Clone ID: LIB3150-078-P2-N2-E2
ctcagaaaacccagccgccgccgcatcggcctcccaggtaagcagtagcgtccaccccagccgccgccatgaagcgcaacccccgcgtcacgagctcccgccggaagtgccgcaaggcgcacttcacggccccgtcctccgtccgccgcgtgctcatgtccgcggcgctatcgacggagctccgccacaagtacaatgtgcgttccatcccgatccgcaaggacgacgaggtgcaggtcgtgcgcggcacctacaagggccgtgagggcaaagtggtgcaagtgtaccgccgtcgctgggtcatccacgttgagcggatcacccgcgagaaggtgaacggctccaccgtgaacgtgggc

SEQ ID NO: 12107 - DNA, 363 bp, Zea mays
  Clone ID: LIB3150-078-P2-N2-E3
gtaacagattttgaggctacaggcagagcttgcaaaatcatcaagttatcctgaaaattttcttttggaggctcttcattctactggctattctggtgctttagcaaacccactaattgtgccagaatattcagttagcagattgaatgcagatgtcctggagcaatttataactgagaactacactgcttccagaattgttctagctgcatcaggtgttgatcatgatgaattggtatctattgccgaaccccttctgtctgacattcccagtgtatctggaacaacaaggccaaaatcaacctacattggtggagaatacagaagaagtgcagattcatcgaacacagacgttgcattggc

SEQ ID NO: 12108 - DNA, 398 bp, Zea mays
  Clone ID: LIB3150-078-P2-N2-E4
gtgacaggtaatctgacagatgagttccaagctgagtcctattccaggcttactagtgctctggagaaatgcaaaaagctgagaagtctgtctggattttgggatgcttctcctatttgtgttccgaatatctatcccctctgtcatcaactaacaggcctaaacttgagttatactcccacactggattattctgatctagctaaaatggtcagccgctgcgtgaaactccagcgtctctgggtactggactgcatttcagataagggtttgcaagtggtggcctccagttgcaaggacctacaagaactcagggtgtttccatcagaatttattgttccttgggcttctgctgtgacaggatgagggacttgctgcaatattgtcaggctgtctaa

SEQ ID NO: 12109 - DNA, 95 bp, Zea mays
  Clone ID: LIB3150-078-P2-N2-E5
tttttcagttaatctgacagatgagatccaaggtgagtcctattacaggcttactagtgctctttagaaatgcataaagctgagatgtttgtctg

SEQ ID NO: 12110 - DNA, 65 bp, Zea mays
  Clone ID: LIB3150-078-P2-N2-E6
ttttctaggaattctagtcaatatgagatccaagggtggggcctatctgaggatgagaggggctt

SEQ ID NO: 12111 - DNA, 287 bp, Zea mays
  Clone ID: LIB3150-078-P2-N2-E8
tgtcaggactcgcttcaagctcctcatctcgcgcagggggggtcgcctgagatcacagagacaatggtgaaggcagttgctgtcctcgccggcactgatgtcaagggcaccatcttcttttcacaggaaggggatggtccgaccaccgtgactggaagtatctctggcctcaagccaggcctccatgggttccatgtgcacgcgcttggcgacaccaccaacggctgcatgtcgactgtgccacacttcaattctgttggcaaggagcatggtgctccggtagatga

SEQ ID NO: 12112 - DNA, 281 bp, Zea mays
  Clone ID: LIB3150-078-P2-N2-F1
ctcccggcggcggcgcaggagcagcagcaccagcacccgaggatggtgaagttcctcaagcccggcaaggccgtgatccttctgcagggccggttcgccggcaggaaggcggtgatcgtgcgcgtgttcgaggagggcacccgcgaccgcccctacggccactgcctcgtcgccggcctcgccaagtaccccaagaaggtggttcgcagggactcggccaagaagacggcgaaaaagtcgcgcgtcaagtgctttatcaagctcgtaaactttacccacct

SEQ ID NO: 12113 - DNA, 395 bp, Zea mays
  Clone ID: LIB3150-078-P2-N2-F4
ttcaatcttgcaacactcccttccaaagacttgtctagaggctggattgccctgctctctgctggcgctgcatcctcctttagtcttccaagttttctcttggcagcagttgtgatctacgaactctttctgtgacttgaccaacatctcttttggtcctgtcaatcttgcaacactcccttctaaagacttgtctagaggttggattgccctgctctctgctggcgctgcagcctcctttagtcttcccttgctgcattctgtgctcactttcgaaagctgctctgttctgctctgctttattgatttgtgcacttggattctcttgtctgtgtaatcaagcttctctctttttggggcacaactagtcaccccattgaagcatttcaagcttt

SEQ ID NO: 12114 - DNA, 395 bp, Zea mays
  Clone ID: LIB3150-078-P2-N2-F8
ttcggagatctccgccgccatggagacgctggccagcgccatgcggcgcgagaaccgccggtccaaggccccgccctcctcctctgcttcctccgccctcgcctcgggcagggtccctctcgtcatggccttcctctcctgcctcgcctggctctacgtcgtcttccgttagtggcatgtcgctcttactcttttgtttcttttctttcttcttattgttattcttttcttgtttcaaattgttactttttcattctttaattatatattttattcgtttgttagttgtcttctttattttttattttatattttattttctttaactctttttcattctttttcttctttacttatcttatattctttacatatttttttatttaatatttatt

SEQ ID NO: 12115 - DNA, 370 bp, Zea mays
  unsure at all n locations
  Clone ID: LIB3150-078-P2-N2-G2
ctcacggtcacggaccatccattccttcgtgcacgcaacgcaaaaacaagcacagacactcgcgatccgatctgggccggccaagcagccacccatccatggcgactagggtttggctcaccgccctcctgcttggtttcctcgtcgccgcctcccccttcaccggccgagttgctagagctgaatccgaggaagatgctgctgcagctgaggttgttgaaggggctgatctaggtattgtgggtgatgatacacaggtttccagtgatggacctntaagtcctgctcctggtgtagagacagtagttgtcttcccaaaaaatgctggcaaaattgtactagcaggtgaagaaactgaattactagtttg

SEQ ID NO: 12116 - DNA, 330 bp, Zea mays
  unsure at all n locations
  Clone ID: LIB3150-078-P2-N2-G3
caggctccctcctccctcctccctcctcctccctgcaaatcgccaaatcctgcaggcaccaccgctcgttttcctgtgcggngaacaggagagaaggggagagaccgagagagggggaggcgcggcgtccgccggatctgctccgacccccgacgcagcctgtcacgccgtcctcactctcagccagcgaaaatgggtgccggaggcaggatgaccgagaaggagcgggaggagcaggagcaggagcaggtcgcccgtgctaccggcggtggcgcggcagtgcagcggtcgccggtggagaagccgccggtcacgttggggcagatcaag

SEQ ID NO: 12117 - DNA, 402 bp, Zea mays
  unsure at all n locations
  Clone ID: LIB3150-078-P2-N2-G4
acacaatagaccactgatttcacaatgaaaagggagacaatgccttcatggctagaactgttgcttgcaacacaattctttacgacttgtgctaaccatcttcttgctagtcgcaatgaatgtaacctattttgcacccagtgtgagaccaaaccagctgctttctgtaactattgtcgttcaagtgatcattccacccaccgtgtaatccagataaggcgttcatcgtaccatgacgttgtgagggtgtccgagattgaggatatccttgatgtcagcgatgtgcaaacttatgtaatcaatagtgcaaggattgtatncctgaatgagcggccacaactgcgtgcttctagtgttcccatttgtaaggcacccacatcatcaacacatagctgtgagaca

SEQ ID NO: 12118 - DNA, 347 bp, Zea mays
  Clone ID: LIB3150-078-P2-N2-G8
tttccggcgacgccgcctttgaccgcccgcgcagcgtctccgtcgatgcgggggtcaacttatacttcaccgaccttttctatggtgtcgttcttatgttttagttacttctttacacttttacaattttttgtatgttttctattttttaattaattatattaattcttttcttatttttttttttattcttttttttattaatatttattattttttattaatcttatttttttttttttatatattttttttttatttttttatttttttattagtgttatattattttttttcttttatttaaattatctttatttattttcatattttatttatttattttt

SEQ ID NO: 12119 - DNA, 415 bp, Zea mays
  unsure at all n locations
  Clone ID: LIB3150-078-P2-N2-H1
attagctttatctactccagagcgcagaagaacccgatcgacaccatgagggtgttgctcgttgccctcgctctcctggctctcgctgcgagcgccacctccacgcatacaagcggcggctgcggctgccagccaccgccgccggttcatctaccgccgccggtgcatctgccacctncggttcacctgccacctccggtgcatctcccaccgccggtccacctgccgncgccggtccacctgccaccgtcggtccatgtgccgtcgccggttcatctgccgccgccaccatgccactaccctactcaaccgtcccggcctcagcctcatccncagccacacccatgcccgtgccaacagccgcattcaagcccgtgccagctgcagggaaccttgcgcgttgcagcaccccgat

SEQ ID NO: 12120 - DNA, 508 bp, Zea mays
  Clone ID: LIB3150-078-P2-N2-H3
catgtttagacaggatgccggctggccacggcctgcgctcgcggacacgcgaggtgttttccccccccttccttatgaaggtctactttccgttcaccacctacctctgcacctacaatatcggctattacttctgatttaaaggtttatctgttcctttccacaattaatatttctcatacatttttttatatacttttcttctcctaatctcattttttcaaatctttacctatatactcgtactttttattttttacaatttcttaatatatttttaacaattaataacttcttatttttttatattatattatggtgtctgttcgttagtttagttatctttcttaatttacttatttattttatctttcatttttttattaactatttttatttttattattgttttatttttatttattttcttttcttttttttactttatttatttttattttattatatttcatttattttttttaattttcgttttatttttttatct

SEQ ID NO: 12121 - DNA, 313 bp, Zea mays
  Clone ID: LIB3150-078-P2-N2-H4
cgcagcatctcaaccccatggccaagatcaagatcgggatcaatgggttcggcaggatcggaaggctggtggccagggtggccctgcagagtgacgatgtcgagctcgtcgccgtgaacgaccccttcatcagcaccgactacatgacctacatgttcaagtacgacactgtgcacggacagtggaagcaccatgaagtcaaggtgaaggactccaaaacccttctctttggtgagaaggaggttgctgtgtttggctgcaggaaccctgaggagatccccgggggttcggttggtgctgaatatgttggtga

SEQ ID NO: 12122 - DNA, 137 bp, Zea mays
  Clone ID: LIB3150-078-P2-N2-H5
tttattatatcaacccgacggccaacatcaaggtgggaatcaatgtgttcgggggggacttaaggcatgtgctcaatgaggatctgcattgtgactacttattgctcgattttgtgaacgactattttatatgtttt

SEQ ID NO: 12123 - DNA, 181 bp, Zea mays
  Clone ID: LIB3150-078-P2-N2-H8
tacgaattccagctgacccactccaactgcggaaaatcccacgaaagatgggggacgcggcaacacggaagaagaggacctcgacagaccgtgcgacgacttcatccttcgttctcggcctgcgatccgttttgcatctccaccacatacaccggctaacgggcgcgtggacacctgtttg

SEQ ID NO: 12124 - DNA, 295 bp, Zea mays
  Clone ID: LIB3150-079-P1-N1-A1
tcttgattgttccaggtattcgcagtcgaccgtgtcctcggagcacgatgaaggttgttgctgcctacctgcttgctgtcctcgctgggaatgccagcccctccgctgaggatttgactggcattctggagtcagttggctgtgaagttgacaatgaaaggatggaactgctgctgtcccaactgagcggtaaggacatcaccgagctcattgccgcgggcagagagaagtttgcttcagtcccatgttgcggcggcggtgtggctgttgcgtgaggtgcacctgctgatggggg

SEQ ID NO: 12125 - DNA, 387 bp, Zea mays
  unsure at all n locations
  Clone ID: LIB3150-079-P1-N1-A12
gcgcgcacgcaaacnnaagtcctctacagncaaaccacacccacttctttttgtgattcagcatgttctcttccggggtgaacagacttagcccaaggcctggaatttattcgttcatggaccacaaagctcgctaagcgtttgaatgtttgtggactaattaactgacagtatgctatatttacttctggtgatgtgttcctacttgaggcgaaccctcgtgctttacgcacagtaccttttgtattcaatgcgattggtcatccgctagctaaatatgcatcatttatcatgtctggtgtgacctttccggagctcgggttcacttaaaaaatgaatcctaaacatgtttttgttaaagaagcgtggcttccatttgtgaaaata

SEQ ID NO: 12126 - DNA, 411 bp, Zea mays
  Clone ID: LIB3150-079-P1-N1-A3
aggctctccaggaggcccttcccggtgacaatgttggcttcaacgtgaagaatgttgctgtgaaggatctgaagcgtgggtatgtggcctccaactccaaggatgaccctgccaaggaggctgctagcttcacctcccaggtcatcatcatgaaccaccctggccagattggcaatggctatgccccagttctggactgccacacctcacacattgctgtcaagtttgctgagctcgttaccaagattgataggcgatccggcaaggagctggagaaggagcccaaatttctcaagaacggtgatgctggtatggtgaagatggttcccactaagcccatggtggtggagaccttttctcagtatcctcctcttggtcgatttgctgtccgtgacatgaggcaaacggtgg

SEQ ID NO: 12127 - DNA, 396 bp, Zea mays
  Clone ID: LIB3150-079-P1-N1-A6
attcaggtgattcagcatgttctcttcctactagaacagtctcagcccaatgcctggaagttatccgttcatggaccacaaagctcgctaagcgtttgaatgtttgtggactaatgaactgtcagtatgctatatctacttctggtgatgtgttcctacttgaggcgaaccctcgtgcttcacgcacagtcccttttgtatccaaggcgattggccatccgctagctaaatatgcatcattgatcatgtctggtgtgaccttgccggagctcgggttcactaaagaagtgattcctaagcatgtgtctgttaaggaggctgttcttccatttgagaaattccaagggtgcgacattcttcttggaccagagatgcgcagcactggagaggtgatgg

SEQ ID NO: 12128 - DNA, 311 bp, Zea mays
  Clone ID: LIB3150-079-P1-N1-A8
tcggcggcggcggcggcggcgaccatggctgtcgaaaagaacaagaggatcttcaagggaaagaagggcggcaagatatagaccgcaaatcctatgtttaccaatgacaaggatgacattaagtgtacctcccaggtcatgatcatgaaccacccttgccagattggtaatagctttgccccagttatggactgccacaccttacacattgctgtcaagtttgctgttctctttaccaaaattgatatgcgatcccgcaaggagcttgtgaaaaagcccccatttttcaaaaacagagattctggtatggt

SEQ ID NO: 12129 - DNA, 318 bp, Zea mays
  Clone ID: LIB3150-079-P1-N1-A9
tcgactgcgcaaccggcaccaaccttcgccaggttttcgtgggctctttcaccgatacaaccatcctccaggctacttatattcggatctaacccaaagttgctgttttttccatatatgaaaagaagaacgcaagggatgctcgattgactctagttacttagcagaaccaaaagtggaaggccatcaaagatacgaggctattttctctccatgtctcggtcaccccacctcccaccccgctgcccaccgctgggtcctcagatcactcgaagggatgacggcatgttcacgcaaagctgcaggtttccatctggg

SEQ ID NO: 12130 - DNA, 199 bp, Zea mays
  Clone ID: LIB3150-079-P1-N1-B2
cgcatgttcttagcttttctgtcatctttcggcaactatttatttgtttgactgttataagatgttatgcaacatctactccatttgaagtaattgtcttgtgtagagcaaaaaaaaaaaaaaaaaatataaaaaaaaaaaaaaaattaaaaataaaaaaaaaaaaaaattttaataaaaaaaaaaaaaaaaaaaatag

SEQ ID NO: 12131 - DNA, 392 bp, Zea mays
  Clone ID: LIB3150-079-P1-N1-B3
accaaggttgttggtgtgccagtttgattgaatggtgacctcaagaaccagtttgttgaaacaacagttggatttgatacagtatgtaaggttaattcacagcttgtaagcaatgtttgtcttgatgcgatctcagctggaaagtactattattttgttcgtctgacgggacgaaaagcatcttatgttgcctttgaatgtgtcacttagtcacacccaaacatgcttatcttaggcgaggaggtagctttgctaaaattcacactgatggaaattattatcatgttttgtgattgtagttcatgctagggcataattaggttaattttatggtgtgcttgttttttccgatagactttatgaaagcattccaatattttatgctttttatt

SEQ ID NO: 12132 - DNA, 372 bp, Zea mays
  Clone ID: LIB3150-079-P1-N1-B4
tcatactcttgcgccgccactgcctcacaggtaaggccgccatggtctccggttcgggcgtgtgcgcgaagcgcatcgtggtggacgcgcgccaccacatgctgggccgtctctcctcgatcatagccaaggagctgctcaatgggcagaaggtggtcgtcgtccgctgcgaggagatctgcatgtcgggcggcctcgtccgtcagaagatgaagtacctccgcttcctccgcaagcggatgaacaccaatccgttccacgggcccatccacttccgcgcccccttcaagatcctgtggcgcaccatccgcggtatgaatccgcacaagaccaataggggggaggcggctcttgcaaggcttaatacgtacg

SEQ ID NO: 12133 - DNA, 92 bp, Zea mays
  Clone ID: LIB3150-079-P1-N1-C1
cgactgcgcaaccggcaccaaccttcgccaggttttcgtgggctctttcaccgatacaaccatcctccaggctacttatattcggatctaac

SEQ ID NO: 12134 - DNA, 404 bp, Zea mays
  unsure at all n locations
  Clone ID: LIB3150-079-P1-N1-C2
tcgcagaagaacccgatcgacaccatgagggtgttgctcgttgccctcgctctcctggctctcgctgcgagcgccacctccacgcatacaagcggcggctgcggctgccagccaccgccgccggttcatctaccgccgccggtgcatctgccacctccggttcacctgccacctccggtgcatctnccaccgccggtccacctgccgtcgccggtccacctgccaccgccggtccatgtgccgccgccggttcatctgccgccgccaccatgccactaccctactcaaccgccccggcctcagccttattcccagccacacccatgcccgtgccaacagccgcatccaagcccgtgccagctgcagggaacctgcggcgttggctgctccccgatcctgggcca

SEQ ID NO: 12135 - DNA, 406 bp, Zea mays
  unsure at all n locations
  Clone ID: LIB3150-079-P1-N1-C3
tcctaaagctgcttgagacccatcttgtggccgtcttccactgnccccgagtccaaggtcttctatctaaagatgaagggtgattactacagatacctcgctgagttcaagactggagctgagagaaaggacgctgctntnaacacgatggtggcatacaaggctgcccaggacattgctctggctgagcttgctccaactcaccctattaggcttggactggcacttaacttctcagtgttctactatgagattctgaactcacctgatcgcgcctgcagtcttgcaaagcaggcttttgacgaggccatctnggaactggacaccctgagcgaggagtcctacaaggacagcactttggtcatgcatctccttcgtgataacttgaccctatggacttctgaca

SEQ ID NO: 12136 - DNA, 222 bp, Zea mays
  Clone ID: LIB3150-079-P1-N1-C6
tttcctttgttgtatcttgtcactgatcagggttgtttgctttgctttgccgtgctaatggcgcccgctccatgtggccgttcgtcgcagagggtgttccactttggcaagggcaagagcgtgggcttcatgaacatgtatgagctgctgggcggcttgggcgcgaacctggcggagatggcgagcatcgtgctgtctgtgccgccggtgttcacagtgtct

SEQ ID NO: 12137 - DNA, 406 bp, Zea mays
  Clone ID: LIB3150-079-P1-N1-C8
aaaaaaaaaaggaggggagaaaatataaaaaaagaggaggagggaaaataaatttttaataaaaaataaaataaaagaattaaaaaataaatatgtaaagtaaaaaaaaaaaataaaaaaaaaaaaagaaaaagggataaaaaaaaaaaaaaaaaatacaaaaaaaaaataaaaagaaaaggaaaaaaaaaaaaaataaaaaaaaaataaaataaaaaaaaagaaaaaaaaaaataaaaaaaaaaaaaaagaaaaaaaaaaaaaaaaaaaagaaagataaaaaaaaaaaaaaaaaaaaaaaaaataaaagaaaaaaataaaaaataaaagaaaaaaaaaaaaaaaaaaaaaaataaaaaaaaaaaaaataaaaaaaataaattaaaaaaaataaaagaaaagaaaa

SEQ ID NO: 12138 - DNA, 392 bp, Zea mays
  unsure at all n locations
  Clone ID: LIB3150-079-P1-N1-D1
tctcctccacctccaccctngaatcgttcgccaccatggcgtcgcagggatcctccgtcttcgccgcactcgagcaggccccggaggaccccatcctcggagtgaccgttgcctacaacaaggatcccagccccntgaaggtcaacctcggggtcggcgcctaccggaccgaggaagggaagcccctagtgctgaacgtggtcaggcgcgccgagcaaatgttgatcaataatccgtcacgtgtcaaggagtacctaccaatcaccggtctggctgaattcaataagctgagcgctaagcttatctttggcgctgacagccctgctattcaggagaatagggttgctaccgtgcagtgcctatcggttactggttntttaagagtcggaggt

SEQ ID NO: 12139 - DNA, 401 bp, Zea mays
  Clone ID: LIB3150-079-P1-N1-D4
tcgacccacacgagcaccaagccgaggggaggggcgatggcgagaggtgtggtgtcagcgaagggcggcacggccgcgggcaagaagaaggggtcggtcgccttcacgatcgactgcaccaagcccgtggaggacaagatcatggagatcgcctcgctcgagaagttcctgcaggagcgcatcaaggtcgccggcggcaaggccggcaacctcggcgactccgtcaccatcttccgcgagaagaccaaggtcaccgtcacctgcgacgggccattctccaagaggtatctgaagtacttgaccaagaagtacttgaagaagcacaaggtgcgagattggctccgtgtgattgcagccaacaaggaccacagcgtctatgagctgcggtacttcaacattgc

SEQ ID NO: 12140 - DNA, 398 bp, Zea mays
  Clone ID: LIB3150-079-P1-N1-D5
tttctcttggccattctccaccgcggatcatggtgggcctatatctgattgcactggtgaaggactaaaggcttcattattgttatcaaagatttctcctgaaattgttggtggaccgatagaagctaatagattttatgatgctgtcagttgtctgatgtcttatatgaatgataatggtggttttgcgacttatgaactcacaagatcctatgcctggctggagctgatcaatcctgctgagacctttggggatattgtgattgattacccgtatgttgaatgtacatcagcagcaattcaggccctgacatcattcagaaaactataccctgtgcaccgcaggaaagaggtggtcagctgtatcagcataactgctaatttcattgagagcattc

SEQ ID NO: 12141 - DNA, 398 bp, Zea mays
  Clone ID: LIB3150-079-P1-N1-E3
ttaatggtttaaaagcatccaccaagcctaagactacgaagggccagaaatctggtcctcagacccctttgggttttggttctccgggcaatccttctactcctgttggtggctgccgctatgatagctccctcgggctcttgacaaagaagttcctgaacttgctaaaaggtgcacctggtggcattgttgatctgaataatgctgcagaaactctagaggtacagaaaaggcgtatatatgacatcactaatgttcttgaagggataggactgatagaaaaaaagcttaagaacaacatccgttggaaaggagttgatgactctcgacccggagaagttagtgatgatatgtccattttacaggcagatattgatgctcttacactgcaagagcgc

SEQ ID NO: 12142 - DNA, 386 bp, Zea mays
  Clone ID: LIB3150-079-P1-N1-E4
ttttgttgagagccatggcggctgaccaggagccggagctgcaggaggagatgaacgactctgccggcggcggcctcaggctgcctccagggttccgcttccacccgagcgacttcgagattgtcagcttctacctcaccaacaaggtgctcaacacgcgcttcacctgcaccgccatcacggaggccgacctaaacaagattgagccatgggacctccctagcaaggcgaatatgggcgagaaagagtggtacttcttctaccataaggaccgtaagttcccgacggggctgatggctatacctgtccaccctggccggttactggtaggctacgttcatggactaggttgttttcaactcctctgaaggggtggcggttctggt

SEQ ID NO: 12143 - DNA, 173 bp, Zea mays
  Clone ID: LIB3150-079-P1-N1-F1
gggttgggaatcttttagaagggagaggggggcccccccaaagtcaaggaggccaaaaaaatccaaggggggcctaacaaacccccttggaaaaaagtgccggtttatagccaccagggccacaccatctgcgacccccaaaaaattgttggggcgccaaccgggaccccccc

SEQ ID NO: 12144 - DNA, 327 bp, Zea mays
  Clone ID: LIB3150-079-P1-N1-F2
gcaattcgcccctgtcgtgagcagaatcctacagctcgtattcgcctcatctcgcagcagcagcagaagaacaagggtatggcgaaggatgggggtcccgactggaacggcctgctcaagtggagcctcgcccacggcgacagcaccaacccgccgcgtgctctcagcgaggaagacagaaaatggttcatggatgctatgcaagccaacacggtagatgttgtgaagaggatgaaggagatcactcaggtgatgaaaacaccagaagatgtcttgcagtctcagggtgtgaccccggagaacattgaagatatgttggatgagcta

SEQ ID NO: 12145 - DNA, 264 bp, Zea mays
  Clone ID: LIB3150-079-P1-N1-F4
ttttcttgtttcacagagtgaaaacttatcggggtggcgtctgccattgccggtggcaggcatggtctgggcctaattccacccgttgagcactatcatcctccttgaaacctacagatctgtggcctccaaggccctcgttaataggcaacaagccggtcatatggacaccgtcgcgcccctgcaactgatagcctgcgccggcgacgccgtcaataagctgctgttcgaaccagcaggcgcaggacctatctgtgaattgcc

SEQ ID NO: 12146 - DNA, 57 bp, Zea mays
  unsure at all n locations
  Clone ID: LIB3150-079-P1-N1-F6
aaaaaaaaaaaaagaantaaaaaaaaggagaaggattaaaaaataaaaaggaagaag

SEQ ID NO: 12147 - DNA, 337 bp, Zea mays
  unsure at all n locations
  Clone ID: LIB3150-079-P1-N1-F8
aaaaaaaaanaaataagaaaagttttaataaaaagagaagggaaataataaaaataaaaaattantaataaaaaaaaaaaataaaaaaaaataatataaaataaaaaaaataaagaaaataaaaaaaaaaaaaaataaataataataaaaaaaaaaaaaaaaaaaatataaaaaaaataaaaaaaaaaaataaaaaaaaaaaaaaaaaaaaataaaaaataaaaaaaaaaaaatataaaaaggtaaaaataaaaatataaaaaaaaaaataaaaaaaaataaaataataaaaaaataaaaaaatattaaataaaaataaataaaaatataatataat

SEQ ID NO: 12148 - DNA, 115 bp, Zea mays
  Clone ID: LIB3150-079-P1-N1-G1
ttgttttctaccttgccatgcacaaattcagactgcttccatctggtgcctgggggatcaacgacaccataacaatggtatgttaggagatccacatcctgactgtgcactatct

SEQ ID NO: 12149 - DNA, 400 bp, Zea mays
  Clone ID: LIB3150-079-P1-N1-G2
ggcgaaagcaccccacaagagttccttgacttccttgccaagtttcagaggacatctaggaacttcgcaaagaggcaacttacctggttccgcaatgagaagatttaccactgggtcgatggctcgaaaccatttgaggcgcttgttcaatttgtctgtgatgcttaccatggctgcagtgcaaggatggttcctgaatcacttgaaatgaaaagggaaaattgcgtgctcaaaagccgtgatctcaaaacctatcgctcaatgaacagggtgtttcttgggggtgatgactgctctcacgttttgaattggatcaggagaacacagagcaaatgaaatctagatctactctcttatcatgtttttttttcaaacatggaaattgtctagctttttggtg

SEQ ID NO: 12150 - DNA, 399 bp, Zea mays
  Clone ID: LIB3150-079-P1-N1-G3
ggagctgccgcagtcccaccgaccccgccgccggtcgccctccatctcctcgccgctgcctctcgtttctcttttcaataatcaagatgagccgtggtggtagtgccggtggtggtcaaagttctctgggttatctctttggaagcggtgagccccccaaaccagcagtggcaccagctgcaagtgctccacctgttgagaaaccatctgctgcaaagactgatgcggccaagcaggttgctgctggggttaccagccaaaccaataactaccacagggctgatggtcagaacactggcaacttccttacggaccgtccttcaaccaaggtccacgctgctcctggcggtggctcttccctgggctacctgttcggtggcaactgatgcccgtgctggt

SEQ ID NO: 12151 - DNA, 157 bp, Zea mays
  unsure at all n locations
  Clone ID: LIB3150-079-P1-N1-H1
tttcatagccgcggaaaccctacccacccgggccgctcacgcaccgggcgcgcgcagcctcctgtcgcgtgcctgccttctacaccgcccaaagcgattggatctcgagatcgtntggtgccacgtttgatgactgggattctgaagattttcagcc

SEQ ID NO: 12152 - DNA, 125 bp, Zea mays
  Clone ID: LIB3150-079-P1-N1-H2
ttttgttttttatgtcaaagttgaagatagcgtgaatcttgacttagctgggggaattgagatgctcgatatgccgtcaaggtagccaaggattgtacaatggtttgtatgtaatcaggtatggt

SEQ ID NO: 12153 - DNA, 384 bp, Zea mays
  Clone ID: LIB3150-079-P1-N1-H3
tcggtgacgaatggcgagctctcagtgctgcgataacccgccggccctgaacccggcctgcggggagggcaaggtcgtcgacagcttcggcgggttcaaggcctacgtcgccggccccgaggactccaaggccgccgtcgtcctcgtcgccgacgtcttcggattcgaagcgccgattatgaggaagatagccgacaaggttgcttcgtcagggtactttgttgtggtaccagatttgtttcatggggatccttatgcacctgagaatgttgagaagccctttcctgtgtggataaagtcacatactccggaaaaagggtttgaagagacaaaacaagttattggggctttaaaggagaagggagtgtctgctgttggagctgc

SEQ ID NO: 12154 - DNA, 244 bp, Zea mays
  Clone ID: LIB3150-079-P1-N1-H6
ttctcatctgcgtacacggtctccctcttcctgtcagtagtagagtgagagtgaggcagcgagtgggagacaaggggaaatggggaagggagcgcaagggagcgatgcggcggcggcgggcggcgaggtggatgagaacatggcggcgtggcttggtgccaagaacaccctcaagatcatgcccttcaagctcccgcccgtcggcccttatgatgtccgcgtgcgcatgaaggcagtggggatt

SEQ ID NO: 12155 - DNA, 91 bp, Zea mays
  unsure at all n locations
  Clone ID: LIB3150-079-P2-N2-A5
aaatccaaaaattccaaaacagaccaccctttttttttttttttttttttnttttttttttttatttttnttttttaaaaaaatattaatt

SEQ ID NO: 12156 - DNA, 130 bp, Zea mays
  Clone ID: LIB3150-080-P2-N2-B5
aacttaacctcggttattcgatatttccggcaatttctagctaaccataatagtacaagcaaccgccacccctgaaacataaaccaacttaatggccctagaatgtgaagtgagaaaattgatagaaaaa

SEQ ID NO: 12157 - DNA, 394 bp, Zea mays
  Clone ID: LIB3150-080-P2-N2-D6
gggcggacgaccatttttttattataaatatttttaatttagacacgtgggcaacgcatgggtaaactttaaagaccaaagttaatactcagcaagcgattaatatctttcttatgtgaaactaaattaaattatggccgtgttaacaacatgtaactgggaaaacttggatgtactaaatatatgactaataatcaaagaaattataatcatatatattattagaataataaatcagtataatattattcttttaataatattgatttatacataaaattttttttttactcaataccattaatatattaattttataaattcggattactattaatatatattcattagatataaaatactaacataaatatatctaatttaatatatatta

SEQ ID NO: 12158 - DNA, 87 bp, Zea mays
  Clone ID: LIB3150-080-P2-N2-E3
ataggaaactggtacgcctgcagtaacaataaggaattccagaggcggacacacttttttttttattatatataaatatttatattt

SEQ ID NO: 12159 - DNA, 81 bp, Zea mays
  Clone ID: LIB3150-080-P2-N2-G3
ctttttttttttttaaaaattattaataaattttaattaaaatatttttttaaaataaaaaaaaaaaaaatttaatataat

SEQ ID NO: 12160 - DNA, 265 bp, Zea mays
  Clone ID: LIB3150-081-P1-N1-A1
attttgtcatctctcttgatgaccgttatctctactttgtaaattggcttcatggcgatattaggcagtacaacattgaggatcccgcaaagcctttcttggctggacaagtatgggttggtggtcttcttcagaagggcagtgatgtcgtctatgttactgatgatggtcaggaacagcagtataatgtgcctcaagtcaagggtcatcgacttagatgtgggccacagatgattcagctgagcttggatggcaagaggatata

SEQ ID NO: 12161 - DNA, 248 bp, Zea mays
  unsure at all n locations
  Clone ID: LIB3150-081-P1-N1-A10
tctcgtagttcttgaggttgcattcagtgcccttgaaggcctcaacaaacagtcctttttgactgagctgggaaatcgcttgcataaggggctgcttaatcattggcagaagttcacatttagtcccagtggtggcctacggttgaaacgtgacataactgaatatggggattttgntttgatctttaatgctttcttcataggatatatgtttattccgttattattatttttttaatttttttttt

SEQ ID NO: 12162 - DNA, 389 bp, Zea mays
  Clone ID: LIB3150-081-P1-N1-A11
caagaccatggatgcctccaagctccgcgagcttcgcgacttcgtcgaggcgtgcaagaagaatccttcgctcctcgccgaccccaacctctccttcttccgggattacctccagagtttgggtgccaaaattcccgccgccgccccctctttcgaaagtcccaagagatcttccatggacgacattgatgacgacggtgatgacgacgacgatttggatatgagggatcccactcctgagcgagacgagctcgatgaagagattgttgagtctgatcttgagctcgaaggagaaattgtacagtctgaccatgatgacccaccacagaagatgggaaatccttcagtggaggtgactgaggaaaaccgtgatgctttccaagaaagca

SEQ ID NO: 12163 - DNA, 422 bp, Zea mays
  Clone ID: LIB3150-081-P1-N1-A2
agcaatagctatgactgcacacgcacgcgtgcgtgagctcggtagagttaacccacgcgcacgccgtcatagatctcgtttcaaatccatccatcctggtttcctccgtcccgcagcatctcaaccccatggccaagatcaagatcgggatcaatgggttcggcaggatcggaaggctggtggccagggtggccctgcagagtgacgatgtcgagctcgtcgccgtgaacgaccccttcatcagcaccgactacatgacctacatgttcaagtacgacactgtgcacggacagtggaagcaccatgaagtcaaggtgaaggactccaaaacccttctctttggtgagaaggaggttgctgtgtttggctgcaggaacccttaggagatcccggggggttcggttggtgctgaatattgttgt

SEQ ID NO: 12164 - DNA, 366 bp, Zea mays
  Clone ID: LIB3150-081-P1-N1-A4
atctggtctcaccgggcctggcggcgagggagagatggggaagaaccaggcgtacaaggcgatgcagcgggcgcggctggggtcctcgtccggcgcgccgggcgccgccgacgcccccgaagacggcatgacggacggttcattccattctccagagtggcatgcggcgcgcctggccagccttaacaagacgcacaccctcacctgggaggagttcaagaagaagcagaaggaagaggaactgaaaaggggtgagctggaggctgacaaagacaaaatgatgagagagtttagagctcaactggatgctgaaagagctcaaaagctagcaaacggaagaaatcactcaaggtcaaacttaaaatc

SEQ ID NO: 12165 - DNA, 392 bp, Zea mays
  Clone ID: LIB3150-081-P1-N1-A5
taatacccggcgaccacatcaaaacacgaggcgtccccgactccgcagtccgcaggaccggtcactcggcacgcaggctagcagcacagcagcagccagagccatcccctctcctcgctacgcttcgcttcctcggcgccgattccttctcctcctcctccacccttgtccgtccccttccggcgcacgagctcgcccgagatggcgaacgcgagatcgggtgtcgctgtgaacgatgagtgcatgctgaagtttggcgagctgcagtcgaagaggctgcaccggttcataactttcaagatggacgacaagttcaaggagatagttgtggaccaggtcggggatcgcgcttccagctacgatgacttcacaaacaggcttcctgagaatga

SEQ ID NO: 12166 - DNA, 334 bp, Zea mays
  Clone ID: LIB3150-081-P1-N1-A6
gccgccgttgctgctgccgcgtccacagaatggggggtttcgtgaagactcataagaccaatgcgtatttcaaacgtttccaagtgaaattcaagagaaggcgggctggcaagacagactacagggccaggataaggctgattaaccaagacaaaaacaagtacaacacacccaaattcagatttgttgtgcgatttaccaacaaggacatcactgcccaaatcatatctgctagtatagcgggtgatatggttcttgcttctgcctactcgcatgagttgccacgatatggtcttgaaagtggtctgaccaactatgcatctgcctactgcac

SEQ ID NO: 12167 - DNA, 300 bp, Zea mays
  Clone ID: LIB3150-081-P1-N1-A7
taaaaccctaaccctccgccgcccctcggacccccaaccagcagctgccgcggccatccgccggcgagatggcgctgtacctgctgttcgagtcggcgtccggctacggtctattccacgcgtacggcatcgatgagatcgggcagagcgtggaggccgttcgctcctccgtgctggacctcgatcgcttcggcaaggccgtcaagctcaccgccttcaaccctttctcctctgccgtcgatgcactcaatcagtgcaacgctatatccgaagggatcatgaccgatgaactgaggagtt

SEQ ID NO: 12168 - DNA, 404 bp, Zea mays
  Clone ID: LIB3150-081-P1-N1-B1
caatacttgaagatgaacaaccatatttccattctagtgattctcatcgtcgatgtgtctgttgtcctcctgctcaattcccatgtagggttatgcagctgctacaaccgcatctttagttttggtgacgataccatggacactggaaatttcattcacttgattgggaaggccccatctaagtacaaggaagccccctatggcaagacattttttagacatgcaactggccgcatttctgatggtcgtgtcctcattgatttctatgcggaagcactaaaactgccaatgataccacccattttacctgagaagaacttctggtgtttcccacatggcgccaacttcgctgtgtttggtgccacggcacgtggcaaagtcttcttttcagggagcccctggtg

SEQ ID NO: 12169 - DNA, 192 bp, Zea mays
  Clone ID: LIB3150-081-P1-N1-B10
tgtatacctgtggacgaacaaccctagtacgagtctagggatgctcagaggggccgtgtgtgctgtcctactgctaaactcccacgtgtgcttatggagggcatggaaaggactgtctagacctaccgtggtagcctcatgcactggattttcattcctcagacattggatagcctcatgttacttcatgac

SEQ ID NO: 12170 - DNA, 364 bp, Zea mays
  Clone ID: LIB3150-081-P1-N1-B2
cgatctcgtagagatcgaggttaactcctccgtcctcaacgacgagttcatcgcccaccgtctggggctcatcccgctcacctccgccgccgccatgcaaatgcgcttctctcgggactgcgacgcttgcgacggcgacggctcctgcgagtactgctccgtcgagtttcacctctccgtgcacgccaccgactccgaccagacgctcgaggtcacatccaacgacctgagatccatggaccccaaggtctgcccagtcgaccaagcacgcgcctaccagcacgcgctcggaggcaccgacccctttggagccaatgcctcgaacgaaaacaggggcatacttattgtaaagctgcgtcggggg

SEQ ID NO: 12171 - DNA, 93 bp, Zea mays
  Clone ID: LIB3150-081-P1-N1-B3
tttctttctcttagaaataacggccaacttcgcagggctgaattactaattcaggaggcaccctctgttcctcatctcaatcaccatctccgg

SEQ ID NO: 12172 - DNA, 409 bp, Zea mays
  Clone ID: LIB3150-081-P1-N1-B4
gcttaaccctagccgaaagaaacaatgtctctcctcccctgagcgcgctcgtggccgccccttgttggccatggctctccagctccgccgcctcctcccgcacggatacgcccagcgacaccgcgccgtcatccacgcgctatcgctgctgccgccgccgcccgcaatgattcaagtggatgttggcattcctgaaggagagatgaattttcattccactgcatcaaaactggacttcaagggataccgagctgtctatgaggatgatcaggccagtccatgcattgacagctctgagggagattgtgtgcatgagtgtaactttgaggccttgtcgaaattaatgggtaaggacttggtgtttcctgttaacgtgcatcttggccagcacttcactaaaccaccacca

SEQ ID NO: 12173 - DNA, 98 bp, Zea mays
  unsure at all n locations
  Clone ID: LIB3150-081-P1-N1-B5
tctttnctctctttagcatagaccctctatatggaacgtccaactttgcacatggaggccccaccttattagccatctttattaatcacctccgtact

SEQ ID NO: 12174 - DNA, 345 bp, Zea mays
  Clone ID: LIB3150-081-P1-N1-B6
tctcttttcaaatccatccatcctcgtttgctccgtcccgcatcttttcttccccatggccaagatcaagatcgggatcaatgggttcggcaggatcggaaggctggtggccagggtggccctgcagagtgacgatgtcgagctcgtcgccgtgaacgaccccttcatcagcaccgactacatgacctacatgttcaagtacgacactgtgcacggacagtggaagcaccatgaagtcaaggtgaaggacttcaaaacccttctctttggtgagaaggaggttgctgtgtttggctgcatgaacccttatgagatcccgtggggttcggttggtgcttaatttat

SEQ ID NO: 12175 - DNA, 395 bp, Zea mays
  Clone ID: LIB3150-081-P1-N1-C2
ggagaaccttcaaagattcaatcaaataggaggaacatttcgcctagaagtcatgcaattgctgatacagggaggacttatccagatgaatgttgtgctacacaaggagaaactcatgtaatcaatattgaaaatgatacttctgaagagtttcgattaggaagcacgttaagacggacatcaccagcaaaattgacaacacctgctcagaagcacagaagggtttctggagatgactatcataatggaagtgttcctctgaaggatagtacatatcatagtagcctagatttagaggtcatagctggtccatctcatggaataagctgttctcggcagtcaagtaggccttctatgctcccaataactcttggaagggttcccccaagtgattt

SEQ ID NO: 12176 - DNA, 170 bp, Zea mays
  Clone ID: LIB3150-081-P1-N1-C3
taattggcggatgcgggagtggtggtggtgctcgtggtctctcaccggagcaccctgtacagcatcatcgctgctgcattagatagtgccatagttggagctggtaactatccctcccccctccgttcccgtaccgctcgcatccgtttgtcaagcctgctcagtgccca

SEQ ID NO: 12177 - DNA, 324 bp, Zea mays
  Clone ID: LIB3150-081-P1-N1-C4
ggctattcccgtccgcctgctatcttctagtactcacccttgccctcctcgtcgtctctgccgctgccaagtcctcccgccgccccatctccgacaacgagatccggcagaagaaggaggcctgctacaccgacgtcgagaacgggctgtggggatgggtgtgcaggtactcgccgacggagaaggagaactgcgtgttgcgctgcctctcgccggagtgctacgacctcatatacggcggggatccgcttgaggaaggggagttggactatgttcgaggccaggagtacaagtattgtatgcacaaatcattccttggagaaa

SEQ ID NO: 12178 - DNA, 119 bp, Zea mays
  Clone ID: LIB3150-081-P1-N1-C5
tgggagcaccgacgtaagctgatccttaagcgacctgtctcactttgttgagagcgcccgggaattcgaaccgggccacaggcgtaccagtgtcctatatgtgctatagagctagcgaa

SEQ ID NO: 12179 - DNA, 400 bp, Zea mays
  Clone ID: LIB3150-081-P1-N1-C6
tgtcgttgtgggcgacaaggaggcgtccggatctggcgacaaggcggcgtccggatctggcgacaaggcggtggccacgggaaacctgccgtgcatggatcgcctccgggaggagctctcttgcgctatttgcctggagatctgctttgagccgaccaccacgtcttgtgggcacagcttctgcatgaaatgcttaatacatgctgcatccaagtgtggaaaacggtgtccaaaatgcaggcaattcatcagcaactcaagatcgtgcaccatcaacacagtgctctggaacaccattcagctgttgtttcccggtgaagttgaggcaagaaagaattcgaccttaccatgcgatatggacgcgagccggagcccactcatagcttataggctatcacaa

SEQ ID NO: 12180 - DNA, 277 bp, Zea mays
  Clone ID: LIB3150-081-P1-N1-D1
tgtcatattagttggtggctgcgatcccaagacacttcatcctgatgttgattggttggagaaggttctgaaagaaaatgagcctatccctaaacttgtcactgttgtgaatccggggaacccctctggagcttttattccaaggcctatgcttgagagaatttcagatctgtgcaaatattctggttcatggtttgtggttgacaatacctattagttctttatgtatgaaggaattgtgctctactttttttcatttttctcttattggcaacct

SEQ ID NO: 12181 - DNA, 381 bp, Zea mays
  Clone ID: LIB3150-081-P1-N1-D2
cggtgacctccagtactggatggatgaaaactacctacataactgcttcgggcccagcggcgaggtggttacaataaaagttatccgcaataggcaaacaggacagtcagaggggtatggatttgttgagttcttttctcatgcatcagcagagaaagctcttcagaattttactggtcatgtgatgccaaacactgaccggccatttaaattgaactgggcatcgtatagcatgggtgaaaagcgatctgaagtggcttctgatcactcgatatttgttggcgatctagctgctgatgtcactgatgaaatgctgctggagcttttctccagcaagtacccgtcggtgaaaggagctaaagttattattgatgcaaacac

SEQ ID NO: 12182 - DNA, 132 bp, Zea mays
  Clone ID: LIB3150-081-P1-N1-D3
ataccttcaaatctgcatgcatcaagaccgcgtatatatctgttaagggccgagcctcttcttatgccccattctatggtacacatatttttctcacaggcccgtaagctgattgagactttgagaatgacc

SEQ ID NO: 12183 - DNA, 390 bp, Zea mays
  Clone ID: LIB3150-081-P1-N1-D4
tacatacatccacaaaaacaaaagaagggaaaaaccacaagctagccatggttagcagcaagattagtattatcggagccatcacatctccaattgtggttatagtggcactgacactattgatcacacttttggcaccgacagtagatgcacaaccatactcaacaatgccacctagcatgatcggagatttattgccacggacgagagtacctccgtctgggcctagccatcctccacccatggcggcgatgccaccatcatggagaatgccatctgctggacctatgaagcctccttccatggcggcgatgtcacctgatgttgttgaggatttgctaccacgaggaagaggtccaccctccgtgcctagccatccaccacccttgg

SEQ ID NO: 12184 - DNA, 349 bp, Zea mays
  Clone ID: LIB3150-081-P1-N1-E1
cggacgcgtgggcctgctccattctcagccgccgccaatcccttcccgtgctccgcaaccgctgagtgagaagaagagatggccggcaagggcgatggcccggctatcggcatcgatctcggcacgacgtactcttgcgtcggcgtgtggcagcacgaccgcgtcgagatcattgccaacgaccagggtaaccgcaccacgccctcgtacgtcgccttcaccgactccgagcgcctcatcggagatgcggccaagaaccaggtcgccatgaaccccatcaacaccgtctttgatgccaagcgtctcatcggcaggaggttcagtgatgcgtctgtccaaaagggatatc

SEQ ID NO: 12185 - DNA, 237 bp, Zea mays
  Clone ID: LIB3150-081-P1-N1-E3
tctgtcttgctcctcttgctaaggtcatcaatgacaagttcggtatcgttgagggtctgatgaccactgtccatgccatcactgctacccagaagactgttgatgggccctcgtctaaagactggaggggtggaagggctgctagtttcaacatcattcccagcagcactggagctgctaaggctgttggcaaagcgctttctgtccttaacggaaaggtgactggaatgtcttttc

SEQ ID NO: 12186 - DNA, 82 bp, Zea mays
  Clone ID: LIB3150-081-P1-N1-F4
ggtgtatgtggaggctgttgctgtcgccgttgaggagacggtgacggtggacgatgatgtggaggatgttgctgtctccgtt

SEQ ID NO: 12187 - DNA, 210 bp, Zea mays
  Clone ID: LIB3150-081-P1-N1-G1
tttttggagttttggtcagaatttgagttggatgctgcagatatgttggtaggagtagttgttaatgtaactttagtcggcatgttagcgccatatgctcgatttggtagcagatctgcatcagatggtctctttgtgcgcgttaggcatgcttatgattccctcccaagcattttttttttatctttattgtcctttttcattttttct

SEQ ID NO: 12188 - DNA, 371 bp, Zea mays
  Clone ID: LIB3150-081-P1-N1-G2
attctcgaattacgattcccaatccagcaaaccctaccagccttttgcaaactcagagagggacccgatggcacccaaggcggagaagaagccggcggcgaagaagcccgcagaggaggagcccgcggccccggcggagaaggcccccgctgggaagaagccgaaggcggagaagcggctcccggcgggaaaatccgccggcaaggaaggcggtgttgacaagaaggggcggaagaaggccaagaagagcgtggagacgtacaagatctacatcttcaaggtgctgaagcaggtgcacccggacatcggcatctcctccaaggccatgtccatcatgaactccttcatcaacgacatcttcgagaagctcg

SEQ ID NO: 12189 - DNA, 389 bp, Zea mays
  Clone ID: LIB3150-081-P1-N1-G3
ctcgcgaactccatttcgatcccatttgaaatcaacccatcctcgtttcctccgtctagcagcctctcaccctcatggccaagatcaagatcgggatcaatgggttcggcaggatcggaaggctggtggccagggtggccctgcagagcgacgacgtcgagctcgtcgccgtgaacgaccccttcatcagcaccgattacatgacctacatgttcaagtatgacactgtgcacggacagtggaagcaccatgaggtcaaggtgaaggactccaagacccttctctttggtgagaaggaggttgctgtgtttggctgcaggaaccctgaggagattccatggggtttcgttggcgctgaatatgttggtgagtctaccggtggtttcact

SEQ ID NO: 12190 - DNA, 207 bp, Zea mays
  Clone ID: LIB3150-081-P1-N1-G6
ttttgtttcttcgtgaagctcgtgtcctggggcgacgatcgagtggtgatacagtaccctctttgtctacctgatccgcctcatgaacagcaccaactaagatgaataactcaaggtctggtgatacgagcgagttgttttctttccccctggagaaaagtgcttccgagaataaatttttttccatcggatttgtctgaaactatg

SEQ ID NO: 12191 - DNA, 252 bp, Zea mays
  unsure at all n locations
  Clone ID: LIB3150-081-P1-N1-H2
ttgagatgcaccatgaggctctccaggaggcccttcccggtgacaatgttggcttcaacgtgaagaatgttgctgtgaaggatctgaagcgtgggtatgtggcctccaactccaaggatgaccctgccaaggaggctgctagcttcacctcccaggtcatcattatgaaccaccctggccagattggcaatggctatgccccagttctggactggcacaccttacacattgcttgtcaagtttgcntgagct

SEQ ID NO: 12192 - DNA, 379 bp, Zea mays
  Clone ID: LIB3150-081-P1-N1-H3
tctcgtagagagaaggaaaaatatccccaaaccctagctcccgatctcgatggcgaaccctcgcgtcttcttcgacatgaccgtcggcggcgccccggcgggccggatcgtgatggagctgtacgccaacgaggtgcccaagaccgcggagaacttccgcgcgctgtgcacgggcgagaagggcgtgggcaagtccgggaagccgctccactacaagggctccaccttccaccgtgtcattcccgagttcatgtgccagggcggcgaactcacccgcggcaacggctcctgcggcgagttcatctacggtgagaagtttccctgccatgtgtttttgcgcaagcactccatcctctgtttgtttttcatggtctatttt

SEQ ID NO: 12193 - DNA, 403 bp, Zea mays
  Clone ID: LIB3150-081-P1-N1-H4
tgtcttggtgaaggactccaaaacccttctctttggtgagaaggaggttgctgtgtttggctgcaggaaccctgaggagatcccgtggggttcggttggtgctgaatatgttgttgagtctactggtgttttcactgaccaggagaaggctgcagctcacttgaagggtggtgccaagaaggttgtcatctctgctcctagcaaggatgcccccatgtttgtcgttggtgtcaacgagaaggagtacaagtctgacattaacattgtcttcaatgctagctgcacaaccaactgccttgctcctcttgctaaggtcatcaatgacaagttcggtatcgttgagggtctgatgaccactgtccatgccattactgctacccagaagactgttgatgggccctcg

SEQ ID NO: 12194 - DNA, 189 bp, Zea mays
  Clone ID: LIB3150-081-P1-N1-H5
ttatgttttcggaattctctgcgatttctgtagagctcgactaccccccactagttgtggttcctcctttcgttcgagagagcgattctggtggcaatggcgaagagcgagggttcggcgatcgggatcgacctcggcacctcctacttttgcgttggtgtgtggcatcacgaccgggtggagattttt

SEQ ID NO: 12195 - DNA, 69 bp, Zea mays
  Clone ID: LIB3150-081-P2-N2-A10
attttttttttattatataaaaataaaaaatatattttttattaataaaaataatatatataataatat

SEQ ID NO: 12196 - DNA, 325 bp, Zea mays
  Clone ID: LIB3150-081-P2-N2-B1
attccttttcattttattttttattttttttttccttcccattaattatatttcatttaacttttttttttatccttttaatttttttttttttttttctttatttttttttttttttttttttttttttttttttttttttaattttttttttttttttattttattttttttcttttttttttttttttttttttttttttttttttttttttttttttttttttttcttctttttttttttttttttttttttttttttttttttttttttttttttttttttttttttttttttttttttttttctttttttttttttttt

SEQ ID NO: 12197 - DNA, 335 bp, Zea mays
  unsure at all n locations
  Clone ID: LIB3150-081-P2-N2-B11
aanaaaanaaaaaataanaaaaaaatatttaaaataaaaatataatatttaaaaataataattaatataataaaataataaattaaaaaaaaaaattaaatataaaaataatattataaaaataatatatataataaaaaaaaaaataaaaaaaaaaaaaaaaaaataataaaaaaaaataaaaaaaaaaataaaaaaataaaaaaaaataaaaaaaataaaaaataaaaaaaataaaaaaaaataaaaaataaaaaaaaaaaaaaaaaataaaaataaaaaaataaaaaaaaaaaaaaaaaaaaaaaataaaaaataaaattaaaaaaataaaa

SEQ ID NO: 12198 - DNA, 310 bp, Zea mays
  Clone ID: LIB3150-081-P2-N2-E3
gggaaagctggaacgcctgcaggaaccggcccggaaaaccgggggcggccgccaataaaaattttatcgacaaaaaaagaaccagagagagaaaataaagggaaaaaaaaaaaaaacggaaacaaataaaaaaaaaaaaaaaaaaaaaaaaaaaaaaaggaaaagaaaaaaaaaaaaaagaaaaaaaaagaaaaagacaaaagaaagaacaaaaaaaaaaaaaaaaaaaaaaaaagaaaaaaaaaagaaaaaaatggaaaagaaaaaaaaggaaaaaagaaagaaaaagaaaaaagcaaaaaaaagaaaa

SEQ ID NO: 12199 - DNA, 391 bp, Zea mays
  unsure at all n locations
  Clone ID: LIB3150-081-P2-N2-F5
ggaattcaggggcggacgaactttttttttttttttntattaataaaaaataattgtgagtgggtatatggaaaaatagataaaataattataaagtgttttataaaaaaaattgatataaagaaaaaataaaaaataaaataatgtaaaaaaatattataataaaatataaaaaaaaaataaaattaatataaaataaaaaagaaaaatttaaattaaaaattaataattataaaaaaaaaaaaaaaataataattaaaaaaaaatatattaaaaaaaaaaaaaaaaatgtaaaaaaaaaaaatttattaaaaaagtataaaaaatgggtgtaaaatttaaaaatattataaaaaaaaaaataataaattatagaaaaaatttttgtgtg

SEQ ID NO: 12200 - DNA, 352 bp, Zea mays
  Clone ID: LIB3150-081-P2-N2-G12
ctggtgcgcctgcaggtaccgaatcgcaattgccggcgcgctcgccctttttttttttttttatattaacagcggggggtagaacattatattagcactaagaggattgccacaacttcatcttaaaacaaggtttatgaacaaagacatgtataaagtagccggcaaaaacatggcgactattccaatccatttccacactcaaaagttgcaacaaggccaaggtgataaaagtttatccagacaatgataactcaagagagggtccaccctagaacaacttaaatcgtgcatggcacaactcctgctcatgttcaagactcatgatgctttgtacttaaacagatcattt

SEQ ID NO: 12201 - DNA, 229 bp, Zea mays
  Clone ID: LIB3150-081-P2-N2-H10
gcctccaggtcccgaatctcgcgattcccggcgcggtcgccctttttttttttttttttttttttttttggggtgaggtcatttttcaaatccacatacacatttttaaattcataaactgatttccattacacaatacacacaaacacattaaacccaaaccatattattatccggggacaaattacaaacattctcttattatctttacttaaaaattagttttttc

SEQ ID NO: 12202 - DNA, 305 bp, Zea mays
  unsure at all n locations
  Clone ID: LIB3150-081-P2-N2-H5
cggtaccgaattccaattgcgggcgcgctcgccctttttttttttttttttttttttttnggagcgggggacaaaacttcaattacacacgacacatttctgaatggcattgactgagttccatttacacatttactcgcgaaccccatttaacttgattcatagtttaagctggggcataatttaaactttccttacttttttttgtctagagtttgtttttttatcacaatttaaatttttggatcgttggttttttggaggccaaaaaataaaaactttctttacttttatagttaaccttt

SEQ ID NO: 12203 - DNA, 266 bp, Zea mays
  Clone ID: LIB3150-081-P2-N2-H6
ggtaccgaatcgcaattcccggcgcggtcgccctttttttttttttttttttttttttttgaattggggccaaaacttgggaggtcacaaaatttcagaaaggggatgtcaattatacatgaacaatttcagcgcaccccaattgaaaataaatcgtgagatcaaatttgaggcaactctacgtttgagaaaagtttaacatgccaacattccgtattttacctcacaattcaatatcattgaaccattggtttttatcagaccca

SEQ ID NO: 12204 - DNA, 207 bp, Zea mays
  Clone ID: LIB3150-082-P1-N1-A1
tcggtccccccgcgccgtctgcgaggcagccggccgtcacagaagcccgatccggacgccgcgagaaatccttgttatacctgatggctatgattgatgagcctctttatccaattgctgtactgattgacgagctcaagaatgaagacatccagttgcgtctaaactccattagaagactttcaacaattgcacgggctcttggag

SEQ ID NO: 12205 - DNA, 275 bp, Zea mays
  Clone ID: LIB3150-082-P1-N1-A10
gcgaaggcgaccctccctccttcggtcggtccgcgccgcctcccgggcggggccgccatggtgaagtactcgcaggagccgggcaaccctaccaagtcggctaaggccatgggcagggatctgagggtccacttcaagaacacaagggagacagcctttgcgcttcgcaagttgtctttgaccaaggctaagcgataccttgaggatgttattgctcacaagcaggcaattcccttccggagatactgtggggagtgtggtcttaccgcgcaagc

SEQ ID NO: 12206 - DNA, 382 bp, Zea mays
  Clone ID: LIB3150-082-P1-N1-A11
gagcagcaaagcaagcgagcgtcagtggcagactggctgaatcgagaggtggaggcagcaaccaacaaggtagcactatgaaggtcaagattcttcagtggcatgcagtggcttcttggacgtgggatgcacaggatgagacatgtggcatatgcaggatggcttttgatggctgctgtcctgactgtaagttccctggtgatgattgcccactcatttggggtgtctgcaaccatgcttatcatcttcactgcatactgaagtgggtcaattctcaaacatccacacccctttgccccatgtgccgtagagagtggcagtttaagggctaaggtactatggacatctagaactgcaccaagcgactctcagttctcagaga

SEQ ID NO: 12207 - DNA, 334 bp, Zea mays
  Clone ID: LIB3150-082-P1-N1-A2
tcgctcccaacaccacctcgcctgcgatctccgtagcctccgtcgcgtcgagcatcgatcatgtcggcctactgcggaaagtacaaggatgagctcatcaagaatgctgcctacattggcacccctggcaagggtatccttgctgctgatgagtccactggcaccattggcaagcgcctttccagcatcaatgtcgagaacgttgaggagaaccgccgtgccctccgtgagctcctattctgcttgcctggtgctctccagtacatcagcggtgtgatcctcttcgaggagaccctgtaccagaagaccaaggatggcaagccttttggtgatg

SEQ ID NO: 12208 - DNA, 231 bp, Zea mays
  Clone ID: LIB3150-082-P1-N1-A3
gccgccgccatgtcgaagcgaggcaggggaggttcggcggggaacaagtggcgcatgtcgctgggtctgccggttgccgcgacggttaacttcacggacaacactgtctccaagaacctctacatcatctgcgtcaagggcattaagggccgccttaaccgccttccgttcggctgcgttggcgacattgtcatggccaccgtcaagaaagggaagcccgacctcaagaat

SEQ ID NO: 12209 - DNA, 375 bp, Zea mays
  Clone ID: LIB3150-082-P1-N1-A4
gtgaagggaagcagaagcgagacaaatccccacccggctccaaaccctagccacctcccccgtcccccccttttcgtcccctagatctcgctggcgtctgctccgcctcgcttcgatgtgaccccaccctagggtttgagacggtgttgcggtgtgtgcgtgtgtcgcggcgattcgcgacgcgagtaggattcgaggtgtcggcggcggtgcgagcgcaaatgaaggacccggcacaccgcacgaaggtggtgctccggcggctaccgccggcgatcgcgcagcaggacgtcgtggaccaggtcgatgcgcgcttcgctgggcggtacgactgggcctgctttcgtcccggcaatgccagccaaaagaatcata

SEQ ID NO: 12210 - DNA, 134 bp, Zea mays
  Clone ID: LIB3150-082-P1-N1-A5
ttcttttgctcttcaccaggaaccccaacaccggagagaataagctgtataaagaattcctggtgaacgctcatggtgaggatgtggttctcttaatacaatccccataagaccttgactccattataacctta

SEQ ID NO: 12211 - DNA, 123 bp, Zea mays
  Clone ID: LIB3150-082-P1-N1-A6
tttccgctgcacgcacgcgccgcgaggaggtctggagcgtctagctcgtatgaagctaagtcagccaatctcccggaccgtcccttctcagttctcatggccgtccgccgcatgcccgcggct

SEQ ID NO: 12212 - DNA, 275 bp, Zea mays
  unsure at all n locations
  Clone ID: LIB3150-082-P1-N1-B1
aaagcatgcaaagagtgatgaaagcatgcaaagagagttgtgtttcttccccggaagtgcttccgagaataaatttttcttatctgattgtctaaaacctataacgggtgtatcgtagtggttgttatcgttaaacttttaacggtcattctatttcaaaagttttgcattttgcaaaaaaaaaaaaaaataaatataatataaaaataaatataantaaaaataaaaaatacttttattatttttttcttctttttttttttttggcggccccc

SEQ ID NO: 12213 - DNA, 355 bp, Zea mays
  Clone ID: LIB3150-082-P1-N1-B3
tcgagtggaaggaacgagtttgccttcccaaccgctcccaaaaaataatatacgatacaataaaaatatttttctttccctacatctctattgaataatacatcatcatgataagttgtcatttgatctatgacttgtgaaactgcaatccctcagcaatctcttgtgcattttgccttttagattcatacaattcctgacccaagtcaggtgcgtgttcttataatgtttctcgcttctttttaatagttcttagccccctgttgctcagacagagcagttcggaaccttggacatctgatcaggaattaagaggaaaacaaaaacaaacagtttgttcattactactcaaaaa

SEQ ID NO: 12214 - DNA, 282 bp, Zea mays
  Clone ID: LIB3150-082-P1-N1-B5
cacaccttgacgccagcataagcacaaacgagcactctcatacgcaggccgcacaacccatggaagcgtcccttgccgccgccaccgtcggcttgttccctccgccgcgaatccgtattcgaatcaccaaatcgagtccactcccacgccctctgcgcctccaatccgtaccctccaagatctgaacctccggctcgcgggcatgcctggtcgcggtctacgagttcacaccgccggcgccaggaggcggcctctacttggctggaacgtacgagctgtccc

SEQ ID NO: 12215 - DNA, 299 bp, Zea mays
  unsure at all n locations
  Clone ID: LIB3150-082-P1-N1-B8
ccccaagaacgaagaaacatttcaaaacgaaagaacgcccccaaagccctcnccnncgnagcagctatgnnagccacaggccctcatgctgatggatactgtgataattacctccaaagcctgataagtgactgcaaaacatacgtgatgttcccagctaatccaaatgtccctccttccgatgcttgcttcggtgtcataaaaaagcaaactgttcttgcttgtgctccattgtcacctaaaaaacttataaagttgttgtcattgtaaatagttcctaatttactttatcctattat

SEQ ID NO: 12216 - DNA, 333 bp, Zea mays
  Clone ID: LIB3150-082-P1-N1-C2
cctcaggggcgactcggtcatcatcgtgctgaggaaccccaagtgaccgcccaaccggaagccaggtctctgttgaaaactgtagcttatgatgtatgttggggatgattaaggccttgttcgtttacgtcggattgcaaccggaatcattccagctaatcaaagtttatataaattagagaagtaatccggctaggaatcgttccaacccaccaatccgatagaaacgaacaaggcctaactggttatcttgaactgacgttcatgtggcatcgcaatggcacatgaacatacggcgttccatgagtttgtttaccggaatatgaacctacc

SEQ ID NO: 12217 - DNA, 199 bp, Zea mays
  Clone ID: LIB3150-082-P1-N1-C3
tcgcagcaccggccgcctcagcttctggggcttccccagcagcgcatcgaggacagcccccagtcggcggcgattcggggcggtgacggtgagggcgttcgcggagacgatggcgacggagaagctgggtatcaaggtggaacgcatcccgccagagtcccgcctcttcgagctcggcgtccgtcagtgggccacgtgg

SEQ ID NO: 12218 - DNA, 366 bp, Zea mays
  Clone ID: LIB3150-082-P1-N1-C4
ctctctttggatcgattggtttcgtaactggtgagggactgagggtctgggagtggattgatttgggattctgttcgaagatttgcggaggggggcaatggcgaccgcggggaaggtgatcaagtgcaaagctgcggtggcatgggaggccggcaagccactgtcgatcgaggaggtggtggttgcgcctccgttggccatggagggtctcgtaagatcctctttacctttctctgactaaccgtcttctacttttgtgtatccaaggtgcttacttcctttttccctagtttctttggtctcaaagttgtgagttttctttagagtgtttcatgatttttttattatacttaattttttttttct

SEQ ID NO: 12219 - DNA, 325 bp, Zea mays
  Clone ID: LIB3150-082-P1-N1-C6
tctgtttatatctcttcttcacctcactaacagcagctagcaactctgggatgcggcgaataatggccgctcgctcctcctcctcccagccgcagctggtcgcggcggcggcggtcctggcagcggcgctgctgctgctggcggcgggggccgggacggcgtctgcggcggtgagctgcggcgaggtgacgtcatcggtggcgccgtgcctcgggtacgcgatgggcagcgcggcgtctccctccgctgcgtgctgcatcggtgtgcgctcgctcaacagccgctcgtcgtctgctgctgaccggcatgccaccttcaactgcct

SEQ ID NO: 12220 - DNA, 312 bp, Zea mays
  Clone ID: LIB3150-082-P1-N1-D1
gtttatcttctcccctcctctgcccccatctcgcttctcgcacacggcagccggattccgaagcgcgccccctcggccccagccaaaagcatcgcagtttctaatcgtttggagagcacacaagaatgtcgttcgtgcagctctctggtgctggagtcgctgcagtggccttcacgaacaagagcctagtctctcggcacgcaacgctacgggtctgctcgtcgaggcgctcgatccgtagcctggtcgttaaggctgcaactgtcgtcaccccaaagtacacttcactgaagcctctgggagatagggtgc

SEQ ID NO: 12221 - DNA, 379 bp, Zea mays
  unsure at all n locations
  Clone ID: LIB3150-082-P1-N1-D2
tctagaacggtcaaaaggaagccgtggctcttattaggcaacaaactcatccgaggcaaatccgctgcagtctttttcataaccatacttgcgtttgctgtactcgccttcgcttatgggacacaattcaacaatatggatctggaataggcaaatagctaagtgttgtcatggttcacttcatatatatatatatatatatatatatgcatgnagcccgacagctatatattccagaatgtgaatgagcccaagattaagaaaatgttgtacactatagatcagttctatgtgtaacccggttgggatttttccattcccgatcatgtatacactacaatagtgaatagtctagtacaggtggtttttggattggcta

SEQ ID NO: 12222 - DNA, 395 bp, Zea mays
  Clone ID: LIB3150-082-P1-N1-D3
attaacacccctacgtacgcctttcctgtggaaacccttctctcgcctgcctctcccccgccgcgccgccacttcccctctcccgtcaactccggcttccgcgcgaggtcgagctagcgtttggagttctcgagacctgctgtgatggcgacagagcaagcggcggagaactacacggtggaggacctcgtggccctgaacccctacaaccccgacatcctcaacgacctcgagaagttcgtcaatgagcaggtctcatctcagacatataacttggatgcaaatctcagccttcttcgcttgtaccagtttgagccagaaaggatgagcatacagattggggcccacatactgattaaagctctcatggcaatgccagcccctgacttcaagtt

SEQ ID NO: 12223 - DNA, 261 bp, Zea mays
  Clone ID: LIB3150-082-P1-N1-D4
tcgaggaaatcaagttccttattggtgacatcgaagccagccagggtgccttccagtactttggcctgaaagaggaccagacaccccttatcctcatccaggatggtgactccaagaagttcttgaaggttcacgttgaggctgaccagatcgtctcttggttgaaggagtactttgacggcaaattgactccgttcaggaagtctgagcctattcctgaggtcaacaatgagcctgttaaggtggttgttgctggcttca

SEQ ID NO: 12224 - DNA, 199 bp, Zea mays
  unsure at all n locations
  Clone ID: LIB3150-082-P1-N1-D6
cctgagcgaaagaccttttgtacatatgtgaggggcccaaatcctcnntttctctgttagaagcccatactaatgctagtctagatcttggattgcttcttgcacagttcaaattcatcatattgcacagttcctctcagttatatattaggcattacataatattttcatcaaatgctacttgctaaccgtattcctt

SEQ ID NO: 12225 - DNA, 411 bp, Zea mays
  unsure at all n locations
  Clone ID: LIB3150-082-P1-N1-E1
tgantcgttccaatctcctgagcanctttctggctcgtcccagacaagnccaatcgaagcccgagatacgatccatggactccatccggcatccggagcaggngggtaaaggggaagaagaggaagcggccgggcgcaaggtcggcgggccaaggaagaagtcggtgtcgaggtccgtgaaggccggtctccagttccccgtcggccgcatcgggcgctacttgaagaagggccgctacgcgcagcgtgtcggcaccggcgcccccgtctacctcgccgctgtcctcgaatacctcgccgctgaggttctggagctcgccggtaatgctgccagggacaacaagaagactcgcattattccgcgccacgtgcttctggcgatccggaacgacgaggagcttgggaagctgt

SEQ ID NO: 12226 - DNA, 309 bp, Zea mays
  Clone ID: LIB3150-082-P1-N1-E2
tgttcaaggcaagaggctattgcaaaaaaggctgcagaagatacatctaataccgaaaatatcaatgcctcaagctcaaacagcgattctgttatggctgaagcagaacttgcctcaaatgctgctgctggtgacaagcaagaacagccaaaggatgatgacgatctactacagcaggcacttgcaatgtcaatggagggtggcgcttcaggatctgcagctgtgactgactccggtatggcagaagctggtgcagttgaccctgacttaagcgtggctcttcaaatgtctggccaggatgcaaacatg

SEQ ID NO: 12227 - DNA, 241 bp, Zea mays
  Clone ID: LIB3150-082-P1-N1-E7
aaaaagaaaaaaaaaaaggaaacaagagaaaaaaaaaaaaaaaaaaaagaaaaaaaaaaaaaagaaaaaaaaaaaaaaaaaaaaaaaaaaaaaaaaaaaaaaaaaaaaaaaaaaaaaaaaaataaaaaaaaaaagaaaaaaaaaaaaaaaaaaaaaaaacaaaagaaaaaaaaaaaaaaaaaaaaaaaaaaaaagagaaaagaaaagcaaaaaaaaaaaaaaaaaaaaaaaagaaaaaaaa

SEQ ID NO: 12228 - DNA, 371 bp, Zea mays
  Clone ID: LIB3150-082-P1-N1-F1
gcggcagtgcgtagagaggatcgtcgaacagaacagcatgaagatggtcatcgttctcgtcgtgtgcctggctctgtcagctgccagcgcctctgcaatgcagatgccctgcccctgcgcggggctgcagggcttgtacggcgctggcgccggcctgacgacgatgatgggcgccggcgggctgtacccctacgcggagtacctgaggcagccgcagtgcagcccgctggcggcggcgccctactacgccgggtgtgggcagacgagcgccatgtaccagccgctccggcaacagtgctgccagcagcagatgaggatgatggacgtgcagtccgtcgcgcaacagctgcagatgatgatgcagcttgagc

SEQ ID NO: 12229 - DNA, 348 bp, Zea mays
  Clone ID: LIB3150-082-P1-N1-F2
gcgccgccttttcgtccccgcgtccgcgtcgcggctccactgggcgtgcgcgtcaccggcgggaggcgagggcaggcggtggtcgcgatggcgtccgccgacgctcgcttggcggtgattgcctcctccatccgcgtcatccccgactttcccaagccagggatcatgttccaggacatcacgacactgctgctcgaccccaaggcgttccgtgacaccatcgacctcttcggtgagcggtacaaggaccaagggatcaccgtagttgctggtgtggaagctagagggttcattttttggcctcctatcgctctaaccatcggtgctaaatttgtacctttgaggaag

SEQ ID NO: 12230 - DNA, 181 bp, Zea mays
  Clone ID: LIB3150-082-P1-N1-F3
tgttctcacttgccactccgattttcctcggtgagactcctatgccggaccgtgtctccaattctctggtgcgagtgacatctaggtttccagacgccttcggtgagtacagggaaggaagtcgtcatggctgacgactaacaggctgagatacaatgtggaggcttctaatcgtgtttct

SEQ ID NO: 12231 - DNA, 354 bp, Zea mays
  Clone ID: LIB3150-082-P1-N1-F4
tttttcttgagacaaccagccgctccccccggctggcccgtgccctagacaaagaggaaaggtacgcctccggttccagagcggagaggattgcgccgcctgattggcgattgctgatagtctgccgccagtgccctcgcccgatttgctccgccgagaacaacatggggagaagctataatcacagtccatcgccaccaagaggctacaggagaagaactcgcagcccaagtcctcgtggtcggtatggaggccgtgatactgatagggacctcccaactagtcttttggtgaggaatcttcgtcgggattgtatgccttgtgaccttcgtagaccatttggaaaatttggcc

SEQ ID NO: 12232 - DNA, 393 bp, Zea mays
  Clone ID: LIB3150-082-P1-N1-G1
ttctctcttccaccttccaccacaagcgccggcgcagccggtgcctgctccttcccgatccccgaggcaaagctgcgactccgcaaccgccgccatggcgttcgagaagatcaaggtctccaacccaatcgtcgagatggacggtgatgagatgaccagggtattctggcagtctatcaaggacaagcttatcctcccatttctggacctggacatcaagtactatgatttggggatactgcaccgtgaagcaactgatgacaaggtcacagtggaggctgcagaggctactctcaagtacaacgtggctattaagtgtgcgaccattactccagatgaaactcgggttaaggagttcaatctgaaacacatgtggaagagcccaaatggcac

SEQ ID NO: 12233 - DNA, 243 bp, Zea mays
  Clone ID: LIB3150-082-P1-N1-G12
aagttgctgccaactagatggggtggctagcttattagaacttgaacatgtttctagcttgcttttttgttgatggatggttcaagcactagggaagccatattttcctagtccctcttgttgtaatgatcttttagtaaccacttgtaatttgattttcaagtgtctgttacctatattgctcttttagttcttaaatgttaaagaggtatatgagtcatttaatttggctcagaaattttg

SEQ ID NO: 12234 - DNA, 89 bp, Zea mays
  unsure at all n locations
  Clone ID: LIB3150-082-P1-N1-G2
tctgtgttttatnacgaggatcaacggcaagccgcgggcgagattaggttacctatttcagggggggatcgggctacatagctgaagac

SEQ ID NO: 12235 - DNA, 350 bp, Zea mays
  Clone ID: LIB3150-082-P1-N1-G3
tcgagatcagcaagtgccagttctacctagacatgctgaacgagtgccgccgtggtggtgtgtctgtctaagctgcctctgggattattcatggattttctttccggatgggggtatctcattaataaggcaccgtgaaacttcgaccatcttcacagcttgaaaccaaacttcctgggattaatttattttgttatcctatggtgttggaacagactttttgtctcttgatcataaatttttaaacgaacctgttatgtttggtgttatttataaattttttattatttacttcttttaattatttttttttaatttttttattttttgatctgtttttattcgttttt

SEQ ID NO: 12236 - DNA, 390 bp, Zea mays
  Clone ID: LIB3150-082-P1-N1-H1
tcggacgcgtgggcggacgcgtgggcggacgcgtgggcggacgcgtgggcggacgcgtgggcaacactggacctgcaattgagtgtaagttgctccaggttttcgttggtctaactgactcttcgacatctgtacaaaatatagttgatgctatcaaaagttcaggtgctattgtcagtttaattcagtttgttgaagcacctcaaagggaagtacgcatgaattccatcaagctcttgaataacatatcaccttatatgggtcaagaacttgctgatgcttttcgtggaaacttcagtcaactaagcagcttggtcaaggtaattgtcgataacaatggtatttctgaagagcaagcagctgctgctggccttgtagctgatctttcca

SEQ ID NO: 12237 - DNA, 269 bp, Zea mays
  Clone ID: LIB3150-082-P1-N1-H10
ttcttcttcttaagtggaatcctactagactgggttgcgtgcttattagaacatgaacatgttgcaagctgggatgattgttgaaggatgggacaaggccgaggaaggccaaaccttctcagaccctctccgtggaactatctagaagcaaccatcttgcaatcgggggcccaggttgcagttacctatatacccttcttgagcaccattgggccgtgcgtgtgagtctagaagaggcacgagaaatttgtggtgaaagtagttgccct

SEQ ID NO: 12238 - DNA, 52 bp, Zea mays
  Clone ID: LIB3150-082-P1-N1-H11
tcttcacttcttcttctgctatggacaaattcggcgtcgcgtcatgcatcga

SEQ ID NO: 12239 - DNA, 259 bp, Zea mays
  Clone ID: LIB3150-082-P1-N1-H2
ttctttgctcggcgatctatcatggagggtgagggggagatggcggtgaatccgcagctgtttgggaacgggatgccggtgccgttctacggcgagatgttcgtcctcgtccgcgacggctgttagttccacgtcgacaagatcccgtcagctcctggaggtcatgtgaaaacaaaaggcacaatttacctgggcaatataaggatggtgtttgttgccaacaagcctgtttgcatcttctttgcttttgatatgccac

SEQ ID NO: 12240 - DNA, 346 bp, Zea mays
  Clone ID: LIB3150-082-P1-N1-H4
ctaccgttaaagttgcagccaacttgattaggttgctagcttatcagaacaagaacatgttgcaagctggcatgattgttggaggatgggacaagtacgagggaggccaaattttctcagtccctctcggtggaacgatcttgaagcaaccatttgcaattggaggttcaggttccagttacctatatgctcttcttgatcatgaatggaaagagggaatgagtcaggaagaggcagagaaatttgtggtgaaggtagtttcccttgctatggcccgtgatggtgctagtggaggggtttgccgtacagttacaatttatgcggttggcgtgaaaaggaactttta

SEQ ID NO: 12241 - DNA, 300 bp, Zea mays
  Clone ID: LIB3150-082-P1-N1-H5
caccacctcgcctgcgatctccgtagcctccgtcgcgtcgagcatcgatcatgtcggcctactgcggaaagtacaaggatgagctcatcaagaatgctgcctacattggcacccctggcaagggtatccttgctgctgatgagtccactggcaccattggcaagcgcctttccagcatcaatgtcgagaacgttgaggagaaccgccgtgccctccgtgagctcctattctgctgccctggtgctctccagtacatcagcggtgtgatcctcttcgaggagacccttgtccaaaagacca

SEQ ID NO: 12242 - DNA, 273 bp, Zea mays
  Clone ID: LIB3150-082-P1-N1-H6
tcatttctggtactgttatggacaaattgcacaatgacaaatagttctcgcctggacatcattattccaaggccagccatgagtctcataatccagtggaagaacatcaaccacatggatcagatgataattccaatgaaacaagagatggtgttggtggcaatgaagctcctgttgtgtcaacatccagaatggatgcgatgaataaaattgacaaggataaggtaaaagcagctttggagaagcgaaggaaattcgaaggtggttttgcca

SEQ ID NO: 12243 - DNA, 140 bp, Zea mays
  unsure at all n locations
  Clone ID: LIB3150-082-P2-N2-A5
gggaaagcgggaacgccggcaggaaccggaccggaaaacccggggcggacgcagccgcaggagaaaacaaaagacaacacaaccggcanaaggacgccggcgggacaaaaaagaaaagaccaaaacaggacgacagacag

SEQ ID NO: 12244 - DNA, 255 bp, Zea mays
  unsure at all n locations
  Clone ID: LIB3150-082-P2-N2-C6
cggaccggaaaacccggggcggccgcccaannaaaaaaaaaaaaaaaaaaaaaaaaacaaaggggaggacaaaaaaagaggaaaaaaaagaaaaaaaaaaaaggaaaaaaaaaaaaaaagaaaaaagaaaaaaaaggaagaaaaaaaaaaaaaaaaaaaaaaaaaaaaaagagaagagaaaaagaaaaaaagaacagcaaaaaaaaaaaaaacaaaaaaaaaaagagaaaaaaaaaaaaaaaacaagaggggggg

SEQ ID NO: 12245 - DNA, 85 bp, Zea mays
  Clone ID: LIB3150-082-P2-N2-H5
aaacgccacacctaccggaccttaattcccggtacacccaccctattttatttttttttataacaactaaaatttaacaatacca

SEQ ID NO: 12246 - DNA, 304 bp, Zea mays
  unsure at all n locations
  Clone ID: LIB3150-082-P2-N2-H6
cggcccccctttcctttttttttttttttaataaaaaaaaaaaggggggggatnnnngtaaaaagattatataatttaaataaaaaatatttatattttattttattttaattaaaatatttatttataattttataataatataattatttaataataaattaatatgttaaaaaataatattttttttaaaccaaaatatttaaaaaaatattgtttattctttttatcccaatatggtcataaaacaatggtccctttttataaatgtataacccctttcattaaaatatattttaaagtt

SEQ ID NO: 12247 - DNA, 354 bp, Zea mays
  Clone ID: LIB3150-083-P1-N1-A1
tctttatgatgaaaaatattaaaaatatgtgtgctagatgcctaatttttcctgtgtgaggtaaaacaaagcaccctggcactgctcttaaaggaactgccattttttcttcttttcgcagctggttgaccagtagtactattatttagtggctcaatctagcaaaataagagaatttcacctcacatttaacatattgcttgtgagcttgtctactagaagagccaacactttatcaagatcttgaagcaagtattcaaacattttctcacattcagaccctgcatacaacacctaccttgtctagaaagattccagaacatttttcaggagggactttttacagttttgttt

SEQ ID NO: 12248 - DNA, 196 bp, Zea mays
  unsure at all n locations
  Clone ID: LIB3150-083-P1-N1-A11
agagctangacggcgcacgcacgcatacttaaactctcatcctttaaaccacacccactttctatttaacacacacataatactcttcgagccattccattccatcttaagggataaaataattatccgttcattcaccaaccttttatacgatcccctcccactaattttttacaccgggacgcaaagcgagcca

SEQ ID NO: 12249 - DNA, 173 bp, Zea mays
  unsure at all n locations
  Clone ID: LIB3150-083-P1-N1-A12
agggaagccgccggtcacttcggactccatcgtcaacctcgatcatggcganccgactatgtacgaggaggttctggcgcggcacaggagatagcgcctccatcttcatccctggttggcaaacaatgagctacttctccgacctcggcggcatctgttggttcctggagcct

SEQ ID NO: 12250 - DNA, 360 bp, Zea mays
  Clone ID: LIB3150-083-P1-N1-A3
cggcatctaacaagattgcagcggcacatgtcgtcttcgtcctcgccttgctccttgtggcctatcgtgcggaggcaactgtctgcatgaggcataacaatttctatcacggtccatgcatgagcaacaaggactgtgccaactcgtgcgttcaacataacctcggtgtcggcgggtattgcaggggcaagatcccatttaacaaagaatgcatgtgtacatttgaatgcccatgagtcaaaagccactatatctgacgggcgcaacttgttatatatctagggatgggatgtcgtttggcatgtactccaatttgaaagtgtccaagtgaggctttatacatatattcaggtgagagat

SEQ ID NO: 12251 - DNA, 376 bp, Zea mays
  Clone ID: LIB3150-083-P1-N1-A4
tacttctgcgccgccacccactacaggtaaggaagaggaggagggcaggatgtcgcaccgtaagttcgagcacccgaggcacggctccctcggcttccttcccaggaagcgctcctcccgccaccgcggcaaggtgaagtcatttcccagggatgaccccaagaagccttgccatctcactgccttccttggctacaaggctggcatgactcacattgtccgtgaggttgagaagccaggatccaaactccataagaaggaaacttgtgaggctgttaccatcattgaaacccctcctcttgtcattgttgggctcgtggcatatgtgaagactcctcgtggcctccgcacactcaactctgtttgggcccaacat

SEQ ID NO: 12252 - DNA, 377 bp, Zea mays
  Clone ID: LIB3150-083-P1-N1-A5
ctctagccaacacacacataatactctccattccattccattccatctcaaaggatagaataatgggcggtctctccaccaagcttttcgtggtcctcctcctgctcgtttgttacaccgggacgcaaggcgggccggtgactatggtgtcggcgaggaagtgcgagtcgcagagcttccgcttcaagggaccttgctcgagggacgccaactgcgcaaacgtctgcctgaccgaaggtttcaccggcggcgtgtgcaagggcctacgccaccgctgcttctgcaccagggactgctagtactgcctcgcctcgtgtcctgcgtgtgcatatatagccgcagcggatcagtaaaacatgcatgcctgcgttaccaaa

SEQ ID NO: 12253 - DNA, 226 bp, Zea mays
  Clone ID: LIB3150-083-P1-N1-A6
tctgtattccattccagaaccatacttcgggggcccccgccgacgagctggggcggccatatacggcgaaagccctattccagcccttgggcggggatagataggttagttactatcaccaaaacccaaggcgggccagtgactatgctgtggtcatggaaatacgtgttgcaaattttttgctttaagggacctcaattgagggacgcctacatttcaaactttt

SEQ ID NO: 12254 - DNA, 178 bp, Zea mays
  Clone ID: LIB3150-083-P1-N1-A7
gtcgtttcgccgcctccgccgacaccgactgcctccctcagctgtggtcgccatgggcagaaggcctgctagatgctatcgccagatcaagaacaagccgtaccctaagtccaggtactgccgtggtgtccctgaccccaagatcaggatctacgatgtcgggatgaagaggaagggt

SEQ ID NO: 12255 - DNA, 190 bp, Zea mays
  Clone ID: LIB3150-083-P1-N1-B1
ttaaacatacatgcaggtctccacatacgtgggttagccatacaacagaggacattccacccactatcatctggcacacactgatgtcactttccagcttaacaactaaaccatacatcacatgtcgtcgccttttccagtcatagatagactaacctacactaatctcaacaggattttgtaccaggtg

SEQ ID NO: 12256 - DNA, 83 bp, Zea mays
  Clone ID: LIB3150-083-P1-N1-B2
ttatctcatatatgcaggtgtacatatccgggggtgtgccatacaacagtgggctttccacccacttttttcttgtgcacact

SEQ ID NO: 12257 - DNA, 215 bp, Zea mays
  Clone ID: LIB3150-083-P1-N1-B3
tttatacatccatccaggactccacatccgggggtgagccatacaacagaggaccgtccacccactattttctggcgcacacttatttcgctgtcctgcttgactattaaaccatccataacatccgttctcgttttccagacattgagcgcccaacctacaccaacctctacaggcttttgttccattttatctcatccctgactgtttttctt

SEQ ID NO: 12258 - DNA, 202 bp, Zea mays
  Clone ID: LIB3150-083-P1-N1-B5
tttttatataaaaccacgtgtacacatccgggggggggtcatacaacagagggctggccacccactatcttctggcacacactgatgttcctctcctgctctacaattaggccatacatcacatgtgtcgactttctcttgtcatatatagacctacttacaccaacctcaacaagcttttgtaccatgtgatcttatacct

SEQ ID NO: 12259 - DNA, 240 bp, Zea mays
  unsure at all n locations
  Clone ID: LIB3150-083-P1-N1-B7
ttacacatctacgcaggtgtctgggggtggggcatattatagagggggtcaaactagtaataatcatgttccaatnannttttttttttttttacattaaatattttttttttattttatttttattatacatattattaatttaataatttcatatttctttttttattttaaatttattaaatgttttttttttataaattttaattttttattatttttttagttttataatttttt

SEQ ID NO: 12260 - DNA, 127 bp, Zea mays
  Clone ID: LIB3150-083-P1-N1-B9
tctttacacataaatccaggtgtacgggggagcgttttcgtcatacgggagagtactttccatccaatattttatgacacacactgatttctcttgccttctctactattatgtctgaaaataacat

SEQ ID NO: 12261 - DNA, 263 bp, Zea mays
  Clone ID: LIB3150-083-P1-N1-C1
gtaaacataaatgcaggtgtcggcatacgtgggtgggccatacaacagaggactgtccacccactatcttctggcactcactgatgtcgctgtcctgcttaacaattaaaccatacatcacatgtgtcggctgtctctagacatagatagactaacctacactaacctcaataggattttgtaccaggtgatctcatacctaactgatttcatgaggatctattggcctcattaacatacatgtgaactaaaaccagaccaac

SEQ ID NO: 12262 - DNA, 215 bp, Zea mays
  unsure at all n locations
  Clone ID: LIB3150-083-P1-N1-C3
tttatttttcaatccaggtgtacacatccgtgggttagccatacaacagaggactttccacccactatcanctttcacacactgattttgttgtcctgctttacaatttaaccttccatcacatgcgcctcctttccctagtcatattgctcctaacctacaccaacctcaacaagcttttgtatccatgtcatctcatttcttaactgttttcc

SEQ ID NO: 12263 - DNA, 298 bp, Zea mays
  unsure at all n locations
  Clone ID: LIB3150-083-P1-N1-C4
ttacctatccatccaggtgtacacatccgggggttagccatacaacagaggactttccacccactattttctggcgctcactgattttgctgtcctgctctacaattaggccttctattacatgtgtcttcttttcttatacatttttcaccctacctacattaangttttcaggcttttttcccatttcatcttattccttacttgcttcttttgtttttatttttcctcttatctttttttttgattttattttagattttctttttattttttggtttttttttctttttttttt

SEQ ID NO: 12264 - DNA, 238 bp, Zea mays
  unsure at all n locations
  Clone ID: LIB3150-083-P1-N1-C5
tcgtgtattattatctatccacgggttcacatacgggggctactcatacaacagaggtccgtccacccactatcttctctnnttcacttattttcctttcccgctctactattaaaccatatttctacatgcgtctcctatcccctttcatttttagctcttccttcaccaaccttaataagcttttgtcccattttatctttttccttaactttttttcttttgctattaatttccc

SEQ ID NO: 12265 - DNA, 145 bp, Zea mays
  Clone ID: LIB3150-083-P1-N1-C8
tctgtatacataaatccaggtgaacgggggcgtgtattagccataagagagaggtctttccaaccaatattttttggaacacactgatgtcgatgtcctgctctacaattatgccatccataacatgtgttgtctttttctattc

SEQ ID NO: 12266 - DNA, 79 bp, Zea mays
  Clone ID: LIB3150-083-P1-N1-C9
ttagacgtcaatgcaggggttggggggcggggatgagtcataagggagaggactttccaatcactatgtctggcgcaca

SEQ ID NO: 12267 - DNA, 204 bp, Zea mays
  Clone ID: LIB3150-083-P1-N1-D1
ttaaacttaaatgcaggtgtaggcatacgtgggtggggcgtacaacagaggacaggccacccaatatcatctggcacgcactgatgtcgctttcaagcttgacaattagaccatacatcacatgcgtcggctgtctccagtcattgatagactaacctatactaatctcaacaggattttgatccaggtgatgatatacctaac

SEQ ID NO: 12268 - DNA, 52 bp, Zea mays
  Clone ID: LIB3150-083-P1-N1-D11
tctcctaatgctaccagccaagccctaattagtgcaagttctaacgaccatg

SEQ ID NO: 12269 - DNA, 111 bp, Zea mays
  Clone ID: LIB3150-083-P1-N1-D2
ttatttttaaatgcagctgttggtattcgtgtgttggtagtaacacagaggtccgtccaaccaaaattatcaggcacacacttatttcgatttcctgctcaacttataaac

SEQ ID NO: 12270 - DNA, 318 bp, Zea mays
  Clone ID: LIB3150-083-P1-N1-D3
caatccagctgttcttatccgggcgtgggttgtaacacagaggtcctcccactcaatatcttttggcacgcacttatttcgttttcctgctcatttattagaccatccattatatgcgttgttcttttctatgtcattttttgatttatctattctaaccctttcttgctatttgttccattttatcttttttctttcttgttttttttttttcagattattctttttattttttttatttttttctatatttatttttttttttctgtttttcttttctttttggttactctttatattaatttcttcttctttttt

SEQ ID NO: 12271 - DNA, 361 bp, Zea mays
  Clone ID: LIB3150-083-P1-N1-D4
gtaaatttcaatccagcagaacaaatccgggcgggctttataacacagagggctgtccacccactatcttctggcacacacttatttcgttttcctgcttaacaattattccacccttcacatttgttttctttttctatttatactgatcctaatttatacctatctcattatgtttttgttttaagtcattttattttatactgtaccctttatttatttttaattcatttttaaccatattcttaaattttaacttttatatataccttttttttttatttgtatattttatttataatttttatatttcttttcattttttttctttttaattattatttttaatctaaattttttt

SEQ ID NO: 12272 - DNA, 104 bp, Zea mays
  Clone ID: LIB3150-083-P1-N1-D7
tctgtacatataaaagcaggtatccgggggcgtgtacttttaaaaagggggtgtcattttcaaatatatgttactcatttaaatttttttcattctcaattatt

SEQ ID NO: 12273 - DNA, 197 bp, Zea mays
  Clone ID: LIB3150-083-P1-N1-D9
tcgttagatgttactgcacgagtcctaatgagtgtatggctcatacaagagagttctgtccatccactatcttctggaactcactcatgttgcatgtcctgctggacgattaggcacgtacatgacataggtcggcgatctcctgacattgtgtgactaaccctcaccaatctgaataggtttttgtcccaagtgat

SEQ ID NO: 12274 - DNA, 252 bp, Zea mays
  Clone ID: LIB3150-083-P1-N1-E1
gtaaatttaaatgcaggggtaggaatacgtgggtgggtcctaccacagaggactgtccacccaatatcatctggcacacactgatgttgttgtcaggcttgacaattaaactatacatcacatgcgtacgctgtctcctgtcataggtagactaacctatattaatctgaataggattttgttccatgtcatcttatacgtaactgatttcctgacggtttgattgacctactaacatttaagtgatcttaa

SEQ ID NO: 12275 - DNA, 365 bp, Zea mays
  Clone ID: LIB3150-083-P1-N1-E10
ttttctgatggttcgagccaagccctagtaaggggatgttcgacggaggaaggtgcttcccagcacgttctcaattgcatctctctcattgttcatttcaagttatgatatctatggcttgtatctatctatcattccatctttttatatattattaaattttattataatttttttttttattttttgtcttcttttttttattcatcttatttttatattttcttattttttattttttatctttacatttatttttttaattttatattttattatttattatacttgaattatttattaatttttttattttttttatttattattttatgttttatcgttgggtttttgtattatttttt

SEQ ID NO: 12276 - DNA, 282 bp, Zea mays
  Clone ID: LIB3150-083-P1-N1-E11
ttttctgatgctaccagccaagccctaataagtccatgttcgagcgaccatggtgctgcctctccagggcggaatggttctggccaaaggcgccgccaagcgtggccaccaaggttcgtaacatgacagcagtcccgggatgaccaagcctgggatgctgaggctgacgagggggggcggcgtgaagcgcatctcggggctcatctacgaggagacccgcggcgtgcttaagatctttctcgagaactttattcgtgacgccgtcacctacacgttgcacgc

SEQ ID NO: 12277 - DNA, 70 bp, Zea mays
  Clone ID: LIB3150-083-P1-N1-E2
ggatttataaatggaggggtaggaagaggggggggggaaataaaaaagagggggggccaataaaaatcac

SEQ ID NO: 12278 - DNA, 181 bp, Zea mays
  Clone ID: LIB3150-083-P1-N1-F1
ttaaaaccctaaaccctcgctacccggcgggggctacaagctctacgggggggcagcaacataaggtcaccggctagaggaggacgtggtgggaggggtggcaggttcgactgcaccggacatgggggcggtggctcgcagacgtgggtttggcagcgtgagatgccgtagaagggacagg

SEQ ID NO: 12279 - DNA, 242 bp, Zea mays
  Clone ID: LIB3150-083-P1-N1-F11
tcaaatcccaccagcaaatccccaattcctccgagttcgagcgaccatgtcggggcctggcaagggcgggaagggtctgggcaaaggcggcgccaagcgtcaccgcaaggttctccgtgacaacatccagggcatcacgaagccggcgatccggaggctggcgaggaggggcggcgtgaagcgcatcttggggctcatctacgaggagacccgcggcgtgctcaagatctttcttgttaact

SEQ ID NO: 12280 - DNA, 203 bp, Zea mays
  Clone ID: LIB3150-083-P1-N1-F2
ctttcgtccccaaaacgaccgagcgaatggacgacagcttctcaccaccggtaccttcaatggcacccaaggcggacaagaagccggcggcgaagaagcctgcagaggaggagcccgcgacagagaaggcggagaaggctccggcggggaagaagcccaaggccgagaagcgccttccggcggtcaagtccgtctgtaaggag

SEQ ID NO: 12281 - DNA, 175 bp, Zea mays
  unsure at all n locations
  Clone ID: LIB3150-083-P1-N1-F3
ttattatttctaaactggttatttcaaagtgaggggatattttaaacacgggtgtgttttattataatcatttatattattattttttcttataatatatctntttttaaattttctttttatttatattttttatttatcatattatttttttataactaatttttctttttta

SEQ ID NO: 12282 - DNA, 159 bp, Zea mays
  Clone ID: LIB3150-083-P1-N1-F4
tctttttgtaaaactagtacggaaatggcgcgcaggcgttgttcctaacgcgacggtaagatgtaagcaccaagcaatccacttttctggaggagagcaacttcctggaccatctccaggagagcgagcgacatgcgctcgtcgagctccacgacaagg

SEQ ID NO: 12283 - DNA, 214 bp, Zea mays
  Clone ID: LIB3150-083-P1-N1-F9
tcttcaaatcccaccagcaaatccccaattggggcgagttcgagcgaccatgggggggcgtggcaagggcggtaagggtctgggcaaaggcggcgccaagcgtcaccgcaaggttcttctgtgacaacatccagggcatcacgaagccggcgatccggaggctggcgaggaggggcggtgtgaatcgcattttggggctcatctacgtggagac

SEQ ID NO: 12284 - DNA, 370 bp, Zea mays
  Clone ID: LIB3150-083-P1-N1-G1
tcactctccgcttcccgctccgatcgacctgggcgctccccaccaccgagcccatggcggaccagctcaccgacgaccagatcgtctagttcaaggaggccttcattctattgcacaaggacggggatggttgcatcacgaccaaggagctgggcactgtcatgcgctcgctggggcaaaatcctacagaggctgagctccaggacatgatcaacgaggtcgatgctgatggcaacggcaccatcgatttcccagagtttctcaaccttatggctcgcaagatgaaggacaccgactctgaggaagagctcacggaggccttccgtgtgtttgacaaggaccagaacggctttatctcggtcgccgagct

SEQ ID NO: 12285 - DNA, 342 bp, Zea mays
  Clone ID: LIB3150-083-P1-N1-G10
ttcaaatcccaccagcaaatccccaattcctccgagttcgagcgaccatgtcggggcgtggcaagggcgggaagggtctgggcaaaggcggcgccaagcgtcaccgcaaggttctccgcgacaacatccagggcatcacgaagccggcgatccggaggctggcgaggaggggcggcgtgaagcgcatctcggggctcatctacgaggagacccgcggcgtgctcaagatctttctcgagaacgtcatccgcgacgccgtcacctacacggagcacgcccgtcgcaagaccgtcaccgccatggacgttgtctacgccctcaagcgccagggttgcacccttt

SEQ ID NO: 12286 - DNA, 381 bp, Zea mays
  Clone ID: LIB3150-083-P1-N1-G2
ttattattcaaagcaggacctagatgaagtaggcgatgtttacaacagaggtgaggccaattaaactcatcgggcacacgatgatcttgttcacggagtcttccatttaattttctccggcaggggttgtttagatattttcttttttatagtatccttatttagttctggtttgctttttgtcttttttatctttttttttttatttttttttttctttttttatttatttttttttttcattttaattttttttttttatttatatttttttttactttgatgtcttgttcttttttttataaattactttcttatctttatttatctttattttatttttgtttttttttcgttgttttatttttttttttcttattt

SEQ ID NO: 12287 - DNA, 232 bp, Zea mays
  Clone ID: LIB3150-083-P1-N1-G3
tttatattcaattcaccactcacctaacgggggggatcaaaacaacagaggtggggccaattaacatcatctctcactcccttatctcgaccccatgggggatctcattactatccacaacagccattccctttttcatgtcgcattctcatgcttctatctttactgctctttgctttttatccattttgactttttggtaaccctttactataccattgttttatttttt

SEQ ID NO: 12288 - DNA, 352 bp, Zea mays
  Clone ID: LIB3150-083-P1-N1-G4
gctgttattaggaggggctggtacctcacgtgaactttgcatctggacactgttgtttctgaggtgtggaactattgttagtggagatagtaccgggagtgtacagttttgggatagccgccatggaacacttctgcaagctcactcctatcataaaggcgacgtgaatgcactaacaactgtgcctggtgagaacagggtatttttcgcagggtccgatggccaggtaattttatacaaaatatcaaaagatgaatttggtgctactaaaaatgtgggcaaagagcaagttcacatatgggtctatgtgggatatgtgagagctcacactcatgatgttagggcactgacc

SEQ ID NO: 12289 - DNA, 281 bp, Zea mays
  Clone ID: LIB3150-083-P1-N1-G5
tcttttttcacaggagcagtcaccatacgtgggcggtctataaaacaacggtcgggccaaacaatatcatcaggcactcacttatctcggtaccaggtgtgaccactttactgtcctcaacattggttctctttttcttgtcctatgttattatacccaccacaagcatttttttcttatttttcattgttgacatttttgttttctttttgtctattctctcgttgtttcttttaatttttctccatatcttatttctaatatttttttatactatattt

SEQ ID NO: 12290 - DNA, 268 bp, Zea mays
  Clone ID: LIB3150-083-P1-N1-G6
acttccacacttacaaaaagggggagttctaaaaaaggagggtcgtgccaaacaacatcaacattcactaccttctcgcggcgccacaagctatcacatttctctacacctcttcttttcactttttcttgtcctctttaaattttactttttttaatcttttttattttttttacatttcttttatttattatttcttttttttttcttttttttttttttttttttttcttttattttttttttttcttttattatattttttttt

SEQ ID NO: 12291 - DNA, 119 bp, Zea mays
  Clone ID: LIB3150-083-P1-N1-G7
tttaaatttcaccagcaaatccccatgtcgggggttttctagcgatcaggggttttcccaacaagggtcttaatggtcttgccaatggcggtgccaagcgtgacctcaaggctctacat

SEQ ID NO: 12292 - DNA, 129 bp, Zea mays
  Clone ID: LIB3150-083-P1-N1-G8
ttcaaattccaccagcaaatccccaaggggggcgagttcgagcgaccaggggtgatcccagcaagggcggtaagggtctggccaaaggcggtgccaagcgtcaccgcaaggtttttcacgacatcatcc

SEQ ID NO: 12293 - DNA, 242 bp, Zea mays
  Clone ID: LIB3150-083-P1-N1-G9
ttcaaatcccaccagcaaatccccaattcgggcgagttcgagcgaccagtgggggggcgtggcaagggcggtaagggtctgggcaaaggcggcgccaagcgtcaccgcaaggttctccgcgacaacatccagggcatcacgaagccggcgatccggaggctggcgaggaggggcggtgtgtagcgcatctcggggctcatctacgaggagacccgcggtgtgctcaagatctttttcgagta

SEQ ID NO: 12294 - DNA, 234 bp, Zea mays
  Clone ID: LIB3150-083-P1-N1-H1
ttattcttcaatcatcgtcccagcagaagcaggggattcatatgacgctggtcggggcattccacctcatctccaacaacatctacttgcacacggagcgcttcttttacatgcacctcacttatgttctctacattattttccttggtaagacctctgacatgctctagttggccttcagtgccattgttgccattgagaatccccttgacattatcgtgcattctgttatgc

SEQ ID NO: 12295 - DNA, 203 bp, Zea mays
  unsure at all n locations
  Clone ID: LIB3150-083-P1-N1-H2
ttaatatttaatggacggctaggaagaagggggcgatgtctacgacggaggtgatgtcattatagatcatcgtacacactcttttcttgttcacagaggtgtacacttaactgttcaatgcaggcgttcacttgcttaagtcctaggttctggacgctaaaatgatctgggttttcttttgancaatggtagctattaggtag

SEQ ID NO: 12296 - DNA, 205 bp, Zea mays
  Clone ID: LIB3150-083-P1-N1-H3
ttaatatttaatccagcgctaggaagaagtaggcggtgtcttcgacgggggtgagggcatattagatcattttacacactaatttcttgttcacagaggtgaagacttaactgtaccatgcaggcctacacatgctcaattcctaggtaatggaggctataatgatcgcggttttcttttgagcaacggttactgttaggtagcc

SEQ ID NO: 12297 - DNA, 352 bp, Zea mays
  unsure at all n locations
  Clone ID: LIB3150-083-P1-N1-H4
tttgttttggnngnacggttnnncaaaggggggggggttttttttggggggggaggggttattaaaatttttttaatttttttttttgttacttttaatatttttattttttaattttttaatattttttttttattttttatgttaaatttttttttttttattttttttttttttatttgattttttaattttttatttagttttttatattttttgttttctttatttttttttttggttttttggatttatctatttttaaatttttattatttttttttttttttataacttttttttttctctattttttttttttatatttgtattttttttttttattcttttt

SEQ ID NO: 12298 - DNA, 55 bp, Zea mays
  Clone ID: LIB3150-083-P1-N1-H6
ttatttttcacaagaggagtcggataacgtgggaggtgtatatcacagtggttgg

SEQ ID NO: 12299 - DNA, 247 bp, Zea mays
  Clone ID: LIB3150-083-P1-N1-H8
ctgccttctgcgcctccatttcggcctctgtcccttgcaagttcaatctcacctccaaccatgggtaaagagaagtcccacatcaacattgtggttattggccatgtcgactctggcaagtcgaccaccacaggacaccttatctacaagcttggaggcattgacaagcgtgtgatctataggttcgagaaggaggctgctgtaatgaacaagcggtccttcaagtacgcgtgggtgctcgacaagc

SEQ ID NO: 12300 - DNA, 330 bp, Zea mays
  unsure at all n locations
  Clone ID: LIB3150-083-P1-N1-H9
gagtgcttagctgtgtgatctgacgcagagtcccctgtgctgactctgtgtcatggatggtccattttatcttgtggtattatcagcctttacataactgctatgtttggatnaaaaatatgaaaattttttaatttaaattttaattaaataaattataataaatgatatttttttattatttgtttagttctggtccttttcgtttatatttaaattatcgggggcaaatgcttttttctttatagttgttttttttctgtaatttagtttttttttttttgttaatttagtgtggtttctctcttttatatatcttttatttttgta

SEQ ID NO: 12301 - DNA, 328 bp, Zea mays
  unsure at all n locations
  Clone ID: LIB3150-083-P2-N2-A5
aaaggagaaggaaagaaaaatttttttatttttataaaaannnaaaatnaattaaaataaattagggtttaaaataataaaggggaatgaataaaaaaaaataatttataaaataaaaagtataaaaaaaaaaattaaaataaaaattattaaaaaaaataaataaaataaaaaaaaaaatttaataaaaaaaaaaaattaataaaaaaaaaaaaaataaaaaaaaataaaaaaaaaaaaaaataaaaaataaaaaaaaaaaaaaaaaaaaaaaaaagaaaaataaaaaaaaaaaaaaaaaaaagaaaaaaaaaaaaaaattatatat

SEQ ID NO: 12302 - DNA, 53 bp, Zea mays
  Clone ID: LIB3150-083-P2-N2-B1
gattacttaaacagatcgtggtgtaacctagagggcaccacctgattgttctt

SEQ ID NO: 12303 - DNA, 177 bp, Zea mays
  unsure at all n locations
  Clone ID: LIB3150-083-P2-N2-D1
tataaaaaaaatagnantgaaggtacagatccggaataaaggggcggacgaccttttttttttttnnaacaaaaaaaaaataataaaataagaaataaaaaaaaaaataaaatgttaataaaaaaaaaaaatgaacaaattaaaaaaagaaaatatttaaataaaaaaagatataag

SEQ ID NO: 12304 - DNA, 64 bp, Zea mays
  unsure at all n locations
  Clone ID: LIB3150-083-P2-N2-F1
ggaacgccggaaggaaccggaccggaaaaaccggggcggacgacctttttttttttttnnnnaa

SEQ ID NO: 12305 - DNA, 349 bp, Zea mays
  Clone ID: LIB3150-084-P2-N2-E2
ctcccgtgcccctcactgtttagtggcgacgactgggcgacagtcgccgccgccgcccgctaggggccgtgcccctggtctccatcttcggcgcttcgcccaccagatatgagcagctggcaattcgattttgaggccattatttgataacccgggacaagtgcactggttacctgaccattttagctttttgagatggctacacagttgccatgcttcacacagctcagtccaccgtcttgtagttggataaaagatgtcgggaactgcaaggctacgcctgatagggtagccagaagtgcccgagctttgggccactgtcacttccggtgctgtgcaggcccccgta

SEQ ID NO: 12306 - DNA, 255 bp, Zea mays
  Clone ID: LIB3150-084-P2-N2-H12
ggtatatagcagaaattttattggtgcgatttacaggttgtgctcataatttttacattattacacacggaatagtttcttttttggctcgttagtggtgcaaaaaggcacccaaaccttttggctacaaacccctttttttcttttccaatccccccccaagcggttttggggggggggagattttttttttccctccaccccttgaaagagcaaaaggggggggttaaaaaccaaatatttcccccccccggg

SEQ ID NO: 12307 - DNA, 354 bp, Zea mays
  Clone ID: LIB3150-085-P1-N1-A1
tcttttgatccatttgacatcttctcatcattttttggaccctcttttggaggaggtggtggaagcagcaggggaagaaggcaaaggaggggagaagatgtagtccacccacttaaagtttctctggaagatctttacaatggcacctcaaagaagctctctctttcgcgcaatgtcatctgctccaagtgcaagggcaagggctcgaagtctggtgcctcaatgaggtgccctggttgccagggctcaggcatgaaagtcactattcgtcagctgggcccttccatgatacagcagatgcagcagccttgcaatgagtgcaaggggactggagagagcatcaatgagaaggac

SEQ ID NO: 12308 - DNA, 421 bp, Zea mays
  unsure at all n locations
  Clone ID: LIB3150-085-P1-N1-A2
cccgaccataaaccccgcgccgcccgccagcaaccttcagtctcatttctcacgcgtagctcggacaggcagcttgaagctcgcgaaccagccatggcgaatggggacgcggccgtggaggtcggcgggaacggggagcaggaagccgcggcgcgccaggcgtcgacgttcgcggagctgggtatctgcgcggagctggtggaggcgtgcgacgccatggggtggaaggagcccaccaggatccaggccgaggccatcccccacgcgctccaagggaaggacctgatcgctctggcgcagacggngtccgggaagacgggcgcgttcgcgctgcccatcctgcaggagctgctcagcaaccgccaggctgaacagtctttcttcgcttgcgtgctctcgccaacgagagagctggcgattc

SEQ ID NO: 12309 - DNA, 268 bp, Zea mays
  Clone ID: LIB3150-085-P1-N1-A3
cgcaggccgcagcactcgagagcgcagcgcgggcggcggcgctccgcctgggactccacaccaggccgctgcgtccatggacccctccccgcagtcgacgccgcccaccggagacgacccggctgcggcggcggatcccgacctaccgaggctcacggtgacgcaggtggagcagatgaaggtggaggccagggttgccgacatttaccgctccctcttgggggccgcgcccaacacgaaatccatcatgctagagctgtcgcgtgct

SEQ ID NO: 12310 - DNA, 326 bp, Zea mays
  Clone ID: LIB3150-085-P1-N1-A4
tttttatcctagcaagagaccaaaggccggagaggtccttcagcatgcctggtgtcatcgatttacatttttttcacttcctgttcgtccaaaagttttattactttctagaacacctccatgtgttgttttcttaggcaatttattgttcagttgttttttgttgacttctatcttgaactcaatcttactttgtaattttattttttttcttccccaaattttttttgtcaattttttttcttatcattcattttttctatattttttgtttgttaagatattttttcttttctcattttttttttttcctcaatatatttttt

SEQ ID NO: 12311 - DNA, 190 bp, Zea mays
  unsure at all n locations
  Clone ID: LIB3150-085-P1-N1-A6
ttatacatttttcacactacttncttttcacaagcattttttgttatgtctttttttttctaattttttttttatctcatattttttgtttgttgttttttttctttatatttttttgtttttctatttttttttttaatatttttttttttctgttattttttttttaattatatttttctttttttat

SEQ ID NO: 12312 - DNA, 392 bp, Zea mays
  Clone ID: LIB3150-085-P1-N1-A8
tttctttcataaaccccgcgccgcccgccggggacgttcagtctcatgtgtggggcgtagctcggacaggcagcttgaagctcgcgaaccagccatggcgaatggggacgcggccgtggaggtcggcgggaacggtgagcatgaagccgcggtgcgccaggcgtcgacgttcgcggagctgggtatctgcgcggagctggtggaggcgtgcgacgccatggggtggaaggagcccaccaggatccatgccgaggtcattcctccacgcgcttcaagggaaggacctgatcgctctggcgcatactgtgtcctttaagacggtcgcgtttgtgctgcccatcctgcaggagctgctcaacaaccttcaggcttgaacaagtcttttttcgctt

SEQ ID NO: 12313 - DNA, 168 bp, Zea mays
  unsure at all n locations
  Clone ID: LIB3150-085-P1-N1-B12
tgtcttctcgaccccccattccctccctgacgatgccgacaacgcgaaggccgcggcggctcatgcgaggccgtagttgtttcatgtggttgttgtgttcttttttgtcttttttcttctcttttcttatttttttttgcttttttttttttttaaanattttttttt

SEQ ID NO: 12314 - DNA, 377 bp, Zea mays
  unsure at all n locations
  Clone ID: LIB3150-085-P1-N1-B2
ctatcaccagagatgagtttggctactgtgcgaacatatatatggaaaaagccagaagatttgattcttcattacagagtggtccaaccgagatgatcacggcttcagatcacatggttctcagcatgcctgcaccataaacggtgtggttgaagacacccttggcttagcgaggaaaccgtcagaaatattttgctcttgggctccggtagcctntctcctagaatcccgacttcgtttgcttctttgtaaagttccttcctgatcttgccctggtagtaagatgtatcatagcacaggtataaggccctctgcttgtacatgtagaagattttgggtgcttaattaaagttcaaatgggattttttttggttttt

SEQ ID NO: 12315 - DNA, 102 bp, Zea mays
  Clone ID: LIB3150-085-P1-N1-C11
tcattatcacagatcatccacagagaccatgtggcgtgtaagagacaagagagtgggagagaggggggatatatggcagacatcgcgttgctggtgacggag

SEQ ID NO: 12316 - DNA, 127 bp, Zea mays
  unsure at all n locations
  Clone ID: LIB3150-085-P1-N1-C12
gggaactggaggaactgagcggtggggtccgctgaggcctagttatcttgttcgcttctgctaccgngttcaccctagtctagagggggtttatcttcgtctgtggtcgtctcgtgtccgtatgttt

SEQ ID NO: 12317 - DNA, 225 bp, Zea mays
  Clone ID: LIB3150-085-P1-N1-C2
cattgtgttgactgcagagaagatcccgtggatatttgctactcaaaaaggaaaaaaaaaaaaaaaaaaaaaaaaaaaaaaaaaaaaaaaaaaaaaaaaaaaaaaaaaaaaaaaaaaaaaaaaaaaaaaaaaaaaaaaaaaaaaaaaaaaaaaagggggggacaaaaaaaaaaataaaaaacggaaaccttaagacaaaaaaatataacctaaaaaaaagggggg

SEQ ID NO: 12318 - DNA, 385 bp, Zea mays
  Clone ID: LIB3150-085-P1-N1-D12
taacccctgctgcaaagaaggataatgctgagggacaagaggttgaggcagcagctgaggaaacgaaaaagagcaaccatgtcacgaggaagcttgagaagcgcaaggagggacgtacccttgacccacacattgaggagcaatttggcagtggacggttgctggcatgcatttcttcccgccctggacagtgtggccgagctgatgggtacatccttgagggtaaagagcttgagttctacatgaagaagctacagaggaagaagggcttgagcgctgtatcttatagcattcttatggtttgtcttgcaccgaaatttgtgtactgttttgttttctttcttgtgtttttcgattaattttttttcatatgccttttttttat

SEQ ID NO: 12319 - DNA, 412 bp, Zea mays
  unsure at all n locations
  Clone ID: LIB3150-085-P1-N1-D2
tgctcctaccgcagctctccctcaggtttagtgttcgcaatggcggcctggaacaagcttggtggccttctaaggcacagtgctctggtgagcggtatcactggtggctcttctcctgcagtgttcaatgctgcacggctcatgtctaccaagctatttattggtggtcttgactggggtgtttatgacncgtaacttttagaagcatttatctgctttggagagcttttttaacactgtttttttttacattatgtttttctggatgaacttgttttttccttcctttttttttccatcaattatttattgtctcccgtcttttgtttttatccaactatatgattttttttctcatttttattttttttattcaaaattattttttctttctatctcctctttttttttt

SEQ ID NO: 12320 - DNA, 192 bp, Zea mays
  unsure at all n locations
  Clone ID: LIB3150-085-P1-N1-E1
ttccctcccccgcccctctcgcgcgggacctttctccctggggacacctaccctcacncattcttgtcgcaatggcgctagcctcccaaggcattaccctgcgtccctgcagcgggtccgattccacagcggaggcggcctcttactgcctcgcgcgcggtccgcgcggatgagcatccccaccgggctagc

SEQ ID NO: 12321 - DNA, 202 bp, Zea mays
  Clone ID: LIB3150-085-P1-N1-E2
ctttctccctatctatcagcactgctcgccggggccgcctctgcaaaaggctcgcttttgcctccggaacccagcggaatccgccggcggaccggaaacactcgctcgcccccctcaccccctgtctgcccggccgtcggagcgcgtcgcctccgggcgtgcagcagcagtccgtggaggtggagccgggaggaggaggagg

SEQ ID NO: 12322 - DNA, 125 bp, Zea mays
  unsure at all n locations
  Clone ID: LIB3150-085-P1-N1-E3
tcgttttctatcaatgaccacttcagtatttgaaaggccagccttttaaacctacaggctgtaacaaacaaanccaacaagcaacttacccctattacccccgtttttttaacacatcccagccc

SEQ ID NO: 12323 - DNA, 247 bp, Zea mays
  Clone ID: LIB3150-085-P1-N1-F2
cggacgcgtgggcggacgcgtggggtcagagctagcaagctcaaagaaaactgagctcgtgtgtagtgagcagcgagtagtgagtgactggtgaccatttcaagaacagcgccgcagcagggagctaattcgttcgttcatcgtcgcatcatcagtttgatccttcgacgccatagcttcctgcaacttcgagctcactaaacaaccatgggaggcacgctggagtacctgtcggatctgctgggcg

SEQ ID NO: 12324 - DNA, 197 bp, Zea mays
  unsure at all n locations
  Clone ID: LIB3150-085-P1-N1-F3
tcgcttgttctacaaacgcctaaatgtggtgcttgaagaaaagtgggagagggtcgagaatccttatattncctaagtgttggaggtatttagtatcaaaggcttgtttatgtgtcgttttttttgtctttatttatattttattcattattttatttattttctttattttttcttatattttattatttatatat

SEQ ID NO: 12325 - DNA, 64 bp, Zea mays
  Clone ID: LIB3150-085-P1-N1-F4
atttcgatctgtggctaaggagttgcggtttggtttggccgtgctcgtgggtcgtgtagatgtc

SEQ ID NO: 12326 - DNA, 394 bp, Zea mays
  unsure at all n locations
  Clone ID: LIB3150-085-P1-N1-G2
cccacgcgtccgctctcagaggcgacgcctcgggcgctcctaccctgccccgtctccggtccccccgcgccgtcggcgaggcagccggccgtcacagaagcccgatccggaccccgcgagaaatccttgttatacctgatggctatgattgatgagcctctttatccaattgctgtactgattgacgagctcaagaatgaagacatccagttgcgtctaaacttcattagaagacttttatcaattgcacggtctttttgagaagaaagaaccagatattttctttttcttttttttagtgaaaacaaactttttgaagatgtgttttttttggttattattgttttatttgtttgttattataannntttaatattttttacccatttttttt

SEQ ID NO: 12327 - DNA, 357 bp, Zea mays
  Clone ID: LIB3150-085-P1-N1-G3
tcttaaggctgtcagcaatgtaaataacattattggaccagcaattgttggaaaggaccccactgagcaggttgagattgacaacttcatggtccaacagcttgatggaacctccaatgagtggggctggtgcaaacagaagcttggagcaaatgccatccttgcggtttcacttgctgtgtgcaaagctggagctatggtgaagaagattcctctttaccagcacatcgcaaatcttgctgggaacaaaactctggtgctccctgtacctgcctttaatgtgattaatggagggtcacatgctggaaacaagcttgccatgcaggagttcatgatcctcccaactggtgccttctc

SEQ ID NO: 12328 - DNA, 393 bp, Zea mays
  Clone ID: LIB3150-085-P1-N1-G6
cttgagaagtctgccacctatgatgagatcaaggctgcggtcaaggccgaggcagagggtagcctcaagggcattctgggttatgtcgaggaggaccttgtttccaccgatttccagggtgacagcaggtctagcatctttgatgcgaaggctggcattgccttgaacggcaactttgtgaagcttgtgtcctggtacgacaactagtggggatacagcacccgagtggtcgacctgatccgccacatgaacagcaccaagttaatgaacaaactgatgaaagcatgcaaagagtgatgaaagcatgcaaagagagttgtgtttttttctcggaagtgcttctcagaataaatttttttcatctgattgttttatacctatatacgttttttt

SEQ ID NO: 12329 - DNA, 397 bp, Zea mays
  Clone ID: LIB3150-085-P1-N1-H1
tttttctcccccagtccccgatccgaagctgtgccgtggtaccatttcgatccagtggcgccgacgtcgaagctgtcgacgggcatcaagcgcgcttcgcggtcgcacgcgtaccatcgccgtgggctgtgggccatcaaggccaagaacggcggcgccttccccaaggccgacaaggccgccgccgccgtggaacccaagttctaccctgccgacgacgtcaagccccgcgttcccagcacccgcatgcctaagcctaccaagctcaggtcgagcatcacgcctgggacggtgctgatccttctcgcagggcgcttcatggggaagagagtggtgtttctcaagcagctcaagtccggtctgctccttgtctgtgggtctttcaagatcaatgtat

SEQ ID NO: 12330 - DNA, 102 bp, Zea mays
  Clone ID: LIB3150-085-P1-N1-H11
acaagtaatctgaatggctgtggagtgcataatcaataatcaaataaatacaaagcttttggccttattaaaaaaaaaaaaaaaattaatttaaaattaatt

SEQ ID NO: 12331 - DNA, 410 bp, Zea mays
  Clone ID: LIB3150-085-P1-N1-H12
tcatttccccactagcaaccgtccccacaatcctgcgacgatgcctgccgcgccgacgctgttgcccccctgcgacgcggaggagccgctgctggcggagtcctccgaccgcttctccatgttcccgatccgtttcccgcagatctgggagttctacaagaaggcggtggcctccttctggacggcggaggaggttgacctctctgccgacgcccggcactgggacgaggctctgtcccccgacgagcggcactttatctcccacgtgctcgccttcttcgctgcctccgacggcatcgtgctcgagaacctcgcttcccgcttcatgaccgacgtgcaggtcgccgaggcgcgggccttctacggctttcagaacgccatctagaacatccacttcgagatgtattctc

SEQ ID NO: 12332 - DNA, 397 bp, Zea mays
  unsure at all n locations
  Clone ID: LIB3150-085-P1-N1-H2
caatcgcacaggagagaccgagagagaggttttccatccatggctcccggcgtcgcttccgtgctggtcccgcaggagcccgtcctcctcaaggacatcctcgcctcaccgtccccctgcgggaacaccgctgtctccgcccgccacctcttcggcaacggagtcgcgccgccacgctcctcggacgacggcatcaaggacgccgctgccgaccgccacggtgaccgcgacctctccatccccaagatcttcaccggagacgtgctggacctgctcgacnatgctgcgaggctggacctgatgctggcgctgacgggggacggcggtgcggcgtccatggccggcttctccgcgcgcgggtggtgggtctcgaaagaggatggcgacgcggtgcagc

SEQ ID NO: 12333 - DNA, 253 bp, Zea mays
  unsure at all n locations
  Clone ID: LIB3150-085-P1-N1-H6
aagctcggagagcaagggcatcggggggaggcccagatatgcatgtagagaagaaggaattctnncctggagaatataagattgtagatcttgttcttccaaacacatctgatagttacaggttgttctgcatgatatttttttctagagacttttatgtgactcgttgcttatttccatactcttctttagatattattgttttttacaaattttttttttcatactttttttttccttaccttatttttat

SEQ ID NO: 12334 - DNA, 376 bp, Zea mays
  Clone ID: LIB3150-086-P1-N1-A3
tttttccgcgccgccatgtctggaaggaggaagactcggaagcccaagggggagaacgtgacccttggccccgctgtccgcgagggagaacacgtctttggcgttgcgcacatcttcgcctccttcaacgacactttcatccatgtgacggatctgtctggaagggagacgctcgtccgcatcactggtggcatgaaggttaaagctgatcgtgacgagtcctcgccttatgctgctatgtttgcctcacaggatgtcgcgcaaagatgcaaggagcttggaattactgcattgcacattaagctccgtgctactggtggaaacaagaccaaaacccctggccctggtgctcagtctgctcttaaagctcttgctc

SEQ ID NO: 12335 - DNA, 376 bp, Zea mays
  Clone ID: LIB3150-086-P1-N1-A4
gtcgaaggcgaggtcctcagcagcgccgggggactccgctcgcacgccaggctcagcctactccgtcttcccctgtctagcagacaccctcttcccctctccactcccaatcttatcgtcgcctccctcgacgtcgctgctgcctccacttcaccatggcgcttcacgccccggtcctcgttctgaaggactcgctgaagcgggagtctggcgcgaaggttcaccaagccaacatccaggcggccaaggctgtcgctgacatcatacgcactacattgggtcccagatccatgctgaaaatgcttctggatgctagtggaggtattgtggttactaatgatggtaatgccattttgagggaaatagacattgcaca

SEQ ID NO: 12336 - DNA, 282 bp, Zea mays
  Clone ID: LIB3150-086-P1-N1-A5
ctcgcctcggccgctctggcgcttgtgcggggggtgaagcgcgggtgcgggtgcgggaagcctcgccagacctagcgctgccgactgccgagctgggtgcgggcgcgaggagtctacgggaagacaagggtgaggaattatgagtgaaacagggcacactgtacaagtcactaacctttcgagcagagtatctgaaagtgatcttcatgagttcttttcgttctctggtcccattgagcatatagaacttatcatatcacaaagatacggtgccacttgtta

SEQ ID NO: 12337 - DNA, 146 bp, Zea mays
  Clone ID: LIB3150-086-P1-N1-B4
ctcttgctcgcactcgccgagaacgaatgaaagcgcatgaagccccagcgggagcgccaacccacccccgaatcaaacagggcgcctgccgttcgcctcgactcgcgctcccgtcagctatagtcggtacaagccactttggggaa

SEQ ID NO: 12338 - DNA, 226 bp, Zea mays
  Clone ID: LIB3150-086-P1-N1-B5
cttccatcgcgccagtgttttgagaagctggtcggcgctcctagatccctgcgcctctctcgcgttcgaggctaggtagccgccaccatgagcccgctcggggcagcctccggttctcaagaagtacatgaacaagaagcttcagattaagctgaatgcaaaccgtgttgttattggcacacttcagggattcgaccagttcatgaatctggtgatccacaacact

SEQ ID NO: 12339 - DNA, 83 bp, Zea mays
  Clone ID: LIB3150-086-P1-N1-B6
tctttttcatcaaaccagtgttttgagaaaggggtcgagactcttaaaaccggggggggcgaactcattcaacacacatacac

SEQ ID NO: 12340 - DNA, 402 bp, Zea mays
  Clone ID: LIB3150-086-P1-N1-C3
atacttctccccagcgcacacatcgatagggaattcgatctatatagccgggtcttctcatggcggtgttcaagacgacaatcgtcctagtcctagtttttgtggtcttgtcttcaacgtctccgtgctacaaagcctgacgaagctgcattggcggctgtgatcaacagctagatgcgacaccatgcgtggaccctctcaagaacgacgcggaccactgcacgaccgctactttcgctttgcaatgcctatccgccaagcacaagaccaagtcggcctactgcaagcatgagggcagcaaatactagtgcttctgcccgccatgagagcaaccagctcttgagcatcggttttgttatactctttattaatttattttttctgttttgttcactatatttt

SEQ ID NO: 12341 - DNA, 188 bp, Zea mays
  unsure at all n locations
  Clone ID: LIB3150-086-P1-N1-D2
tcattcataccaggttggcctaaaataaatcntattataacttgtcttaatcatgtttatagctgatacctttttcaaattgatatcctctcacaatttctcacaacatactatcctttatcataaagtttaaagctctatttgcctaattatatagcattcttacttaaatttactttttttaattt

SEQ ID NO: 12342 - DNA, 142 bp, Zea mays
  Clone ID: LIB3150-086-P1-N1-D4
caaaccattagctttatctactccagagcgcattgcaacccgggcgacaccataaggcagctgctccgtgccctagctatcctggctctcgctgggagcgccacctgcacgcatacacgctgacattgtaccatgcagtcac

SEQ ID NO: 12343 - DNA, 328 bp, Zea mays
  unsure at all n locations
  Clone ID: LIB3150-086-P1-N1-D5
atctactccagagcgcagaagaaccggatcgacaccatgagggtggggctcgttgccctcgctctccttgctctcgctgcgagcgccaccttcacgcatacaagcggcgtttgtggtttctagtcaccttcttctgtttatttactttttgtgtttctttttttattttntattttttttatgtcttttttgtttatatctttctttttctctttctttttatttattgtttgttttttttctatttcttattttttttttcagtttttaatttttttttttttttttttttttcttatttctgttaatatactttcttctttttttt

SEQ ID NO: 12344 - DNA, 237 bp, Zea mays
  unsure at all n locations
  Clone ID: LIB3150-086-P1-N1-E2
ggtgcctgccggctctttgctgatttccaaaagcgttttttgccggatgcgcagatctacataccaacaccaacgtggtccaaccatcacaatatttggagggntnctcaagtgccacagatgacattcacatactaccatccagngnnnagagggcttgatttctcaggattgatgcatgaaatcaagaatgctccagactgttcattctttttgcttaatgcatgtgctcataat

SEQ ID NO: 12345 - DNA, 402 bp, Zea mays
  Clone ID: LIB3150-086-P1-N1-E4
gccgtcctgttggtcgtgcctctcttcagccttgttttcttgagcattagcgagagccccttacatggtgcagtgctagcatcgttgctggcgacctcggtgaggtcggatctgcaaaggttgcagctagcgcgcctacactacatcaacatggtgtggcatctcctttcgcagatccccaacatgctacgccgccggctgcctcattggaactcctgtgcaccgcttgcctttcttctcccattcaacccgcaggcgttccctggctcaatagcgcaactaggggatgtccgccgctacctccatataggaaacgacagatttagattttcaggtgatgcgtggtcgggatcccggatcaatcaaaataagtgtgaaataagtgtgaaatttgagaggctg

SEQ ID NO: 12346 - DNA, 411 bp, Zea mays
  unsure at all n locations
  Clone ID: LIB3150-086-P1-N1-E8
ttttcgatcccatttgaaatcaacccatcgtcgtttcctccgtctagcatgctctcaccctcatggccaagatcaagatcgggatcaatgggttcggcaggatcggaaggctggtggccagggtggccctgcagagcgacgacgtctagctcttntccgtgaacgaccccttcatcagcaccgattacatgacctacatgttcaagtattacacattgcacggacagtggtagcaccatgaggtcaaggtgatttgactccaataccctttctcttttgtgagaattgagttttttttttttttttttcgtaatcctctaaagagatctctttgggttattatttaattattaatattttattatacttttcttntaatactattctttatatgttaagtttattaattat

SEQ ID NO: 12347 - DNA, 338 bp, Zea mays
  unsure at all n locations
  Clone ID: LIB3150-086-P1-N1-E9
tctgcggcggagcacggatgccaaggagggggagcaacaacagcaggcggggcctaaaaacnncatcccactcagtgcttgcaaccatggctaggggaccgaagaagcacttgaacaggctcaatgcgcacaatcatcgcatactcgacaagcttggcggagcttttgctcccaagccatcttctggacctcacaagtccagggagtgccttcctcttatcctcatcatcaggaacaggctcaagtatgctctgaactaccgtgaggtcatttctatcctgaatcaacgccatgtacttgatgatggcaaggtcaaagactgacaagacctaccctgc

SEQ ID NO: 12348 - DNA, 270 bp, Zea mays
  unsure at all n locations
  Clone ID: LIB3150-086-P1-N1-F4
tctctttccgatccgccgagtgcacaccagcnttgcctcactccgatcgagatggagggccgccnagggcgagaagaagatgatcaccctcaaaagctccgatggcgaggagttcgaggtgagaagaggcggtggctatggattcgcagaccattcgccacatgatcgaggatgactgcgccgacaacggcatccctctttctaacgttaacttcaagatcctatccaaggtaatcgagttctgcaacaagcacgtacattgcctcgtcg

SEQ ID NO: 12349 - DNA, 388 bp, Zea mays
  Clone ID: LIB3150-086-P1-N1-F8
cttttcgtctcttctctgcctttgctccgcaaacacagagcgcaggaggagagagagagagagagtgagaggggagagagagggctagggttttgtgccccccacgcctcacgcattgaatccgagccgggtcggtgttgctgcgaatcgccggcggtgcttgggctgtgattccattgcaatggcatctgaaactgatgagaaagctaagatggagagtttgacatctgctgcagcctttgtggagggtggcattcaggatgcatgcaacatttgccttgaggccttctgtgagagtgacccttctgcagatcaaccaaaatggatggatcaacacatgagtcaaccaaaatccaacacccaacccaatcggtattcaatcaaatac

SEQ ID NO: 12350 - DNA, 175 bp, Zea mays
  unsure at all n locations
  Clone ID: LIB3150-086-P1-N1-G1
gtcccgctccccaccccgccaccaccgacgctgggatgaaggccgtgccaggcgacagcgccgcgcccccggtgcccatnccnatgccgatgccggcgaccaagatcaccattnnngtttccgcggggggcggcacggaggcagatctcctcaggaagaggccggacaaggggtg

SEQ ID NO: 12351 - DNA, 269 bp, Zea mays
  Clone ID: LIB3150-086-P1-N1-G3
tgcggcgcctccacatctcgtctctcagatcgggaggcgaaaccaaggcggacatatacatatttgtagtggtaccatcataacaagtaaagatggtgaagttcactgctgaagagctccgtgccatcatggacaaaaagaacaacattcgtaatatgtctgttattgctcatgtggaccatggcaagtctacacttacagattcccttgtggcagctgctgggattattgcccaggaagatgctggtgatgatcgcatgactgatact

SEQ ID NO: 12352 - DNA, 353 bp, Zea mays
  Clone ID: LIB3150-086-P1-N1-G4
ctcaaacacaagcctcagatctcaatcacgtgcgccgccgcttcgttcgtgtggaggggagaagagaggaaatggcggcgaccgagggcgtgctcctggggatgggcaatcccctcctcgacatcttcgccgtcgtcgatgacgccttcctgacaaagtatgacatcaagctgaacaatgctattctcgctgaggagaagcacttgcctatgtatgacgagttggctagcaagagcaatgttgaatatattgccggaggagccacccagaactctatcagggttgcccaatggatgcttcaaacttctgtgtgcacaagtttcatgggatgcattgataaggatcagttttgt

SEQ ID NO: 12353 - DNA, 367 bp, Zea mays
  Clone ID: LIB3150-086-P1-N1-G5
cttcccttcttgcagaggaacagaaggcattctgccgtcgttgaatatgtttttagtggccatcggttcaaactaacaattcctaaggagacttgcagtattgccttctcattatctggtgttcggtgtcctggtaaaggcgagccatactcagatgaagctattgctttgatgaggagaaggatactacagcgtgatgtggagatagaggttgaagcagttgacagaacaggaacattcataggttcgttgtgggagtccaagaccaacatgggctctgtacttctggaagctgggctggcgaatctgagttcttttggcttggttaggatgtcagatgctcatgtcctaacaagagctgaacagt

SEQ ID NO: 12354 - DNA, 155 bp, Zea mays
  Clone ID: LIB3150-086-P1-N1-G6
tttctaattcatctcatccatacatacaccgcccggccctccaacaacatagccccaccaaccacctcctcaccctcacattcattaactactcctttcaccattttccctcatcttaatctagcactccgtcgctctatacaaaaatcctaccc

SEQ ID NO: 12355 - DNA, 352 bp, Zea mays
  Clone ID: LIB3150-086-P1-N1-G7
ttcccaggctccccctacccctcctggccggaatcctcccccaagcgggccgcacactcccctccgcatcatcagcagtctccctccgaggaatgagaagacaaggagaaaccaacacatttcatatttctagagtctaatacggcatcagggtgcatcattgtcaagggtggatcaaccattaatgattttcagtcccagtctggggctcgtattcagttatcacgtatcaatgagtttttcccttggacaaatgacagaatcatcatggtttctggactgtttgatgaagtaatgaaagccacttaacctattttttaataaactgttggcttatggttaacaaatcaac

SEQ ID NO: 12356 - DNA, 455 bp, Zea mays
  unsure at all n locations
  Clone ID: LIB3150-086-P1-N1-H1
ttctattttacccaccggggctccacacgaggagaggtctactcccgtgcgggaggctcaaccgccccgccggcgcctattccgattccgatctcgtnnaccaataacaccattcctttttttctgaatatctatatntataaagatctttttctttaagtaactgcaacaagttccaatatccttattttaacaatcataactcaatagattcttatgatttcctaattcctaatactattttgtttaacattaacttattttatttattcaatacaacatttatttatttatatattctcttataacttctatttttaatatttttaattttatttatttgttaatatatttatctatattaaataatctttaatattatattaattatataataattattatatatattaataatttttatattttaatatttttatttattataattaatt

SEQ ID NO: 12357 - DNA, 362 bp, Zea mays
  Clone ID: LIB3150-086-P1-N1-H2
tagcgtttcagcaatggcccgtcaatatggtcggggtgtcatttctgctgtgcagagagtgtcgatggctatatctccctcccaatctggtctaaatgctgggcataggatgctttctggcttccctgaagctgccacacttgctagatgggtttgccagagttatcactaccatctaggtatggaattacttaatcaatcagatggagctggtgaagcatttttgaaaatgctctggcatcatccagatcctgttctgtgctgctcctttaaggagaaacctatgtttacgtttgcaaacaaggcagtgtctggacattttagtatacatctcttgttgcccagctagacctgtcgctaga

SEQ ID NO: 12358 - DNA, 363 bp, Zea mays
  unsure at all n locations
  Clone ID: LIB3150-086-P1-N1-H4
gcgagaggcgaggagagagaaagttctggagctagactagcgccgtgcgaggagagaagcnagatgagcggtgaggcggcggccgtgggcggaggcgaaggagaggcgaatggcattccgccgaacgtcaccatctatatcaacaacctcaacgagaagatcaagctcgaagaacttaagaagtccctaacagccgttttttcccagtttgggaaaattcttgatgtgcttgctttcaagactttgaagcataaaggtcaagcttgggttgtcttcgaagatgtcgcatcagctactgaggctctgaagaggatgcatggctttcccttctatgacaaaactatgagaattcaatatgccaag

SEQ ID NO: 12359 - DNA, 329 bp, Zea mays
  unsure at all n locations
  Clone ID: LIB3150-086-P2-N2-D11
actcactatagaggaaaggctggtacagcctagcagagtaccagagtccgagatattccaggggcaggcccagccctnntttttttttttattatttttttatttttttagggcagagaggcaacatcttgtaatgtggcgattctattccaataggccatgcgatcacatggcacatggcataccaaatccaatgcgttaaccatgatttgacatatgctattttacacgtacttattcaatgagagtgagagagtaactaaaggttgccgatacaaagtgaactacttcttgaactactcattgcttagttgtcacacttttcactc

SEQ ID NO: 12360 - DNA, 259 bp, Zea mays
  Clone ID: LIB3150-086-P2-N2-E11
tctctcccgtgcccctcactgtttagtggcgacgactgtgcgacagttgccgccgcctccctctaggggccgtgcccctggtcttcatctttggcgctttgtccaccagatattatcatctggcaattcgattttgaggccattatttgataacccgtttcaagtgcactggttacctgaccattttagctttttgagatggctacacatttgccatgcttcacacagcttagtccaccgtcttgtatcaggattaaat

SEQ ID NO: 12361 - DNA, 387 bp, Zea mays
  Clone ID: LIB3150-086-P2-N2-E5
ggaaagctggtacgccagcaagtaccagttccatatttccaaggagcagagccagccctttttttttttttttttttaatttttatttttttaaaagaattttttttaaaataaataattcttttaaatatatataaaaataaataatttaaaaaaaaaaatataaattaaaataaaattaattattataaatatttatataaaaaaaaaattaattttaaaaaaaaaaaataaattttttaaaaaatataataattttaaaatttaatataataaaaatatttaatttattatatatcattaataaaatttttatattaattatttaaattaatataataaatttaattaattttattaaaaatatataaatataaattaatttaa

SEQ ID NO: 12362 - DNA, 380 bp, Zea mays
  Clone ID: LIB3150-087-P2-K1-A2
ccaagcaaattctttttgtggtagtcctgtattcactcggggggaatagatgcgtcttgcatttgcacttctcgaaggaaccaaaaccaatacgtaagattctgcatctaggagttccaacaattcagcataacacgaatagcaaaacctgacaacgcttaacataaaacgtcataccaagtcctaaagttcattatttcaaatatcttggttgataatgcacctaataggatcctgcccccctcaagcataatagctttggctgccaccaccatagccaccaccttcgtagccgccgccacctccgtagccaccaccttcatagccgccgccgccatagccaccaccaccacggttcccaacaggtcttttattatcca

SEQ ID NO: 12363 - DNA, 377 bp, Zea mays
  Clone ID: LIB3150-087-P2-K1-B1
tcccgggcggccgtccttttttttttttttttgtgtttttttttcttttttttttttttttttttttttttttttttttgggggggtttttttatttttgggggtgcttcaaaaaaaataagttaattttctctaaaaaaaaaaaaaatgtttgggaaaatgagtgttcccaaatccccctcatggtgggtgggctccctttttcccgcggtttttggaccaataaaaaccacgcccctcctttttttttgttttaccatggccttgttcttaatctacccctttttaaagcttgctttttactccccccctatcttcacatttccctgtttttcttttcttgcccttatttttttgttttcccttctcctttttta

SEQ ID NO: 12364 - DNA, 174 bp, Zea mays
  Clone ID: LIB3150-087-P2-K1-B4
gttgggggaaaccaatccaatccttttcttcattatcaaacaggatcaaaaggggcggctatcatacacagcaaagggacaactctgaaccaaaacaatatccacgtgagttgtcaccaaattcaaaatcattccagttgaatgccatgccttattcatgaaaaagaaaaagag

SEQ ID NO: 12365 - DNA, 200 bp, Zea mays
  Clone ID: LIB3150-087-P2-K1-C3
aaaccgaaccagaataccgtttgttttttatcgcgtgccacgaaaatattggggaccatcaaaaggtgctaacgcgggtacaccagtacgactactataaattgagcagctactgggccagccagtcactgcagcatacacacgagactgacacaatccgtttagtccaccttctctatcttggtgcctgggccaccttt

SEQ ID NO: 12366 - DNA, 223 bp, Zea mays
  Clone ID: LIB3150-087-P2-K1-C9
cggccgcccttttttttttttttttatttattaaactattaattttttttttctttctcatcttctttctttttgttgggttttttttattatctgggggttctcttctttcttcaaacttttcacctattctatatttcttctaaaaaacaaaaaaaacaccccgggttataaaaaaaaaccccctctaaaaaacccccccaaaccctgcgaaacaattaca

SEQ ID NO: 12367 - DNA, 104 bp, Zea mays
  Clone ID: LIB3150-087-P2-K1-D6
cgcctgcagtacggtccggaatcccgggcggccgcacatcatcctcgccatctaagctcgtcgtgctgcttctcattatcagaatccttgctatcctggcatca

SEQ ID NO: 12368 - DNA, 104 bp, Zea mays
  Clone ID: LIB3150-087-P2-K1-E12
tcggaatcccgggcggccgccttttttttataaatgttaacaaataaacagggttctttttcaaaggcgcactttaggggggcacgaaagcatggggggaaaaa

SEQ ID NO: 12369 - DNA, 333 bp, Zea mays
  Clone ID: LIB3150-087-P2-K1-E4
gccgcagtaccgtccgtattcccgtgcggccgcccttttttttttttttttttgtttttttttttttggctcaatttcaatccaatttattcctcatcgagatacgtggaagactggggatgtctggggctccatcggtacagtatgttcccgaaaacgttttataagataaagtgagcctgtgtcttgttttaacttgtgggactagaacccatgcccgttgtagaataatcggagcttgcccttgtttgtattggaagacttcctttccattccttgtaaccaacttcgttcgttaaatactttgagtgtgctgttctttgttgctaattg

SEQ ID NO: 12370 - DNA, 324 bp, Zea mays
  Clone ID: LIB3150-088-P2-K1-A11
ttcccgggcagccgcccttttttttttttttttgagatgatttatttagagtctttttactttaatgtttagcagaacacatgaggggtactggcacgcttagcggtgtcctgcacaagagaagcaaggtcacacaaggcactgttataccctatacacttaaaatttatgttgcacaaagcaaaatcagataggctaaacccatacgtctggattcgcattccaactgttgattggacttaatcaacggtctcgaagaaagcctttccaggagcacgcttctcaagtcgttcatggttaccgagcattttttctctgacacct

SEQ ID NO: 12371 - DNA, 320 bp, Zea mays
  Clone ID: LIB3150-088-P2-K1-A12
cgccgcaggaccgtccggattcccgagcagccgcccttttttttttttttttttttttttttttttttttttttttgaggaaactaattttacatttaaattggaccgattaatcatgtacttggttcatacacaaggtccacaccacaaggacatgctcagatcctgtgtacagacagaaccacaatcgggtaacagggtttctagatagaaggaacaactcaaggattgcgaaatacagactggacagcggtgatgacgacgctcaaggacgccgactaaacacgggggagccaccttggtcaaccggtgtcctggtc

SEQ ID NO: 12372 - DNA, 301 bp, Zea mays
  Clone ID: LIB3150-088-P2-K1-A2
aaatccctaaactatttataactgcaaaaagaattttcagagttcagttcaccttatttttgggacagggtacaaactttttactattatacctttccctcctttccattcattattataaacattcattaattaaaacaaaattaatttgcttcgtaaattatttcactaactttctaacctttgttcaacaatctatgggttatatctttataccttcttcttacttattctccattaaaataaaatatttattactccccataataaatttacttcttcaatttacttatttaccatt

SEQ ID NO: 12373 - DNA, 392 bp, Zea mays
  Clone ID: LIB3150-088-P2-K1-A6
cggccggattcccgagcagccgccctttttttttttttttttttttttttttttttttttttttttttttttttttttttttttttttttttttttgtttttttttttttttttttttgttgtgggccctaaaaagcccaataaaacgcttgggggggcccggccccccttgccaattaattccgggggaacaatcccagtccatttggtcttgggggaacacaaagaattggggtcctttttggcccccttccagccttttaacaaaaaaaaagaggggtggggggcccaattcggtttcattttttgcccgggccttttttgacggcccaaagcttttaaaactttggggctggaacaattttgccccccccttcaaaaatttctggccc

SEQ ID NO: 12374 - DNA, 172 bp, Zea mays
  unsure at all n locations
  Clone ID: LIB3150-088-P2-K1-B1
ggggttggggagacagatttaggggggccaaagcagggtttggaaatacanngggtttttaaaagaggttaatggaaattttaagggggatttttaaattacattccaggagcaccaaatgtgaaagagacaaaaagtcctataacccttttttctcccgaactctttattt

SEQ ID NO: 12375 - DNA, 388 bp, Zea mays
  Clone ID: LIB3150-088-P2-K1-B11
cgccagcaggaccgtccgaattcccgagcggccgcccttttttttttttttttttttttttttatcagaagtcttttaacaatagagatcttagcaaaactttgcacgacaaggtacaataagtagtaacatgttcagatgattgcacggacacggaacaatctccaaattatagtcgaaaagcaccagcctagaagagagatttcttttgaattaaaaagacatcattctatagactactcatggaacatagtctataaactcaggctgctgtgaaggccttctttccagcagctgcggatccagctggaatgactttaacgacattgaacctcacagtttttgacaggggcctgcactggccaatgatgacatggtcaccttcctt

SEQ ID NO: 12376 - DNA, 185 bp, Zea mays
  Clone ID: LIB3150-088-P2-K1-B3
ataatataaacctttttttaggttgttttattttatacaaaaaggggggcggcccacaacaaatttttcaaattcaaaaatccgtttattatagcctataaatttgttattttaaatttaggggaaaaggaaattttttaaatctataaccaaatttaaaaattaccctttaaattaacccgtaa

SEQ ID NO: 12377 - DNA, 70 bp, Zea mays
  Clone ID: LIB3150-088-P2-K1-B5
ttccttagattacttattacttcttgtagttcttagtttataaattatggcttttgtgaaggcctttttt

SEQ ID NO: 12378 - DNA, 255 bp, Zea mays
  Clone ID: LIB3150-088-P2-K1-B6
gagtgcaaaaagcaaaacttttgaaatagaatgaccgttaaaagtttaacgataacaaccactacgatacacccgttttaggttttagacattcagataagaaaaatttattctcggaagcacttccggggaagaaacacaactctctttgcatgctttcatcactctttgcatgctttcatcagtttgttcatttacttggtgctgtttatgtggcggatcatgtcgtccatttgggtgctgtatccccacttt

SEQ ID NO: 12379 - DNA, 424 bp, Zea mays
  Clone ID: LIB3150-088-P2-K1-B8
agcagtacagtccgtattccagagcggccgccctttttttttttttttttttttttttttttttatttttttttatttttttttttttttttttaattatttttttttttttttttattgtggtttttttttttattttttatatttttttatttattttattttttatttttttttttatttaaaaaaaaaaaaaaaaaaatttaaggggggggaaaaaaaaaaaaggtaaaaaaaaaggggggcccctaaaattaaaaaaaaaaaaaaaaaaaactcttgttaaaaaaaagtgttttattgagggggtggggataaaacatcttagagaggtaggtggataaaaaaaaataatataataatcaccctctaaataatttaataaaatataaaaaaaaaaaattagataaattaaccatttttc

SEQ ID NO: 12380 - DNA, 181 bp, Zea mays
  Clone ID: LIB3150-088-P2-K1-C4
aagagcccaagcttttttttgcaacgggctatccatagaagaattggtgactgtgtcacaccgagaaggagatgaccctttgtactcttgcatgtcgcattgaacaactcacgctttcatcacaattacatacaggacacacaccaaaccttggtgcacttgcactttcttacattcagta

SEQ ID NO: 12381 - DNA, 392 bp, Zea mays
  Clone ID: LIB3150-088-P2-K1-C6
gccggattcccgggcagccgccctttttttttttttttttttttttttttttttttttttttttttttttttttttttttttttttttttttttttttttttttttttttttggggtttttttttttttttttttttttttttttttttttaaaaaaaaaccccggcggttttttaaattaaaaagaaaagggggttttccccccggccccccccaaaggtgggttttctctaaaaaaggggccccctatccaaaaaaaacccgaagggggggggggggcttaaaaaaacccccccaataagggtgaaaaaaaattaggaaggttttgttttttcccccaaaaaagggccccccaatggtgtatttttttggcggagaaaaaattgaaaaat

SEQ ID NO: 12382 - DNA, 449 bp, Zea mays
  Clone ID: LIB3150-088-P2-K1-D3
gccgcagtaccgtccggattcccagtcagccgcccttttttttttttttttttttttttttttttttttttttttttttttttttttttttttttttttttttttttttttttttttttttttttttttttttttttttttttttttttttttttttttttttttttttttcaaaaaaaaaagatttttcccaaaaaccccggggtttttttttcccaaaaaaccaaattttttttgtggggaaaaggggggattttttttttggggggtttaaaaaaggggggggaaaaaagggccccaaaaacgcccctcctccattttttttagggggttatggggggggtttttcctttttttctcgccttttttttaaaagagaataaacacgtgccccccaagagaggaaatatcctttaataacaaaaaatactgttttttttcattggagg

SEQ ID NO: 12383 - DNA, 136 bp, Zea mays
  Clone ID: LIB3150-088-P2-K1-D5
ccaatcgcttccaacgacctttttatatccaacaccttcacctgacaaaccggaaaaattaatttaactcttaggaggttctccatccaccaatcctatcattttgttactcaattcccttacctcaattatccat

SEQ ID NO: 12384 - DNA, 271 bp, Zea mays
  Clone ID: LIB3150-088-P2-K1-G10
gattccagagcggccgcccttttttttttttttttttttttttttttttttttttttcttttttttttttttttttttttttttttgggttttttgaccaaaacggagggtgcatcccatctttcaaggcccaaaatatttaatctatcaaaaccccatcacccaatccgtcagggtgtccataaaaaaaaacaaaactctttccattgagaaacaacgaaattttaaaccccatgaattaacaaaaacccgttttcctctaaaaacaaaa

SEQ ID NO: 12385 - DNA, 338 bp, Zea mays
  Clone ID: LIB3150-088-P2-K1-G4
attccagagcagccgccctttttttttttttttttttttttttttttattttttttttttttttttttttttttttttttttttaaggcaagaccagcaagattaccgggtccatcaaaatcaggttaggcaaacgacattacaacgagtgcagaccaccactcgcctgaatctagtgagattgaaaaaaaacaggacttttctgattttggggctcccacgacaaaatcacctgagttggtttcgagcaaacacgaccatacatttattgggaccggacaaacattgcaacaaaaggaatcagcaggctagtttatcttcacaagaaaacatcccca

SEQ ID NO: 12386 - DNA, 187 bp, Zea mays
  Clone ID: LIB3150-088-P2-K1-G9
atcctattggagcatttcataaaggcctatggagcactaaaataccaactccctttttaagtaattcgccaaagactttatacaccgtccccaaaaaaaaaagccaccaacaaaccccaattcccccccccccggggaacaaaaaaaaacccacccaccccttaggcgcgaccacactaccctacac

SEQ ID NO: 12387 - DNA, 277 bp, Zea mays
  unsure at all n locations
  Clone ID: LIB3150-088-P2-K1-H3
ccggccggattcccgagcagccgccctttttttttttttttnttttaagcaacatgtcgatcctttttttttttccttcaaaccacagcgctcagcatgatgcatgcattcgcgacacaaatgcactaagcaagcaagcagagttcaatgtatgttacatggtcaatctttctcaaacccgatcatttgaattgtcaggaggccccaatcaaacttggtctcaatccaccagcaaactggacgtcatactcctgtgctaaagtgtgcttggactacg

SEQ ID NO: 12388 - DNA, 217 bp, Zea mays
  Clone ID: LIB3150-088-P2-K1-H4
aaagcaaaaacttaaaggggaagcccgggattcactcaatgggaatagaggcggcttgcatttacacttctcgaaggacccaaaaccaatccggaagattctgcatttaggagtcccaacatttcagcataacacgaatagcaaaacctgccatcgcttaacataaaacgtcttaccaagtcctaaaggtcaattatttaaaatatcagggtgaaat

SEQ ID NO: 12389 - DNA, 275 bp, Zea mays
  unsure at all n locations
  Clone ID: LIB3150-088-P2-K1-H6
gccgtccttttttttttgcagaaagctatactatatattatgctttaataggncttttccctctgtgactaggaggagcatcacacatgcaacaaatgtttaataaaaacctgccacaatttgttcgatcaaaacccaacaggtggtattaataaccatcgtccacctacaaacatgaaatgcacaggctcaacacattggagacgcgaaagattgacaaacaaatcaaggttcgcttgctggttcgccgtcgctggttttttggcggttgtttg

SEQ ID NO: 12390 - DNA, 340 bp, Zea mays
  Clone ID: LIB3150-088-P2-K1-H9
cccgggcagccgccctttttttttttttttttttttttttttggaggaacagctttttcatttcagaagaaaagtgtatctcagaaaagcctagctagacaagacctcacgttgcacttacaagaatcttattgttccccactgcttcttgtaagaacgcaaaagccggaacgataccagcccagccatgagctatccttttcatgaacaacgaaagaactgatacattttcaaccgttggaccgacatttggtttctgatgctcatggacgtacaggatcaacagatctaatctttctcaaattaaaaactaagatctatatgtatttcattggccctt

SEQ ID NO: 12391 - DNA, 401 bp, Zea mays
  unsure at all n locations
  Clone ID: LIB3150-089-P1-N1-A1
ctcgccttcccttccccaccagcccccgtctgtctctctcttctctctgactctctctctcgtagccgcgtccacctcgcagcagcaagcaagcgcgaccaaatggcgcctctaggagacggcggagctgctgccgcggcggcgtccaacaacctggtggtgtcgttcggcgagatgctgatcgacttcgtccccgacgtggccgggctgtcgctggccgagtcgggcggcttcgtcaaggcacccggcggtgcgcccgccaacgtagnctgcgccatcgtccagctcggcggatgcttccgcttcgtcggcaagttcggcgacgacgagttcgggcacatgttggtgaacatcctgaagcagaacaacgtgaactcggaggggtgcctgttcgacaagca

SEQ ID NO: 12392 - DNA, 217 bp, Zea mays
  unsure at all n locations
  Clone ID: LIB3150-089-P1-N1-A10
tcgtttcaaccgaaggagttaccaagtatttggagcctgctgttgccggcttccggatgcanaaggaacttgactaccttgttggagctgttgccaacccaaagaagccatttgccgctattgttggtggatccaaggtctcaagtaagattggtgtcattgagtccttgctggcgaaggtcgatatcctcatccttggaggtggtttgttctacac

SEQ ID NO: 12393 - DNA, 214 bp, Zea mays
  Clone ID: LIB3150-089-P1-N1-A3
aggagacatgggtgcaaacagaggaaaaacagggcccgagtagatgaaggaaggacgttctgtcaaacagggcgtgtgtgatcatctacatgacatctttcacgccgccaccaagaatatacatggcggatgggacctctgctgcatccagcacgggatacacatcaaaggatcccaaggcatctatacaacagctggagcagacaatgatact

SEQ ID NO: 12394 - DNA, 383 bp, Zea mays
  Clone ID: LIB3150-089-P1-N1-A4
caactcgccgtctgccttctgcgcctccatttcggcctctgtcccttgcaagttcagtctcgcctccaaccatgggtaaagagaagtcccacatcaacattgtggttattggccatgtcgactctggcaagtcgaccaccacaggacaccttatctacaagcttggaggcattgacaagcgtgtgatcgagaggtttgagaaggaggctgctgaaatgaacaagcggtccttcaagtacgcctgggtgctcgacaagctcaaggctgagcgtgagagaggtatcaccattgatattgctctgtggaagtttgagaccaccaagtactactgcacggtcattgatgcccctggacaccgtgacttcatcaagaacatgatcact

SEQ ID NO: 12395 - DNA, 250 bp, Zea mays
  Clone ID: LIB3150-089-P1-N1-A5
agaaaatctggcatcatactttctacaacgagcttcgtgttgcaccagaggagcaccctgtgttgctcactgaggctcctttgaacccaaaggccaacagggagaagatgacccaaattatgtttgagactttcaatgttcctgccatgtatgttgcaatccaagcagttctatcactctatgctagtgggcgtactactggtattgttcttgactctggtgatggtgtgagccacactgtgcccattta

SEQ ID NO: 12396 - DNA, 344 bp, Zea mays
  Clone ID: LIB3150-089-P1-N1-A6
gaggaacttagaagtccagagtaccttgccgaaggtatagatttaagaagaggcgctcaagcaaccggcatgacacccatatagcttgccctttctctgtgtgatctttggtacatgtatggatgcacagctcgacctgcgtacaccgtatgtgaggtgacgaatggctacaacacctttgtcttaacataaacatgccaactgggactacgttgagcaaaaatctctcgcatgaatatatactctgctgactacattatttcaggacaccgtatttctcagcccctaggaaagggcacaattcactgcaaggtcgagcttattatcaacttctagaatgcctt

SEQ ID NO: 12397 - DNA, 230 bp, Zea mays
  Clone ID: LIB3150-089-P1-N1-A9
gacttccatgcacgcggcaccttacctaagctcctatacatgtagacccaccccaccctttctatctcttcccaattccacaacatacggggcttctttctatgcctgtgggcagccacaacacatctgtctatgccagatcatcattaatcaattctgtacccctgaccgccacgcatgtttaacagcacccttcctatcctgcctatcacttagacttaaccttattt

SEQ ID NO: 12398 - DNA, 97 bp, Zea mays
  Clone ID: LIB3150-089-P1-N1-B1
tagagctagcaaaacattgggaccacatacagtgcgtgcttctacgtctgtgttcccaaagaccacaactaaatacacgaggatgaaggggtccact

SEQ ID NO: 12399 - DNA, 284 bp, Zea mays
  Clone ID: LIB3150-089-P1-N1-B10
ttcaatccttagccctattctgccagtgtgggagctcaggaatctgcgccagggccagtgatacagagaccttcgcatttcatgctgagatcaaccagctggtctgactcatcatcaacaccttctacttcaacaaggagatcttcctccgcgagcttatctccaactgtttcgatgcgctggacaagatcaagttcgagagtctcactgacaagagcaagctcgatgcgcaacctgagcttttcattcaccttggtccagacaagggcacgaacacgcttttc

SEQ ID NO: 12400 - DNA, 324 bp, Zea mays
  Clone ID: LIB3150-089-P1-N1-B2
tcgtggcagagaggagaccgaagatcaaggaggcgtctcatgagtgggcatcggttaacaagctaaagcccatattgatgacgaagccagaagaaatcacaaaagaagaatatgctgacttctataagagcttgacaaatgactgggaagagcatctcgctgtgaagcactgttatgtgtggggtcaactgtgggtgaaggctgttatatttgttgctaagagggcactgtttgattttctttgacaccaagctgaagcgccacatcatttagctctatgtgcacagcgcggtcataatggacaactgctaagagctgatccct

SEQ ID NO: 12401 - DNA, 390 bp, Zea mays
  Clone ID: LIB3150-089-P1-N1-B4
aaggtcaggaaggtggacatgcttgatggcgtgaccatcctccggtccgagaaggtcaaggatgagctcatccttgacggaaacgacgtcgagctcgtatctcgctccgccgccctcatcaaccagaaatgccatgtgaagaagaaggatatccgaaagtttttggacggtatctatgtgagcgacaagggcgtcatcgaagaggagcagtgagcgacagtgtagccgaaatgccaggagatgaatatgaatgtcgtttgagttgcaattttgcgagactgaatgtgaacctttttctcattccttaaatagttgactgccagtgttcgtgggttcaaacgaaatttagtcttattaactgaatttgcgtattcaaatggattgcgtggc

SEQ ID NO: 12402 - DNA, 160 bp, Zea mays
  Clone ID: LIB3150-089-P1-N1-B9
tctttcgctagtgggcgaccgccgccgcgtccgtccgtcaggtgcccaggtgtagcctcgtccgccccttcgtcaggtcttcgttagacccctcgtcgactagcacccaccagacatgcattagagcgcgcattaaaaataatatctgttcttaccggcg

SEQ ID NO: 12403 - DNA, 326 bp, Zea mays
  Clone ID: LIB3150-089-P1-N1-C1
agctcatgagacgagcctggtcaggatagggaagcccatcccgagcctatcgcggtgtctattccctccgcaaccgaggtacagcgattgcgggcgtaagctccgcgctgcagtgggtatacctgtccgtctacaaaagggtcgtcttctttggatgggcgcaggtgcatgactacgcgctcctgacgctgagaatgagcgggcacaagggcgcctatgacgccgacaagagggcgttgttgttcgcgcagacagccgccaatattgagatcgatgatgggctcgtaaggaaggagagggctccgatctgtgcaactcttacacag

SEQ ID NO: 12404 - DNA, 201 bp, Zea mays
  Clone ID: LIB3150-089-P1-N1-C2
attttccaagcacgctgctgccagggtctgcaggcgtgcaagcacgcatcagcgtgtgcacaagcgaaatggcggcgacggcagccgtgccttcttggcgccgggcattcgcggagctcttgctggtcctgcagctgcgcggcgcgcggtcggcgacgttcaccatcgcgaacaactgcggctacacggagtggccggggc

SEQ ID NO: 12405 - DNA, 377 bp, Zea mays
  Clone ID: LIB3150-089-P1-N1-C3
ctccaattccctcgtagcagcagcaccagcagagtctccttcctctccggcggcgatgtctgggcgcggcaagggcggcaaggggctgggcaagggtggcgccaagcggcaccgcaaggtgctccgcgacaacatccaagggatcacgaagccggcgatccggaggcttgcgaggaggggcggcgtgaagcgcatctccgggctcatctacgaggagacccgcggcgtgctcaagatcttcctcgagaacgtcattcgcgacgccgtcacctacactgagcacgcccgtcgaaaaaccgtcaccgccatggacgtcgtctacgccctcaagcgccagggtcgcaccctgtacgggttcggcggctaaacgcgccctg

SEQ ID NO: 12406 - DNA, 396 bp, Zea mays
  Clone ID: LIB3150-089-P1-N1-C4
cggacgcgtgggcatgcgtgaagtgcgcactgttgtctactcacagtttctggaatcgtacaagagtgtgacaatggaagccatggctgctgcatttggcgttacagtcgactttatagaccaggaactgtcacgcttcattgccgctgggaagctccactgcaagatagacaaagttgctggcgtcttggaaacgaaccgacctgatgctaggaacgccttctaccaggcaaccatcaagcaaggagactttttgctgaaccgcatccagaagctgtcacgagttatcgacctgtaggggagagcccttcatgcaggagcttgccttggttcctggagtgtacgggcggtgcttgactttcaatgggtctcagttgaagaagcttttagggatat

SEQ ID NO: 12407 - DNA, 379 bp, Zea mays
  Clone ID: LIB3150-089-P1-N1-C5
tcgcaacttcacagcgtatcatcgttttccatcgctcctactcctatcatccagaaaatctgagcggtattgatggcgcccaaggcggagaagaagccggcggcgaagaaggtggcggaggaggagccctcggagaaggcggctccggcggagaaggcccccgcggggaagaagcccaaggcggagaagcggctacctgcgggcaagtccgccggcaaggagggcggcgacaagaagggtaggaagaaggcgaagaagagcgtggagacctacaagatctacatcttcaaggtcctgaagcaggtgcaccccgacatcggcatctcctccaaggccatgtccatcatgaactccttcatcaacgacatcttcgagaagc

SEQ ID NO: 12408 - DNA, 368 bp, Zea mays
  Clone ID: LIB3150-089-P1-N1-D1
ggaatattcagcttatgttggctgtttctgccagacggacaagatctgacatagtcataaagctaccagaaaatacagagaatacttggaacacattttggaatatctgacatcatttctgtatcgcacagagccattgcaagacattgataagatttttttaaagttggagagtgaattcgaggaacaatgggccaatgaaggaatacttggatgggggaataaagggacagaaaaagagtctgaaatagatctcgattactacagcacagttgaagaacttgttgagcttgggccagaaaaattaaaacaggctgtagctgctcgaggtttgaagagtggcggtactgctcaacagcgtgcagatc

SEQ ID NO: 12409 - DNA, 408 bp, Zea mays
  Clone ID: LIB3150-089-P1-N1-D3
ctccttcggcccttcctctctcccatctcggctagggttaggtcgtctcgccaagtcgccatgatgcagcagcccccgccgcagcagccgcagccgggcatggcgccgcctccgcctccgcaggctgctggcgggcagccaccgcagtggggtgggatcccgccgccgatggcgcagcagtacggcgcaccgcctccgcagcagcctccggcgatgtggggccagcctccgccgcaggcgcactacgggcaggcaccaacccctcagcagtactacgccgcgccgccggtgccggtgcaggcgccagccgcccccgctgcggcggacgaggtcaggacgctctggatcggggacctgcaatactggatggacgagaactacgtcttcgggtgcttttcgaacactggg

SEQ ID NO: 12410 - DNA, 162 bp, Zea mays
  Clone ID: LIB3150-089-P1-N1-D4
ttgtttcagcgcagcgcctctctgctactgtggtggctgacgccggcggggtgtgagcgaactgcgagctgctgccacccctgctgccgcggtcgaccgccggccccggaccgagatggacgctcggtgggcggtgctgctcgcgctgctggtcgccagcgg

SEQ ID NO: 12411 - DNA, 133 bp, Zea mays
  Clone ID: LIB3150-089-P1-N1-D5
tagattttgaagactatctctcatatttcaatgccaaaggcgttcggcacagggctttaaaaattcaaatattaatttacaacttcacaagttgtatgcaaaacaacatctacttatataaccacataagtag

SEQ ID NO: 12412 - DNA, 404 bp, Zea mays
  Clone ID: LIB3150-089-P1-N1-D6
tgcttggtgctccctctctgcagatctcccttcggagtcgtcgaggaaccccttcacagcgcgtaagatggctgaacaggaggccccagtcgtggttgaggcaccaaccccagttcttggggagcctatggacttgatgactgctctgcagctcgtgatgaagaagtcaagtgctcatgacggacttgtgaagggtctccgtgaggctgccaaggccatcgagaagcacgccgctcagctttgcgtgcttgctgaggactgtgaccagccagattacgtcaagctggtgaaggcactctgcgctgagcacaatgttcacctggtcactgttcctgccgcgaagactcttggcgagtgggccgggctctgcaagattgactcttagggcaaggcaaggaaggttg

SEQ ID NO: 12413 - DNA, 385 bp, Zea mays
  Clone ID: LIB3150-089-P1-N1-D8
ttgagaccatggcggaccagctcactgacgaccaaatcgccgagttcaaggaggccttcagcctcttcgataaggacggcgacggttgcatcacaaccaaggagcttggaactgtcatgcgttcactgggtcagaacccaacggaggctgaactccaggacatgatcaatgaggtggatgccgacggcaatggcacgatcgacttccccgagttcctcaacctcatggcccgcaagatgaaggacaccgactccgaggaggagctcaaggaggcgttcagggtgttcgacaaggaccagaacggcttcatctctgccgcggagctccgccacgtgatgaccaacctaggcgagaagctgaccgacgaggaggtcgacgagatgat

SEQ ID NO: 12414 - DNA, 359 bp, Zea mays
  Clone ID: LIB3150-089-P1-N1-E1
cgatgtcaccaagggacccgtccagatcaactggttcaagggagggaaaaccaacatatgttacaacgctgttgaccgcaacatcgagtctggcaatggcgacaaggttgcaatgtactgggagggtaatgagcccggtcaggatgggaagcttacctattccgagctcctggagaaggtttgccagcttgcaaattacttgaagagccttggtgtcggcaagggtgatgctgttattatatacctaccaatgttgctggagcttcccattgccatgcttgcctgtgcccgcattggtgccgttcactcggttgtgtttgctggcttctcagcagattcgctagctcaaaggattgtcg

SEQ ID NO: 12415 - DNA, 385 bp, Zea mays
  Clone ID: LIB3150-089-P1-N1-E11
tctttggtaatcgccctattaaattgcgtgggggttacttgaaggagaggacagatgttgaggctctgcaaagacaaaagaatcatgtccaaaggaagcctaaaattcccaagaagagtgttctttacaagtagagatatataggccctaccgagggtgaagggcagctcatggatgcgttgctgccttgagatgatgctacttctggaatgtcttcactctctgcactactagggggcggaaatcacgcaagggctgttgtttcatgcaaattgcaacgagctactgctgccatctgatgcaatttgagctccgtgttactgatttccatagtttgcgttcatccatttgtggagctggagtactgtcatggctactgactaac

SEQ ID NO: 12416 - DNA, 398 bp, Zea mays
  Clone ID: LIB3150-089-P1-N1-E12
ttcgattttgactttgaaccctgtgggtacggcatgaatgcgatccatggctctgcattctccacaatccatgtgacgcccgaggacggtttcagctatgccagttatgaggttatgggcttggatgccactgctctgtcttatggtgaccttgtcaagagggtccttcggtgctttggcccctcggagttttccgttgccgtgaccatcttcggcggtcgtggccatgccgggacatggggaaaggcacttggtgcagaggtctatgactgcaacaacatggtggagcaggagctgcctggaggcgggctcctcgtgtaccagagcttctgtgctgctgaagacgctgttgctacctcgcccaaatctggtttccactgctttgacggcgagaacgt

SEQ ID NO: 12417 - DNA, 394 bp, Zea mays
  Clone ID: LIB3150-089-P1-N1-E3
gtccctcgccttcgccgccgaatacgagactgcgatctcgggttcaccgcagcgcacagagcagacccgactcccggcccgatccgcgctctcctctccgtcgcttcagtcatggcaggaatggcacctgagggttctcagttcgatgctaagcactatgattctaagatgcaggagctgctgagcaccggtgagactgaggagttcttcacttcatatgatgaagcttttgagagtttcgatgatatgggcctgcaagagaatcttctgagaggcatttatgcttatggttttgagaagccatctgcaattcagcagagaggaattgttcccttctgcaagggtcttgatgtcattcagcaagcacaatctggtacaggaaagacagcaacct

SEQ ID NO: 12418 - DNA, 404 bp, Zea mays
  Clone ID: LIB3150-089-P1-N1-E4
ttactcctcgcgccgccgccacagcaacccttgcagccccaatcccccacggcgaccatggccggcgcgcaggagtccctctccctggtgggcacgatgcgcggccataacggcgaggtgacggcgatcgcgaccccgatcgacaactcgcctttcatcgtctcctcctcccgggacaagtccgtgctggtgtgggacctgaccaacccggtccactccaccccggaatccggcgtcaccgccgactacggcgtccccttccgccgcctcaccggccactcccactttgtccaggacgtcgtccttagttccgacggccaagtcgcactctctggctcctgggacggcgagctccgcctttgggacctattcaccggtcttaccacccgccggtttgttggtca

SEQ ID NO: 12419 - DNA, 291 bp, Zea mays
  Clone ID: LIB3150-089-P1-N1-E6
aattacccgagcgcgatgcggtcgtccaatgggcagaccacgctcaaatcctttctcttcaagcccaggtatgccgtctgattcgcatccatcccaattttcgccccctccgggccagcacttcaatctccgttccttgcattctcctattcgtgtgttagggttgtcgatggagtaccgtcaccaccgccggcggcggtgatggaggcgccgatctgttcgccggagccgccgaaacgggagattgtcagagtcaccaagacgaccattaaggagaaggcgagcgcgttc

SEQ ID NO: 12420 - DNA, 404 bp, Zea mays
  Clone ID: LIB3150-089-P1-N1-E8
tcttaaatcgtggagtggaaaccctactcgggggcttccgcagacgtcggcggcgaattcccccacccaattcccactctccgctcgacagatccatacatgatgggagaggccaaggagaacgacgtttatgaggaggagctcctggactacgaggaggacgacgacaagacggtcgatggctccgctgctaagcccaccggagaggtcgcaaagaagggctacgtcgggatccacagttccggtttcagagacttcctgctcaagccagagctgctccgtgctatccaggattgtggttttgagcatccttccgaagtgcaacacgagtgtatccctcaagccattcttggaatggatgtattctgtaagctaaatctgggatggggaaaactgctgttttt

SEQ ID NO: 12421 - DNA, 339 bp, Zea mays
  Clone ID: LIB3150-089-P1-N1-F11
tcttccacatcacattgaacaagaatgctgtctgtgggtgacagcagtgcattgtctccgggtggtgtccgcattggcgcgccagcaatgacctcgaggggtctactggagaaggatttcgagcagattggggagttcctccaccaggcagtgaccatctgcctgaacatccagaaggagtacggcaagctcctcaaggacttcaacaagggcctggtgaacaacaaggacattgagaacctcaaggtccaggtggagaagtttgccgactccttcgacatgcctgggttcacgcttgagagcatgaaatacaaggagtagatatgcctctctcatgcg

SEQ ID NO: 12422 - DNA, 183 bp, Zea mays
  Clone ID: LIB3150-089-P1-N1-F4
tgcttcttctccgttgccgtatgcccctggcgggagcgccatccacagctgctggaataaaaatgacagaaaagaaactttatagttcgatgaatgggcagtttgccgtgggtttggaataatttggactttgtcttctttcgctactgttgtcgtaccattgtcttaatcgatttgtggatt

SEQ ID NO: 12423 - DNA, 407 bp, Zea mays
  Clone ID: LIB3150-089-P1-N1-F5
ttacctcgcctgcgatctccgtagcctccggcgcgtcgagcatcgatcatgtcggcctactgcggaaagtacaaggatgagctcatcaagaatgctgcctacattggcacccctggcaagggtatccttgctgctgatgagtccactggcaccattggcaagcgcctttccagcatcaatgtcgagaacgttgaggagaaccgccgtgccctccgtgagctcctattctgctgccctggtgctctccagtacatcagcggtgtgatcctcttcgaggagaccctgtaccagaagaccaaggatggcaagccttttgttgatgtcctcaaggagggaggcgtcctccctggcatcaaagttgacaagggcaccattgaggttgttggcactgataaggtgaccaccac

SEQ ID NO: 12424 - DNA, 306 bp, Zea mays
  Clone ID: LIB3150-089-P1-N1-F6
ttgtttctgactgaccacactagcgcagcgcgcgcgaggagcaaaggggggcatccgctatcgcgcgcgcgccatgtccaccaggccgggccctttgactgaatggccatggcaaaggcttggaaacttcaagtacttggtgatggctcccgtggtggtccacggcgcgcggcgggtggtcgcgcggggctgtggcgacatcgacctggccttcgcgcttattcctgccgtcgctgctgctgcggatggtgcacaaccagatttggatcagcgccgcgcgctaccagacggcgcgcgtgaagcacc

SEQ ID NO: 12425 - DNA, 345 bp, Zea mays
  Clone ID: LIB3150-089-P1-N1-F7
tactggacgagcttactctcaaaccatctacactcagtcatgtggaggctagtgcaatcccgtttgctgctttgactgcatggcgcgctttacatggtacggctcgtatttctgaaggacaaagagttcttgtgattggtggaggaggagcggttggattagctgctgttcaacttgcggtggctgctgggtgtgtggtttctgctacctgtggaacacaaagtattgagcgagttatgggagttggtgctggacaagctattgactacactgctgaggatactgaagcagcaattaaaggaaagtttgatgcttgtttagacaccataggagtacctgagacag

SEQ ID NO: 12426 - DNA, 354 bp, Zea mays
  Clone ID: LIB3150-089-P1-N1-F8
tctttcagttcgagagagagagagagagagagggggataaagatgtcgtgggtggggcaccaccaccacaaccagccggctcccccggcgtcgggccccaaccaggtgttcaagatcttttgccgcgccaacgagaactactgcctggccgtccgcgacggcgccgtcgtgctggccccggtcaaccccaaggacgaccaccagcactggtacaaggacatgcgcttcagcacccgggtcaaggacgaggaaggcatgccggcgttcgcgcttcgtaacaaggccacggggctcgccatcaagcactcccttggccagttccacccggtcaagctcgcgccttttagtcccgga

SEQ ID NO: 12427 - DNA, 311 bp, Zea mays
  Clone ID: LIB3150-089-P1-N1-G1
tgtccttgatctttttggtgatgaaactgaggagggcatgaaagcagctgatgagcgtgctccccctgccaaggcctcttttaaaaagaaagaaagtggtaaatcctccgtccttatggatgtcaaaccatgggacgatgagactgatatgaagaagctggaggaggctgtccgcagtgtccagatggagggtctgacttggggagcatcaaagcttgtgcctgttggatacggcatcaagaagatgactatcatgttgacaattgtcgacgatcttgtgttcatcgacactctaattgaggaccacctta

SEQ ID NO: 12428 - DNA, 93 bp, Zea mays
  Clone ID: LIB3150-089-P1-N1-G12
aaataaaaaaaaataaaagtgaaaaaaaataagaaaaaaaagaaggaaaagatagaaaaataatatgaaaaaaaaaaagataaaataagggag

SEQ ID NO: 12429 - DNA, 429 bp, Zea mays
  Clone ID: LIB3150-089-P1-N1-G2
tggtaccctatagagtaaccccacgcgcccgttctcggttggcgccgatcacgtccttcttgtggctcgttaaaccatcttatgtatctcgctgtgcgtgcgtgcgttcatgcacccgtgcaggaaactgccgggatctgtggagggccaaaaagcagggtcgcgtcaaactcaaaccaaaactgaaactggggaggatttggcaaacgcagggggtcaggaacgcaccgcgtgctctccttgcaagctgttgcacatgcactcgatctgatgagcaacaccttgcaagggggttggttcgggcattgactctcttgctctgtcctcccgtcgtcgacctgccactctctcctcggtccatggccgggctgtagtagaagctcgttcgtcagctagctagctaggagcttagaccatgcatgcatgcat

SEQ ID NO: 12430 - DNA, 319 bp, Zea mays
  Clone ID: LIB3150-089-P1-N1-G4
gaaaaatttaaattcgctagaagtatgttgtttaatgggagacgccctggcatcaatgatggcataggcttccaaaggggagacaatgtcaaacttaatgctgaaagggaaatgtgcccttgggccatttctaaagtattttggtgattgagtgccaacacaagtgcttaaatgtgaatctatgcccatggatgaacaaagtgcaaatcaagagcaaaggtatgtttctaagacttagtacattggttttgtgtactaatatacttgtctaagtctcagaaacaaaatgaataagaaaagagaagagttggctgtgtac

SEQ ID NO: 12431 - DNA, 136 bp, Zea mays
  unsure at all n locations
  Clone ID: LIB3150-089-P1-N1-H2
ttcatatcggactcgagacggggaaaaccagggcgcagttatctggatctctgaaggtttgtttaatgtaaagaaatggtggtccatcatctactcaaatttttttctctttnaaaaaaaattaggggtatcaaat

SEQ ID NO: 12432 - DNA, 165 bp, Zea mays
  Clone ID: LIB3150-089-P1-N1-H3
actcttgcgtcggcgtctgcagcacgaccgtgtccagatcatcgcccacgaccagggtaaccgtaccacaccctcgtacgtcgccttcaccgactccgagcgcctcatcggaaatgcggccaagaaccaggtcgccatgaaccccatcaacaccgtctttgatgc

SEQ ID NO: 12433 - DNA, 346 bp, Zea mays
  Clone ID: LIB3150-089-P1-N1-H5
ttaatctctctagcccaaactcgaccgcctggggtggaggtaaatacactctgggtcggccaaacctaccccagccgccgccgccgccaccgccacctgccccagcgcgccgccgccgcagccaccatgggtcgcgtccgcaccaagaccgtgaagaagacctccaggcaggtgatcgagaagtactactcccgcatgaccctcgacttccacaccaacaagaaggtgctcgaggaggtctcgattctgccctcgaagcgcctccgcaacaaggtggctggcttcagtacccacctgatgcgccgcatccagcgcggcccagtccgcggcatctcgctcaagctgc

SEQ ID NO: 12434 - DNA, 299 bp, Zea mays
  unsure at all n locations
  Clone ID: LIB3150-089-P1-N1-H6
aagctaaatcctctnagtcgactcactcgtcgtctttattcgccgccgctcgcctctccgagcgggtttataatacaaatcaggagggtccaaaaaatcggccccgtggccctggtgaactacagcaaagactatggccgcctcgtcgtcatcgtcgatgtggtcgaccagaacatggcacttgtggacgcccctgatatggtcaggtgccagattaacttcaaacggctcttacttactgacattaagattgacattaaacgcgttcccaaaaagacaacccttatcaatgcttattt

SEQ ID NO: 12435 - DNA, 205 bp, Zea mays
  Clone ID: LIB3150-089-P2-K1-A11
cgtccgtattcccgggcagccgcccttttttttttttttttttttattttataataattattatttttttttttgaaaaaaaatttataggggggttttaaaaaaaaaaaggggagaggattatttaataatttataataattaaaaaaaaagaagtataaaaaaaaatattgtaataaaaaaaaatttttaaaaaaataaaatt

SEQ ID NO: 12436 - DNA, 389 bp, Zea mays
  Clone ID: LIB3150-089-P2-K1-A5
gtccgtattcccggtgcgccgccctttttttttttttttttttctttagtggggaacatcaacctttgttcactctttcataaagaccataatgtgaaatgtaactttaagcattgctgggtacaggaggtgaacaaaacctgcgctctagagcgttgccgtcctacaaattattatgcatcaagcgttaacttttcccagcgcaaaaaaagacctatttcgcctgtctaatgagttcctctcatcataaggatgtcggtcattttttccgttaagatttaaaaagattcgggtacttatttctcgtccgtgtgttacattttcacttctccaattttttatcttagtgtactcatataattattatttatcactgggctttatattta

SEQ ID NO: 12437 - DNA, 83 bp, Zea mays
  Clone ID: LIB3150-089-P2-K1-B10
accgtttccttaattcccggtgccggccgccctttttttttttttttttttataaatcatcaaactttttttttgtttttaaa

SEQ ID NO: 12438 - DNA, 252 bp, Zea mays
  Clone ID: LIB3150-089-P2-K1-C12
cctgcacgtaccgtccgtattcccgtgtcgccgcccttttttttttttttttttattttttttagagcacgttttttcaaaatattataaggcaaagacaacacaggacattcttttttcgctacgggtcacatatccacaagtttataaacaataataagtacagccttctaacatctacaatcttttcataaacgcttgaatctcccttgcttcacctttataaactctaatgtaccttcatcttacttt

SEQ ID NO: 12439 - DNA, 244 bp, Zea mays
  Clone ID: LIB3150-089-P2-K1-E11
gcacgtaccgtccggattcccgtgcggccgccctttttttttttttttttttttcatcatttattttttttttttttttttctttttcttaaattttatttggttctttttttcattcacagagggaaacatacacattaaaaaataacagataccacactgtcgtacataaaaattccaaaactttaaacaactttaaaaaaatattaagccaaaatttcaaagataatacaatttatttacc

SEQ ID NO: 12440 - DNA, 425 bp, Zea mays
  Clone ID: LIB3150-089-P2-K1-G1
cgtccttattcccgctcggccgcccttttttttttttttttctttattttttctcttttcccgcttttaactagcatgaattaactgaaaattgttaagccttttacatattgttgaagcttaacccttacccaaaatatcccaaatacatttttctcccgtgtttccacatatctgttattacacctttattttcatccattctacttttgtgcttttataacgtttaacttgcttttcttttctttacactggatatttttaatctcttttaatttttttttttttaaaatttactctattttgcttttctttctttatcatttacaatatttccttatcttttttctcaccttattattaactctaatatttatactaattttttttttattcttttccatatatttctttttttttaatat

SEQ ID NO: 12441 - DNA, 323 bp, Zea mays
  Clone ID: LIB3150-089-P2-K1-G2
ctgcacgtaccgtccgtattcccgtgcggccgccctttttttttttttttttttaatataaatagttacgttgattatctaacaccaaaacacttgcaatgtcggtgcaggtctgaagcgtagaacggggcacagatgaccagatcatgctcccaaatcatcctgctacaaaacttggtacagcatggttacaaacaaatgtttcacagtttgatgattttgacaaatgggacttgacgctgcaccgtatcaccttacgccttgagcttaccaaagaaccttagcttttaattggtagtcttgaagcgaccatgcccaaattt

SEQ ID NO: 12442 - DNA, 60 bp, Zea mays
  Clone ID: LIB3150-089-P2-K1-G6
ttccctttgcggccgccctttttttttttttttttatcttaaaaaacttatactcttttt

SEQ ID NO: 12443 - DNA, 250 bp, Zea mays
  Clone ID: LIB3150-089-P2-K1-G7
tttttctttctcttgcattctacgtcatatcgtgttgtatattttcacctaaatggaggtcactctccttctttttacaacttctttactttgtaaaccctttcgtttcctaacttaatctcctttcttcacattctcctttttccatctttcttaatatctattaggcctctactcgatcttctcttccaactaatttctcattcttaatttctattgtttctctcccttttatctcttctttaatctc

SEQ ID NO: 12444 - DNA, 251 bp, Zea mays
  unsure at all n locations
  Clone ID: LIB3150-090-P2-K1-A6
ggccgcccttttttttttttttttttctccannaacgaaagaaacacttttgtgtgcaagctgcactgctaaaatagggcagcattaattagtaccaattgtgaacacagataattcacatgattacaaactcaaagtcgtgcggacgtgacgcaaggttatctacatatagcatgttcacggcagctattacctacgagacgggttctctacttgcttttcacgactaacaacataaacagtttataagc

SEQ ID NO: 12445 - DNA, 322 bp, Zea mays
  unsure at all n locations
  Clone ID: LIB3150-090-P2-K1-B7
cggaatncccggtgcggccgcgggcgctgacctcgaaggcctcctccacgtcccgctgctatgttgccgaagcggtgggtgatgagcggcttgacgtccaccttgccgctgcgcaggaagtcgatgcacagcggccaggtgtccttgtaccggaacacgcccaccacgttcaccttccgcgccgccgccgtcgtcagcggcagcgtcatcttgttgtggcccatcccgaccaggcacaccttcctgccgggccgagtcgtctacagcgctcgcgacatggtcttgttttactctgctcagttcangcttacatcgatttcct

SEQ ID NO: 12446 - DNA, 445 bp, Zea mays
  unsure at all n locations
  Clone ID: LIB3150-090-P2-K1-C3
tccgccctttttttnttttttntnnnntttaaacagtacggccattcttttttagttaaangcacatcgccccaaggaggcattattacttcacatgatcgagtaccagggtaatgtacattacttagttaaacagcagctgtgtttcgatacgacgcgatttctatcataatcctcaattcaatatacggtcccaacactgcccccaacaaacaaacccaagctaaattattcactgcatgcaatacgccaaggacatgcacgagctcacggattacagaaccaaatgaggcgcaaactttggtgcccaaatgaccaaatcagaacatgacgaacttttagaagccctgctcgaacaggaaatcgtcgagcctctccaccaccatggtgcattgccctgaaaaaaaggttcgtctaaacaccaataataaggaatgccggtttt

SEQ ID NO: 12447 - DNA, 133 bp, Zea mays
  unsure at all n locations
  Clone ID: LIB3150-090-P2-K1-D2
aagaataaattattttatgtacctggccggtaccacctaaccnnancacagtcttgctgctaacagtcgacgttacctttgatcagctgccatttcgatcacctgccacagttttaatctatacatttacact

SEQ ID NO: 12448 - DNA, 51 bp, Zea mays
  Clone ID: LIB3150-090-P2-K1-F10
atcccgggcggcccccttttttttttttttttactttcttccctttttttt

SEQ ID NO: 12449 - DNA, 154 bp, Zea mays
  Clone ID: LIB3150-090-P2-K1-G8
gccgccctttttttttttttttttttttttttttttctttccttttattatttttttctccttttctttttttaggggaatactttaacaacctgggggtcctactaaataactacccccacaccccaactaattccctttaaccctcaaaaac

SEQ ID NO: 12450 - DNA, 112 bp, Zea mays
  Clone ID: LIB3150-090-P2-K1-G9
ccggtccgtattcccgggccgccgcccttttttttttttttttttttttatttttacatcatttttttttttttttttttttttcttttcttttgcgtaataattacttccc

SEQ ID NO: 12451 - DNA, 144 bp, Zea mays
  Clone ID: LIB3150-090-P2-K1-H9
ccgtccgattcccgggcggccgccttttttttttttttttatttttttttcattttttaaatttttttttattaaataaataattatttggggggggtttttagtacgaatgttggggtatatttttcttaaaaaaaacccaaa

SEQ ID NO: 12452 - DNA, 365 bp, Zea mays
  Clone ID: LIB3150-091-P1-N1-A1
ctgttttcggtttaggagccgttggtcttgccgctgcagaaggtgcaaggattgctggagcgtcaaggatcattggtgtcgacctgaaccccagcagattcgaagaagctaggaagttcggttgcactgaatttgtgaacccaaaagaccacaacaagccagtgcaggaggtacttgctgagatgaccaacggaggggtcgaccgcagtgtggaatgcactggcaacattaatgctatgatccaagctttcgaatgtgttcatgatggctggggtgttgctgtgctggtgggtgtgccacataaggacgctgagttcaagacccacccgatgaactttctgaacgaaaagaccctgaaggggacc

SEQ ID NO: 12453 - DNA, 386 bp, Zea mays
  Clone ID: LIB3150-091-P1-N1-A3
gcttccacaacgacaccgaaccggcgatatgccgaccgaaagcgtgaaatggcagaaggagctctttacaccgcatagagattgacactagccaacctccgattgattagaagactgagctgtacacactaactggtgtaccacctgaacgccaaaaaattatggtgaagggaggaatattgaaggacgaagcaccatagctgtactttgcgagtgaaagacagtcaaaagttgatgatgataggcacggctgatgagattgtgaaagctaccgagaaaggttcagtgtttgttggggatctaccagaagaagagcacgtgattgcactgtggcacagtgctagcctcgataaccttgggaatacatgctatatgaaatgcacatt

SEQ ID NO: 12454 - DNA, 389 bp, Zea mays
  Clone ID: LIB3150-091-P1-N1-A4
gccgtttatagagaaggaaaatttcactaacatcgtagcttctgttaaagatgggggacccccgcccgttcttctacatgtccgtctgcggtgcccaaggccaatcgttctgaagtggaaatggcggaccacggtaaccaaccgacctggcttaataagctcgcggtgcagatgcacctgaactcgatcatctctgaaggtgagcgggtccagtaacatatgcccatctgtctaatgttaagaaaggagattaggcacaaggaactacatgacacacagcctttcgggaccttcaatgagtgtatgcactggcataaatgtcccagcgaggcagacccccgtatgtgctaatgctcctggtgagaaaggatgcaagaacttgatgattg

SEQ ID NO: 12455 - DNA, 391 bp, Zea mays
  Clone ID: LIB3150-091-P1-N1-A5
gcgtcccccaagaactagtaaacatggcaaaactgttgagcctgttcttagccctctcctttgtagcagctatgtttgccataggctctcatgctgatggagactgtgagaatgacctccaaagcctgataagtgactgcaagacatacgtgatgttcccagctaatccaaaggtccctccttcggatgcttgctgtggtgtcatcaagaaggcaaacgtttcttgcttgtgctccaaggtcaccaaagaaactgagaaggttgtgtgcatggagaaggttggtgatgttgctgagcagtgtaagaggccatttgagcatggctttcagtgcggaagctacaaggttccagcaaactgatgataccataagagggaagcgtttggcgtagt

SEQ ID NO: 12456 - DNA, 397 bp, Zea mays
  Clone ID: LIB3150-091-P1-N1-A6
ttagtttttaccaggccgaagaaaaacaatggtggggccaagctatgggtgggcagggggaatttgaggagcatgctgagaatgcaaataccttgcctgagagcacgagcaatgtgaacaagactgtcctctacgggctttacaaacaagccacgggtggagatgtgaataccgatcgcctgggcatattctaccaaaaggacagctccaagtgggatgcctggaaggctggtgatggcaaatcgaaagatgaggcgatgaatgactacatcaccaaggtgaagcagatccaggaggaggctgacgcctgttaaaagtctcttaatagtgatgccaaacagttatttgtcagatgagctttgtgccatttcctcattagaagcatatcattcgtttc

SEQ ID NO: 12457 - DNA, 409 bp, Zea mays
  Clone ID: LIB3150-091-P1-N1-A7
tggtcttcgggtataaaacacgccaccggggccagttcttcgtctccggcaggttagagagcccgcacctcgcggagctcgacctcgccccccacctcttcggctcccaccctgtggctggctcgtgggacccctgcaaggccctgcctttggagcgggcggccaccgccgtgtgggagttcagctgcgtcgtgccttcgcagcacgaatcgctggatttcaagtttgttttgaagcgaaaaggtgataatcctcaatacattattgaggagggacctaaccgaccattgggttgccagagaaatgaatttgagatggggaatgcgttgtttaaactcaacgaaaggaaggaggtacttgagtgcaagggtcaggttgagacagaaatgttatccccatttgacttggc

SEQ ID NO: 12458 - DNA, 378 bp, Zea mays
  unsure at all n locations
  Clone ID: LIB3150-091-P1-N1-A8
agcagcttctgcttgctctggggggaaggagagagagagagagcgagagagagatctagtagagaggctagtaggtggtcctcgaacgaagatgttggcggtgttcagcgggcaggtggtggaggtgccggcggagctggtggcggcgggcagccggacgccgtcgcccaagacgaaggcgtcgcagctggtggggcgcttcctggccgcgtccgagccggccgtgtccgtgcagctcggcgaccacggncanntgaaagctaccaagaacagcccagtgtttgttggggctctaccagaacaagagcacgttattgcactgtgtcacagtgctggcctctatatccttgggactacatgctatatgaaatgcacatt

SEQ ID NO: 12459 - DNA, 405 bp, Zea mays
  Clone ID: LIB3150-091-P1-N1-B1
cagcaacgctcgctcgacactgtcactagctagttgctctactagagggcgggtatagagctgcctgcaatccgccgctgagaagggaggatcggaagcgacgatgaggtcgtttgctcctgtctttctgacggcggaccgggcctggctggagctggcgggcaccgcgcagggcggcaacttctaccaagacacagagatgacctggggcgatggccgcggcaagggagtggacggggggcgcgggctggacctgacgctggaccgcacgtacggctccgggttccaagccaagagcgagtacctgttcggcaagatcgacatgcagatcaagctggtgccaggcaactccgtggcacggtcaccaccttctacctgtcgtcccaaggcgacgcgcacgacgag

SEQ ID NO: 12460 - DNA, 278 bp, Zea mays
  unsure at all n locations
  Clone ID: LIB3150-091-P1-N1-B10
gctcacctcggcgatggcatccgcggcggccgnggagtgggaggcggcggcgcggaaagggctggtggcgcgcaagccctgcttcgggctacctaccggctggccaacctggctccccgggctcctctaccttcgcatggggcaaggtcccttcgacattcacgtcgacaccttctttcccgatgccgaacacataccatatggtgaaattggggattgggtgggtttcaacaacgagaaaaggggcgtgaatgagtatctcaagggtgagaaaaatg

SEQ ID NO: 12461 - DNA, 405 bp, Zea mays
  Clone ID: LIB3150-091-P1-N1-B2
taccacgtgacagcaccatcccgcctcatcgcgacggggatatatggaggaggagggggcaaaccctaccgccgatccgggcccagatcgccatggccgcccccaacagcaacgacgcggccagcgccagtggcaccggcccggctggtgaggaggacatctccatcgaggcgttggcgcggcgcgtgcaggagcacatgaccctcagttccaaccccgccgctcgccgccacaagttctgggaaacgcagaccgtcggccagttacgcgacgtcgccgacacatcgctaccggacgggcccatcgagccgcccacgccactctccgaggtgcgcgccgacccctacccgctacccgacggcttcgagaggctcacctgcgaccctgatgacgacgcgcttcttg

SEQ ID NO: 12462 - DNA, 340 bp, Zea mays
  Clone ID: LIB3150-091-P1-N1-B3
gaccaggtaagcagcagcaggaaccctagcaccgcggcatccgcagccatgggtatggacctcgttgccggtgggaggaacaagaagaccaagcgcacagcgccgaagtccgacgatgtttatctcaagctccttgtcaagctctaccgtttcttggtcaggaggaccaagagcaacttcaatgctgtcattctcaagaggctcttcatgagcaaaaccaatcgcccaccaatctccatgcgccgccttgtcaagttcatggaaggaaaggagaagaacattgctgtgattgttggcacagtcacagatgacaagaggatccaagagggtccagcaatga

SEQ ID NO: 12463 - DNA, 205 bp, Zea mays
  unsure at all n locations
  Clone ID: LIB3150-091-P1-N1-B4
gcgacgaagctgatccttaagtcaccacgcgtcgcggggttcacggccgcgctaatgcgccgcttcgatgctgggctgtatctactactttggctgcacgtattgtgttggacgcataagaagacgtgtactttagtagttggtttgtagaccaacctttgggaataaaataaaatcccccccanggaaaaaatttgttggtttt

SEQ ID NO: 12464 - DNA, 396 bp, Zea mays
  unsure at all n locations
  Clone ID: LIB3150-091-P1-N1-B5
tccgccgccgccgaaggacggaaggagaagagggtacggccgtctccttgcccccatggcccacgagaagaagctgtccaacccgatgcgggagatcaaggtgcagaagctcgtcctcaatatctccgtcggggagagcggcgaccgtctcacccgcgccgcaaaggtgctcgagcagctcagcggccagacccccgtcttctccaaggcgaggtacacggtgcggtcgttcggcatccggcgtaacgagaagatcgcctgctacgtcacggtgaggggcgagaaggccatgcagctgcttgagagcggcctcaaggtcaaggagtacgagctgctcangaggaacttcagcgacaccgggtgctttggtttcggtatccaggagcacatcgacct

SEQ ID NO: 12465 - DNA, 378 bp, Zea mays
  Clone ID: LIB3150-091-P1-N1-B6
aagcttctgacgggagcccaaattcacctgcagatgctgaatgggcactgtctatacctatagaagatttcatatatataatgcatgatgtgcatgctgtaattggcgagctttcagaatcaggcagcttcattggacatgtgaatcagttactagggtcatgccccattgaagtatttaatcttgtgaaacaaagtatactgcaagctgttgaacctttaaaggaactgttgcctgcaataatcaatgttatgattggaatcataggtaagaagtctaacgaggacttgaagcacctgaaaggaataacagcgacatataggatgacgaggtaactttcagtcaggcactcttcatatgtatcaaggattttacatc

SEQ ID NO: 12466 - DNA, 362 bp, Zea mays
  Clone ID: LIB3150-091-P1-N1-B8
atcgaactctacctgcctttctctcgtcgctggcggcggcggcaggatggcggcttctactgcgaggacggtgaaggatgtgaacccccacgagtttgtcaaggcctactccgcccatctcaaacgctccggcaagatggagcttcctgagtgggttgacattgtgaagactgcgaggttcaaggagctccctccttatgaccctgactggtactacatcagggctgcatctgtagcaaggaagatctacttgagacaaggcattggtgttggtggcttccagaagatttatggtggccgccagaggaatggctcacgcccacctcacttctgcaagagcagtggtgccatttcacgcaaca

SEQ ID NO: 12467 - DNA, 225 bp, Zea mays
  Clone ID: LIB3150-091-P1-N1-C1
taaaaataaaaaaaaaaaaaaaaaaaaaaaaaaaaagggaaaaaaaaaaaagggggagagagaaaaaaaaaaaaaaaaagaaaaaaaaaaaaaaagagaaaaaagaaaaacaagaaagaaagataatgtatagatgaaaacggacagaaaaatgggaggagctggcggaaacagaaaagggcgggaacttttaccagaacacaaaaatgaactgagtggaaggag

SEQ ID NO: 12468 - DNA, 272 bp, Zea mays
  Clone ID: LIB3150-091-P1-N1-C3
aacaacctaacttcaatggctacaactctgcatcgggtatgatacgcatgtggtgcgggactaccaatggcttccaggaacatcttcgcgggtggcaactggaaatgcaacggtactggcgaggacgtgaagaagatcgtcaccgtgctcaaccaagccgaggtgccctctgaagacgtcgtcgaggtggtctagagtactccttaagattatctgatctaattaagaagatgttgatctttaactttgacgtctcacatcaaaactgatgg

SEQ ID NO: 12469 - DNA, 345 bp, Zea mays
  unsure at all n locations
  Clone ID: LIB3150-091-P1-N1-C6
ctttctcccggagtagattttattcctatggattcgtcgtatctgaggccgcggcggagcgtnaccacgacgaagtcggtcaggatgagccgcgaggataccctgaaagtgcaggtgagttcttctgtttgcctgtcattttagtcaatcaggcagggctggccgctgatcccggttcgcgctcaccctgcatgccatgtcttctcctgcggcgtttttctgtctgggcgcacagaccctcgagctcaaggtgaacatccactgcgacggctgccttaagaaagtcaagaaggtgcttcacaagatcgatggggtgtaccagagcacggttaatgcggcggaggg

SEQ ID NO: 12470 - DNA, 394 bp, Zea mays
  Clone ID: LIB3150-091-P1-N1-C7
ggcttctcctccccctccggttcgggttcgggttcgtgaggttctccggggttcggtttcgtgggtgagcggatcgagatggcggcgtcggatgttgagtaccgctgcttcgtcggcggcctcgcctgggccacggacgaccactccctccacaacgccttcagcacctacggcgaggtcctcgagtccaagatcatcctcgatcgggagacgcagaggtcccgcggcttcggcttcgtcaccttctccacggaggaggcgatgcggaacgccatcgagggcatgaacggcaaggagctggacggccgcaacatcaccgtcaacgaggcccagtcccgcggcggccgtggaggcggcggcggcggcgggtacggtggtggccgtggaggcggcg

SEQ ID NO: 12471 - DNA, 397 bp, Zea mays
  Clone ID: LIB3150-091-P1-N1-C8
gccagctgaagggcgcacaccccaaaaggggttcgaaaagggtgcctcatggttagctgggaatttgtcattctcaagggcaagagcatctttagaaggatcggcacctgtccctgtatacaaagagccatcttttgttatcccaggagttccagcaataattcaacatgaaataatgaataatagaagacatgtactgacaaaggataccactggttcagtcaaattgtgggagatcactcggggtgctgttattgaagattttggcaaggtttctttcgaagacaagaaaaaagagttgtttgagatggtaagcatacctgcttggttcaccatggatgctcgattagggtgcttgtctgtccacctggatactccacaatgcttttctgcagaa

SEQ ID NO: 12472 - DNA, 371 bp, Zea mays
  unsure at all n locations
  Clone ID: LIB3150-091-P1-N1-D10
aaaaaaaaaagggggggggggaaaaaaaaaaaananaggggaaaaaaaaaaaannaaaannaaannaaaanananaannnaggggaaaaaaaaaaaaaaaaaagaaggggnggggnnaaaaaaaaaaanaaaaaaaaaaaaaaaaaaaaaaaaaaanaaaaaaagaaaaaanaaaaaaaaaaanaaaagggggagaaaaaaaaaaaaaanaaaaaaaaaaaaaaaaagaaaaaaaaaaaaaaaaaaaaaaaaaaanaaaaaaaaaaaaaaaaaaaaaaaaaaaaaaaaaaaaaaaaaaanaaaaggaaaaaaaaaaaaaaagaaagaaaaaaaaaaaaaaaaaaaaaaaggaaggggagggggggaggagg

SEQ ID NO: 12473 - DNA, 364 bp, Zea mays
  unsure at all n locations
  Clone ID: LIB3150-091-P1-N1-D2
cttttgcgcttctcttctctcttctcccctgtctgcttctgtggactgtggatgtgctcactgcttantttggtgggttctgctcaccaatctcgctcgcagtatacgaagcctccatagtccatcatcctactgcactcggagaccacggacttggaataccaccctcgcccacagtcccacaccaggaaccatgaggaccatcatggcgaagagcccccacgactcctccttctcccggaggaacttcaagtggccggttcttgtcaagagcagcagccatggcgccgcagccggcggcggggaggacagcttcggcaagggcgcggaggacgccgacgaggacgaggcgaccatggcgttc

SEQ ID NO: 12474 - DNA, 401 bp, Zea mays
  unsure at all n locations
  Clone ID: LIB3150-091-P1-N1-D3
ctctcttttgagagagggggaagtaataggggggaaaaagctagcaggggggtttccttgatcccatcatcgtgctacagatcctttagttctagcaaggaggaggaaaaagagagagcaagcccatggatcccagccagatgatgttccccatctggggggcgccgcctcccgccgccttgaagccgccctccgatgaccacgccgccgcccccaacgcgcaggcgcagcccttcctcccccctcccaatcccaaccgcggctggaagcgcaagaatcccgccgccgccgnctaccagccaccggccctcggcgatctccaggtgcagaaccgcgccaaggctcgccgctggttcaagaacagcggnggcggcaaccccaaccaaagccgcaagtatttc

SEQ ID NO: 12475 - DNA, 392 bp, Zea mays
  unsure at all n locations
  Clone ID: LIB3150-091-P1-N1-D4
caggatggccgccgatcgcgcacggntgcggcgcgcgctgccggcagggtgctggacgaaatgcctccgctgcgcttcccctttcccctccacctcgcccgccgcctcctcgctctccagcctcagccgtgctgccacgtctccctttccgcccgcctctcgctcccggcgccttctacactcgccgccctcggcggcggtgcgcgtgcgggcgcagctgcagatgcgcttcttggcgagcgaggccgcgcggggcggtgtcggcgggcgcggggcagcagcggacagcgaggaggaggcgcaggagtgggcggtggagtgggaggacagcgaggacgacggctacgagcccgagatcggcgacggcggggacggcggcggggtcgcgctgc

SEQ ID NO: 12476 - DNA, 396 bp, Zea mays
  Clone ID: LIB3150-091-P1-N1-D8
gtcttattgaaggactttttgcggaggcggttgacctagtgagtggggtgcactccaaatatctcaataacgagaaacaaaaacttgaagcaacaggtattattgctaatggaatgggagaagacactagctaaccataaatccaagaaactgcagatggcaatctgcatatcaaggaaaaaactgcatatctcagggatctctgggaggaaacgagcttccagcttgaggagttacaacgactgaaatcttgtgtcaaacttgagaaagaaggattaaaatgcagaacatcgacatcgtggtctctgtcttttactcccaaattcacagatgagaaactgttgattgcttcctcgaaaccaaaggtcgctatcattcgtgaagaagggagcaatg

SEQ ID NO: 12477 - DNA, 398 bp, Zea mays
  Clone ID: LIB3150-091-P1-N1-E1
gaacttgagacctcgcccgcccaaatacgaaagcctcagatctcagtgaccagcgccgccgcttcgttcgtgtcgaggggagaagaggaaatggcggcgagcgagggcgtgctcctggggatgggcaaccccctcctcgacatctccgccgttgtcgatgacgccttcctggcaaagtatgacatcaagctgaacaatgccattctcgctgaggagaagcacttgcctatgtatgatgagttggctagcaacagcaatgttgaatatattgctggaggagccacccagaactctatcagggttgcccaatggatgcttcaaactcctggtgcaacaagttacatgggatgcattgggaaggacaagtttggtgaggagatgaagaaaaatgctcaagc

SEQ ID NO: 12478 - DNA, 129 bp, Zea mays
  unsure at all n locations
  Clone ID: LIB3150-091-P1-N1-E11
aaaaanaaaaaaaanaaaaaaaaaaaattttattttaaaaaaaaaaaaaaataaaaggggaaataaaaaaaaaaaagggggtgaagggtaaaataaaaaaaaaaaaaaataaaaggagtcctaacctct

SEQ ID NO: 12479 - DNA, 400 bp, Zea mays
  Clone ID: LIB3150-091-P1-N1-E2
cacaaactcgtgctctggtacactcgccggacgcctggagcgaggtcgcagtcgtacgaggacaacatcaagaagatcatcgatttcagcacagtcgaatcgttctgggtttgctactgccaccttgcgcgcccttcttccctgccgagccccactgaccttcatctcttcaaggatggcatccgtcccctctgggaggatcctgcaaaccagaatggtggcaagtggataattagattcaaaaaggcagtttcaggtcgattttgggaggatttggtgctagtggtagtaggcgaccagcttgagtatagcgatgatgtctgtggtgttgtgcttagtgtccgtttcaatgaagacattctgagcgtctggaaccggaacgcatcagaccatcaggctg

SEQ ID NO: 12480 - DNA, 397 bp, Zea mays
  Clone ID: LIB3150-091-P1-N1-E3
cgggacgcacgctagcagcacagaagcagccagagccatcccctctcctcggtacgcttcgcttcctcggcgccgatacctcctcctcctcctgcaccctagttcgtactcttccggcgcacgagctcgcccgagatggcgaacgcgagatcgggtgtcgctgtgaacgatgagtgcatgctgaagtttggcgagctgcagtcgaagaggctgcaccgattcataacttgcaagatggacgacaagttcaaggagatagttgtggaccaggtcggggatcgcgctaccagctacgatgacttcacaaacagcctacctgagaatgactgccgatacgcgatctatgatttcgactttgctactgcagaggatgtccagaagagcaagatcttctata

SEQ ID NO: 12481 - DNA, 344 bp, Zea mays
  Clone ID: LIB3150-091-P1-N1-E4
taactattattgacattgacttaaacgctgacggaggacaatttatctcttgaagtgacacaaccagaatcaatattagtgagaacactataattaggttggataggctgcgacaagttcttgtatctaaccaggtttataccgaagcattcacatgcccgcgtgtaaggtaccacccacgtgaagcatcatttgttgcacagtccaatgagaactacattgctattatttcagaaaggtcacccttcaagctgaacaagtacacgcggtttgaatgacatggaatgcgcggtttccgattgaaaacccagtatgcgcttggacaaaaagatctattgtttgca

SEQ ID NO: 12482 - DNA, 395 bp, Zea mays
  Clone ID: LIB3150-091-P1-N1-E5
ctcacgctttcgtgcaaggacaagagcagatgaccttgaggaacaacctgactgaaagcgctgattctgattccactgctcacaagccgatgatgaggggcccatcactcaatgggaaagcccacacttattttgagcagagacctgctatggataattggatgtcatcgggaaggcgtgaaaatgacttcaaggacacccgatctgccttcaaggatgcccgcaccgcctctcaatcatttggagatacacagggtttttttgtgcaagcttatgatgacaatcatcaccgtctctctttcaaaaatcagggttcaactcatcgcttcgcagatccgtacttctatatgcctcaacaatcgtcagtgacgggtgaatcaagcacaaggacacaa

SEQ ID NO: 12483 - DNA, 388 bp, Zea mays
  Clone ID: LIB3150-091-P1-N1-E6
gagttggtaggcttcttcaatgatcatgtgaaggtcaatgcaccacaaaagaagattcttagtatacaagtgtacggtggtctccattctgccgagtacgaaaccatagtgcaaaatgctccgccaccgccgtcgtgtgagataactgatatttatggcttcaggaggtcgaggcctttatatggatcattcaggggaggcgttggtcagatgaagctatagttcaacattttctcatcattctgtaaaattctgaaaaagagtcatctttctgttcaactgcatctacgttgattgttttttcattgcgaacactctagtaggccatttatctacggttgtttcactatatttattaagatattatgagaatttacattgccctggt

SEQ ID NO: 12484 - DNA, 392 bp, Zea mays
  Clone ID: LIB3150-091-P1-N1-E8
gtccgcccaaccctccaaaccaaggcgggcaagccccttccatttgccaggcggccacaccatctgatccccaattcgtttccacctatcgagccaaggtgcgacgacggcggtcgcagcgtcccctccctccctccgtaccgctgccgccggtctaccaaacggtgaaatatttacgtaagcgaatcagggtcttgaagatagcttccagatatgtggggttttgcatcaaatgcttgggcatccgggctggggaagaggagtcccccaaattgcacctcttcgagtgctgcttgttccgatgacgaagcatcctcgtgcacgagcagggaagaaggcctggaatgcccaatatgttgggagtctttcaatatagtggagaatgtgcctta

SEQ ID NO: 12485 - DNA, 358 bp, Zea mays
  Clone ID: LIB3150-091-P1-N1-E9
tttttcttgcggagtaagaagagtggcggcggcggcccggcggcgtgtataggcgtgttcccgagcagaggcccccccaaacgcgcagcgcacacaaacacacaccagcccagctccgagagatcatccggcggccggcgagatgagccgcggcacgggcgcgggttatgaccgccacatcaccattttctcccctgagggacgcctgtaccaagtcgagtacgcgttcaaggcggtgaagtcggcgggtgtcacgtcgatcggcgtccgcggcgcggactccgtctgcgtcgtcacccagaagaaagtcccggacaagttgctggatcagacgagcgtgacacactttgttccgatc

SEQ ID NO: 12486 - DNA, 391 bp, Zea mays
  Clone ID: LIB3150-091-P1-N1-F1
tgtcagttcgcttcgtgagttatctttatctcctctcgatcgatcgcttcctgcatcgaggcggtaaagcgccgcccagatcgccggaagcaagcggcgacctcaccagctccgagcagcagcagggaggctcgtggaaccattagtcgttttctggcagcggcatggaggggctgagctggagaacggtgtgttgtttatcggtgctctgggccgtgccgcttttccctcagctcctggagaagcgcatcgttgaggatctaatcctctccgttggatctgatggtggctctgctccagatgctgattccgccccagctgggggtgctgaaacttctgatgcccctgctgcagaggagaagaaggaagagcccaacgaggagtctgatga

SEQ ID NO: 12487 - DNA, 404 bp, Zea mays
  Clone ID: LIB3150-091-P1-N1-F2
ccgcctccccctccgctccttccagctcgctctgtaatctgcatcagcctcgcccgccgccgtcgccgccatggggaggggaaagttcaaggggaagcccacaggccgccgcaacttctccacacccgaggagatcgctgctggtacttcaggtcggccacgcacctttaagaagaaggaggaagaggaagatgaggaagaggtagaaagagaagagtctgaggaagaatctgaagaggattctgatgaaaagactaaacataaaggcactgagggtattattcagattgaaaatccaaacttggtgaaagccaagaatataaaggcccaagaagttgattttggcaagacaactgaactctcaaggcgtgaaagagaggagcttgagaaacaaaaagctcatg

SEQ ID NO: 12488 - DNA, 401 bp, Zea mays
  Clone ID: LIB3150-091-P1-N1-F3
gccgccatcgccgaagaccccattactccggccgcctccgcagccccggaggctggccgcctccgcgaagcacttaccgccctttccgaggcttgcgagtccggcaacttcaatgcttccgaaaccgcctccttcaccatctccgacattcttgacaccgcagccggcgtaagtggcgagctcgatgacgggagcgacgacagccaagacgcgtcgaggtcaggggcctacgaagtgctgcttcgcgaggtgctcgagttcctctctcgcccgtcatcgatctcgaaccagatggcccttgacgcgctctcgcttgtgcttcccaaacccgtggcgaagctaggggctcgaatggggagatgccccgatgttgccgcagctatcctaaagttcttcgtgac

SEQ ID NO: 12489 - DNA, 397 bp, Zea mays
  Clone ID: LIB3150-091-P1-N1-F4
gaaaactcggccccccgcaggatcttttggtccggacctcgtgagtcgctgccacgatcgaggcagggcgccaattgcggtggccaccacttccaatccactccccgcgttcgcctcgccgagctgttcttgctctgtcctctctccaactccacgatttgttccacacccggttcccgagcctccgcagcgcttcttgctgaaaaagggaactccgagttctccagctctggatcggcagagagcggtggttccttttgcggactctgaggtccagttcttgcttttgatttgtctcaccaacccaccagtcgggctgcaggcttagagctggaaggaataatttgagtagagaaatggggcagtgttgcagcagagctacggccccggactctgg

SEQ ID NO: 12490 - DNA, 398 bp, Zea mays
  Clone ID: LIB3150-091-P1-N1-F5
tacctcaccccacctatattatcccgtgccgcttgtctttcttgctccgcaggcagcgaaatccaatctagaagcgcccctctccctctctctctctctcttcgccgtccgaagctccgcaccccaatctaatcgacacctcgccgagatgggccgcaagttcttcgtcggtggcaactggaaatgcaatggaaccacagatcaggtcgagaagattgtcaaaaccctgaatgaaggacaggttcccccttcagatgttgtggaggtcgttgtcagccctccttatgtcttccttcctgtggtcaagagccagctgcgccaagagttccatgttgcggctcagaactgctgggttaagaagggaggtgctttcaccggtgaagtcagtgctgagatgc

SEQ ID NO: 12491 - DNA, 395 bp, Zea mays
  Clone ID: LIB3150-091-P1-N1-F7
ccctccagcgcctccaccctcctcgccgcctcactccctctgaggtcgcagatccgtccggttagacgaagccgcccgcacccatggcctccggtgagctcgcctgcacctacgccgccctcatcctcagcgacgacggcatcgccatcaccgccgagaagatcgccaccatcgtgaaggcggccaacatcaagctcgagtcctactggccggcgcttttcgctaagctcctggagaagcgcagcgttgaggatctaatcctctccgttggatctggtggtggcgctgctccagttgctgcttccgccccagctgggggtgctgcagctgctgctgcccctgctgcagaggagaagaaggaagagcccaaggaggagtctgatgacgacatgggc

SEQ ID NO: 12492 - DNA, 431 bp, Zea mays
  unsure at all n locations
  Clone ID: LIB3150-091-P1-N1-G1
gctgggttcctttaaagacattcactcgtctttggttttccanaaaccaagcgccatgccgggccggtgttcatacgatcggggcgtgacgcagttaaccaacgccagagaaggagtgcgttgggagagagagcagagcgcagcgatgaggagagcagtgagggccgccgttttggggacttattcaacaaccccatatgggctcggaaatcaggccagggaccttcgcagggtcgccatggattcatctgggaccgcgactggtgagtgcgagaactggggcacctataatcgctcgcacgtgacgtctggcgcgctcaccaaatcactgatcgccgtggtccggtctctgtgccacccaattgccgtcgagcaagccaccgtggaatcttgtgttcagcaagtagagatagctgagcaagaactcattg

SEQ ID NO: 12493 - DNA, 365 bp, Zea mays
  unsure at all n locations
  Clone ID: LIB3150-091-P1-N1-G2
acgcgacgaaacctgggttcctttaaagtcgttccactcgtcttttattttccaccccgcgcctcccagatcgggcggggttgtgtattaacctcggccgtctacttcgcagctaaggggaggggaaagtttaaggcgaaacccacaagcctccgaaacttcttgacacataacgagatcgctgctggtacataaggtcggccacacaactttaagaagaactgcgataatgaagatgaggaaaaagacaaagagaagagtctgactaaaaatgtgaagagcattctcacgttaagactaaacataaacgcactgatggtatgatatatattgaaaatacaaactcngtgaatgctaccaatata

SEQ ID NO: 12494 - DNA, 274 bp, Zea mays
  Clone ID: LIB3150-091-P1-N1-G5
tcgccctccgatctacaaggtttgctcgttcatgttctaggtgctggacaccttttgcttcgcatggctcgagcgctgcacagaccctgtttcgtggctccgctgctgtggctggcgttgttactggttgccgactcaccgcggggtgcgttctacttgcctggcagatacatgcacacatactcccaaggcgaggtgataacacgccaaggtgaactctctcacgtccatcgagacggagatgcctttcaactactacagactaccatactgc

SEQ ID NO: 12495 - DNA, 285 bp, Zea mays
  unsure at all n locations
  Clone ID: LIB3150-091-P1-N1-G6
ggcggggccggcgcgacgacgacggccgcggcggcgggggccggggcggcggccgcggccaacgccagcaacaacgacnacnaggccggcgcgggcgcgggcgcggacaccnngacgccgacgcagggcaccaggangccgancnncnnggnccngagcgcgccaacccggacgccggcccnggncnccaggaccaggacganggggaacacgccggaccaacagacgncagagccggccgcggaggggncgaccgcgagcgcggacgcggagacggaggcccgg

SEQ ID NO: 12496 - DNA, 332 bp, Zea mays
  Clone ID: LIB3150-091-P1-N1-G7
actacgccgacgatatcgtgatccgacgccccggaccccgcggcggcaatggacattgacgacgcggaacactaccacaccgcctacatgtccacagacgatatcatccaagcctcccgccttcaagacaacaacgaaccgacactaaaggactagcgccaacggaccaacctgcagttggaaaccctcaaggacaagatgaatgaaaaccaagagaaaatcaagctcaacaagcagcttgccctacctcgcccccaacatcggtgagatctcacaaatgaaccctgaagatgaagctgacgatgaagccgctaacactgatatagactcac

SEQ ID NO: 12497 - DNA, 380 bp, Zea mays
  Clone ID: LIB3150-091-P1-N1-G8
ccagcggggactgttggatttatacggagcggggacccacctactgcctcgccttcctcccatggcgccgcccctcgccgccgtctcatcgtcgtcgcccctattctctccttcatcatcccgccccatccgccgctgccatgcacctcctccttctatctccttcggccgctcgcccacggcggcggcggcggcagcggcagcggcagctgaatcctctgtcagcactcttctcgaggtgcgcggactcaccgcatccgtgaaggagactgggcagcagatcctcgccggcgtcgacctcaccatccgcgagggcgagattcatgcgattatgggaaagaacggctctggcaagagcaccctcacaaaagttctcgtag

SEQ ID NO: 12498 - DNA, 266 bp, Zea mays
  Clone ID: LIB3150-091-P1-N1-H10
agaaaaaaagacatcacaccgacacggagctattggggtctgggactgataaaaaaccatcccctcaataggaagatgttcacgctatctgtcatttcttcaatacgattcgtaaacagctcgacgagaacacaaagtctcggcggatcaatgacacatacttcatccagatgaaggagctaacaatgaatccccagcttgcaccacgtttgaggtttatggatcgtgatgtgattgatctcccgtcaaataaccgggtgcctcga

SEQ ID NO: 12499 - DNA, 119 bp, Zea mays
  Clone ID: LIB3150-091-P1-N1-H5
aaaaaaaaaaaaaaaaaaaaaaaaaaaaaaaaaaaaaaaaaaaacaaaaaaaaacaaaaaaaaaaaaaaaaaaaaaaaaaaaaaaaaaaaaaaaaaaaaaaaaaaaaaaaaaaaaaaaa

SEQ ID NO: 12500 - DNA, 300 bp, Zea mays
  Clone ID: LIB3150-091-P1-N1-H7
agatgtcgccttcttccagggcgccaacctgccgcagccagtcctcgcccaggtatggatgcacgccgatcagaacaagactggtttcctcggccgcccggaattcttcaacgcgctgcgcctggtcaccgtagcgcagagcgggcgttagctcacgcccgacatagcgcagtcggcactgtatggacccgacgcggctcgaataccaacttccaagatagccgcgggggcggctcgatcacagatggatgctgcgggggcgcctaggcctcatgggagcgctgcgatgacgcccacgcc

SEQ ID NO: 12501 - DNA, 356 bp, Zea mays
  Clone ID: LIB3150-092-P1-N1-A1
gtcccgctccttcgcccgcccgacgcgacccctggacctggagagagaggtcggcatggctgccgcggtggtcgacgacgctgggatggacgccgtccagaagcgcctcatgttcgaagacgaatgcattttggtggacgagcaggacaatgttgttggccatgagtcaaagtacaactgccatttgatggaaaagattgattctgagaatctgctacatagggcatttagtgtgttccttttcaactcaaaatatgagctgctactttagcaaaggtccgggacaaaagttacctttcctttagtttggaccaatacctgctgcagtcaccctttgtaccgtgagtctgagctta

SEQ ID NO: 12502 - DNA, 389 bp, Zea mays
  Clone ID: LIB3150-092-P1-N1-A3
tccacatcttgaaccgacgccgactccgcaggaggagacgcatcgtggagagcaagccaggaagctaccatttgggccaagtggaagaagaagcgcatgaagaggctcatgaggaagcgcaaaaagatgaggcagagatccaagcaggcagatcgagatggattgtggacctgattacatgcgtcggtacatacatttcttcggatgcgttggtagtgcctgtggagagatgtcaacctggcatggtgtcacggtccgccatcagatgaacatgttgcctgcacttcaatgggccacttttcatggttctagttgtatttgaatccagcgtttgccactaagataaatcagacttttgtttagtgaacctattatgagggagctttttt

SEQ ID NO: 12503 - DNA, 424 bp, Zea mays
  Clone ID: LIB3150-092-P1-N1-A5
caaaattggcagatgaggagagagagaaaggcaacgagttcttcaaggagcaaaaatacccagaagcaataaaacactacacggaggctctcaagagaaacccgaaggatcctagggtttatagcaatagggccgcctgctacaccaagttaggagccatgcctgaaggtcttaaagacgcagaaaagtgtcttgaacttgaccccaccttcaccaaagggtatacgaggaaaggtgcaattcagttcttcatgaaagaatatgacaaggccgtggaaacctaccaggctggcttgaagcatgacccgaacaaccaggaactgcttgatggtgttaagaggtgtgttgaacagatcaacaaggccaacagaggtgaaataagccaggacgaattgcaagaaagacagaacaaagctatgcaaga

SEQ ID NO: 12504 - DNA, 410 bp, Zea mays
  Clone ID: LIB3150-092-P1-N1-A6
gtccgcaactcctctaaacccttcctctccctgcggcgccggcgccgacgtggccgtccactacctcctccgccgcggggtcgccggtggctcactgctccaccctatccgcggtctcttcgtcgcctccaaggagcttgggaggcgtccgttgggctctgcggcggcgggagacgcagcggccgagctgaggggcgcgcgggaggacgtcaggcagctgctcaaggccacctcctgccatcccatcctggttcgattaggttggcatgatgctgggacatatgacaagaacattaccgagtggcccaagtgtggtggagctaatggtagcttgagatttgaagtcgagttgaagcatggggccaatgctgggcttgtgaatgctctgaagctgatccaacctatcaagg

SEQ ID NO: 12505 - DNA, 259 bp, Zea mays
  Clone ID: LIB3150-092-P1-N1-A7
ttatatagagcccacccactttttttttagttctacatacgttgtctaactgcatttttaattcgggagggcggcctccctattccaaaccctaaacctaaaccttttacccgtcgccgacaacatcacctacacctccgacgaccacaggccctatcccatctaaaccgacattcttctcggactgaaacaatatcccaccactactatgtcagtaaggagaatgagctcgacctctcctccaactatgtctttacca

SEQ ID NO: 12506 - DNA, 414 bp, Zea mays
  Clone ID: LIB3150-092-P1-N1-A8
ccactctccgcttcccgctccgatcgacctgctccctccccaccaccgagcccatggcggaccagctcaccgacgaccagatcgccgagttcaaggaggccttcagcctcttcgacaaggacggggatggttgcatcacgaccaaggagctgggcactgtcatgcgctcgctggggcaaaatcctacagaggctgagctccaggacatgatcaacgaggtcgatgctgatggcaacggcaccatcgatttcccagagtttctcaaccttatggctcgcaagatgaaggacaccgactctgaggaagagctcaaggaggccttccgtgtgtttgacaaggaccaagacggctttatcttggccgccgagcttcggcatgtcatgacaaatcttggtgagaagcttactggtgagg

SEQ ID NO: 12507 - DNA, 309 bp, Zea mays
  Clone ID: LIB3150-092-P1-N1-B1
ttcacaacgatactatcatgctactccgggcgcttaaatatggggtgaggggatgtcatactacaacatgggcggcaaggtgctgtataagggcggaaccaaacgccacctcaaggttctgcgctacatcatacaaaagatgacgaatgcgtggatccgctgtctagccatgaagcactgagataatcgcatttatgatctcatatactaggagacccgtgacgggctcaagatctttcctgagaacgtcatacgcgactccgatacctacactaagcacggacgcaagatgaccgttaccgccatgga

SEQ ID NO: 12508 - DNA, 317 bp, Zea mays
  unsure at all n locations
  Clone ID: LIB3150-092-P1-N1-B12
tcctctaaancnacccacctttttctcccatcccaacaacacanctatcaccagcctttttaaaaaccacaggccaaccccataacctcttcctcnctttctccctctactcaactccactatctacacttctaccatcttactcactccctccctcccttatctcaacttcactattctctcatccaccatctcacatattcacataaaacatttcatttcacaactaatcccaccaatcacaaatcatatatattcattcttcctaatcctttacctaacaccaactataagaccattcttttttcttttatcac

SEQ ID NO: 12509 - DNA, 393 bp, Zea mays
  Clone ID: LIB3150-092-P1-N1-B2
cccaagtcaatgaggatgacttaacacttgagaggcttgaagattttcggtctcagctcaaggatcttgaaaaagagaagagtaataggttggagaaggttcttgattatgtaggcatagtacatgatctttgtaccgtcttggggatggattttctcagcacagtgattgaagttcatcccagtttagatgactccatcggtgacaactgtaagagcattagtaatgatacattgtcaaaacttgacaatacggtagctacacttaatgaagataagaagttgcggctaatcaagcttcaagaactcgctggtcagctctatgatctttgggatctcatggatgcccccaaggaaagaaggcgcatgtttgatcattgtacctgcaacagat

SEQ ID NO: 12510 - DNA, 407 bp, Zea mays
  Clone ID: LIB3150-092-P1-N1-B3
ttatagcaaggaacgtttcctcctcgcccagagcatcagcgcccttggctggggcattgaatggcttcaggctttctttcttgtgcttgacgatatcatggatgactctcacactcgtcgcggccagccttgctggttcagggtgcctcaggttggcttaattgctgcgaatgacgggatcatccttcgcaaccatatctcacggatccttcggtgccactttaagggcaaaccttactatgctgatctccttgatttgatcaatgaggttgagctcaagacagcttcaggtcagcttctggaccttatcactacccatgagggagaaaaagatctaacaaagtttaacataacagttcacggtcgaattgttcaatacaagacagcctattattcattttatctgc

SEQ ID NO: 12511 - DNA, 351 bp, Zea mays
  Clone ID: LIB3150-092-P1-N1-B4
gagggacacggcctgtagtcccgtctttgagacgcaacttccatcggtgtgaagctatacattcaggggcgcaatgtccgccaacgtcaccgaggtaaacctcaaccccaaggtcttaaaacgtgagtatgcagaccgtggggagatggtgattcatgctcagagcctgcaacaacatctacagacacaaccaggggcggtaactttggatgagatgctgtcttgacatgttgtgcatgcccaacttcttgaacaataacctgtgacactggtgagggcggttcatgctcttagagatcatacgcgcccatcagagaacgagggaaccatatcagtgttcagtgcggaagc

SEQ ID NO: 12512 - DNA, 417 bp, Zea mays
  Clone ID: LIB3150-092-P1-N1-B5
tcttcgatccggactagctgcccctgccttggatacaagcatagcatggagggggccaattcttcttggtggacaagctcactggacagttggacttgtagcaaccttgatggctattagtagcatcattgctgctgatacatctgctttcctttgtggaagggcatttggtcgtacccctttgactaacataagccctaagaagaccttggagggtgctttagctggcctagctggctgcgtactgaccactgtgctgctgtcgactgccttacgctggccaaggtcgcttttgagtgccacagcttatgggatcctgatcttcctgggttcgttattcggagatcttgttgaatctctgatcaagcgcgacgctggtgtgaaggactccggatcgctcattcctggtcatggtgg

SEQ ID NO: 12513 - DNA, 411 bp, Zea mays
  Clone ID: LIB3150-092-P1-N1-B6
cgttgccgctctcgtcccacccctcaccggccgccggtcgccgccggcatgtcgcgtaccgcagatttgccgcagaagaatcagatccaaaccccgtatcttctcttcttccccctccttccccattgtccccgccgctgccatggccaccggcggcgccgcccccaccgcctccgatgccgggtccaagaagaagttgctcatcttcgactccgaggaggatctcgcggtttctcttgcgaagtacactgcggagctgtcggagaagttcgcggccgagaggggtgccttcaccgccgtgctctctggcggatccctcatcgaggcactcaggaagctgacggagccgccgtacctggattcagtggactggagcaagtggcacgtcttctgggtggatgagagggtcgt

SEQ ID NO: 12514 - DNA, 422 bp, Zea mays
  Clone ID: LIB3150-092-P1-N1-C1
tccacttctcacctcaatctcgcgagaagcgaagccggaggaggagggtgcgaggagatcgcgagcagccggagccggagccggagccggaggcctagtagatgaagacgttcgatccgtggccggtcttcttccgccgggagtggaagcgcaattggcccttcctcacggggttcgccatcaccggcttcatcatcactaagatgacggccaacttcaccgaggaggacctcaagaactccaagttcgtccaggagcacaagaagcgctgaccaaccaggtgttgtccgaattgcctgtctggacagccagttatgttatgctgtttgaatgaaaaattagcttctttttcttcatctaaatgcgtgcagcctatgctccatctgtaatgtaataagaggcaactgacttgatccaaaagc

SEQ ID NO: 12515 - DNA, 409 bp, Zea mays
  Clone ID: LIB3150-092-P1-N1-C2
gcaaagtgagggcggcgagatgaacggcggcggggaggacgggaagcagcagccgcacctggtactggcgcacaagctgttcctcctgtcgcactccgacgtcgacgacctcgccaaggtcgacctacgcgctgacgtgttcgcggcagtcaaatccgatgacatggcagctctgtacgagtcgttggcggcggacggcgtactggagacggacgcggcgctgctggccgagatgcgcgccaggatcgacgaggagatccggaagctcgacgagaagattgctgatgcagaggagaacttgggtgagagtgaagtgcgtgaggcccatctcggcaaatccttatatttcataagggttggggagaaggagaaagcactggagcaggctaaagttactgaaggaaaaact

SEQ ID NO: 12516 - DNA, 349 bp, Zea mays
  Clone ID: LIB3150-092-P1-N1-C3
ggaatttctgaaaagcattgaacatattcttgagcgggagaaaaattgggtttggtggaagcgagatgggtgtctcgcatttgaaaagccgccctttgaaaagaaaccaggtcaggctggtgccagaaaacggaagccaaggtggagacttggaagcaaagagctcagccaactttggaaatgggcagaacaaaaccccaatgtcttgactgatcctgaccgtgtccgcatgccatcaattacagaatattggaaaccacttgcagaagatatggatccatctgctggaattgaagaggagtatcaccacaaaagtaatcgggtgtactgttggaaaggactacggttt

SEQ ID NO: 12517 - DNA, 418 bp, Zea mays
  Clone ID: LIB3150-092-P1-N1-C4
ttacgtacacaaccccactcaaccggcagggaggcgctcttcgtcggcggaggccatggtttccctcaagccgcataagaggctcgccgcgggagtcctaaaatgtggcaaggggaaggtgtggctcgaccccaacgaggtctacgagatctcgatggccaactcgcgtcagaacattcgtaagctggtgaaggatggattcataattaagaagccacagaaaatccactcaaggtcccgggcaaggagggcccatgaggccaagcagaaggggaggcactcgggttacggtaagcgcatgggtaccagggaggctaggctccccaccaaaatcctttggatgcgcaggatgcgtgtcctcaggcgtctgctgcgcaagtaccgtgaagcaaagaaaatcgacaagcacatgtaccat

SEQ ID NO: 12518 - DNA, 412 bp, Zea mays
  Clone ID: LIB3150-092-P1-N1-C5
tcgtttatggcatcgagatatatcagcttatatgcagaagcacctccatcgtgcagttcatctgttacaaatggcattaaggtacgctcatctgctgtctttgtgccagaacatcctgggaggcctggggaaaaatttatgttcacttactcaattcgcatgtcagttccagaggcatgcatgctaggtggcgtgtactattcttcctgccagctttgctcccgccactggaccatcagatcgtgtgacagggttgtttctgatgtgagcggaggaggggttattggagagtatcctctactgttacctggcgaggatgagtttgtctactagagttgcacgccactgccccaagtacctggatctgtggagggctctttttcgtttgtgcctggcaagttgagccgacctg

SEQ ID NO: 12519 - DNA, 400 bp, Zea mays
  Clone ID: LIB3150-092-P1-N1-C6
tcgatcacacgctgaacgcttccgccccggcgggaccttccccgctgtgcgtgcctccgctcgcctccgcttccgttccgcgccctgcccccggaaggcaagcaaagccctcgctacttgcggagcgtcgttggtcaaaccctagcacacgtacgagcaggccagccccgcccgctcccattcccaggccctcatccatggcggcgctctccgtgcccctccacgccgccgccggatcccgcgccgccgcggccgaccccgtcaaggttccgtgcgtgaggagcactggttcagcccattttggccgcgcctccccctccgtcgcggtctcctcttcggctgcgaggcgcatcgagccgattagagcgatagctacacaggcgcccccctgccgtgccac

SEQ ID NO: 12520 - DNA, 409 bp, Zea mays
  Clone ID: LIB3150-092-P1-N1-D1
ttcttcttgcaggacccatgcagtccgttggtctcgcttgtacctcgcggcggctctgatgctgatagatggcagcaaaagggtctcatgccttctcctggcacacctgtacaagcaatgcacaaagcagataggaagtatgttattgggaaagtttctgatgaggaagaggcgaaacagaggcagttgaaagctattcttaacaagctgactccacagaacttcgaaaaactttttgaacaagttaaggaagtcaacattgacagtgtagcaacacttactggggtcatttcacagatatttgacaaagctttgatggaaccaacttttctgtgaaatgtatgctaatttttgcttccatctggctggagccttgcctgacttcattgaatacaatgaaaaaatcaca

SEQ ID NO: 12521 - DNA, 412 bp, Zea mays
  Clone ID: LIB3150-092-P1-N1-D10
gtttctggatcctcattgtttacatcaccgccaagggaagggaaggagtgaggatccagaaaccaagttgccagccccttgaatttaccatattttgtcactggtttatttctaccataccatctgatagtggacagccaagcgactttcctttcatcatttctatctctctcgatcaatgattatttatgtactgctataataatctgccgcgtgctggcaaaattctgcctccctagaacaaccaatggcatttggtttgctggtaaattatctcttggctccgtgtgttccctgtggctgtctgtctataatttatgttcattattttgttccggagaccgaagaatctgaggacttgtatgtatctgggatcaagatgtgaatctcgcatgtaccagatgacagaact

SEQ ID NO: 12522 - DNA, 372 bp, Zea mays
  unsure at all n locations
  Clone ID: LIB3150-092-P1-N1-D12
cttttatcctttataatcnacnanctttttattttcatcaacacaccccaaatattccgcacgttttcttaaaaaagagaaacaacttttcttatcatttatttnttttaaatctttatcataatcattaacataactctttcctattttaaattgtcatccactcacaattttacacaacatactatctctaaacatatatcttataatccttcttttcctaactatttaactaacttcacattaattatcttactctcactttcaactttacattcatcaaaacaatctttccatctattataaataaataaacaactctctattatacctcttatcttaattattcaccaattaatttaattttcacca

SEQ ID NO: 12523 - DNA, 423 bp, Zea mays
  Clone ID: LIB3150-092-P1-N1-D4
ttcccgctccgcctccactcctcgcgccggtgccgcatctcctctacgggtgggaaggagagaaagagggcgaaatggtgaagcacaacaacgtcatccccaacgggcacttcaagaagcactggcagaactatgtcaagacatggttcaaccagcccgcccgcaagcagaggcgccgcatcgcacgtcaaaagaaggctgtgaagatattcccacgaccaactgctggccctcttcgtcccattgttcaatgccagactctcaagtacaacatgaagtcaagggctgggagaggctttacccttgaggagttgaaggctgcgggcattccaaaaaggcttgctccaaccattggcatttctgtggatcaccgccgcaagaacaaatcccttgaggggctgcaggccaatgtccagaggctta

SEQ ID NO: 12524 - DNA, 306 bp, Zea mays
  Clone ID: LIB3150-092-P1-N1-D5
ttatcaaattgataacaccatacactcaccggaggcttcctgaattggtgggggcactatcaacaacacctaattggatctacactacacatcactccaacaaacagcaacatttgtgtctcttcgccatactgatcgacatgttacggcctattaacacttctaactgtcacaacatctctggcactattccatcccatgaaaaccatcacgaaacaccctacaccaagattgttgtaatactattcaatatccacccttattacacagtgcttgcgattgctgacatcattaggaaaaaaatca

SEQ ID NO: 12525 - DNA, 414 bp, Zea mays
  Clone ID: LIB3150-092-P1-N1-E2
tgattgactacaacctggccaagcaccccaagcttgacgtgcccaacgctggaggtgattaagctcatgcagagcttcaagtccaaggagtatgtcagggagaccttctcctggcagtactactactggtacctcaccaacgatggcattgagcacctccgcagcttcctcaacctgccgtcagaggttgtgcccaacaccctcaagaagtcctccaagcccccgtcccgtccctttggctctggcccaccgggtgaccgccccaggggtccccctcgctttggggaagacagacctaggtttggggatagggatggttacagaggaggtccacgaggtgcaatgggtgattttggtggtgagaagggtagtgctcctgcggatttccagccatcttttatgggtagcagacct

SEQ ID NO: 12526 - DNA, 409 bp, Zea mays
  Clone ID: LIB3150-092-P1-N1-E3
tctactatctgaaagaaacccgccaccaggtgtggtccttccttctctcgaatccaaccgcaatcctttcagcttcagcttcttctgctccttctctggtgaggaggcgtggtgagagactgcgactgcgcgatggaggcgtcgtcgtcggcgttggcgctcgtggccgccgtgctcctcctctcctccccgctcgctgcgtcagatttctgcgtgtgccgttcggaccagccgacggcggtgctgcagaaggcgatcgacttcgcgtgcggcccgcagggcggcgccgactgcacgcccatcctgcagggcggcgggtgctacagcccggacaccgtcgtcgcgcactgctcctgggccgccaacacctactaccataacaacaaggccaggggcgccacctgcgact

SEQ ID NO: 12527 - DNA, 409 bp, Zea mays
  Clone ID: LIB3150-092-P1-N1-E4
caaccagctgcggagggaggaaccctagcggaacactgtgcaggtgacgggggcgcgctaccggtcacgggggatacggcggcatcgtcccctcctccatccccggcgcggcggcgccagcagccggcctgcagggacggtctccagtctccagaatccagattcagagcttgtccctgttttgtggtgtgctctgttgtactgtagcctgtagccagggcaaattaaagctacaatgcaggctgcctactatgcaaaggatcttttggttgggagtgcagttgaccgaagttggaaaatacttctgatacttacagatttcacagaggtcttgtttattttctactattttccttcaagcacgtgtaatagtacgtttgacaaacaatttgctgacgagcacaggttt

SEQ ID NO: 12528 - DNA, 405 bp, Zea mays
  Clone ID: LIB3150-092-P1-N1-E5
gtcgcgaccgccctacgccacgtgctcgatccagcctcgtcggcttgttgggacccgtcaccggcggtcagcacccaccaggttcataaatggcagagacggtgttcaccccctctttggaaggtatgaagcatgtgaaggcagagaacggagtcattctcaccaagcccttccttgatgtctgcaagcaaatcttgcctgtcctggataaatttggagctgctatggcaattgtaaagaatgatatcagcggcaatatcacaaggctggaaaacaagtattcttcagatccatcaaagtatggacacttgtacagcatggttcaggaagaagttcaaaacaagaccgcgaaaggttcctcaagctgcacaaatggtcttctgtggctcacgagggccatggatt

SEQ ID NO: 12529 - DNA, 402 bp, Zea mays
  Clone ID: LIB3150-092-P1-N1-E6
ttgaactgaaatcgaatggtatcctgggggagacctaacacagaagggtgggaaaaacaaacctaaaaaaggttcaaagaatacgaagcctatcactaaaaccgaggactgtgagagtttcttcaactttttcaatcccccgcaggtccctgaagatgatgatgacatctatgaagacactgctgatgagctgcatagtcaaatggagcatgattatgacattgggaccaccataagggataagattatccctcatgcagtttcctggtttactggtgaggctgcgcaaggtgaggattttggtgagttgggcgatgatgatgaagatgatgatgatgaagacgatgacgaagatgatgaggatgaagaagaggatgatgatgaggaagaagatgatgagga

SEQ ID NO: 12530 - DNA, 229 bp, Zea mays
  Clone ID: LIB3150-092-P1-N1-E7
tttttaaaaaatacggcctccatcatatctttaatttacttcacaaacttatattcttataccttcatcatccattttttgagaatttatacaaaaattttatttctcaacctctattaaacaccataactcaatttctccatttatcccttaaacaactttattacttcatttattaacaacctatttatcatatttaacaactcttcttcaattcaatcctttatta

SEQ ID NO: 12531 - DNA, 195 bp, Zea mays
  Clone ID: LIB3150-092-P1-N1-F1
cagaccgggagtagtcgacgcgccgtcactgaatcctcagatcacgggtagccgtaatcacgccactctgctgactcccggcgagcagtgtaacattttccttcagccatgggcaaggagaagactcacatcaacattgtggtcattggacatgtcgactctggcaagtcgaccaccactgcccacctgatctac

SEQ ID NO: 12532 - DNA, 419 bp, Zea mays
  Clone ID: LIB3150-092-P1-N1-F3
tagctcgctcgctctccttgcaactccagtgcgtgctcactgccactggcgagcagatcgagctgctccgtctcacaaaccctcttgctttgctgctgcacctgcaagtctgcaaccgcgcacacagagatgtcgacgacggtgagccgtgcgtccctcgaccagaagctcgccctcgccaagcgttgctcccgagaggcgaccctcgccggagccaaggcggcagcggtggcgactatcgcctccgcgatccccaccctggccagcgtgcggatgctgccgtgggccaaggccaacatcaaccccaccggccaggcgctcatcgtctccacggtggctgggatggcctacttcatcgccgccgacaagaagatcctgtcgctggcgaggcgccactcgttcgagcaagcccctgagca

SEQ ID NO: 12533 - DNA, 260 bp, Zea mays
  Clone ID: LIB3150-092-P1-N1-F5
tcactccgccacacctcgtcgcgtcgcgtcgtgtgcgcctagaagatgggcgtaccagtcctctacaccgagatcggcaagaagaccagggatctgctgtacaaggactaccagacagaccacaagttcaccctcactacctacagctccaatggcgttgctgtcactgctactagcacaaagaaagctgacctgatcttcagtgagatccattcacagataaagaacaagaacatgaccgtatatgtgaaagcaaactc

SEQ ID NO: 12534 - DNA, 417 bp, Zea mays
  Clone ID: LIB3150-092-P1-N1-F6
tttcatttgtctttgttgggatctccttgcgagcacccgatgatagtggagattggtaaaacgttgattttcatgtgtttgcacatagaatattttgactcttggtgaactgtcggcagctgatacgaaagatggttcaagcaccgccgaggactccataattgacatagacatgttctattccacgaacttgtagaaagtttcaagatttgctctgttgcattttgtgttcagtattgcattcagtgttttgatatataatctagacactgcagaaatggaaagatgctgatggaggagacagacacggatgatagcatctcttttgttacttctgtaaaagtaaatgcaaaacgtgtactttcaaaggcaaagtctgcatgctccatgttccttggccttggggagagcaccata

SEQ ID NO: 12535 - DNA, 423 bp, Zea mays
  unsure at all n locations
  Clone ID: LIB3150-092-P1-N1-G3
ttcggatcgagaggataccagaggtactggagaagataagaaatatgggcgggatgatganaaggatcattctagggagaggggggctgggagggatgacaagtatggtgcttcaaaggtggcattgccggtctgggatgatgatagacatggaaggcctaatcggggtgactggaaatctgcttcttcaagggagcaaaggctggactgtggtgacagaagggattctacaagagtgaaaccaacagatcatgatgggagcaatgggggatcgggaaggtctttcatgcatggtcgttcaatgtctccagaagagcacaggcatcggggcaggcatgaatctcatccatcatcgagagtgtccagaagtgcagcacatatcgaggatattaactcgagaggaggtgaagcatcccggaatgg

SEQ ID NO: 12536 - DNA, 381 bp, Zea mays
  Clone ID: LIB3150-092-P1-N1-G4
tgtctttctcgaattgggggaagagagcgagagacgaatcgcatcgagccggagaggaagtcatagacagggaggagggcggcggaatctgcgccggcgggaggcaggcatggaggacctgagcgtggaggagctcgccttcaacctctccacctacaaagagcagctacgcgaggtcaagaagcttatcaaggagaagaaggatgatgctggaatttctgaatatattgatatggagaaggagcttcaagaggtcataacgtttaccgaagagattttggcaactgcaaagcaaactgagagtgcccagaatgttgcaggtctatcaccgccaagctattcagctggagtgcagtctgagggactggatgacctttcaca

SEQ ID NO: 12537 - DNA, 329 bp, Zea mays
  Clone ID: LIB3150-092-P1-N1-H1
ttttctccgtcatgtcgaagcgaggtaagggaggttcggctgggaacaaggggggcgtgtcactgattctaccggtggcggccacggtgaactgcgcggacaacacgggcgccaagaacctctacatcatctccgtcaagggcatcaagggccgcctcaaccgcctcccgtccgcctgtgtcggcgacatggtcatggccaccgtaaagaagggaaagcccgacctcaggaagaaagtgatgcccgccgtcatcgtccgccagcgcaagccgtggcgtggggaggacggtgtctacatgtactttgaagattatgctggagtgattgtg

SEQ ID NO: 12538 - DNA, 349 bp, Zea mays
  Clone ID: LIB3150-092-P1-N1-H3
gaggaggtgggcgccgaagacgtggagcagatcggcatggccgcgctgcaggtggagcggaacgttcgcgactcgggcagtggcatggaggtgaaagccatggtcgttggcaatgaccgcggggaggacgaggaggatgccgacgccgacgccgacgacgcggaggagccgtcgtcccccgtggagaaggaattcgagtatacggtggatgttacctgcgcgagtacaacgaagccagctacgtctgtggttgcacagtactttttggacggcaactcgggggggctgtattcaagggtcgaggcgctggaggcggacagggcggccctgcggaggtagatcttcgctc

SEQ ID NO: 12539 - DNA, 294 bp, Zea mays
  Clone ID: LIB3150-092-P1-N1-H4
tatcaaccttcttagggttgtataatatgaaggcaatgttgagactggtgtgaggtgtgagaggcctattgatgcatcaaaagtattctgagctaataataaagccttctccacggattttatgatttctcaaaataaaaaaacaaaacaacaaccattacccaaattaacaaaaacatgaaacagataatactgagactacttaaaaacacaacttcaacagcaagccgtccattttgactcgatgtctgtaccagtttatttaacattatttggggggggggggggccgccc

SEQ ID NO: 12540 - DNA, 197 bp, Zea mays
  unsure at all n locations
  Clone ID: LIB3150-092-P1-N1-H5
ttaaactantatcctctatantctacccaacatccttcttcttctccactcaccaccatctccacgaccttcttttaacacggatgccctcccatacccatntccacttaccttctcctccaccttctcctaacacctacattctctctctttaccatcacacaccctctctttttttttttatcttccacttacac

SEQ ID NO: 12541 - DNA, 93 bp, Zea mays
  Clone ID: LIB3150-092-P2-K1-A12
cccgggcggccgcccttatttttttcttttattttttaaacctcttttttcttttttattttttttacatttattggtgaattcttttttttt

SEQ ID NO: 12542 - DNA, 296 bp, Zea mays
  unsure at all n locations
  Clone ID: LIB3150-092-P2-K1-A2
tnnnnnnnnntngggncccagcaacaatgtttcgaaccccaccaatatgaaacactcgcaatatttttttttttcccaagtttggggggggaagaccccccaatttaatcctgtggctttgtgggggttctcccccaacattatttaaacacagtttcggacaacagggttgcggttttagatgatgaataacaaacggggacaaaacgggttaggtcacacatttttttaaggggggcctgggggtacatttttgcaactaaacccacatgcatgtgggttttctaggggggggg

SEQ ID NO: 12543 - DNA, 188 bp, Zea mays
  unsure at all n locations
  Clone ID: LIB3150-092-P2-K1-A3
cttttttttttttttttntcagtaaaacgttttttcactttttttnttattttttttgtttggtcttaggtttttttttttgaagaaaaaggtctgtagttagttcaatgtttccctttctgggtgggggccccaaattgtacctactcccccacttgggatgctctccctgttttgcccacattcct

SEQ ID NO: 12544 - DNA, 177 bp, Zea mays
  Clone ID: LIB3150-092-P2-K1-B12
ccgcacgaccgccggattccgggcggcgcctttttttatttaatttttaatttattttttggcatctgaacaaatgtaatctgcttatatgagcattgaaacatctcccgttagaaaattgataggattacacatccttatctctgtttcagacctttaaatgacatacaaactaat

SEQ ID NO: 12545 - DNA, 164 bp, Zea mays
  unsure at all n locations
  Clone ID: LIB3150-092-P2-K1-C4
accacaggncaaaaaaacaccaaaagaaagcccaaagggagggggcggcggccacaccaaaacaacaagacacccacggngcaaaaacaaaacaaaaaaaagagggaaagcgacaaaaggccgcacatagaccaaagggccaaaagcaaacgagagaagggcag

SEQ ID NO: 12546 - DNA, 195 bp, Zea mays
  Clone ID: LIB3150-092-P2-K1-C5
aaaaaaaaagaacaagggaacccggagggggggaaaaaaaaaacggagaaaaaaaaaacacgaaaaaaaaaaaaaaaagaaagaaaaagaagaaaaaaaagggagggcaaaaaagggggaaaaaaaaaggaaacaccaaaaagacaaaagaaaaaagggaaaaaaagggaggagaccaaagagaaaaggaacacc

SEQ ID NO: 12547 - DNA, 325 bp, Zea mays
  unsure at all n locations
  Clone ID: LIB3150-092-P2-K1-C7
ttgtcaagatgagaaccttttgttcttttttataatcaatttgtcgataacgaaagtggcattcactggaagcatttacaggcatgctttacacatctgtgaaacagntngntcatgaaaccaaacacaggctaaactgtttccttaattatcaggatcctgcctatatctgcggcttttatttcacactttatttatgggctgaatcgtcataaagacctcttgattcattacaatatgtattacattgagaactctgttgctatgccccgggaacaattaaccttctctctgccattgtgtggtaaacggtgtgttgaccttg

SEQ ID NO: 12548 - DNA, 361 bp, Zea mays
  Clone ID: LIB3150-092-P2-K1-D5
ctcccgtgcccctcactgtttagtggcgacgactgggcgacagtcgccgccgccgcccgctaggggccgtgcccctggtctccatcttcggcgcttcgcccaccagatatgagcagctggcaattcgattttgaggccattatttgataacccgggacaagtgcactggttacctgaccattttagctttttgagatggctacacagttgccatgcttcacacagctcagtccaccgtcttgtagttggataaaagatgtcgggaactgcaaggctacgcctgatagggtagccagaagtgcccgagctttgggccactgtcactttcggagctgtgcatgcccccggagtgcaaactttt

SEQ ID NO: 12549 - DNA, 364 bp, Zea mays
  Clone ID: LIB3150-092-P2-K1-D7
cggaatggccggtgcggccgtcgctctgttcgtggtaatcaggacacccagttttcgattttttgtgcacataaatactgggtgcaagggtatatttttacaaggccatgggtaccaaaatgtttgagtggtctaccatacatctatcttgctgacccttacatcctacacagaaaaattgttgtcgtgtggtcacagcaacccgcctgtgctactctttttttttcactcagattcattttattacaccttaagcccttaacttggggtgcataaaaggatgttctcaagaagcatatttacgtcaggaaagaatacacaccgtgtccagtacatgtttatatatactctatgcacacataag

SEQ ID NO: 12550 - DNA, 137 bp, Zea mays
  Clone ID: LIB3150-092-P2-K1-E5
cggccgccgacaccagggagcccggcgacgccagaggcaccgagcccacggacaagaccgggcggccggacagcacgcgccgaagggcggccagaaccgagcccccgagcccgcaacaagccagacccgcccgacac

SEQ ID NO: 12551 - DNA, 192 bp, Zea mays
  Clone ID: LIB3150-092-P2-K1-E8
aaacacccggttcggagggtgggcttggttccttactattttcaagggcgccacttcaaaaatactcctaaaagcttatttcaaggggaaccatcctgccctcggagtgcgtggtacattaaaattgtacaccatgcttgcgactttaaacatactatttccgcctagagcttggggaaaacaaatctcttt

SEQ ID NO: 12552 - DNA, 244 bp, Zea mays
  Clone ID: LIB3150-092-P2-K1-F6
aaaaaaaagggaaatggaagattaaaagatgggggggaaaaaaaaaaaaaaatttttataaggaaaaaaaaaagaaaaaccccagatttgggggggaaaaaacccaaaaaaaaaatatgggaagggagattaaacaaaaaacaaaaagaaagggggagggccgttctccactgggtagaataaggaaaaaaaaaaaaaagggataaaaaaaaaaaaaataaatttgggaaaaagctctaccgag

SEQ ID NO: 12553 - DNA, 89 bp, Zea mays
  Clone ID: LIB3150-092-P2-K1-G12
ccgcgaccgccgaattcccggcgccgccttattttatttatatacaaatcatctttttaattttttttttctcactaattcttcttata

SEQ ID NO: 12554 - DNA, 239 bp, Zea mays
  Clone ID: LIB3150-092-P2-K1-H3
gccgcccttattgttttaattagtaaaattatttttatttgaagggtttttactttttttcattgcgtagctacatagtgctctgttttattttatcctgattctagtaatttttttttggatcccgatttaaaaattttattcccggagcgaaacccaacttaatggccttgtcacccatcccccgtttgggccgctgtgcgtccccccaaatagtaccccacccagagtatttttaa

SEQ ID NO: 12555 - DNA, 244 bp, Zea mays
  Clone ID: LIB3150-092-P2-K1-H5
ctacgaaaagatatcagctttttcgaggcttaatttgaggggggccttaatagggggaatgtgcagaaatggcctcaacaaccacttgcccatttaacaccacgaaaaccctcagttttaaccatgaacagtttggaagttttacatatctgagaaaatagatggaactgcaccttttatgagccctcctactaatacttttcacagaccatataggctctggcattgtaatttttttaatcac

SEQ ID NO: 12556 - DNA, 198 bp, Zea mays
  Clone ID: LIB3150-092-P2-K1-H6
gtccgaacagtactaattaggcttgcgccaaaatagtgttcacagattacattctaacgaatgaaagtattaaaatgaataaaaaatgatgaaaacaagcgatttgaggctaatactcaaataccacagatatacactatgaggacgatctcacaggtacaagcaggcaaacaaaaatgtgcgaagaagaacaacggg

SEQ ID NO: 12557 - DNA, 345 bp, Zea mays
  Clone ID: LIB3150-093-P1-N1-A2
atcactttgcgtgcagcatcgattgggtcggaaatcgagggtttggtaagcgagatcgccgccggtgacagctgacagggacgagatggacgccggcggaggcggcgtcttggtcgccgttctctgcatgctgctggtcttcgccatcttccccctcctcctctggcgccgccgctccgatgccgtcaccgccgataaccaccgcgtcccgccccagcccctccaggaggatcaggtgctgcacggtcgcgcggcggcgcgacggatgcgtcggaggcctggggctgccggagcaagctcctctactgcgtcaactagccgcaatgctgtataggacgacgcgga

SEQ ID NO: 12558 - DNA, 260 bp, Zea mays
  Clone ID: LIB3150-093-P1-N1-A3
tatatgtcttgccactacacatattttgggagcgcattgcattccatctgaggtcatactattctaatttgtgaccaccgtccaccatactctctttggacatcaccatgatggagtgcatcaccgtccacataggccaggccgggattctggtctgaaacgcgtactgcgagctgtactgcctccagcatagcattcatgctgttggtcacatgcccggtgacaagaccattgtgggaggtgatgttactttcaacatc

SEQ ID NO: 12559 - DNA, 296 bp, Zea mays
  unsure at all n locations
  Clone ID: LIB3150-093-P1-N1-A4
gtttagaagccaggatccaaactccataagaaggaaacttgtgaggctgggaccatcattgaaacccctcctcttgtcattgttgggctcgtggcatatgtgaagactcctcgtggcctccgcacactcaactctgtttgggcccaacatcttagcgaagaagtgaggagaaggttctacaagaactggtgcaagagcaagaagaaagctttcacaaagtatgctctcaaatatgaaaatgatgctggcaagaaagaaattcagctgcagcttgagaagatgaanaaatatgcttc

SEQ ID NO: 12560 - DNA, 253 bp, Zea mays
  Clone ID: LIB3150-093-P1-N1-A5
tactttcgaggagctggatagaggccggcgactggaatcaaccgccgatcggagccgcggctgaagaggaggagcaagctcgagatggtgggtctcgtcggcggcagcacggcgcgggcggagcacgtcgtggccaacgccggaggagagacggagtacgtgcgccgtctgcaccgccacgcgccggccgagcaccagtgtactttcaccctcgtcaagcacatcaaggcgcccgttcacctagtgtgggagc

SEQ ID NO: 12561 - DNA, 395 bp, Zea mays
  Clone ID: LIB3150-093-P1-N1-A6
gcaccacaaggttggggagaccaatgaaccaggcatgtaccgcattaacgatgacctggaatactctgttgagatctatgaatggtctggaacaagctggaagccatatgttgctgatgatgtgcaactccagtttttcatgatgagtccttatgttctgaaaactatgtcgaatgacaacaagggtttatactcaacatccttcaaagttcctgatgtctacggagttttccagttcaaagttgagtaccagaggctgggatatactggtttgtcttttacaaagcagattccagtgcgcccttacaggcataacgagtatgagaggttcataacatcagcgtacccatactacactgcctcattttaacgatgtgtgctttcttcatattctc

SEQ ID NO: 12562 - DNA, 291 bp, Zea mays
  unsure at all n locations
  Clone ID: LIB3150-093-P1-N1-B1
gacaagagcaatgtccatgtggtgatggagctttgcccagccgggtagctcttcgatcgcatcattgcaaaggggcactacacagatcgtgcggctgctacaatctgcagagcagctgtgaatgctgtcaacattctgcacttaatgcatgtgatgcaccgngatctgaaacccgagaacttcctgcttgcgaccaaagangagaatgcaatgctcaaggccactgattgtgagctttctgtcttcattgcagaaagaaagatgtacagggacattgctggaagtgcttac

SEQ ID NO: 12563 - DNA, 368 bp, Zea mays
  unsure at all n locations
  Clone ID: LIB3150-093-P1-N1-B2
cttcagaccattagctttatctactccagagcgcagaagaacccgatcgacaccatgagggtgttgctcgttgccctcgctctcctggctctcgctgcgagcgccacctccacgcatacaagcggcggctgcggctgccagccaccgccgccggttcatctaccgccgccggtgcatctgccacctccggttcacctgccacctccggtgcatcttccaccgccggtccacctgccgtcgccggtccacctgccaccgccggtccatgtgccgccgccggttcatctgccgncgncaccatgccactaccctacttaaccgccccggcctcagcctcattcccagccacacccatgcccgtgccaaca

SEQ ID NO: 12564 - DNA, 271 bp, Zea mays
  Clone ID: LIB3150-093-P1-N1-B4
gtcttcagaccattagctttatctactcgagagcgcagaagaacccgatcgacaccatgagggtgttgctcgttgccctcgctctcctggctctcgctgcgagcgccacctccacgcatacaagcggcggctgcggctgccagccaccgccgccggttcatctaccgccgccggtgcatctgccacctccggttcacctgccacctccggtgcatctcccaccgccggtccacctgccgccgccggtccacctgccaccgccggtccatgt

SEQ ID NO: 12565 - DNA, 416 bp, Zea mays
  unsure at all n locations
  Clone ID: LIB3150-093-P1-N1-B6
cccgatcatcgcaccacctgtagcccacctagctctcgagtctcgacccagcgacgagatggccgcggtggatctgaccccaaggacgcccaagaaggcctacggcggcgacggcggcgcctactacgagtggagccccgccgacctgcccatgctctccgtcgcctccatcggcgccgccaagctctcgctcgccgncggcggcctctccctccccagctactccgactccgccaaggtcgcctacgtcctacaaggcgcgggcacctgcggcctcgtcctgcccgaggcgacgaaagagaaggtggtggcggtgaaggagggcgacgcgctggcgctgcccttcggcgcggtgacgtggtggcacaacggtcccgccgagccaagccgcctcacggtgctcttcctcggcgaca

SEQ ID NO: 12566 - DNA, 402 bp, Zea mays
  Clone ID: LIB3150-093-P1-N1-B7
tcgatcagtcagccgccccgccacagccatgcgcctccccgccggcgcacgcggtcgcgctcctgctcgcccgccgctccctctcctcctccccccgcatcccgcgggcgcacacagggatatggagcgaggcgccctcccggagctctcccttctctccgccgagcagcgcccgcaggtccttccacgggaccaggccggtggcggcaagggactactacgatgtgctcggcgtcagcaagagcgccagccaggcggagataaaaaaggcctattatgggcttgcaaagaaactccatccagacacaaataaaggtgatgcggatgcagaacgcaagtttaaagggttcaacgagcttatgagactttaaaggatgaacaaaaaagatcattatatgatca

SEQ ID NO: 12567 - DNA, 252 bp, Zea mays
  Clone ID: LIB3150-093-P1-N1-C1
tgctcatgtccgcggcgctatcgacggagctccgccacaagtacaatgtgcgttccatcccgatccgcaaggacgacgaggtgcaagtcgtgcgcggcacctacaagggccgtgagggcaaagtggtgcaggtgtaccgccgtcgctgggtcatccacgttgagcggatcacccgcgagaaggtgaacggctccaccgtgaacgtgggcatccacccttccaaggtcatggttacaaagctgaagcttgaca

SEQ ID NO: 12568 - DNA, 184 bp, Zea mays
  unsure at all n locations
  Clone ID: LIB3150-093-P1-N1-C2
accttatgagcagccccacgtgccccgaagaagagttccttctgacctggcggaagtcncacnccaccttcaaggacacatgcgaggagctgggctcccacccacccaaagaggacaccatactgcgcgccgtcatacccgcacgtcagagcgaggccgcatgcatcttgcaccttgccaccgc

SEQ ID NO: 12569 - DNA, 194 bp, Zea mays
  Clone ID: LIB3150-093-P1-N1-C3
cttcatcaaaaagtaaagctgataaaaccactgaccgttaggatgcaagacaaggggagaccatacatatattctcttgtgcttctgggcatctgtatgagcgttttctcaaaataatgattttgagtgttctaaaaaagacacagaggccagagaagatcttggtcattaagaattatctatctccacaggtc

SEQ ID NO: 12570 - DNA, 411 bp, Zea mays
  Clone ID: LIB3150-093-P1-N1-C4
gtcagaccaagcaaatggcgatctcgatctcggaggaggccttcgactggatggtccgggagaacatggaggacctcggcatggaccccgatgaggccctcgctgacgccgttgaggcgctcaccctccagggcgccgatctctcaggtatcgttaagcgcgtgccgggagaggccaccgcggcggaggtgagcccggtggtgcgggttctggacgaactgaaggcctctctcagcgccagcggcgggtcggagcaggatctcgatggactcgtctctctgctcgatgagttgcgcaatctgtgctgctccggcgagggttcggagaatgcagcgatcgcggtacggaatggcgtcgtggaggcgctcgtcgccctgtgcgcgtccgttcgggtcgagcaggagaggttgc

SEQ ID NO: 12571 - DNA, 417 bp, Zea mays
  Clone ID: LIB3150-093-P1-N1-D2
tggtactccagctgaaccacttgtggcattagcatttaagctagaggaaggtcggtttggtcagctgacctatctaagaatctatgacggcgttatacggaagggtgacttcatatacaatgtcaatacagggaagaaaatcaaagttcctcgcttggtaaggatgcactctaatgagatggaggatattcaagaagcatatgctggccaaattgttgctgtttttggtgttgattgtgcatcaggcgatacatttacggatggaacagtgaaatatactatgacttcaatgaatgtccctgaacctgtgatgtccttggcagtttcacctatatctaaagactctggaggacagttttcaaaagctctgaatcgctttcaaaaagaggatcctactttccgtgtgggtttggatgc

SEQ ID NO: 12572 - DNA, 268 bp, Zea mays
  Clone ID: LIB3150-093-P1-N1-D3
cccgtgctccgcaaccgctgagtgagaagaagagatggccggcaagggcgatggcccggctatcggcatcgatctcggcacgacgtactcttgcgtcggcgtgtggcagcacgaccgcgtcgagatcattgccaacgaccagggtaaccgcaccacgccctcgtacgtcgccttcaccgactccgagcgcctcatcggagatgcggccaagaaccaggtcgccatgaaccccatcaacaccgtctttgatgccaagcgtctcatcggc

SEQ ID NO: 12573 - DNA, 371 bp, Zea mays
  unsure at all n locations
  Clone ID: LIB3150-093-P1-N1-D4
tgtcaagcaataagacagttaggagggtgggagtgcttggaggtaatagagaaaggangnctcttcgccttgatactggtaactactcatggggaagtgaagctgttacccgcaagacccgtatcctcgacgtggtctacaatgcatcaaacaatgagcttgtgaggacacaaacccttgtgaagagtgccattgtgcaagttgatgctgccccattcaagcagtggtacctcactcactatggagttgacattggtaggaagaagaaaacccctgctgcaaagaaagataatgctgagggacaagaggttgaggcagcatctgaagaaacgaaaaagagcaaccatgtcacgaggaaacttgaaaagcgc

SEQ ID NO: 12574 - DNA, 231 bp, Zea mays
  unsure at all n locations
  Clone ID: LIB3150-093-P1-N1-D7
ttttcaaaactctgttcttcaatacatcgggaattatcgattaaagagaaggacatgnnattgtagcttttatgagcactgcttctagtaatgttcacatagcatggctctgtaataatactgttgatcaccacatccaccatcatcaggcaatccgtttgccaatgttgaggcagccttttacaagcacctgtgctgctgtttgcctatcaatcttaacccttaaagggg

SEQ ID NO: 12575 - DNA, 134 bp, Zea mays
  Clone ID: LIB3150-093-P1-N1-D8
ttttgattcccaaatacttacacgctgctgcgtcctcattcaagaggaggcggaccctccaacctctggactcgtaccctacttgcttcaatcactacatcaactaccatcctgccagcgtcctcccacttcct

SEQ ID NO: 12576 - DNA, 385 bp, Zea mays
  Clone ID: LIB3150-093-P1-N1-E2
acccgatcgacaccatgagggtgttgctcggggccctcgctctcctgggggtgggtgcgagcgccacctccacgcatacaagcggcggctgcggctgccagccaccgccgccggttcatctaccgccgccggtgcatctgccacctccggttcacctgccacctccggtgcatctcccaccgccggtccacctgccgccgccggtccacctgccaccgccggtccatgtgccgccgccggttcatctgccgccgccaccatgccactaccctactcaaccgccccggcctcagcctcatccccagccacacccatgcccgtgccaacagccgcatccaagcccgtgccagctgcagggaacctgcggcgttggcagcaccccgat

SEQ ID NO: 12577 - DNA, 430 bp, Zea mays
  Clone ID: LIB3150-093-P1-N1-E4
ccatacacagagctcgaccccccctcccggtggttctctcgtccagcccgaacggcccgcatccccgtcagtcatggcagcggcagcaggcggaggcgcggtgcgtgcgctgtcccagaaggagcaggacatacagatgatgctcgccgccgacgtccaccttggcaccaagaactgcgatttccagatggagcgctatgcctttaagcgccgcaccgacggcatctacatcatcaaccttggcaagacatgggagaaactgcagcttgcagcgagggttatcgttgccatcgagaacccgcaggacatcatcgtccagtccgcccgcccctatggccagcgtgctgtcctcaagttcgctcaatacactggcgctcatgccatcgctgggaggcacacccctggtaccttcactaatcaactccagacg

SEQ ID NO: 12578 - DNA, 316 bp, Zea mays
  Clone ID: LIB3150-093-P1-N1-E5
tctctcaaccaaatctccctccatcgccggagagagccctagaagccgacaagaaagaaaccgaccgccgacgccgagcaccctcggttccttgcttgcccggcgcccaatctagacagctctttctcgttcgtctgtatccatggccgcctcgagcaagaccatcgctgtcctcctcgccgcgctgctcctcgcgctggtcgcgtccgcggtggccagcatgaagctggaggaggaggacgctttcctggtaagcctttcgccggtgggtgggggggggcgggtcttattcttatcccttcctttctgtactctc

SEQ ID NO: 12579 - DNA, 416 bp, Zea mays
  Clone ID: LIB3150-093-P1-N1-E6
gcaatgaggaccgtgtaacactcatcaaggactaccgtggcaagattgagactgagctcaccaagatctgtgatggcatcctcaagcttctcgaatctcaccttgtgccgtcttccaccgctcccgagtccaaggtcttctatctcaagatgaagggtgactactacagataccttgctgagttcaagactggagctgagagaaaggacgctgctgagaacaccatggtggcatacaaggctgcccaggacattgctttggctgagcttgctccaactcaccctattaggcttggactggcactcaacttctcagagttctactatgagattctcaactcacccgatcgcgcctgcagtcttgcaaagcaagcttttgacgaggccatcttcggactggacaccctgagcgaggag

SEQ ID NO: 12580 - DNA, 429 bp, Zea mays
  unsure at all n locations
  Clone ID: LIB3150-093-P1-N1-E9
cccnccccctcttcttttctcctttccccttcttctttctcctctctcttcctctccccttatccccccccccttccctttccctttttcctttctctctccactcttctctcctccttctcctctcccttcccccctattctcttctcctctttttttccctttcctcccctcccttcttcttccctttcctcttccttttcctcctctcttctcttccctccctctctcctcttttctctctctctttctccctccttctcctcctttccttcccctctctcttctctcccttttctctcctttcttcctctctcacactctcttcttctctctcctcttccatctctctccccttcccttctattttctctccccttttctccttcttcctctcctcatctctctttctctctttctccatcctct

SEQ ID NO: 12581 - DNA, 407 bp, Zea mays
  Clone ID: LIB3150-093-P1-N1-F2
ctccatggtgttgcgggagcttatgccaaacacatctttgtggaagagctgggggctgatgaaagctcactgttgaattgtgtcccgaaagaggactttggaggtggtcatccggatcctaaccttacctatgcaaaagagttggttgaacgcatgggtcttggaaagtcatcctcaaatgttgagcctcctgaatttggtgctgcagctgatggagatgctgaccgcaacatgattcttggtaaaagattctttgtgacaccgtcggactctgttgccattatcgcaaccaatgctgttcaatcaattccttacttttgcttctggcctgaagggagttgccaggagcatgccaacatctgctgcccttgatgttgttgcaaagaatttgaaccttaagttctttg

SEQ ID NO: 12582 - DNA, 207 bp, Zea mays
  unsure at all n locations
  Clone ID: LIB3150-093-P1-N1-F3
tttctggcaggccgcgaaccaaccaaacagctgagagtctgacgacgagccgggggtcanagaaacagggcactgggtttagagcccttcggatctagtattgtcgttcaccggcggcgaccaggccaaaccctagaaccttgccaagatgaggtcgttgcgagcggcgcataccctagtctcccgttcccttttctcagcgcgcca

SEQ ID NO: 12583 - DNA, 418 bp, Zea mays
  Clone ID: LIB3150-093-P1-N1-F4
gtcgccgaggtccgctggtgctcctgcggcatcttctccacgcaggaccgcgccgccgccgccatcgcgcgcgactcggccgccgtgttcgcctggaagggggagacccttgaggagtactggtggtgcaccgagcgctgcctcgactggggcgaggcgggcggccccgacctcatcgtcgacgacggcggcgacgccacgctgctcatccacgagggtgtcaaggccgaggaggactacgagaagaccggcaagatccccgatccggagtccaccgacaacgctgagttcaagatcgtgctcaccatcatccgcgacgggctcaaggctgaccccaagaagtaccgcaagatgaaggagaggcttgtcggcgtctctgatgagaccaccacgggtgtcaagaggctctaccagatgc

SEQ ID NO: 12584 - DNA, 376 bp, Zea mays
  Clone ID: LIB3150-093-P1-N1-F5
ggttccacatctcctgcgaccaggtcgggcgcgtcgtccgcctggactggggcaactccaacgtctccggctccatcggccctgagctcggccgccttgtcaacctcaaatacctggagctgtacaggaacaaccttgacggcgagatccccaaggaattgggcaacctcaagaacctgatcagcttggatctgtatgccaacaagctcacgggaggaatccccaagtcactctccaagctcgactcactcagattcatgcgcttgaacaacaacaagcttacaggatcaattccaagggagtttgccaagctctccaacctgaaagtcatcgatttgtctaacaatgatctctgtggaactattcctgttgatgg

SEQ ID NO: 12585 - DNA, 313 bp, Zea mays
  Clone ID: LIB3150-093-P1-N1-F6
ccactgtccatgccatcactgctacccagaagactgttgatgggccctcgtgtaaggactggaggggtggaagggctgctagtttcaacatcattcccagcagcactggagctgctaaggctgttggcaaagtgcttcctgtccttaacggaaagttgactggaatgtctttccgtgtcccaaccgtcgatgtttctgttgttgatttgactgttaggcttgagaagtcagcaacctatgatgagatcaaggctgcggtcaaggccgaggcagaaggtagcctcaagggcatcctgggttacgttgaggagga

SEQ ID NO: 12586 - DNA, 234 bp, Zea mays
  unsure at all n locations
  Clone ID: LIB3150-093-P1-N1-G2
tctttttttgaagcttccaatgaatacttaggaaagattccatataaggtagaaggtgttcctaacanctaaagcctttaagcccttgatgaccggttcaaggtctctggtatcccacacctcgtcatccctgatgcaaaaactggtgaagtttacactacacatggtgctcaatctctaaatgaatatatcatttatgcttaccctatcacaccatatccgttcaatgaactc

SEQ ID NO: 12587 - DNA, 376 bp, Zea mays
  unsure at all n locations
  Clone ID: LIB3150-093-P1-N1-G3
tcccgtacttccgttgcggcgctaccagctgcggcgggcctcgatctccagggtgtgaagtgactacttgtgatctagatctgaagctgtagtggtcagcagcttattgtgaatcgaagatgagcgtggtggggttcgacctcggcaatgagagctgtatcgtggcggttgcgcggcaacgtggcatcgacgtggttctcaacgaggagtccaagcgcgagacacccgccatcgtttgcttcggaacaaacagcggttcatcggcaccgncggcgccgcgttcttcaccatgaaccccaaaaactccatctctcatattaagcgcctgctcgggcgcaagttctcagatcccgagctgcagcgcgatctcgccttc

SEQ ID NO: 12588 - DNA, 443 bp, Zea mays
  Clone ID: LIB3150-093-P1-N1-G4
ccgctcgccgctctccccgcgtctccctatcatgacgcagctcgtccagatgtggtccgaggcgtcgaaggtagcggtgccggagtcggtgctccgcaagcggaagcgcgaggaacagtgggccaccgagaagaaggagaaggccctagtcgagaagaagaagtccatcgagagccgcaagctcatcttcacccgcgcaaagcagtacgccgaggaatacgatgcccaggagaaggaactggtgcagcttaagcgcgaggcccgtttgaagggtggtttctatgtcagtcctgaggcaaagctgctctttgtggtccgcatccggggtattaacgccatgcaccctaagaccaggaagatcttgcagcttctgcgattgaggcagatcttcaatggtgtgttcctcaaagtcaacaaggcgactattaacatgctacgcaggg

SEQ ID NO: 12589 - DNA, 366 bp, Zea mays
  Clone ID: LIB3150-093-P1-N1-G6
ttctttcgcgtggggccaggcagcccccatcatctccatcggcttctgccagagctccaactactacgagaaccgccactcctcgaaatctccaaggattttctgcggcgaaccccttcgtgacgtgacccaatgggagaggcctcgccgtcgatcgccaaggacgtcaccgagttgatcgggaacacgccgctggtgtacctcaacaaggtgaccgatgggtgcgtcggccgcgtcgccgccaagctcgagtccatggagccctgctccagcgtcaaggataggattggctacagcatgatcacggacgcagaggagaaagggctgattactccaagcgtgagtgttctgattgaaccaactagc

SEQ ID NO: 12590 - DNA, 378 bp, Zea mays
  unsure at all n locations
  Clone ID: LIB3150-093-P1-N1-H10
cctcntctttttttcttcccttttttttttctatctccattctttttttccttctctttcttttatttctttttctctccttctttttttttttcttcttttctttttttctccttcttttttcctcttctacacctttttttatttttttttttctcttttttcttttttttctctttttttttctttcttttttatattttcttttttttctatttttttttctttctttttttctttactcctctttctcttttttctccctcccctttttttttctctcttcctccttatcctttctttcttctctctcttttttttttttttttttcttttcttcttttttctttttttttcctttttttcttttttttcttc

SEQ ID NO: 12591 - DNA, 236 bp, Zea mays
  unsure at all n locations
  Clone ID: LIB3150-093-P1-N1-H2
ttactctcggcagccgcaaacaccttcgaggaagagttcctatcatgcgagcgagcgacncnacccctggacctggagagagaagtcggcatggctgccgcggtggtcgactactctttgatggacgccgtccaaaatcgcctcatgttcgaagacgaatgcattttggtggacgagcaagacaatgttgttggccatgagtcaaaatacaactgccatttgatggaaaagattga

SEQ ID NO: 12592 - DNA, 293 bp, Zea mays
  unsure at all n locations
  Clone ID: LIB3150-093-P1-N1-H3
tcttacagttggtgaacgtggggtcgtgcgtgtgtggtgcttggagagtagagtgtgcgtgttcnagcagcaaacatctgatgtaactgttaactcagagaacgaggaaaccaggaggggctttacatctgcntgtatgttgccaaatgatcaaagattgctatgtgttactgctgatcagcagtttttgttctattgtcccaaaaaaactgatgatggggactttgaactgtctctatataaacgacttataggttataatgatgagattcttgacctggaagttatcgggg

SEQ ID NO: 12593 - DNA, 314 bp, Zea mays
  unsure at all n locations
  Clone ID: LIB3150-093-P1-N1-H4
gctcgttagagcttattttcggacatccgaaaaacatgcttcctatgtgggatgatggttatctttatatttgtatgttaattagtctctttgctgttaaatttcgtgtaagttggtcctgccgatggagaatcgagcagccccctttttttgttctatcaactatgctgtaatgctggctatgtatcggcaaaaacaattctataaaaaaaaaaaaaaaaaaaaaaaaaaaaaaaantaaataaaataatttatatattttattaagggggggggtggggtaaaattaataaataaattaaaatattaagggg

SEQ ID NO: 12594 - DNA, 284 bp, Zea mays
  Clone ID: LIB3150-093-P2-K1-A10
accgtccgtattcccgtgcggccgcccttttttttttttttttttttttttttttattataaaaaatactatccaataatatattttagttcttggacgtattgaaaattatacaaacagcgacatatagagtggtcaagtataattaatgcatgccactctgttcacagaaactctgccatagttacagttcaaggcaccaaaactgttacagctatgcaaaaccatttatttttcatcatttctgggcctcctatttgtattcaaggaggtgtttttgatct

SEQ ID NO: 12595 - DNA, 439 bp, Zea mays
  Clone ID: LIB3150-093-P2-K1-A2
ggggggaaaaacttttgatattatcaaggcagtaataaaatcagcaaaagaatacatatacactcttatatcaaccggagaccagatcatccacgcataacacaatcgtgttaaggccaagacggccaaataagcatgtccggtaaaaagactcgagtgaaaactgcgtacaaggcctccagggtaaattcaaatgtaaaaaagaattgaacattctactgcaatcacacgtgtgctgctgcggttgtacattttacatacattccagatgtggctgtcacaagccaatcatttccatgcgaccgagtcgatcctattccttgcagatttgtacaagcttagcctcttgaccaaaggattcctctttttcaacaaagcgggggtcctaaacaaaatggtgcctaagtaggtttttttctctgttttccaaattagcttt

SEQ ID NO: 12596 - DNA, 247 bp, Zea mays
  Clone ID: LIB3150-093-P2-K1-A3
aagaaacacggcattttttattctcattaggaatgacataaagcaacttgagcgaagcagatacacagccaatcacattgcccgcttacaacctacacatgacaacatcggatccgcctccaaaccctatgccttcttgggggacttggcggccttcttgggcgacttggcctccttgctcccgccgctggacgccttctccgccgtcttcttgggcagcaggaccgggttgatgttgggcaacacg

SEQ ID NO: 12597 - DNA, 268 bp, Zea mays
  unsure at all n locations
  Clone ID: LIB3150-093-P2-K1-A5
ggccgccctttttttttttttttttttttttttttngcggttttttggttcactaaccatccatggtctgataatacaaccggattgcaaatagttcatgacatatgctccataattgacttctaacattaaaagtgctaagaacacaaatagcaaaactttgaaaatgcaaccagagacaggcacgcttgttgtcttgattgggaatgatcggacagtggcaatctccaagcacccgtcgagctgttcagcgtttgcggctgaaaga

SEQ ID NO: 12598 - DNA, 77 bp, Zea mays
  Clone ID: LIB3150-093-P2-K1-A8
cggatcggccgcccggtcgccccttttttttttttttttttttgaaaaaaactttttttttttttcaattctttttt

SEQ ID NO: 12599 - DNA, 428 bp, Zea mays
  Clone ID: LIB3150-093-P2-K1-B1
tcccgtgcggccgcccttttttttttttttttttttaatcgcaaagatcacataatacatattgtaaagtagatcagatgtttggttacgacacggacatgctcaaatagtcatgacaagaaaagacaattcaacagaagctggtgttctcaaatggttatgcttattttcaagccaaatctccacagcattcactttgtcgtgctctccagagtgagttttcaaaaacaactggaaaaaaaaaaaacttctgaggtgacacgtgggaactactcctcgacgacgacgctgatctggcccttgtcaagcatgtcgtagaaggatctagttttcctctgctcgttccagtggtgcatcttccacataccttcagcgatcagacccagggtcagtccaatgaaaatctccttcaccacgcttgggccctt

SEQ ID NO: 12600 - DNA, 52 bp, Zea mays
  unsure at all n locations
  Clone ID: LIB3150-093-P2-K1-C4
ggcggccgtcctttttttnttttttatttaatatatgtaaaaactttaattt

SEQ ID NO: 12601 - DNA, 197 bp, Zea mays
  Clone ID: LIB3150-093-P2-K1-E4
tcccgtgcggccgccctttttttttttttatttttatatttttttttgatttattttttttttttttctatagttaataattggcaaaggggtaacttgacaaatatgaatgggcgcgtttattttaaacattactttttaaaaatgcaagcttccattttttatttttttccattttaaattggtctaatgactaa

SEQ ID NO: 12602 - DNA, 340 bp, Zea mays
  unsure at all n locations
  Clone ID: LIB3150-093-P2-K1-E6
accgcccgtattcccggtcggccgccctttttttttttttttttttttttttttttttttatttttttttttttttttcctcattnnttatgggacccacagtcacagcattttcgaaattggaaatcgttgaaggaatgcaaatttttcaactccttgggggggaaaaagagcagtcccaattcaaaatggtggctttcaccgtcctgaactttcaaattcaaatttaccgtcctgcattttaacctgacctcccccggttaacccctgagcgggcccatttttcctagccctaccttgtaccctgttaattccctcaataaggcgtttttgttttttt

SEQ ID NO: 12603 - DNA, 233 bp, Zea mays
  unsure at all n locations
  Clone ID: LIB3150-093-P2-K1-F3
cgtccgtattcccgtgcagccgccctttttttttttttttttttttttttttttttttttttttttttttttttttttttacttttaanaacctgtctataaataaattaaaggggagagggggtcacccaaactttattatatagtataatttataatagaattcaaataaaaaaaaaaaaatttcattttataataacaccacataattttattccaaaatctacattttt

SEQ ID NO: 12604 - DNA, 51 bp, Zea mays
  Clone ID: LIB3150-093-P2-K1-F5
ccgcccgaattccgggcggcgccctgttttttttttttattattacattac

SEQ ID NO: 12605 - DNA, 168 bp, Zea mays
  Clone ID: LIB3150-093-P2-K1-G2
tcccgtgcggccgcccttttttttttttttttttttttttttttttttttattttttttttttttttgtaggaacaatatataaagattggggaaaaaaaaaaggtggaaagaagttttaacttattttttagaattattatataataggggattcctaaaataaaaa

SEQ ID NO: 12606 - DNA, 377 bp, Zea mays
  unsure at all n locations
  Clone ID: LIB3150-093-P2-K1-H1
caatcttaactttttttttttttttttcaatttaataannaaatttgggctgggtatttaattaatttctatgaattctcataaaattttaatttccccccccacccccccccacccaccctcccacccccccaaccccccgcccggctttaccaacaccaacccccccccccccccccaactccccccccctcccaacacccccctaaccccccccccccccccccctttacatccccacccccacctcaacaccacccccccccccccccccccccttgataattacacccccttnntccccatccccccccccccccccccccctccccccccccctcccccccacctacctcccccctccccacactcccccc

SEQ ID NO: 12607 - DNA, 148 bp, Zea mays
  unsure at all n locations
  Clone ID: LIB3150-093-P2-K1-H12
ccgcccttttttttttttttttttaactttataaaagtttttttttttttttttatacgccaanttttnttttttagtttattattaaattgaaacctgaataacccatcatggaaggagagagagagagagagagaggatttatggc

SEQ ID NO: 12608 - DNA, 418 bp, Zea mays
  Clone ID: LIB3150-093-P2-K1-H5
accagtccgggatcggcgcggccgctcgttcctttttttttcagtaaaaatatacgaactggcgcacaaaaacagaagtacagacgcagcaaagaagattacaattattctctagcgggctcacatgaccctcacagcggaatcggaatgcacatgaaaattacaaaatatagagctcagtaggagtgattaggcttggcagttcctgtgacatgtccttgggaaaaccggtgatgataaacattgcttaaagatcctcagggccattgacatccttgttctcaagtacgtctccatctggaatctccaacttcactccaggcttggcgataattgtcaccttgcccttgagtgtaattccagagccaaaccagacattaccagaaacctttaagctgtcaagctcaactatgctggg

SEQ ID NO: 12609 - DNA, 230 bp, Zea mays
  unsure at all n locations
  Clone ID: LIB3150-093-P2-K1-H6
gcagccccggaccaaaagcaagggtctatagaacaaggaaacacaagcatcaacagcgactatcgacggaatgggccacgagggggngttgctagtgtaatagtataacatggcgacaacacgaaagggggcatcaaaactcaatgggggccctagaaccaccaggcttcaaatttaaaaggcccccttacaagccaataagtgggtccctcctgggccaaaaaccgggc

SEQ ID NO: 12610 - DNA, 363 bp, Zea mays
  Clone ID: LIB3150-094-P1-N1-A1
ccagagttagagcaagttgagcagcattgaagccagaatcccaacttgatgagggagataatgaatatgccagcgatgcaaaatctcatgaataaccctgatttaatacgcaatatgattatgagcaacccacaaatgcgcgagatcatggatcggaatcctgatcttgcccatgtgctcaatgacccaagtgtcctacgacaaaccctcgaagctgctaggaaccctgaaatcatgagagagatgatgcggaacacagacagagctatgagcaacattgagtcctctcctgaaggttttaatatgctccggcgcatgtatgaaacctgccaggaaccatttctaaatgcaacaacaatgagc

SEQ ID NO: 12611 - DNA, 246 bp, Zea mays
  Clone ID: LIB3150-094-P1-N1-A6
cacaataaaaggggagatttcttttatggctggaactgctacttacaacacaattctttactacttgtgctaaccatctttttgctagtcgcaataaatgtaacctattttgcacccattgttataccaaaccatcttctttctgtaactattgtcgttcaagttatcattccacccacccttttaatccagtattatgctttcattttaccataactttttaattattttccatattaattatat

SEQ ID NO: 12612 - DNA, 389 bp, Zea mays
  Clone ID: LIB3150-094-P1-N1-A7
tctaacattggtaataatgtggttaaccaaactgcggggacaaagaagcccgggagagaccgacgcaagtcgccaattcaactcgtcccaggacctctcctgccgtccgagccagtggccaccgaagctgcccctcgggacattgccaacattcccctcaagctaccgagagccatgtcctcggtgactcctgcggagagcaaccctcccctcacagaccggaatgctgccaaacccgacgaatcagtgagcaccggcagcaagaatagcaccggagctgcagccacgagagcaccgtctcagctgagaaaaaacgcaaccaccgagaaggagaaccagttgcgataatccgattgctgacatgcagtaatcgtgactccgtgttgctt

SEQ ID NO: 12613 - DNA, 229 bp, Zea mays
  Clone ID: LIB3150-094-P1-N1-B1
taagcaattgaaattagacccttcaatttatgatgggttgatcaaggaaaaggggggggtggttaatgttatatacattgaaacaaatagtggagcagtgaaaagagttggtagatgtgattcttttgctacagaatatcatcttgaagctgaagagtatgttcctattcccaaaggtgaagttcataagaaaaaggaaatagtgcacgatgtcacacttcatgacctt

SEQ ID NO: 12614 - DNA, 386 bp, Zea mays
  Clone ID: LIB3150-094-P1-N1-B3
tcttaagcctcctcgtccccgatctcctccaacccggatccaagggtttcctggggggagcgtccgaaacgagccagagaacaggtatggcggcggcgcggcacctaagatccggcctccccttcctccgggcccacctggaatcctccgaatccggggccgtcgttcaggtttcgaggggcttcgcgtcgcaggccgttaagcccaccgggaaggagatcaaggttccaaaggctttgtttggcggcacaggcaactatcccagtgcacttgttcctcacagcagcttaaatctaatgcattggacaaagttgaatcttggattaaaggcttttgaagaggctttccaagaagagccccgttgttttttaaattaataaaggcct

SEQ ID NO: 12615 - DNA, 138 bp, Zea mays
  Clone ID: LIB3150-094-P1-N1-B4
tccgtctgatcagatccagcgcctaacccggcgggtccggcgacggtgagtggccggcgttcatgacaccggccgcggcgtggtgcgcgcagcaccgccttcggttccttctaccgttcctttttctcgcgcccgttc

SEQ ID NO: 12616 - DNA, 404 bp, Zea mays
  Clone ID: LIB3150-094-P1-N1-B5
cgcgcccccgctcgcttcacttctctaggtgcgcaccgatcagaagagatgggggtgccgctgctgacgaagaagatcgtgaagaagcgggtcaagcagttcaagaggccccacctcgaccgctacaagtgccttaagccaagctggcgcaggccaaagggtattgactcccgtgtcaggaggaagttcaagggatgcaccttgatgcccaacattggttatggttctgacaagtcgaccaggcactaccttcccaacaagttcaagaagtttgtggtccacaacgtttctgagctggagttgctcatgatgcacaacaggacctactgcgctgaaattgctcacaacgtgtccactaagaagcgcaaggagatcgtggagcgtgctgcgcagctcgacattgt

SEQ ID NO: 12617 - DNA, 407 bp, Zea mays
  Clone ID: LIB3150-094-P1-N1-B6
gacaaaagttgctcttggcatgatacatgaatactacaaaagtaatgctacaggtcttggtgttttctttactctttactatgctttcgacacatcaagctttggggaataaggaaaattgtgacaaggataaagatttcattaagcgtcaatgcgaaaagtgcattggagttggtcgtaaattccctacgacacaactatgttgcaatgctataaaaagagctgatatggcttgcgtctgtcgtagcataacactagaagagcagctcacaataagtgtcgtgaaagttgtggatgttgcaaaggaatgtggcaacccggtgccgcctggaaataaatgtggaacttggactgttccaccacaactgctgggatgggtgcatccgtaagggttcaacaaagcgagc

SEQ ID NO: 12618 - DNA, 411 bp, Zea mays
  Clone ID: LIB3150-094-P1-N1-C1
gtcaccggtgacgctcctcacctactccgtgccggctttcgctttgcggggcgggctgccgcaagctcgcgcgccgcctacatcgacccctccccgcgccgcaggccgcctcccacagacgcggggcagccacgtcgcccggctcggagggattcggttcggcccgtcgtgctcccctccgcactcttctattggcctggagagcagcggagatccaccagcaatttggattgcttctcctttttcttggatatacttggtctcctcggtgttggctaggcaatccagctttccaaagtgtgatcggacaggtttattttggttctgagatggctgatgaggactcatccgacttcaccttctgcaggttctgcagaaaatgacggtcaaccagaatctcctaaagccatt

SEQ ID NO: 12619 - DNA, 356 bp, Zea mays
  unsure at all n locations
  Clone ID: LIB3150-094-P1-N1-C2
aaaatcctttattattntcccactccctttttttctttttacactccncacctactcccgaccggtttttattaagaggcccgcgccccacaaactcacacaccacctacatctacccctcccctctccctattcctcctcccacatacacttttcaatcactttttttttttttaatttattctcaatctacccctcattctcccctcctcactcttttatttaccttcatatcatctatcattcaccaatcaattttaatttcttattcttttttctttatatactttattctcctttttttttccttatccaatccatttttccaaaatttaatcccaccctatttatttttt

SEQ ID NO: 12620 - DNA, 380 bp, Zea mays
  unsure at all n locations
  Clone ID: LIB3150-094-P1-N1-C3
ttttgttcttaccgtttccatcgatttccaggaatgttgagcaccagaggtgctgggtggtcacancaattaccacacgcaagattatcattctcatggttgcgacagcagccatagccgctctctttcccagctgaacgaccgcgggcaagaactgaatgtgccaaacgcagtgccaggagatccagcccaactgcgacgcatggatcaagacgataggctaccccaagggcgggaagtgcatagcgccacactaccacaactgctggtgctgggtggggccaccgtcctacaactcctataaacaacttaatggaacgcctgcagggtctttttacaaccgcacgttacatttttgacgactttaatttgttttgtct

SEQ ID NO: 12621 - DNA, 405 bp, Zea mays
  unsure at all n locations
  Clone ID: LIB3150-094-P1-N1-C4
tttcgtccgtgtgaccggcggcgaggtcggcgcagcgtcttcgctggccccgaagatcgncccgctcggtctttcccccaagaagatcggagaggacatcgccaaggagacggccaaggactggaagggcctccgcgtcaccgtcaagctcaccgtccagaaccggcaggccaaggtctccgtcgtcccctccgccgcggcgctcgtcatcaaggcgctcaaggagccagagagggaccgcaagaaggtcaagaacatcaagcacagcggcaacatcagcctcgacgacgtcatcgagatcgccaggaccatgaggcacaggtccatggccaaggaattggccggcaccgtcaaggagatcctcggtacctgcgtcagcgtcgtgtgcaccgtcgactgcaagga

SEQ ID NO: 12622 - DNA, 364 bp, Zea mays
  Clone ID: LIB3150-094-P1-N1-C9
ttttccttggagagaagattcaagagctgcggcacggtacaaggtatgagatcgtctccgtgctcttgagaaaagagtgatgctacttcagggaatgggaatgcgccaagaatttgcttctgatggaggtagacgtattgttgtatctcagcctacaattgaaggtttggatgatgtggaagaagaggaggatggtgtagcctgtatggtttgtagagaagggtacaccttaagaccaacagacatgttgagagtctatgcattcaggggacgagtgagcggaggtgcaacaagttcttgtagttgtcgtagtgactgtgtttacaccactgttagccactttaacatcatacactaccaatgc

SEQ ID NO: 12623 - DNA, 395 bp, Zea mays
  Clone ID: LIB3150-094-P1-N1-D1
cttccttggagagaagattcaagagctgcggcacgctacaagggatgagaggcgtggccgtgctcttgagaaaagagtgatgctacttcagggaatgggaatgcgccaagaatttgcttctgatggaggtagacgtattgttgtatctcagcctacaattgaaggtttggatgatgtggaagaagaggaggatggtgtagcctgtatggtttgtagagaagggtacaccttaagaccaacagacatgttgggagtctatgcattcagtaaacgagtgaacttaagtgcaacaagttctggtagtggccgtggggactgtgtttacaccactgttagccacttcaacatcatacactaccaatgccatcaggaagctaaacgagctgatgctgcac

SEQ ID NO: 12624 - DNA, 387 bp, Zea mays
  unsure at all n locations
  Clone ID: LIB3150-094-P1-N1-D11
ggagacgcagaggtcccgcggctgggggtgtggtcaccttctgcacgggggaggcgatgcngaacgccatcgagggcatgaacggcaaggagctggacggccgcaacatcaccgtcaacgaggcccagtcccgcggcggccgtggaggcggcggcggcggcgggtacggtggtggccgtggaggcggcggctacggcggtggcgggcgccgtgatggcggcggcggctacggcggtggcggcggctaccgtggtggcngcngcggctacggtggtggtggcnnctgctactgcggtggcaaccgtggcggcggctacggcaactccgacgggaactggaggaactgaacggtggggcccgcgcggccaagttatcctgttcgctacc

SEQ ID NO: 12625 - DNA, 402 bp, Zea mays
  unsure at all n locations
  Clone ID: LIB3150-094-P1-N1-D2
cttctatccacaatcgcaattcncaagcccttccgacggcagtcatgggtggcgtgaccctcctctccctcgctcccaccgccatcttcctccacatcccggctttcacctcctcctccgtcgttggtcccggaatcctagccggccgctgggccgcgccccgcgccctcccgctccgcgcgctcccgccccgtcgcgtcaccgtcgtctgcagcagcgccgcggcggcagccgaggcctcggacgccgcagcgccagtggagaagttccggctcgacaatttggggccccagaaggggtcccgccggcggcccaagcgtaagggacgcggtattgctgcaggccagggcgcgagctgcgggttcggtatgcgcgggcagaaatcgcgctcggngcccggcg

SEQ ID NO: 12626 - DNA, 233 bp, Zea mays
  unsure at all n locations
  Clone ID: LIB3150-094-P1-N1-D3
aaacaagcttgctactgtgatttctcgtgcgagcagcgncggaggagagggagagagcatggccgaccacaaggaggagcctgtgccggagtctgtgatggacaagatcaccgagaagttccacggcggggactcgtcttcgtcgtcgtctgactcggacgacgagaagaaggggtcctcgttggcgtcggcggcggaagccatgaaggccaagatctaccgccttttcggcc

SEQ ID NO: 12627 - DNA, 343 bp, Zea mays
  unsure at all n locations
  Clone ID: LIB3150-094-P1-N1-D6
tccttagagtcacccacctccttttttctatctctattcccntgggccgttcctcttcgggcgcgcgggccatcacaccancttgtccgcctcctctggatcgccgctggactcgcttccctgacccagaagctacgatgaattacatcatctgcgcattcaagccgccctgcgacatcttcgtcacattcgccgatgagagaacccggaagcaggtccagatcaagaaggacaacgggaagactgtcatggtgcctgccttccagacccttgtgaccgtagccggagaggtgtctatcgctccattcccaggttaaaggcttgaacacactgttgttaagat

SEQ ID NO: 12628 - DNA, 397 bp, Zea mays
  Clone ID: LIB3150-094-P1-N1-E1
gcgtcttgaaaggggagagagagagagagaagagagagagaagagagagagagagagaggagttgtagacccgcgagaggctgccgtgtagggaccgtagactcagcgactgcgaaggagggataaggggatggccgggatcggaccgatcaggcaggactgggagccggtcgttgtgcggaagaaggcacccaacgtcggcggcaagaaagattagaaggccgtaacgccgtgcgccgcgccggtgcggagatcgataccatgaagaagtacaacgctggtacgaacaaggcggcatccagcggtacatccctcaacaccaagcgcctcgacgacgacaccgaaaacctcgcccatgagcgagttccaagtgatctgaagaaaaatttatgcaagc

SEQ ID NO: 12629 - DNA, 342 bp, Zea mays
  Clone ID: LIB3150-094-P1-N1-E10
acatcctgcaacacgaggacaagtggtgcatcctacagtccgttggagatgccagaaattgattggaaccttgagaatacacagattgtttgtaagttgtttgtcgaacaagttggcaaagggaatcgaccaaacacttaccttaattcagttgggtacgctgaggtggagaaaggattcaaagataggacaggtattgatgttacaaagtcacaacttaagaataaatgggacaaatttgaaagaagatttcaaggcatggaggaaacttaagttgctgcaaacaagaacgggtggaaccgtgaaaagggcactattgatatggatgatgattggtggaaa

SEQ ID NO: 12630 - DNA, 407 bp, Zea mays
  Clone ID: LIB3150-094-P1-N1-E2
cgctcaagtacctgggtcacagccgatgcccgttatccagctcaacaagcgcgaatcacaacatgttacatggcacattgtcttttatgcctcatagcagtggttttaggatgattcaacagaataatctagtgacacctgaagctgcaaattttactgggaaatcagctttcacttcacttcagggccatgtcactgatcagtgctccacaggctggtttggacctattgagtcaaattcccacacagaccatgcatcgtcaagtttgatcaggtcccagcctttggttattggaaatgatgttcagaaaaccaaaggcacttcattcaaactatttgggattcctcttggcagtccagaaaaatctgaacctctggtatccccaccaagtgtcgcatatgacggg

SEQ ID NO: 12631 - DNA, 404 bp, Zea mays
  Clone ID: LIB3150-094-P1-N1-E3
agcagaagccaccgatcggcgtgccgcgtgcgtgaggcgatcggagcatccggtcgcgaggaggaagacaaccggcgacgcggggggaacatggggaagacgccggtgcggatgaaggcggtcgtgtacgcgctgtcgccctttcagcagaaggtaatgccggggctgtggaaggacatcaccaccaagatccaccacaaggtcaccgagaactggatctgcgccacgctactccttacccccgtcgtaggcacctaccaatactccatgtggtacaaggagcatgaaaatctttcctacagatattaaatgcgctgcccttgacagacagcactcggagttttcatgatgggtttcataatactcccatgatgatttaacatttggctgatcaatttagttca

SEQ ID NO: 12632 - DNA, 166 bp, Zea mays
  Clone ID: LIB3150-094-P1-N1-E4
tagctcttttattgcaaaaaaataaaataaaacaagagaataaaaaaaaagaggagtgctgatttccaaaacaatatacgaaccgtacaaaactaagtctatcaaatcctttataccttcagatttttaagctagtcgtcttattaatcttacctcattcttaact

SEQ ID NO: 12633 - DNA, 396 bp, Zea mays
  Clone ID: LIB3150-094-P1-N1-E5
ctctccacttaacgagcaccaccagttcgtggttcggtcggaacgcagcgcagcggcggcggcgatagggagagaggagagagtctgcaggatccagcaggccgaggaaggagtcagcggcgggccggagaatatgagcggcaacggcgcgaagaaggtggtcgatgcggcggtgaaggccggcaggacgatcatcgactgggacggcatggccaagttgctcgtcaccgacgaggcgcgcaaggagtttgccgtcctccgccgcgctgtggatggcgtgaaccaccaactccagaccaagttcttccaggaaccccagccgattgattgggagtactacagaaaaggaattggatcaaaagtggtggatatgtacaaagaggcttttgaaagcat

SEQ ID NO: 12634 - DNA, 428 bp, Zea mays
  Clone ID: LIB3150-094-P1-N1-E6
tccttatttgactcctcagctaccacccccgccggcccacccccgtctcgcccctgcatgtgggcggcctcgagctctgcttaaatcacagctgtgttcgtttgtggggtgatcctcccccctgtcggattcttttactttctagctctttgactgttgagaacttttgtgtcttattcctctctttattgttctcttttcttgttttgcacttttttgtttttttatttttttttttttttctagattattttcttttctttcatgggggggtggggggggggggtttacctttcttattatattatttttttctttttatcttctctccttttttcatttcttctttttttattttttttattttttctttctattttatcttttcttctttctctctttttttactttattctttattttttttt

SEQ ID NO: 12635 - DNA, 388 bp, Zea mays
  Clone ID: LIB3150-094-P1-N1-E8
ttagaaagggagttcgtgagagacaacaagggtcttggtagcttccgggtgggtggaatccctcctgccccacgtggtgttccgcagatcgaagtcaagtttgatattgatgctaacggtatcctttctgtcactgctgtggacaagggtacagggaagaagcaggatattacaattactggtgccagcactctgccaaaggacgaggtggagaggatggtcgacgaagctgagaagtttgcaaaggaggataatgagaagagagatgccattgacaccaagaaccaagccgagtcggtcatctaccagaccgagaaacaactgaaggaactaggggacaaggtcccgggcgacgtcaaggggaaggtcgagtcgaagctgcaagagc

SEQ ID NO: 12636 - DNA, 179 bp, Zea mays
  Clone ID: LIB3150-094-P1-N1-F1
cacataccctccctacctcgccgtcgccgtggcgtctgccatgggggcgtggaagtacgtctcggagttatggagaaggaagcaatccgacgtgatgcggttcgttcaacgcgtgcgctgttgggagtacaggcagcagccggccatcgtccgcctcacaaggcccacccgccccgaca

SEQ ID NO: 12637 - DNA, 401 bp, Zea mays
  Clone ID: LIB3150-094-P1-N1-F2
gtttttgccaagccgcgcgcctcctgtgcgctgtatccctgcgggacggcgagacaccaagatgacggcgcagaccgcggaggagctcgccacccagatcgagcagcagaagctcgaggagcagaagaccgaggcagaggaagttgtggtggaggatgaggaggaggaagatgaggacgatgacgatgatgacaaggatgatgatgaactcgatggggatgccagtggcaagtcaaagcaaagcaggagtgagaagaagagccgcaaggccatgctgaagcttggcatgaagcccatcactggtgtcagccgcgtcactgtaaagaaaagcaagaatatactctttgtcatctccaaaccagatgtgttcaagagcccgaattccgacacgtatgtcatat

SEQ ID NO: 12638 - DNA, 403 bp, Zea mays
  Clone ID: LIB3150-094-P1-N1-F3
tttaactccaagcctcccccttcagcgatcagcgcacatcacgtaaagcgggacgaaatgatttccaccaccgtcgctgctcaccccgccaccgtcacagcgctgcggcgaaggtacccgcttcgccctcgccagccactctgtgctccaatcttcacggcggcgacgaggcagtgcatggctacggcgaagccctcggtcacaaacgcgctcgctaacctatccgttgagagcgcccccgcggcgcttcccaagctttcgttcccgatactggtgaatagttgcactgggaaaatggggaaggctgttgctgaagcagctgtctcggctggtcttcagttagttcctgtatcattcagtgccattgaggtccctgatcgaaagattgaaatatgtgatagag

SEQ ID NO: 12639 - DNA, 406 bp, Zea mays
  Clone ID: LIB3150-094-P1-N1-F4
gcatagacaggcgtcttcgtactcgcctagctccgcgacccaaagcgttgggccttctcccattcttctctcatttctcaccaccgccgccgctaccccctttcgacaacaccatgagggagtgcatctcgatccacatcggccaggccggtatccaggtcggaaacgcgtgctgggagctgtactgcctcgagcatggcattcaggctgatggtcagatgcccggtgacaagaccattgggggaggtgatgatgctttcaacaccttcttcagtgagactggcgctgggaagcacgtcccccgtgctgtttttgttgaccttgagcccactgtcatcgatgaggtgaggactggcacctatcgccagctctttcatcctgagcagctcatcagtggcaaggaggc

SEQ ID NO: 12640 - DNA, 404 bp, Zea mays
  Clone ID: LIB3150-094-P1-N1-F6
cgactggtttgccaaccacaacctcgtctggccatccctctcatgccggtgggggccacagtttgagaaagctacctacaagaatcgtcagcgcctttacctatctgaacagacggatgggagtgtgcctaatactctggttatcgcaaattgtgaagttgtgaaacctagggttgcagctgctgaacatatctcacagttcaatgaggaagcacggtcaccttttgtaaagaagtacaaaactatagttcatcctggtgaggttaacagaatcagggaacttccacagaacagtaagatcatagccactcacactgacagtccagatgtacttatttgggatgttgaagcacaaccaaatagacatgctgtcctaggagcaagcgagtctcgccctgatctga

SEQ ID NO: 12641 - DNA, 397 bp, Zea mays
  unsure at all n locations
  Clone ID: LIB3150-094-P1-N1-F8
ttctggaattaccataaagctcnaaatgacgccataattgttgatagggttgaggtcaatacaagtccacattggtgtgcccagtttgtaacaaaatctctgttacctttgatccatttatgtatttgtcgctaccattgccatcaacagttactcggatgattactgtaactgtattcagtggtacgggagatgttcttccaatgccttacactgtgactgtacagaaaaatggaaactgccgtgatcttactaaagcccttgctgatgtctgctgcttaaaaaattctgagacattgttgcttgcaaaggtatacgaacgtcggatctaccctttcctaacaaattcaatctagggacttcatattataaaagattaacattttcttttttcata

SEQ ID NO: 12642 - DNA, 402 bp, Zea mays
  Clone ID: LIB3150-094-P1-N1-G1
tcaatggagatgcctgtgacaagtgggaaggtgaaaagaatgattaagtcgggaagttcgattttggaacgaaatctcaaccatgttattaacaatataagggatgccatagcagcttctggtgcttttgaaagtatagtggagcagctgaagaagggaaaactggaagagttaacattggcagatgtgaagaacagcagtgaggacactgaaatgattcctgctgttgatgttgataacattgaagatccgagtgatgaatctgctgtagttcctgcagtgattacaaatgtcggtgctgctccctgtattacacgcgaagcttccttgggtaatatgcatttagaggaccttgtgcctaaaacaaaagactcgggtgcttcatcagggtttactggactg

SEQ ID NO: 12643 - DNA, 394 bp, Zea mays
  Clone ID: LIB3150-094-P1-N1-G11
tctgtagtcctcgccgccggccttgcagaagacgcgcacggcgtgcgggggtcccggtgcgcaacggcacggcgtgcctggcgcccaccaacccgcgggacgagtaccagcactgggtcaaggacatgcgccacagcacccgggtgcgggacgaggagggctacccggccttcgcgctcgtcaacaaggtcaccggcgaggcgctcaagcactccacggggcagggccaccccgtcaagctcgtgccctacaacccggactaccaggacgagtgcgtgctctggaccgagagccgcgacgtctgcaacggcttccgctgcgtccgcatggtcaacaacatctaccttaacttcgacgccttccacggtgacaaggcttacggcggcgtccatga

SEQ ID NO: 12644 - DNA, 405 bp, Zea mays
  Clone ID: LIB3150-094-P1-N1-G3
tttatgcccgggccatttttgaagctgctagagcagtgaccaaccagggtgtggaagtgttcccagagataatggttcctcttgttggaacaccacaggaactggggcatcaagtgactcttatccgccaagttgctgagaaagtgttcgccaatgtgggcaagactatcgggtacaaagttggaacaatgattgagatccccagggcagctctggtggctgatgagatagcggagcaggctgaattcttctccttcggaacgaacgacctgacgcagatgacctttgggtacagcagggatgatgtgggaaagttcattcccgtctatcttgctcagggcattctccaacatgaccccttcgaggtcctggaccagaggggagtgggcgagcttgtgaagcttg

SEQ ID NO: 12645 - DNA, 188 bp, Zea mays
  Clone ID: LIB3150-094-P1-N1-G4
gtgcatgggagaggaaaaaaaaaatctaggcctagcatccacagcggtaggattcgggggttccaattgcagcggcaagccagacagcggcggacggtgaagtgggtcaacgacaccaagggcttccggttcatcttccccgaggacggcacacgaacatctcttcgtgcaccaatcgacgatcaagt

SEQ ID NO: 12646 - DNA, 392 bp, Zea mays
  Clone ID: LIB3150-094-P1-N1-G5
acttctttttttcctcgcaccactctaccgaggacatgtacaccaaatgggcggtccgggcaagtaaactccaatcccctgtctgtaaatggagagggtgctaaaggatgacgccgtcgaggagaagggcgagcgcgccatgatggcatcgtttgttggggccatggcaatctcggatttggtgaagaccacattgggcccaaaaggaatggacaagatcctgcaatcaactggcagaggacgtaatgtgactgttacaaatgatggggctaccattttgaagtcacttcacattgacaatcctgctgcaaaggtccttgttgacatctcaaaagttcaagatgacgaagttggtgatgggacaacttctgttgttgttctagctggagaac

SEQ ID NO: 12647 - DNA, 401 bp, Zea mays
  Clone ID: LIB3150-094-P1-N1-H1
tcacagtcccgttgctcgtgaaccacttgggggccacgacgaagctgagagggataaatccagagatggaagtcattaaagaccagatgaatagtatggatccaaaatcagtgcaggagggacaagctaaaatgaaagcgctgttcaaaaacttaacttgcaagaaggaatggagggaaatcctatggctggtaaaatgaagtacttttctagaggagtagctgttttgacagtcccatttacaatgaactttgccacggcagttttctgttactggacctcatcaaacatattcaccctgttatatggtcttgttatccggcgaccagctgtgaggaagtggtttgatcttcctgctttggaaaatacgccttcgctcacggcaaagccagtattcaata

SEQ ID NO: 12648 - DNA, 326 bp, Zea mays
  unsure at all n locations
  Clone ID: LIB3150-094-P1-N1-H11
tgctatggataccgttttgccttcagtgtgctccaagaagcaacggggagtggcgacnagaactgggtcattggagttggaggctttggaaaggtctacaagggggtgatgagggatgagagcaaggatgcagtgtagcgttgaaacccaaagtgtcagcaaggtctcaacgagttccgtacagagattgagcgtctctcacgtctgcgccaccgccatgtggtgtttttgatcgggtactgtgatgaaaggaacgaaatggtcctggggtacgagtacatggataaaggtactgtcaagagccattgtatatggctctgttaacc

SEQ ID NO: 12649 - DNA, 351 bp, Zea mays
  Clone ID: LIB3150-094-P1-N1-H12
gcctaaccaagccccgaaccggcccgccgggcccccggctaccttgcggggcaggggacagggtcggcacggggcgatgaggagcagcgaggccatggagctcctgggcttccatccctactccaggccctccccttccgaggtgaaggctgcgtatagaagaatggtgatggagtcccatcctgatcgtgtcccaacgcatctgaaatcgcaggctgagtcaaaattcaaggagatcgcagaagcatattcttgttcgaaggacggaagaagatcagggagtaggatggaagttcatgttatgcgttctggtggtccgacttgccacggaagaacaaatagaacgttggt

SEQ ID NO: 12650 - DNA, 398 bp, Zea mays
  Clone ID: LIB3150-094-P1-N1-H2
gcacttacctggacttatagaaaacaaaatttgttgcgtgaaattattggggatcatgctgatatcatctgtcttcaggaggtacaagtaaaccactttgaagattttttttcacctgagcttgacagacatggatatcaggcgctttacaagaaaaggacaacagaggtgtattctggaaatcctatggccatagatggctgtgctacttttttccgcagagacaagttttcgcatgttaaaaaatacgaggttgagttcaataaggctgcacagtccttaacagatgcgattattccttctgctcagaaaagactggctttaaatcgtttgattaaagacaacattgcactaattgcggttttagaagccaaatttgctaatcatggagctgaaaa

SEQ ID NO: 12651 - DNA, 363 bp, Zea mays
  unsure at all n locations
  Clone ID: LIB3150-094-P1-N1-H3
gccccagctagtagatcattggacacatatcgaaacagctctctagctagcgcgctcgtcgtctaacctggcttccggcatggcttccaagcagatcggagtcttgacctgcttcattgccatcaccgctctcgccttccgtccctgcgcattcgccgtgcccatggacggcggctggtcgaacggcggcgccacctggtacggccccgccaagggcgctggatccgaccgtggtgcgtgtgggtaccagggtgccgtcgaccaacctccgttctcgtcaatgatcaccgnctgcagccaatccatcttccaggactgcaagggctgcggcacctgctaccaggtgaagtgcaccggacacga

SEQ ID NO: 12652 - DNA, 383 bp, Zea mays
  Clone ID: LIB3150-094-P1-N1-H4
accccgtcatcgatctcgtttcaaatccagccatcctcgtttcctccgtgcggcagcatctcaaccccatggccaagatcaagatcgggatcaatgggttcggcaggatcggaaggctggtggccagggtggccctgcagagtgacgatgtcgagctcgtcgccgtgaacgaccccttcatcagcaccgactacatgacctacatgttcaagtacgacactgtgcacggacagtggaagcaccatgaagtcaaggtgaaggactccaaaacccttctctttggtgagaaggaggttgctgtgtttggctgcaggaaccctgaggagatcccgtggggttcggttggtgctgaatatgttgttgagtctactggtgttttcact

SEQ ID NO: 12653 - DNA, 363 bp, Zea mays
  unsure at all n locations
  Clone ID: LIB3150-094-P1-N1-H6
ttttgctgctctccgaccccgagctccgaaggccggagcatcaggcgaggggggcgtcgcgtgtgaccgacatggcgctgccgaatcaggggaccgttgattaccccagcttcaagctcgtcatcgtcggcgatggtggaactggtaaaactacatttgtgaagaggcatctcactggagagtttgagaagaaatatgaaccaaccattggtgtggaagttcatccgttggatttcaccactaactgtggtaagatcaggttctactgctgggataccgcanggcaagagaagtttggtggcctcagggatggatactatatccatggccagtgtgcgatcatcatgnttgatgtaacctcaa

SEQ ID NO: 12654 - DNA, 390 bp, Zea mays
  unsure at all n locations
  Clone ID: LIB3150-094-P2-K1-A10
cgaattcccgnngcgccgcccttttttttttttttttttttttttttttttttttttttttttttttttttttttttttttttatttttggttggtttttttataaatgggggcggcgttttttttttttnggggaaggttccccttcttatttttacaaaccccttttattccatccccccaattcaaaaagtttcgggagaaaagtttaaattaaaaatgggtaacaaaattatttttttaaaatttttccaaaatgcctttaaattaaaattgcccaattcccaaaccgggttgtattttttttaggcaaaaaaaacaacccccctcttatttatttttttggggtgtttttataaaaccatttttgtttttgcggaaaaacccccc

SEQ ID NO: 12655 - DNA, 289 bp, Zea mays
  Clone ID: LIB3150-094-P2-K1-A5
agaaagtaacagagatgttttttataccgtttacgtccgatcccttggtacaggccatgaacgttggtcacacaagcacggccagacaagcctagaatacaatcccgattcagaaaatggagagcaaaggttcatcgtaaaaactaagagagccagcaagctagcattttatttagtaaaatcggtcacccgtcggtacccaatcttttgagttgtacacagttgtcgtcttgtggctgtatcccttttttctgtaggcttacgtgttagccatttaagtctcttgttg

SEQ ID NO: 12656 - DNA, 408 bp, Zea mays
  Clone ID: LIB3150-094-P2-K1-A6
accgtcccgattcccgtgcggccgccctttttttttttttttttttttttttttttttttttttttttttttttttttttttttgggaaaacggggggccaactttttttttatttgggaaaaaattacatcaggggcgtttacaatgcaggattaggtctgatcaaatagataagatgacgggatcatattggcccttaactctggtcctccattggtattcttgagcatcatgattcgttccaattccatcaaggcagaacaaatgcatgcatccatccagccagccatggagtcaaatcaaggccgcaaacaaggcagccagttccattgtattttcctgtggattggccactccgacgggttcacgggggcgttaccggtggaggagacaagattgaagggggg

SEQ ID NO: 12657 - DNA, 439 bp, Zea mays
  Clone ID: LIB3150-094-P2-K1-B10
ccatggcaaaaaacagctgtcattcgaccattttttttactgaaatagcatcatccacaggaaatcacaaggagtcaagaaacaatggtatacatagtatctatatatatagcacgaacgaatgcccattttcgggtctctcaccaaatctgcgctatcccctctctctccctcttctcttgagaaaatagggtctcactctcatggcaagacaaacaaagttacagcttcacaaatcaggctcatccaaatggtggatggcgatggtcaaacaaaccgtatcaagcaaagagccgccttctccgtctgccagccgccttcatctccgggccgtcagcagactccccatgcaccacctcgtccaccagctccttgaatatcgacctttcgatctccagcaccatccccgggagctccttgctgaagctcgtccatccct

SEQ ID NO: 12658 - DNA, 432 bp, Zea mays
  Clone ID: LIB3150-094-P2-K1-B8
ccggccgaattcccgggccgccgcccttttttttttttttttgacaaaaggttccgggcaaaacgttttgttcaatttgtcagaagcacaaacacagctgacggtaaaaattgggacaggcggtctgaacattcatctatttatgagctcccagctctgaaagaacagatcttacatcctacatgaagaaaatttaatctcacactagctatcactcttcctcagaaaatagcttcattatttcagcagagctccaatgccgtttgagtcctatcagaccacaaacatcgctaaacaaagtacctcagaagcctgccttccacggtaacgggaggcagcatactcaaaatctctcaccaaatctgaaaaaaacggtcccagtaccagcattgtgatctacgatgtactcttcccttaccaacccaagcttga

SEQ ID NO: 12659 - DNA, 323 bp, Zea mays
  unsure at all n locations
  Clone ID: LIB3150-094-P2-K1-C5
atggtncatcaacttttataataataatgctgttaaaccagcggacactgtatcagaccctgacagctgtcgctgctaaaccagccttcactgcagaaggttcacatactttgactaatccttcaaagtttcttaataaaccacaatacaacgaagcatctttggtaggcaagacgagcacggattcctatcctaagaggtggccttcttcttcttgggcaccctttacccacccacaacacattcatggtcacgctcgtaaggcttcaaccttacctgcttcctgggtctgtacttattcgtcttgagctttttcactttcg

SEQ ID NO: 12660 - DNA, 398 bp, Zea mays
  Clone ID: LIB3150-094-P2-K1-C7
agcagcaattcactgtcttattgtgagtggtttagcgaaacagtgagatccctagttattatatgatgaggtcatgaccaccccgaatttcaactgtcaattcagcacgccatctttcatataccgattttcatgagtcattacctagttataacaaaacaatggctacctagtgcatccgcctaaacttacagcggcgtcgaaatttaaatgttctttcctagctcaatcttcttcaccatcctgagtgtgttgtgaaagatggaatccagtattccagcaaccgtgaagaccccaccgatgatagcgcagacatttgtgatgaaatgggagaaggatttcgggacttcagttaccaagacctgcatgggagaaggctcaaaatggaatttcacaac

SEQ ID NO: 12661 - DNA, 331 bp, Zea mays
  unsure at all n locations
  Clone ID: LIB3150-094-P2-K1-D10
cgaattcccgcgcggccgcccttttttttttttttttcaggaaaaaataataatctgcacttattttacattgnataggtccccttttcaaccggacgagtgataatactccagagttcataaagtacaacgtaagacaatttgcttcattgtacaacaactaattcaattattttgccaaaatccaaattgtaggccggtactttncagaaacattttattcaagcgcttataccataaacaaatgggggaactttaacaagcactaatgaaatatcgagacaaacatttgagagcagcaaaaacactgcagaatcgaaaaaactcaaac

SEQ ID NO: 12662 - DNA, 412 bp, Zea mays
  Clone ID: LIB3150-094-P2-K1-D11
cgaattcccgggcggccgccttttttttttttttttttttttttttttttttttcggagctattttaaaacgacctacaatttatagaacggggagaatgtctagcaataagcaggcaaactgacggttccacaaccaggaggaaaataaacactgcatacatcaatccaacacattcttgtgctttctctttttgcagtacatgatcatcatcacccttctataactgataacaggcacacttacatggccaatacatgatcatttagaaacacacaggtacatgcacatatagctctatgcagggaagttctgtcacggatggacacttcacagccatctgcactgagagctctatatccacgtttactacaccgtagtctcagtaaggaacgatgatggattcaatgag

SEQ ID NO: 12663 - DNA, 284 bp, Zea mays
  unsure at all n locations
  Clone ID: LIB3150-094-P2-K1-D12
tcccgggccgccgcccttntttttttttttttttttcttacctttcttttcaaacttatttttattgtntaacatatagagcccatagagcgggttcatttattcattacaccgcatagcatttttataatatccccatcacaactccacaagacccataaacaccattaaaggtttacatcttacaacaaaaagagtatctaattattaaccaaaattattgtgcatagctatcacaaccaccatccttcttcatgaaccgttatgcttcaactttatataaa

SEQ ID NO: 12664 - DNA, 144 bp, Zea mays
  unsure at all n locations
  Clone ID: LIB3150-094-P2-K1-D5
ccgccgccctttttttttttttttttttttataattattcaatcttttttatttttaaaannananacaaaaacgggggcccattcccaaacatcggggggccaaacattttaagggcccctgaaaccacaaaagccccataac

SEQ ID NO: 12665 - DNA, 465 bp, Zea mays
  unsure at all n locations
  Clone ID: LIB3150-094-P2-K1-E1
cgccgcacgtaccgtccggattcccgcgcggccgccctttttttttttttttttttttttttttttttttttttttttttttttttaaaatatcaaaaatatataaagtttttttgtagcatccgggggaatatttaaactgtgtctatgaaacatccccattgctcttattacatgatactctactatgcaaccaacagaagcacgacttcgctttattgccaaattaaattaagaaatgttctatggactacaagatcacctcagggaacttttgctaactacaaggtcttatgcgagctccaaaacaagagctggtgctccgcctccaccgttgaagacaccagcaactccgatcttgccacttttcgccctgagaacaccaataagggtaaccaaaatgcgngcaccattgcacccgagaggatgtcctaaagaaacaagctcctccatgaacattaatcc

SEQ ID NO: 12666 - DNA, 321 bp, Zea mays
  unsure at all n locations
  Clone ID: LIB3150-094-P2-K1-E11
ggccgccctttttttttttttttttttnttnanntttttttctnnttttttttttttttttttttttttttcctttggtggttttnnnnaaggcaaaagggggaacttattttattaaaagttttacggggacacataaacctgccaaaatatgagccattaatgctcaaccaaccacttggattcccccaacatagtttcaaacattcccatggaaaaaaatttattttcggaagcactttttttcgggggggaagaaaacaactccctcgtataaccaaaccttgagttcttcattttaattggggcttctaatttggc

SEQ ID NO: 12667 - DNA, 331 bp, Zea mays
  Clone ID: LIB3150-094-P2-K1-E12
acctcggcgcggaaggcgtaggggtcggccttgacccgcactacttcgtcggcgcccagcacctcgaacttgtagagatcgccctcgccgacctgcggcacgaagatctcccacagcccgcactcatggcggcggcgcatcaggtggcgccggccgtcccactggttgaagctgccgaccaccgagacgcggcgcgcgctcggcgcccagaccacgaagcgggtgccgccggtgccctcgtggatctgcggatgcgcgcccattcactcgtagggccggtggtgcgtgcccttggacagcagatagagatcggtgtcgcggatcagcggct

SEQ ID NO: 12668 - DNA, 438 bp, Zea mays
  Clone ID: LIB3150-094-P2-K1-E4
cgccgccctttttttttttttttttttttttttttttttttttttttttttttttttttttgggtagggaatatatggattacttatttgtaggggggggaacagcgcaacacatgtccatagtccatacataattggcagataacaaggaattacatgattgatccaaaccttcatggtcttttggaagccatgaggatctttttacacagcaacaaacccacaaatcaccaaagcagtcttttgcagcaccaagtctataatggcatacaaatccacagtagtaggcgagtccatgatgcgtgatcatgaaactcgcgatggcggtgcgcctagcgtgccccatccttgatcttatcgaggctgatttcactcgcatttgtggcctggagtttaacctgaatgccattgaggccacttttgaatttttggtttgag

SEQ ID NO: 12669 - DNA, 79 bp, Zea mays
  unsure at all n locations
  Clone ID: LIB3150-094-P2-K1-F10
tttttttttttttcannnnatttttctttttttaatttttttattttttctttttaactaaaaaaccgccgcacacatt

SEQ ID NO: 12670 - DNA, 277 bp, Zea mays
  Clone ID: LIB3150-094-P2-K1-F12
aaaaaaataaaatgggagggggagaaaaaaaaaaaaacataaaaaataaaaaaataattacaatcaaaaaaaaaaaaaaaaaaaacataaaaaaaaacaaaaaaaaaaaaacaaaatataaaaaaaaaaaaaacaaataaataaaaaaaaaaaaataaaaaataaaaaaaaaaaaaaaaaaaaaaaaaaaaaaaaaaaaaaaaaaaaaaaaaaaaaatataaaaaaaaaaaataacaaaaaacaaaaaaaaacaaaaaaaaaaaaaaataatataat

SEQ ID NO: 12671 - DNA, 109 bp, Zea mays
  unsure at all n locations
  Clone ID: LIB3150-094-P2-K1-F4
gatcaaaacaactcaccttattatantttttctcaaatctaccctaatccgccgttattataacaaaacacgcagccccctacacacctacctataattaatttttctc

SEQ ID NO: 12672 - DNA, 203 bp, Zea mays
  Clone ID: LIB3150-094-P2-K1-F5
gttcgcttccggtccattttttattttattcaaagaaacacacgccatggcggcggtacacggtgacggcgcggatttgcacatgttacgcacgcaacactacagtagacgcagtctgcatagtatgcacccgcacacagctcgaatcataaactaaaagctatagcgccacgcctttcacggccatccctgcggtcggccgg

SEQ ID NO: 12673 - DNA, 147 bp, Zea mays
  Clone ID: LIB3150-094-P2-K1-G10
attaaaatccgccgcccttttcttaacataaacaccaaaaaaccaatcaaaaaatccccttcccccataaacaaaacaaaacaacacattacactaccccatacaaaatcccatctaaacaaccccaccatccttccccaaccaaca

SEQ ID NO: 12674 - DNA, 70 bp, Zea mays
  Clone ID: LIB3150-094-P2-K1-G12
cggccccccttttttattttttttttttttttttttatctttccttttttttttttataaaatatcctaa

SEQ ID NO: 12675 - DNA, 99 bp, Zea mays
  Clone ID: LIB3150-094-P2-K1-G4
actaacaaacattttttttttctataataatttacataatcaaccgcctaattaataaaaatagggccgccttaataaattttttacaattcaccctac

SEQ ID NO: 12676 - DNA, 302 bp, Zea mays
  unsure at all n locations
  Clone ID: LIB3150-094-P2-K1-G6
gtaccgtccgtattcccgngcggccgcccttttttttttttttttttttttttttttttggatccaaataagttgctgtctccaactcagcatatatgaatttttgccgactccaactgggcatataaaattgtttttgccgatacatagccagcattacagcatagttgatagaacaaaaaaagggggctgctcgattctccatcggcaggaccaacttacacgaaatttaacagcaaagagactaattaacatacaaatttaaagataaccattatcccacataggaagcatgttttttg

SEQ ID NO: 12677 - DNA, 168 bp, Zea mays
  Clone ID: LIB3150-094-P2-K1-G7
acgaagagaagttgttatttccactcattttataaacgactgatacctatctacgaaggcttatctaaacttggaggaggcccaaataaccccaaattaaacactccacaaccgttacactggcaaacaacaaccgagcaaaaatcaacaacaaaagataaacatatc

SEQ ID NO: 12678 - DNA, 434 bp, Zea mays
  unsure at all n locations
  Clone ID: LIB3150-094-P2-K1-H1
cgtccgaaatcccgggtcgccgccctttttttttttttttttttaaataatttaacaaaattttttttttaaannngaacataaaaaaaaggggggatattaaaaaaaataggggggatcatatattaaaaaataacaaaaataatntaaaatttttaaaaaaataaaataataataaaaattaaaaaatattaattaaaaaaaaaaaaaaaaaaataaattataaaaaaaaaaaaataataaaaaaaaaataattataaaaaaaaaataaaaataaatataaaataaaaataaaaaaaaaaataaaaaaaaaaataaaaataaaaaaaaaaattttaaaattattaaaaaataaaatattaaatattaatattaaaaaataaaaaatatataaaataaaaaaaaaaataaaaaaaaataaaaaaaaataaaat

SEQ ID NO: 12679 - DNA, 265 bp, Zea mays
  Clone ID: LIB3150-094-P2-K1-H10
caccacccttttttttttatctacaaacccacaaaaacccgccgcctttttcaaaaaaaaaccgccgcaaacaacaaataatattcttttcaaatccaaattttacaacccctctaatataactctatctcccccatcactaacaaaaaccttttgaaaaccattttcaccccttcccctcttcttatataaaaataccccccccttgcccccccaacatttcccccctaacaacccttctctttttttctttttaacaaatttt

SEQ ID NO: 12680 - DNA, 367 bp, Zea mays
  Clone ID: LIB3150-094-P2-K1-H11
cgatatcaggaagcatcacataagagttttcactacacagctggcttatctcaaaaaggacattcgtattagatagtaaaggtgcggagggaagtaatataaatgagcacgttattttgtgctatgaagctacagtgtcgtaaatcgaaaagggaataaccgcaattttttttattgtgtcggaaaacatatatctgctagcacttgcagctcaaaaccaagcatggcaatcgacaactacaggctatggctttgcaacgatgtggaaccagacaatgcaattctcagggctgcaaccgttgcactttagaaaccgtgctgatccgcaccgggaaatttcttgaaacaagctgaaagactcattttc

SEQ ID NO: 12681 - DNA, 181 bp, Zea mays
  Clone ID: LIB3150-094-P2-K1-H12
ggtgatggcggcgtagcaggggcagacgtcgtggttcccggcggtgcccggcggcacgcagttgcagcgggcgcagcaggaccgcggcgccctccggcacaggttccaccgcgacgacagcgcgcaccgcgccccgcacgcgctcccgcagtctatgaagctcacgggggacggtgcgggg

SEQ ID NO: 12682 - DNA, 449 bp, Zea mays
  unsure at all n locations
  Clone ID: LIB3150-094-P2-K1-H3
ccgtcccgattcccgncgcgccgcccttttttttttttttttttttttttttttttttttttttttttttttttttttttttttttttttttttggttttttttttttttttggtggggttttttttttttttttttttttttttaaaaaaaaaaccatttttcccccctttttttttttttttccccaggtttttaaatttttggggtttttaagccctaaaaatggcccattttaaagggttttttttaaacataacccaaaattccttattggggttttaaattttagggggcccccaaaaaaaaggaaaacaaattttttgcccctttgtgaacaaactttaaagcccctttcccttatttagaaattaaatcccaaatggtttttgggggttttttttgaaagggataaaaaaaaattttggtccaaaaagggtcttttttttt

SEQ ID NO: 12683 - DNA, 343 bp, Zea mays
  unsure at all n locations
  Clone ID: LIB3150-094-P2-K1-H4
cgaattccncgaccgccgcccttttttttttttttttttttttttttttttacattttttttttcaaaaccagcctaacaataacagaagcgttttaatcacattatcctgcaacctttacaattccttttgttttaaaacacaacaatattttattatatctcctttatataatttacaaatccaaaactttaactatttttaattgtcatttcctcatattatttttataaatctaacaganaataaattaataattataaatttctttatctctaaattgtttttttatttttttttaaatatttttttttttttatattatattctattttttctattt

SEQ ID NO: 12684 - DNA, 225 bp, Zea mays
  Clone ID: LIB3150-095-P1-N1-A1
ccacgcgtccttgtcttgagcattgccaagaactggcgggcttacacccacgaaggggtactaccatcatgggcggggcgactctgctgctgatatcgagaaggctgggctggactacaagatgagccacatttcgaccagcaggggcgcgagcttgaaactcttggaaggcaagactctacctggtgtccttgccctcgatgacgcctagatccagtgctgctg

SEQ ID NO: 12685 - DNA, 392 bp, Zea mays
  Clone ID: LIB3150-095-P1-N1-A2
aaataaaatgcttccgtgcgctggggctgataggctccacactggaatgaggggtgcctttggcaagcctcagggcacctgtgctagggtggacattggtcaggtcctcctttctgttcgatgcaaggacaacaatgctgcacatgccagtgaagctctgcgtcgcgccaagttcaagttccctggccgccaaaagattattgagagcagaaagtggggcttcaccaagttcagccgtgccgactacctgaagtacaagagtgagggtagaattgttcctgatggtgtcaacgcaaagctgctcggtaaccatggaagacttgagaagcgtgctcctgggaaagctttcctcgaggccgttgcttaagtccaatctacagttggaatgcgaa

SEQ ID NO: 12686 - DNA, 164 bp, Zea mays
  Clone ID: LIB3150-095-P1-N1-A3
cggacatggcacgctcccgtaggttgggttcttttaaagtcgaccaagccgtccgtttcacacgggaattttggggaagggttaatggttggcggttggcctgcccggcctaaagattttggcctgctcccgctgtgttgaggacccctagaatggcgggggtt

SEQ ID NO: 12687 - DNA, 371 bp, Zea mays
  Clone ID: LIB3150-095-P1-N1-A4
aatgcacctgctccgaagactgagagcagctcagaaggcattctcatgagtggacatgttgcacccccaaagtcatcgaacttctttgttgaatttgggatggacagtggatatcacaaaaaatctacatccagttcatccaaagtgcagattgaggaaagcagtgaagcaagacagaaattctcgaatgtaaaatcaatttcatcctctcagttttttggtgatcaggccagtttcgaaaaggacactcaagtctctctccaaaagttttctggttcctctgccatatcaagtgctgatctatttggccatccagcaaacaattctagcgtggatctcagtgcttcagatttgatcaacagaatatcatt

SEQ ID NO: 12688 - DNA, 258 bp, Zea mays
  unsure at all n locations
  Clone ID: LIB3150-095-P1-N1-A5
gcaggacctgttcctgcggtctaggccgcggcggtgagatggtgatggtgtcaggcggcgganggaacgcgtgggcgaaggagatgaccctccgccgcaggatagccagcatattcaacaagacgcaggaacacttccctactctgaaggactacaacgattatctggaagaagttgaggacatgactttcaacctgatcgaagggatagatgtcgaggagattgaagcgaaaattgcaagataccaacaggaaaatg

SEQ ID NO: 12689 - DNA, 172 bp, Zea mays
  Clone ID: LIB3150-095-P1-N1-B10
gcgctttgtacaacaactggtggcccatgttagcagctctcatgtacgtccttgtaccaatgccatgcctgttttttggtggtggatccacacacttcttgaccagcagagaaggtggagggtggattaatgctgcaaaattcttgactggtgcgtcggccattggaaggcc

SEQ ID NO: 12690 - DNA, 399 bp, Zea mays
  Clone ID: LIB3150-095-P1-N1-B2
gcgtacttcaagcgtttccaggtgaagttcaagagaaggcgcgctggcaagacagactacagggccaggataaggctgattaaccaagacaaaaacaagtacaatacacccaaatacagatttgttgtgcgatttaccaacaaggacatcacagcacaaatcatctctgctagtatagcaggtgatatggttcttgcttctgcttactcgcatgagttgccacgatatggtcttgaagttggtctgaccaactatgcagctgcctactgcactggccttctgttggctcgccgtgtgctcaagacccgtggtttagataaggaatatgagggcaatgttgaggccactggtgaggatttctctgttgagccagctgatgagaggaggccttttcgagct

SEQ ID NO: 12691 - DNA, 363 bp, Zea mays
  unsure at all n locations
  Clone ID: LIB3150-095-P1-N1-B3
ctcgcccggtcattccattttcaccaccacatgcgttcttttccgccgccggcggtggcccggcttctcacacaaaccctnaccctagcccgttccggcgncttctccttccccaccggcgcattcgccttcctccgttgcctcgctaccaaggtcgagatcgtcgagatcgacctcaccgaggaagacgctggctcctcngcccacgggttcttcccctagtccccatcgatcgaggtgggtgggatccggcgcctggaggaggccatccacggcgttatggtgcgccgcgccgcttccgattggctgtccttcgtgcctggagggtgctactgggtgcccccgcttcgcctttcgcacgag

SEQ ID NO: 12692 - DNA, 333 bp, Zea mays
  Clone ID: LIB3150-095-P1-N1-B4
cgccaccgtaacaaggtccgcaatggccaagctatcaggtgtgcaatggcaactggaaaagagcagggtgcaatttccactgccagtagcggtgatcaaaccaagggcggtttgcgtggaaaattaaacaaagttgttttagcttatagtggtggtttggatacatccgttattgttccatggctcagggagaactatggttgtgaagtcgtttgtttcactgctgatgttggccagggtgccattgaattggaagggttggagaagaaggcaaaagccagtggtgcatgtcagcttgttgggaaggacctcaaagaagaatttgttagtgaa

SEQ ID NO: 12693 - DNA, 388 bp, Zea mays
  Clone ID: LIB3150-095-P1-N1-B5
ttcgccacccacccacccactcgcttcagccgccttctcctcgcgtaccaagcaggtggagacaggatgccggctggccactgcctgcgctcgcggacgctcgacctcttcgcgcgccccttacgcaagaagggctacattccgttaaccacctaccttcgtacctacaagatcggcgatttcgtcgatgtcaaggtgaacggcgccatccacatggggatgccgcacaagttctaccacgggcgctccggtcgcgtttgtaacgtcagcaagcgcgcgacttgcgttcatgtcatcatgcttgtaaatggtctcatattctgtaagtttttcatgttattttcggagtatttttttgcattttcttattatgtattaaataattctt

SEQ ID NO: 12694 - DNA, 243 bp, Zea mays
  Clone ID: LIB3150-095-P1-N1-B6
cccatctacccactcacttaacaggaggtgtctcttccaaccaaggagggttatacactattcctactttccacttcctgtactcgagtactaaccatcatctattctaccctaatcattaaaaaaatctgcttttttttttccatattcctacttacctacaatatttattattacgtttatttctttctaaattttttcttccaaattaattatttttctcaaattcttttataaattgaa

SEQ ID NO: 12695 - DNA, 375 bp, Zea mays
  Clone ID: LIB3150-095-P1-N1-C1
ctggcactgaggcgattgccaagaagctagctgagcttacaaccacgaagggcgtcactaccatcatcggcggcggcgactctgctgctgctgtccagaacgctgcgctggccgacaagatgagccacatttcgaccggcggcggcgcgagcttggaactcttggaaggcaagactctacctggtgtccttgccctcgatgacgcctagatccagtgctgctgctgctactcaggttctgccagctccgcgtgtcatcttgtctacgaccttggtgtagcactgcatggctaagggctacatacccgcacatggacttttggggataggctcgccaccgtgttctgctagatgagtcgtggaataagctcttact

SEQ ID NO: 12696 - DNA, 175 bp, Zea mays
  unsure at all n locations
  Clone ID: LIB3150-095-P1-N1-C2
tctgtagggcaatgtctcagcgaggattgggtggctgttgcttttgactagtagggtctctcaanctntnccatacttggaggatgcactggagaggatgaaggacagccttcctccgaagcattattgattttgacatgtgtataacaactcgcgtaaatgattacatggcata

SEQ ID NO: 12697 - DNA, 177 bp, Zea mays
  Clone ID: LIB3150-095-P1-N1-C4
tctctctcttaaccttttaaccctcatcctatttcctaaaaaaatatataagggctctctaactctcatatataaaaaccacatacaccaacacaaaaacaaacaaacacacaccaaatcacaaactttaataaacaactcatctagcttccccccccgcttaaaacaaccctcttc

SEQ ID NO: 12698 - DNA, 397 bp, Zea mays
  Clone ID: LIB3150-095-P1-N1-C5
gggcgtgctagggttgagcggctacacgagcgtgctagggttgagcggggctccgcgggcgtgctaaggtttcgcgagcatggcggtggccggcgagcaggtgagggctcccgcctctaattccctcccgagctcctcgagcggccaagcgtctgtgtgtggccgtgtgggcgaaccacatgcgccagccaccgtgcgccctgggtgagcacgtgaggccagaggagaagcgcatgtacaagcagctgcgccagtttagcgcgagactgcagggtagtaggcaagccgcgagcgtgtgactgcagctgctagccaagtgagcgtgccactacaggacagcaaacaacgacgacagcaagcaaatgatccgttcagcatgtgctccctattcgaagtc

SEQ ID NO: 12699 - DNA, 386 bp, Zea mays
  Clone ID: LIB3150-095-P1-N1-C6
ccgccgccaccgccgccaaaacggcgggccgacttggcgtgcgcgtcgggcctcctcctttacagcgcgggcggtgggatatggcatcggaggacgtggtgggcaagagcaggggcgacacggccgtcaccaccatcgtcaacctggcggaggaggccaagctcgcgcgcgagggcgtcaaggcgcccggccaccagatcctcaccatctgcaagtcgctcgtcgccggcggcgtagcaggcggagtgtctcgtactgctgttgctccacttgaacgattgaaaatattgcttcaggttcaaaatccgcacagcattaagtacaatggtactgttcagggtctcaagtttattttggagaacaaagggccttcgtggacttttcaa

SEQ ID NO: 12700 - DNA, 393 bp, Zea mays
  unsure at all n locations
  Clone ID: LIB3150-095-P1-N1-D1
tgtctttgccgccgccactgcccnatccaggtgggcatactaatccctcctcgtctccgctccaaatggcccgcacgaagcatactgcgcgcaagtcgaccggcggcaaggcgccgcggaagcagctggccaccaaggcggcgcgcaagtcggccccggccactggcggcgtgaaaaagccgcaccgcttccgccccggcaccgtcgcgctccgcgagatccgcaagtaccagaagagcacggagctgctcatccgcaagctcccctcccagcgcctcgtccgcgagatcgcgcaagactttaagacagacctgcggttccagtcctctgccgtggcggcgcttcatgaggccgctgaagcgtacctggtggggctcttcgaggacaccaacc

SEQ ID NO: 12701 - DNA, 265 bp, Zea mays
  Clone ID: LIB3150-095-P1-N1-D2
gttgggcgcttggcttattgcacaggtcgagttcgtaggtagtacgactgtcagggaggaagaggcagggaagacaatttggagaccctacggagcatacctggggggagcacgcccgtcacacgtcaggcaaacaggacaggaggttcccagataaccgctgtttgctgcagcctgggatggacccctgctgctcaacacaaagggtactttattggtcctagctagggggccaatcaagcaactctacggaaggacggatcga

SEQ ID NO: 12702 - DNA, 397 bp, Zea mays
  Clone ID: LIB3150-095-P1-N1-D3
tctttttcgttcatcacctcctttatctcggggggctttttatataccgggcagggcaaccaatcctcaaattcaaagacctcaatgagattctcaacatggcaaacaccacccagtatagattgaccaccctcgtattcaccaacagcctcaacactgacaacaccctgactctctcgctcaactcctataccatttgtctaaactacttccacctcttctatgcttccattcaccttggtgatgtacaacactcatcctatctactagagagaaggactttgacatcctgaataactacctacacgtaaaggctgtcccaaccccaatcaataacccctcattgttgtaaacacttcaattgttgtcttatgcactataaccacatattattatt

SEQ ID NO: 12703 - DNA, 398 bp, Zea mays
  unsure at all n locations
  Clone ID: LIB3150-095-P1-N1-D4
tcttacgcgtggtcttttaacggtcattctatttcaatttaaaaaaagggggggnaanaaaaaaaaaaaaaaaaaaaaaaaaaaaaaaaaaaaatattaaaaaaaaatttnatacaacataaaaataaaaaaacaaaaactttaaaagcccccccccccgtatttcccaacccttcccctcagcccccccaattttcccttttaaaaattcctttaaaaccattccaaatcatttcccataccttttccctttgaaaacttttttccccttccaaattccccacctttccccacccggaaccctaaattttaaaccccggttcccccttttgccccccctccccccctaaatccctttgcccccccccccccttttcacttgaaaacccctttccccc

SEQ ID NO: 12704 - DNA, 392 bp, Zea mays
  Clone ID: LIB3150-095-P1-N1-D6
tctccttggagttaaacgaaatgaggtgaccagtgatggtttattttctgggggagaaatggagtgcatgggttgctgtgtgaatgctcctatgattgctgtggctgactactcgaaaggctcagagggttacacatataactactatgaggacctcactccaaaacgagttgttgagattgttgagatgcttagaagaggtgaaacaccccctcgaggtacacagcacccagagcgaaaaaactgtggccctgccggggggaacaccaccttgcacggagagccgaaacctcctccatgcagggatctggatgcctgctaggtttgcttcggagcattacgagcacgcgcataacttggctcgtactgtaaggtgtgcaaactgcacacag

SEQ ID NO: 12705 - DNA, 400 bp, Zea mays
  Clone ID: LIB3150-095-P1-N1-E1
gctttatctactccagagcgcagaagaacccggtcgacaccatgagggtgggggtcgttgccctcactctcctggctctctctgcgagcgccacctacacgcatacaagcggcggctgcggctgccagccaccgacggcggttcatctaccgtcgccggtgcatctgccacctacggttcacctgccacctgcggtgcatgtcccaccgacggtccacctgccgtcgccagtccacctgccaccgccggtccatgtgccgtcgtcggttcatctgccgacgacaccatgccactaccctactcaaccgcccctggcttagcctcattcgcagccacacccatgcccgtgccaacagccgcatccaagcccgtgccagctgcaaggaacctgcggcgttgg

SEQ ID NO: 12706 - DNA, 252 bp, Zea mays
  Clone ID: LIB3150-095-P1-N1-E12
ttcaaagcggcagtgcgtacagaggatcgcggaacagaacagcatgaagagggtcatcggtctcgtcgtgtgcctggctctgtcagctgccagcgcctttgcaatgcacatgccctgcccctgcgcggggctgcatggcttgtacggcgctggccccggcctgacgacgatgatgggcgccggcctgctgtacccctacccacagtacctgaggcagccgcagttgcacccgttcgcggtggcgccctacta

SEQ ID NO: 12707 - DNA, 394 bp, Zea mays
  Clone ID: LIB3150-095-P1-N1-E4
agaccaggcactaccttcccaacaagttcaaaaagtttgttgttcacaatgtctccgagctggagctgctgctgatgcacaacaggacttactgcgctgagattgcccacaacgtgtccacccgcaagcgcaaggagattgtcgagcgtgctgcgcaaatggacatcgtggtcaccaacaagcttgccaggctccgcagccaagaggacgagtgaaatgttgggtagttttgattgtgctctgctggtgttgaagatgttactgagattgatgttcttctgtaccatttctatgcttatgatagacttttcatatggacaaaattatgctatgagtgaaaagagttatggggagtgccatctagttttgaccggactccatgcagtgtggagcc

SEQ ID NO: 12708 - DNA, 400 bp, Zea mays
  Clone ID: LIB3150-095-P1-N1-F1
cacatactcctccccagcgcacacatcgatagggaattcgatctatatatcctcttcttctcatggcggtgttcaagacgacaatcgtcctagtcctagtttttgtggtcttgtcttcaacgtctccgtgctacaaagccggacgaagctgcattggcggctgtgatcaacagctagatgcgacaccatgcgtggaccctctcaagaacgacgcggaccactgcacgaccgcgacatgcgctttgcaatgcctatccgccaagcacaagaccaagtcggcctactgcaagcatgagggcagcaaatacgagtgctgctgcccgccatgagagcaaccaagctagagcagcggttgtgtgatacactcaataaaataaataaactggttgttcaataataa

SEQ ID NO: 12709 - DNA, 376 bp, Zea mays
  Clone ID: LIB3150-095-P1-N1-F2
gtcttcttacagcccgggctgggttatcgatggcacttggagcttttttagctggtctgttactagcagaaacagagttctcattgcaggttgagtcagatatagctccctatcgtggtcttctgttaggacttttctttatgacggttggaatgtctattgacccaaagctgcttctgtcaaacttcccagcgatctctgtgatattgagtctcttgataattggaaagacattgttagttacatttgtcggcagggtgtttgaggtttctgctatagctgccattcgtgttggcctcttgcttgcacctggtggtgagtttgcttttgttgcctttggagaagctgtcaaccagggtcttctatcaccttaatt

SEQ ID NO: 12710 - DNA, 401 bp, Zea mays
  Clone ID: LIB3150-095-P1-N1-F4
tctcttatacccttctatctagacttaaggagggggctctgttaggttgcgggagccctctaccgatcccatagggtcccgctcatgctcattatgtcaggaactacactggcaaaatatctgtccacaagaatgctctacttcagttatacgtttgcattccaatgaaccttgccatctttttttcatatcgaacacacccctcttagtcgccctgatgcccaacgttatatatgacaaagcctgcttaaacatattgtgaattattctactggaacacaaccatcttgccttaccatgtaacgatataagtgtcacctacatgacaacatgctatgttactacattgatatatacgagagctcatcccaggtgaatcttgttcaatgcttacctacata

SEQ ID NO: 12711 - DNA, 371 bp, Zea mays
  Clone ID: LIB3150-095-P1-N1-F9
gttcgcaattacagagatctagagagagagatagagggcagatctacgctagagcgacagagccacaaccaaccgagagggacagtccagtatggtggtggcgctcgggcccggccggttctacggcagcggcctgccgaggccgcgcttcttcccgggcgaccgcgtggacccgccggcgtccgtcaccgacccgctgctcgagtgggcgcgcgaagcgcactggtccatgggcggcatcagcgtgaagcgcctccgcctgcagggccgcatcgagggttccgtcgacaagctccgccgccgtgcgcaccgtgacgccagggtcaaggccaaggccaaggcccgcgccgctggccacatgccggcttcgc

SEQ ID NO: 12712 - DNA, 400 bp, Zea mays
  Clone ID: LIB3150-095-P1-N1-G10
ccgcttcccgtgcagcgccctccctctacgttcccccatttcctgtgttggcggcgatggcgcggcacttcgtgctcaacaccggcgccaagatcccctccgtggggctcggcacctggcagtctgaccccggcgtcgttggcaacgctgtctacgccgccgtcaaggcgggttaccgacacatcgattgtgccagagtttacggcaatgaaaaggagattggtttggcgctgaagaagctatttgaagagggtgtagtgaagcgagaagatctgtttatcacctctaagctatggagtgatcatcatgctcctgaagatgtgcctgaggcactaaatgacagcctgaatgatttgcagcttgagtacctggatctttatcttatccattggccatttag

SEQ ID NO: 12713 - DNA, 337 bp, Zea mays
  unsure at all n locations
  Clone ID: LIB3150-095-P1-N1-G2
gcacggctttcccttcggctttttccttcccaaaggaagcgcnttcctcccgtcacncnngcggcaaggtnngaagtcattcccttaagggatgaacccnncaagatagccttgccatctcactttgccttccttggctacaaggnctggcatgactcacattgtccgtgaggttgagaagccaggatccaaactccataagaaggaaacttgtgaggctgttaccatcattgaaacccctcctcttgtcattgttgggctcgtggcatatgtgaagactccccgtggcctccgcacactcaactctgtttgggcccaacatcttagcgaagaaatg

SEQ ID NO: 12714 - DNA, 375 bp, Zea mays
  Clone ID: LIB3150-095-P1-N1-G3
gggccaaccacgcgatggcggcgtacgccgggacggtgtacgaggcggacgcggaggccgtcgtgcgccggatcacgccggcactcgaccgcgccagacacaagggccaggcagggaagatagcagtaatcggaggatgtcgtgagtacactggagctccttattttgccgctatctctgccttgaaagttggtgcagatctttcacatgttttctgcacgaaagatgctgctacagtaattaagagctatagccctgaactaattgtacatccaatattagaagaatcttacagtgtaagggttgatgaacgagcatctgtttcttctaagattcttacggaagttgcaaagtggatggagcgctttgattgca

SEQ ID NO: 12715 - DNA, 391 bp, Zea mays
  Clone ID: LIB3150-095-P1-N1-G4
ttctttatccgatccgtcgagtgcacaccggctgggcccactccgatcgaggggggggccgcccagggcgagaagaagatgataaccctcaaaagctccgatggcgaggagttcgaggtggaagaggcggtggccatggagtctcagaccatccgccacatgatcgaggatgactgcgccgacaacggcatccctcttcctaacgttaactccaagatcctatccaaggtaatcgagtactgcaacaagcacgtacatgccgccgccgccgccggcgccgtctataatgccggttcctacgacgtgggtgccgcctccgtcaacagcaccgtcagcttctgtgaggacctcaagaactgtgatgcggacttcgtcaaggtcgaccaatcca

SEQ ID NO: 12716 - DNA, 169 bp, Zea mays
  Clone ID: LIB3150-095-P1-N1-H1
gtcctatcacatccctcgctcaaaaataggggggtcttactactatttatagcgggtctcacactatcacaaacaaatatctcatcccctacatactcaaatacaacaacctatctttgtcttatgctataactattatttatgacactaataatcactatttaccaaa

SEQ ID NO: 12717 - DNA, 238 bp, Zea mays
  Clone ID: LIB3150-095-P1-N1-H4
ccctgtccttctccagtgggcgccgacgccccgtggccgcgtccctctcgacctctgccaccgttgtaaaggaggctgttcagacagagaaggcaccaccagcactaggcccttattctcaggccatcaaagcaaataatcttgtgtttgtttctggagttcttggcttgaatcccgagaccaggaagtttatctctgaaaatgttgaggagcaaactgagcaggttatgaaaaacat

SEQ ID NO: 12718 - DNA, 263 bp, Zea mays
  Clone ID: LIB3150-095-P1-N1-H5
ttcttttaataaaaatctagccaaaacggggagggcctacttcatatacaggggggccaaacaactccccacccaaaaaacccaaaatacaacaagcttaaaaaccaacaattatgggctcctccctgtccttttccagtccgctcccacgccccgtcaacgtttccctatagacctctgccaccaatctaaaggaaactattcacacaaataatgccccaccaaaaactatcccttacacaaatgccatcaaaacaaataac

SEQ ID NO: 12719 - DNA, 390 bp, Zea mays
  unsure at all n locations
  Clone ID: LIB3150-095-P1-N1-H6
gaccatacatctcacttcgccaaaaaaattccgtcaacagttgaagttatacccatggcaaaactactcttgggtttgctccttgcccttgctattctagggacaacatcggctgctggttgtgtacaagacgcggaagacatgaaacgagagtgcaagcagtttgagctattcccagcgaacccaaagttgccaccgtcggcagcatgttgtgctgtgtggaagagggcagatgttccatgcctatgcaaatatgttaacaaggaagtagagaaggtatggtgcatggagaaggttgtgtacgtngncaacttttgtaagaggccgtttcaacctggctacaagtgcgggagttatacagttccttttaatatgtaaaaggagtggctg

SEQ ID NO: 12720 - DNA, 394 bp, Zea mays
  Clone ID: LIB3150-095-P1-N1-H8
ttcgtctcccacacggccgccgccctcgggttcgtgcgttccccgcgtagaggttagggttttgtcgccgccatggcgatcctctcggcgctcgccaccgaggtgttcatccccgtcgccgccgtcatcggcatcgccttcgccgtcgtgcagtgggtgctcgtgtcgcgggtgaagctctccccggctgcagccgcgtccggcggcagcaagaacggctacggcgactacctcatcgaggaggaggaggggctcaacgaccacaacgtcgtcgtcaagtgcgccgagatccagaccgctatctccgaaggagcaacatcgtttcttttcactgagtaccaatatgttggtatcttcatgtccatcttttgctggtgggatcttcctctttctt

SEQ ID NO: 12721 - DNA, 285 bp, Zea mays
  unsure at all n locations
  Clone ID: LIB3150-095-P2-K1-A10
accgtccgnattcccgnngcgccgcccttttttttttttttttttttaaaaaatttataaattttttttttaaaagncccaaaaaaccaaaagggggtattttatatcataatatggatatattcaaaaacatatattatactaatttattattatataattatttaatatatttttattttaaatatatacatcattaattatcattaattatacaattattatttaaaaaattaatttatttatttaaatataataaaataaataatattatataatattaaa

SEQ ID NO: 12722 - DNA, 182 bp, Zea mays
  unsure at all n locations
  Clone ID: LIB3150-095-P2-K1-A3
agagaanaagggaaagatttgtttgctttccattgataatagcaggggagagattacaccaaatgggctagaaactggaacacctcgaaacgaagatacagaacaaactacagtagaccggccaactagacacacaaccgaccacggccgtcacattaaagcattagaaggggaggctgtcc

SEQ ID NO: 12723 - DNA, 217 bp, Zea mays
  unsure at all n locations
  Clone ID: LIB3150-095-P2-K1-A5
aanagaannaaggtcaaggtttcttacttggaagcaacagatcatctggagaaggaattttcaacgttctaactatggcctacacaccttgttatctacactcgttacaaattgattgtacggttagaaattacataataatgtacagggaaagaaagaattcactttatcatggtttttgacctattcttcttattccttatttattagtattttt

SEQ ID NO: 12724 - DNA, 117 bp, Zea mays
  Clone ID: LIB3150-095-P2-K1-A6
tgtatggttctcgccctgttgcggtactttaagcgcagtgtaatttttctcatctttttctttttgcgtgttttatgctttcttttttttatctcttcttttttcttcttcttttat

SEQ ID NO: 12725 - DNA, 207 bp, Zea mays
  Clone ID: LIB3150-095-P2-K1-A7
gcgccggccgcttcgcttgaaagtttttagtgaatattttttgaatcttttttgattttgctgaagacggaactcgggcgcgttatgttcataaaatctatgcgtgcaaaggcatcccatttattcatgctgattctcacgttttctctttttgccaactctaaatgcaagcgctattttcacaaccgcctgaagcctgcaaagctt

SEQ ID NO: 12726 - DNA, 324 bp, Zea mays
  Clone ID: LIB3150-095-P2-K1-B1
accattggaaaaaaatacggtttttttacgagagagagacgaatcgaatcatttggtacagactgttcttgcccggcacggatgctcgtacaatcatctcacgaagatcttgatggggggtagttatcaaaaatttttacataataaaatataatattcaatacatatatattatatttattaatattaataataaataatttatatataatttatatacattatttataactattttaataattttatcataatattttaacatttatatattataaatattttctaaattatatttaacaattatttattaaactattattt

SEQ ID NO: 12727 - DNA, 323 bp, Zea mays
  Clone ID: LIB3150-095-P2-K1-B6
cttcctaattgaaaatcccattgttttactttatcctggttacaacagaaacgaaattaagtgtagcataacattactaacaaggaacacgtaggtatgtaattaaactgggattcattacacaaaacagtctctgaatttttatggtagcaggcatactagccataaggacgagacttttgagcaagctccggtgaaacaacttttggtgcatcatctcctttcgccttcttctgaaattcaatgtcttggaactgaacttttgaagatctgttctgacatccaaatgcattttcaaagtcccatccttgtctaagaccaaa

SEQ ID NO: 12728 - DNA, 164 bp, Zea mays
  Clone ID: LIB3150-095-P2-K1-C4
gcgccgccgccgccgcggggtccggcgacgccaggtgcagcggccccactttttataccgggcggccggacagctcgcgccggatcttggccagcgccgcgccctcgatgcccttgaacgtgttcagcaccacgccctacgacgaggcctgcatggcctcgttg

SEQ ID NO: 12729 - DNA, 409 bp, Zea mays
  Clone ID: LIB3150-095-P2-K1-C5
ggccgcccttttttttttttttaacaaccacaacctcatattttacttttttttttaaaacagaagcaaaacaacttcgacgacgataacacaaccacaggaggaattacatattctaccttcttgttcttttagctagttgcttttttatatttttataatttttaaaatattaataaattttattacttattattaaaatattttaatatattttataatttctataatatttattgatattattaacttattttatatttttttaatattttttatatttatttattactattatatttatattattaatttaatatatttataaatatcttcaattattcttttcttaaatattttcagaatttattttattatattaatttccattaatatttattatattatt

SEQ ID NO: 12730 - DNA, 466 bp, Zea mays
  Clone ID: LIB3150-095-P2-K1-C9
gggcgccgcccttttttttttttttttttttttaattttaatttttttttttttattattaattaatatttatattaaggaggtatttataaataaaaaaagggcactaatttaaaaaaaaaataataaattatataattataagcaaaaaaatattaaaaaaaatttattataaatataataaaaaataaaaaaaaatataatataatttaaaataaaaaaaaataaaaaaaataataaattaataaaaatataaataaaaaaataataaatctaaaaatataaataatacaataataaaaaatttaataaactaaaaaaaaaaaaattctaaattatacaaataaaaaacagattaataaaatataaaattaaactacaaaaaaattccaaaaaaaaagctataaaacaaaataaaattcaaaaaaaaaattataaatatttaacaaaatataaatctcacaat

SEQ ID NO: 12731 - DNA, 76 bp, Zea mays
  Clone ID: LIB3150-095-P2-K1-D11
ccgcctaccgtccgtattccccggcggccgcccttttttttttttttttttttttttttttattattttttttttt

SEQ ID NO: 12732 - DNA, 55 bp, Zea mays
  Clone ID: LIB3150-095-P2-K1-G2
cgcgcgcgcgtcgtcgtcgtagggttagttaccctgacttcttggagggcgaggg

SEQ ID NO: 12733 - DNA, 129 bp, Zea mays
  Clone ID: LIB3150-095-P2-K1-G3
aaaaccaaaactttattattatgcatatattattggtcataccacacatgataatgtgtgtcgtcttactgcattattacatatatagatagagagggatggatagaggtgttttttctaattattatt

SEQ ID NO: 12734 - DNA, 132 bp, Zea mays
  unsure at all n locations
  Clone ID: LIB3150-095-P2-K1-H10
attaaacacataanaatttttttttacgcacccgagaaaaccaacaggggggcttaattttacaaaataattcccccaaatcacaaatttaatcactattcttttttttttttccttctttaacacatattt

SEQ ID NO: 12735 - DNA, 93 bp, Zea mays
  Clone ID: LIB3150-095-P2-K1-H3
cacataattactcaatcatcgccgctaaatgactcaactagctagctagcctacgtctatactacaacacatagtttcttcaatattggacac

SEQ ID NO: 12736 - DNA, 52 bp, Zea mays
  Clone ID: LIB3150-095-P2-K1-H4
gccgcccttttttttttttttttttaaaaaaacaattctctcaccttttttt

SEQ ID NO: 12737 - DNA, 260 bp, Zea mays
  unsure at all n locations
  Clone ID: LIB3150-095-P2-K1-H6
atcaccaagctcttcgacctttattttcagctagccngnngcactngccaaggaggagattgtacttccctcgactgctctctatatcgctcctcttcttacagatacagctacagaagtgctccttgactagttattgccatagtaacccacgctataactactgccgaatctcatccctttttgattgttccacaccctttttccattgggtaacatgattataatttcacccttactcccattttttattctaaaaa

SEQ ID NO: 12738 - DNA, 301 bp, Zea mays
  Clone ID: LIB3150-096-P1-N1-A1
ttagtgtgtggcacactggccatactcgggtcgcctgctccaaaggctcagagcaagggcctccacattccacaccactttactgacgccctagaagcaccttgacatgtttcttcagacatgggtaaggagaagactcacatcaacattgtggtcattggccatgtcgactctggcaagtcgaccaccactggccacctgatctacaagcttggaggtattgacaagcgagtgattgagaggttcgagaaagaggctgccgagatgaacaagcggtcattcaagtatgcgtgggtgcttg

SEQ ID NO: 12739 - DNA, 380 bp, Zea mays
  Clone ID: LIB3150-096-P1-N1-A4
gtcggtagcggtgcccccgtctacctcggggccgtgctggagtacctcgccgctgaggtcctggagctcgcctgaaacgctgccaaggacaacaagaagacgcgcatagtcccgcgccacgtgctgctggcgatccgcaacgacgaggagctcgggaagctgctgaccggcgtgaccatcgaccacggcggcgtgttgcccaacatcaacccggtcctgctgaccaagaagacggaggagaaggcgtccagctgcgggagcaaggaggccaagtcgcccaagaaggccggcaagtcccccaagaaggcatagggtttggaggcggatccgatgttgtcatgtgtaggttgtaagcggacaatgtgattggctgtgtatct

SEQ ID NO: 12740 - DNA, 318 bp, Zea mays
  Clone ID: LIB3150-096-P1-N1-A6
ttcgaaaccgaaagagaggcaaaccttggcgatggagctcccgtggggaaggctgctgccgctgctgctggtcctctccgtctcgtcctcgtcatcgtcgtcggctgctgccacgctcgccgtcagcgctccgcccccactgcctgttcctcctcctcgtcatgctcaagacgccgaaggcatgctcatcaacggcaacttcgagacggcgccgcggaagctgaacaagaccctgatcgtggggcgccactcccctgccggggtggacggtgcagggccacgtggagtacgtctcgggcggtccccagcccgggggca

SEQ ID NO: 12741 - DNA, 388 bp, Zea mays
  Clone ID: LIB3150-096-P1-N1-B1
ggtgtctctggaaattttgaaagaatacatgtgttggcgcttcttgtgctggcaagaatgtcaatcactccgtgcccgtctagaagaaggactggaaaagtgtgtagggattactgtccttagacggataagatctaatatttgttggcgacttttaagtggaatggatgcaagtagggatgtcaaactctacatgcctcaggtcattgatatcttcaaagatgcatttatggattctactgatgagcacagtgacatcatctcagacatggttaatggcaaaaatggagaccaagagaaggattttcgaggaatgtattgtgcactgttaactgcaagcacacatgttgtctctgctgcgattcttgaagtgcgcatcgaacaaatc

SEQ ID NO: 12742 - DNA, 409 bp, Zea mays
  Clone ID: LIB3150-096-P1-N1-B10
aaaaaaaaaaaaaagggtgcccaaaaaaaaataaaaataataaaaaaaaaaataaaaataataaaaaaaaaaaaaaaaaaaaataaaaaaaaataaaaaaaaaaaaaaaataaaaaaataaaaaaaaaaaaaaatataaaaaaataataaaaaaaaaaaaaaaaaaaaaaaaaaaaataaaaaaaaaaaaaaaaaaaaaaaaaaaaaaatataaaaaaaaaaaaaaaaataaaaaaaaaataaaaaaataaataaaaaaatagaaataaaaaaaaaaaaaataaataataataaaaataataaattaaatataaaaaaaataaataaaatatattaaaaaaaataaaaaaataaaaaaagataatatttataaaaaaaaaaaaaaaaaaataaaaaataaaaactaaaa

SEQ ID NO: 12743 - DNA, 391 bp, Zea mays
  unsure at all n locations
  Clone ID: LIB3150-096-P1-N1-B2
tccggaggttgccgccggcgctcccaagaagaggacgttccgaagtacagcgtggcgcggggcgtcgacctagatgcgcttctcgacatgtccacggacgacctcgtccagctcttccccgcgcgcgccaggagaaggttccagaggggtctgaagaggaagcccatggcactcatcaagaagctgcgcaaggcgaaaaaggatgctcctgctggtgagaagccagagccagtcaagacacatctccgtaacatgatcattgtccctgagatgattggaagcattgttggggtctacaacggcaagacgttcaaccaggttgagatcaagcctgagatgatcggccactaccttgctgagttctncatctnctataagcccgtcaagcatg

SEQ ID NO: 12744 - DNA, 341 bp, Zea mays
  Clone ID: LIB3150-096-P1-N1-B3
gggacccggcctcttctccgacatcggcaagaaggccaaggatctactcagtaaggactacacttacgaccagaagctgaccatctccaccgccagcgcctctggactgggcctgacttccacagctgtgaagaaaggagggctttattctcttgatgtcagttcagtttacaagtacaagaataccactgttgatgttaaagtggacactgaatcaaatatctctactacattgaccgtgttggacgccttgccatgcacaaagcttgtcacttctgtgaagctgcctgactacaattatggaaaggtggagctgcaatacttccatgagaatgcaactt

SEQ ID NO: 12745 - DNA, 396 bp, Zea mays
  Clone ID: LIB3150-096-P1-N1-B4
cggacgcttggtcggactcctatggtttgtggatgaaaaggtgcagcagtgggctggcttgctaagagcttcctgaaaagttttcatgtcccatgtgcctacaacgtcaaaagctgcaaatgggatcaagagaactttgttatgctgtgtcctacacattcttcaaaaaagttgccttgtgagagaataacgccaaaaatgaaggtcaatgtgcagcaaccatcttctgacattgatggtgcagaatcaccctgtccaactgcaatgctacaggctgaactttggactgcctcaccttttctgactagtgaatgggtgatatgttgatctgcgctcattggccatgagaaggaaatcttgtgtcagtttgagtgtcacactggcatcacagtaacc

SEQ ID NO: 12746 - DNA, 341 bp, Zea mays
  Clone ID: LIB3150-096-P1-N1-C1
ggcacccgaacccaaccgcagcggagccgggggtattcttccttcgccgctgagcacgcctcctccacaggcagccgacccagggaagcgtcgccgtctgcccccaccccgaatctgatgcttcatcgattggttctaatcctcactacctccatattcatgcacgagattgcgcgtgattaggagcagggaccaatcatattgaactcagatctggagcggagcaggaggggagccattgccggtgttctgattgctgttggaggtcgagggatggtaggggtgctgtcgaatcgcgtggatcgggacgacctcaagggccgggatcacatctacacttg

SEQ ID NO: 12747 - DNA, 354 bp, Zea mays
  unsure at all n locations
  Clone ID: LIB3150-096-P1-N1-C2
ttccttttagactaggttaggctaggctggggtgtggaccagctcgcgggggtgggggccttcangttccatcagtaccaggtggtggggcgcgcgctgccgacgcccggcgacgagcaccccaagatctaccgcatgaagctcttggccaccaacgaagtccgcgccaagagcaagttctggtacttcctgaggaagttgaagaaggttaagaagagcaacggtcaggtcctggccatcaacgagatcttctagcgtaacccgacgacgatcaagaactatggcatctggctgcgctaccaaagcagaaccggctaccacaacatgtacaatgagtaccgcgacacaaccctt

SEQ ID NO: 12748 - DNA, 191 bp, Zea mays
  unsure at all n locations
  Clone ID: LIB3150-096-P1-N1-C3
tacaaccatgnnccgccaccccgacacacgcagtcttccgggcgtcggcggcgtacccttctcgtcctgcatcggcgacctcctccgcttcgtactcttcttccacgccgccgcctaccccggagacgacacggtcgcttttcccctctcgccctcctactgcgcccgccttcttaacaacggcgaacttt

SEQ ID NO: 12749 - DNA, 320 bp, Zea mays
  Clone ID: LIB3150-096-P1-N1-C4
ttactgatcccatccaatcacatccgatcagatcacgtctcagtctgagggcgtgccgttaaccaatccatacaacccaccccaacgcacaccgacgacactagagttgctcaggtaccgctagccggcggcgcccaagattaattagcccacttcatacactcctcacttggcctaacgttctcctatccgtacgtctcactaaagctatttgcttgcaactaacagatccatcgtcttgaacaacacactttttgtattgagtaagaccttctaccagcccagcatctaatgtacctgcttatgggcgaagcctgcat

SEQ ID NO: 12750 - DNA, 419 bp, Zea mays
  unsure at all n locations
  Clone ID: LIB3150-096-P1-N1-C6
tttaaactgtagcttggatataaaatctggggcacggaatttaaggactgcttgaaacgctacaaanaggttgcaaagaagaaaaagcgcgtaactgatgaagacttagaagcgttattgtcggatgagatattccagcctaaggttatttggtcccttgctgatgtacaggcaacatgtggtacacttgctttatctacggcaacagtgaaattgatagcaccagatggagaggagaaaatagcatgttcagtcggaacaggtccagtcgatgcagcttacaaggctgctgacaaaataatccaaattccaacggttctccgagaatatagtatgacatcagtcacagaaggcattgacgcaattgcgacaactcgagttgttgtcactggagatgtgagcaacaacgccaaacatgc

SEQ ID NO: 12751 - DNA, 187 bp, Zea mays
  Clone ID: LIB3150-096-P1-N1-D2
gttggcggtggaatcaatgttccagtgagggcggctccgatttttgccagtgctgcagccgtcaaaggtggcaaaaactacatgattgatttcatgatgggcggtgcatcagatgctgttcacaagactgcaggtgatcccattgcacgagtgaagctgcttattcagaatcaagatgagatgatca

SEQ ID NO: 12752 - DNA, 358 bp, Zea mays
  Clone ID: LIB3150-096-P1-N1-D3
ttttgatccagctctcaaccttcatccgagcaagttccacaccaacgtggtgccctaccctaggatccacttcatgctttggtgctacgctccacctatctctgctgataaggcctaccacgagcagctagtcgtgagcgaaatcaccaacagcgtcttcgagccatccttcatgattgccaagtgcgacccccgccatggcaagtacatggcatgctgactcatgtaccgtggtgatgtggttcccaaatgacgaaacgctgatgtggtcacaatcaagaccaagcgcaccatccagttcgtggactggtgcccgactggcttcaagtgcggaagtaactaccagtcttccagcgtc

SEQ ID NO: 12753 - DNA, 274 bp, Zea mays
  Clone ID: LIB3150-096-P1-N1-D7
aaaaaaaaaaaataaaaataaaaaaaaaaaaaaaaaaaaaaaaaaaaaaataaaaaaaaaaaaaaaaaaaaaaaaaataaaaataaaaaaaataaaaataaaaaaaaaaaaaaaaaaaaaaaaaaaaaaaaaaaaaaaaaaaaaaaaataataataaaaaaaataaaagaaaaaaaaaaaaaaaaaaaaaaattaaaaaaaaaaaaaaaaaaaaaaaaaaaaaaaaaaaaataaaaaataattaaataaaaataaaaaaaaaaataaataaaaa

SEQ ID NO: 12754 - DNA, 342 bp, Zea mays
  Clone ID: LIB3150-096-P1-N1-E1
tcatgtctcatgcccgtgctatcggggccgatgctggagccgaacctgtgggtggcgatgccgagctcgtcgctggagctggcagtaggcggcctccgtggcctagggtctatccattccttggacgagtttgctggcggtgtgtctagcaccgtgggcacggagatcacgcctgcacgggcgaccggatctgctccgacgcctatggtgggcgtcgacaggaccatgctgctggagcttgcgatcagcgccatggatgaactagttaagctggcacaggttgacgagcccttgtggcttcccagcctcagtggctctcccgacaagaagctgctcaacttt

SEQ ID NO: 12755 - DNA, 364 bp, Zea mays
  unsure at all n locations
  Clone ID: LIB3150-096-P1-N1-E2
tgctgtaactgcttctagcacaaagaagggtggcctgatccttggggagatgcagtcacagataaagaacaggaacatgaccatagatgtgaaagcaaactcggagtcaaatatcattacaacaattactgttgatgagattgcaacaccagggctgaagaccatcttaagctttgctgttcctgatcagagatctggaaaggttgagctccagtatttgcatgattatgctggagttaatgcaagcatcggtctgacagccaatcctgtagtcaacctctctgctgcctttggtactaaggctgntgcagttggtgccgatatctcacttgatactgcaactgggaacttgactaaatacaat

SEQ ID NO: 12756 - DNA, 425 bp, Zea mays
  unsure at all n locations
  Clone ID: LIB3150-096-P1-N1-E6
ttttcctttgctccattctcagccgccgccgagcccttcccgtgctcggcaggggctgantaanaagaagagatggccggcaagggcgatggcccggctatcggcatcgatctcggcacgacgtactcttgcgtcggcgtgtggcagcacgaccgcgtcgagatcattgccaacgaccagggtaaccgcaccacgccctcgtacgtcgccttcaccgactccgagcgcctcatcggagatgcggccaagaaccaggtcgccatgaaccccatcaacaccgtctttgatgccaagcgtctcatcggcaggaggttcagtgatgcgtctgtccagagtgatatcaagctgtggcccttcaaggtcatttctgggcctggtgagaagccaatgattgttgtccagcacaagggtgaggagaagcagtt

SEQ ID NO: 12757 - DNA, 268 bp, Zea mays
  unsure at all n locations
  Clone ID: LIB3150-096-P1-N1-E8
ttcggntagggcgaagcggacgccagcgtttccgtttggttggcgtggaggcgaagcttctgctgtagcgctacccggatttcctcccttcactagcgctcgcgatctgatgatcgtgggctaattgctctgccagagtcccatccagcgctcctccttcatgatccaagctgtgattttgatcattacccaatccaatctctgcctttttaaattttacagttttcaaccacccttgaaactattaatatcttcctttgtttatttt

SEQ ID NO: 12758 - DNA, 375 bp, Zea mays
  Clone ID: LIB3150-096-P1-N1-F1
ccccctaccggcgatcgctatcgacttgtagcgggagccatggcgtcggcagcgcgaatctgcggcacggagcagtggaaggccctccaggcgcacgtcggcgcgattcagaagacgcacctgcgcgacctgatggccgacgccgaccgatgcaaggcaatgacggctgagtatgaagggatctttctggattactcgagacagcaggcgactggtgaaaccatggagaagctccttaaattggctgacgctgcgaagctcaaggagaagattgagaagatgtttaaaggtgaaaagataaatagcacggagaacaggtcagtgcttcatgtagctctgagggctccaagagatgcagtcataaacagtgatggg

SEQ ID NO: 12759 - DNA, 386 bp, Zea mays
  unsure at all n locations
  Clone ID: LIB3150-096-P1-N1-F12
ttacgacctgatccangaggcggcgtccaggacccagggctggtctggaggggagatagcgaagatgatggcaagtgtccaggccgctgtctatgggagcaaggactgcgagctcaccccagggctgttccgtgaggttgtggactacaaggtcgctgagcacaagcagcggagaagattagccggtgaggagccaaagcaggatgcctagtttaccaatttttttgattcacccccgtcttgccgtgggatgtaccgtgtttcccccccccgggatagattgcttcatcgggcaggcgttttgcatgccccgtgttattcttttgttccatttgccttaccagatttgtctttcggtggtaggcgatggaaactttttttataag

SEQ ID NO: 12760 - DNA, 336 bp, Zea mays
  Clone ID: LIB3150-096-P1-N1-F2
gcctggtgccactttctcagtcccctatagccggcggctaccgctggcgctgtgggggcgttcgggaaggtcgattcgacatggcctaggagacagagacgttcgtctttcaggcggagatcaaccagctgctctggctcatcatcaacaccttctactgcaacaaggagatcttcctcagggagctcatctacaactcctccgatgccttggacaagatcaggtttgagagtttgacggacaagaccaagctggatgcacaggcagagctgttcatccacattgtccccgacaaggtcaacaacacgctgacaattatcgacagcggcattggta

SEQ ID NO: 12761 - DNA, 310 bp, Zea mays
  Clone ID: LIB3150-096-P1-N1-F3
tatcgctagcggcgccctttttttttttttggtttgaacaaaatgatgaatggcaagatcagaacaaggaacacaacacggcaaacatgccagtgaacatatcaggagccacaaggcaaagaggaaattaggctggaacacataagttccacagatctaaacacgaacatgctacagcagagcgctagtgaaatgactaatttctaagccttcttcggggacttggctgccttctttggggacttggcggccttcttagggaacttgctctccttgctgccgccgctttactccttttcctccacctttt

SEQ ID NO: 12762 - DNA, 411 bp, Zea mays
  Clone ID: LIB3150-096-P1-N1-F4
gcaaaccctagcgagcgagagagcccggagccgagagaccagccagccatggcgctgcgtgccctgtacaacgagatccggagcatgaaggtccgcgacgtgccggcttacctgaagccgcgcttgacctgggacaacgtcaagaagagcgccgaccaggccgtcgaccgctacatcgagaagtacatcgacacgagctcgccggaccctctctaccacgtctgcatcggagggatgatcttctcctacttcgtcaatctgccctgggagcgcgcccacctcgcccacctcgaggagatggagaggaccggtgggaagcactagatccgctgccccgtccctcgccggcagcgcgggaggacgggtgactttcatggggtccattcaagctgatggcttctgttttcttct

SEQ ID NO: 12763 - DNA, 379 bp, Zea mays
  Clone ID: LIB3150-096-P1-N1-F5
acgaaaagaagggggtattgccactcatctgatgggcgggggatacctatctacaagcacggagcgaaacttgaaaatagtctatatagccgacaaattaaacactcgtcaactggttacacttgcagacaaacaaccgagcaaaaaatcaaacaacaaaagtatgaagcatatcgggatgggatgggatgcgatgcgatgcaatgcaatgcaatgcaagggccccttgtgatttggatttggcgccccagatttactcccggatcacatgacaatctcgggcttgaggatgctggatttgatctccttgtgcgggagcacgacacccccgttgctgtagatctcgtcgcagacatggacgtcctctccgaagatggtc

SEQ ID NO: 12764 - DNA, 419 bp, Zea mays
  unsure at all n locations
  Clone ID: LIB3150-096-P1-N1-F6
ttctcccatgcggtatgtcgatatcggcgtcccagcgaacaacaagggggggaacagcattggatgcctgttctggcttttggccaggatggttctgcagatgaggggcactatcctccctgggcacaagtgggaggtcatggtggatttgttcttctacagggacccagaggaagcaaaggagcaggaggaggaagctgctgttgcccctgagtttgccgcaatcactgattaccaaggagctgatcnagtgggtggtgaccagtggacctctgatgtgactgcgccgcctgttgctcctactggtgctgattggggtgctgctccagctccggttcctaccggtgatggctgggatcaagctggggcccctgcacctgtggtggacggcactgtacctnctctggttgctcctactg

SEQ ID NO: 12765 - DNA, 286 bp, Zea mays
  Clone ID: LIB3150-096-P1-N1-F8
taaatatttcgagcagttctgaatgccctagtggtctgttcggtggggacggcattcttgctgatgcagaggctgctaaggctgctaaggataaggcaaaagaactatcattgaatctcaagagcatcactcaactgtataatgattatgctgttccatttgagctctgggaggtttgcctggaaatgctgagcttcgctaattactctggagatgctgatagcaaaattcttcgagaaatttgggctagactccttgatgaggcacttacaaaaggtggtgttgc

SEQ ID NO: 12766 - DNA, 227 bp, Zea mays
  Clone ID: LIB3150-096-P1-N1-F9
attggtctgtttttattttaatgtggtcagcataacaaaaaaaaaacatttttttaattcccattttaataaaaaccatttcaacaataaaaacacattttccacacactactttacaaatatcccttaaaaccatacaacaactacaaattttttattacaataaccataaaaaactatcactctcaaaaataaaaaaaaaatataatatcttaaaaaacaaacct

SEQ ID NO: 12767 - DNA, 415 bp, Zea mays
  Clone ID: LIB3150-096-P1-N1-G3
gacagcggacacaaattgctgcataggttacaaaagtgtaggggcaggcggcaggtatcctgatccatcgccatctgcttacacacagacaaaacaaatagtaacgacactaggcatgaagtcgctggcagcataactattgctagcaaaaaaaaaaaagagacagtacaggcatccgggcgcagttgaaacccagcacagattattcaacaatcaccagccacaaacatgtaatccccccttcattcatttcctcctgagcttcgccttcaacctctcgaccgcggcccgcaacgtgccttcgtccttgctgaaggtgaacctcaccaatttctttccctcttcggggtcgaggtagaacacgctgggcggtatagcgcagacgccgacttcgcggatcaagtactcgcagaac

SEQ ID NO: 12768 - DNA, 354 bp, Zea mays
  Clone ID: LIB3150-096-P1-N1-G4
tccacaccgctagctcagcaaaaaccaagccccgattcagcggctgcgggggctggcccacgactcttgtataacccacgcatccaccacactatgctgtgctgccactactccaaccaaatgctacactctcgcccttccgctatcaaagatggtgaaagacggcaggggccgcggcgcccatggaggtcatgcgtctcacgctcggcgacgccgacgatgactacaccgacagggtctgcgaggtctacgccattcccaagagcgcgactgctaacagcgaagaggccgactaccacgtcatccagacaaacatgcttgacatgctcaagcagaccgggaggccacaaatgg

SEQ ID NO: 12769 - DNA, 381 bp, Zea mays
  Clone ID: LIB3150-096-P1-N1-G5
ttcagttttggcgtttccttcaaaatgcatgcctcagctataccaggggaaggcgacgggttatctgagcattttatgtttgaagccatgtgactgaggtctgttattttttcccctgagcgcgaggtttggttgtgagcataatgcatttgcaaagttttatcttgtacgtcatccttcaacgtttcaagttttatcatgtacggcatccttcaatgtttctgctgccagaggttttcccagtgatcgttgagtgctgatcatgttgtccaatgttcatgcctgcagtattaacagatgtccactcttttcctgtgaaattgttaattgcatttgagcagtttatttttcttctcttattatatatatcttttctctttt

SEQ ID NO: 12770 - DNA, 285 bp, Zea mays
  Clone ID: LIB3150-096-P1-N1-H1
ttcaactctttccaccacgcgttctctaacgaccgggacctccaccaagcggtggggagtcactattgcacgagcagtttccacatctatacaccgtaccgccgcatcctataacacatgttcgactcgcttttacaaacgactcgaccaagcccatgacgcacaacatcatggacatcacctcgctcaagaagttcctacaggagcccatcaactacccctgcggaatgacatgatacatcaccgactctgtgaccatctcccgcctgaagaccatggtcaccg

SEQ ID NO: 12771 - DNA, 234 bp, Zea mays
  Clone ID: LIB3150-096-P1-N1-H3
gccacatgggtgttttaccatgtgactcgaagggtccatccctgggggagagacgcgcagacctactagttcatgccaagcaggcgttgagaccatgatcaccgttcccgatggagctaaaaccacttgacgtacagctgaagcatcgatctagagaagagcgcatcctatgcttccttcttttgtagatccgcctcgcggggccaacccggcggacgttgttgtcctcagccc

SEQ ID NO: 12772 - DNA, 354 bp, Zea mays
  Clone ID: LIB3150-096-P1-N1-H4
ccgcacagagcttgttccgtccagtcagcgaaaatgcaagttgcctcggcgtgcacaggaagatgagagcataggacgatggctcgtacgaagcagtaccgcctcaagtccacgtgaggcaaggtcccccgtaagcagatcgccaccaaggtgctgtcgtctgcccttctctacccgtttcggatccgctgctctgttctctagggttcccttctgagacgcgccggctgttgtgctgtggttgcaggcggcgaggaagtcggcgcctacgaccggcggcgtgaagaagccccacatgtacaggcccggaaccgtggcgctgcgcgagatccgcaagtaccagaagagcacgga

SEQ ID NO: 12773 - DNA, 409 bp, Zea mays
  Clone ID: LIB3150-097-P1-N1-A1
tcggtgacaaccatgctacaataccagacaaggctccagatgcacaactcacaggtgacaaccgtgccacaataccaaacaaggcacaggttgtagagcctgcacatgcagagcaggtgcctatgcagtcagaaagggctgcagaaaagacatggcagctgtgtcttaatcagctctcgcacattccttcttttgctccaggtgaacaactaacagacgaaaaggttgtagagcctgcacatgcagagcaagtgcatcttgctcagctctcgcccagtccatcaagggagagggcccgtctcagtcagtttgctccaggtgctcaactcacagatgaagaagcggctgcactagaggaagaagaccatcctcaaattgaccttctggatggtttgcggcgcggaggccc

SEQ ID NO: 12774 - DNA, 401 bp, Zea mays
  Clone ID: LIB3150-097-P1-N1-A3
ttcgtcgcctccgccgacaccgactgcctccctcagctgtcgtcgccatgggcagaaggcctgctagatgctatcgccagatcaagaacaagccgtaccctaagtccaggtactgccgtggtgtccctgaccccaagatcaggatctacgatgtcgggatgaagaggaagggtgttgatgagttcccctactgtgtgcaccttgtctcttgggagaaggagaatgtctccagtgaggcgctcgaggctgcccgcattgcctgcaacaagtacatgaccaagtctgcaggaaaggatgctttccaccttagggtccgggttcacccgttccatgtcctccgtatcaacaagatgctttcgtgtgccggggctgataggctccagactggaatgaggggtgcc

SEQ ID NO: 12775 - DNA, 458 bp, Zea mays
  unsure at all n locations
  Clone ID: LIB3150-097-P1-N1-A5
agaagagctgngacatgcacgccacccttacctaagctcctatcctgtagagcccaccagcttactatggccaaggagacctccggtcagttcaggatcagcaccgggcgaggggccgacatttctataccgtggcggattacaagttggcggagatatacaggctactgacggctctgaaaagcaagagcgacgagatccatggccaaaaaagacgcgacgaaacaatgctgagtgctctctcagaagaaatcgaccaactcaatgccaagatcgacgagctatccagcgcgagaaacgacctgtccgaaaagaacgcgcagaaagacaaggaactggccggaatcagtgaaaaggacatgcagttgcaagacaagactgctgagatcacttcgctaaaataaagagcttgtatctctcaaggaccaagtgaaggcgcacctggacgaactgcacgg

SEQ ID NO: 12776 - DNA, 185 bp, Zea mays
  Clone ID: LIB3150-097-P1-N1-A7
acgctgacgcttcgggaatgacaggacgggactgatcttcgtgctggatttccatctaagccaccatattaggacacaccccatgcacgagcattgtattatcacgtattatatgacgtacatgttaaaggtcgacactatgtactggccgtggaggaacaatgaagacaaggtgaaggactaat

SEQ ID NO: 12777 - DNA, 339 bp, Zea mays
  Clone ID: LIB3150-097-P1-N1-A8
cagctcccatatcctttcccctacctctccagcatctcccgtctgcgtcgtctcgtctccgctcctcacctcgccagccatgggcaagatcaagatcggaatcaacggtttcggaaggatcggcaggctcgaggccagggtcgccctgcagagcgaggatgtcgagctcgtcgccgtcaacgacccgttcatcaccacggattacatgacctacatgctgaaggacgacaccgtgcacggccaatggaagcacatggacataaccctcaaggactccaagacgctagtcttcggccagaatccgggcaccggctttggcatcatgaaccccgaggagat

SEQ ID NO: 12778 - DNA, 107 bp, Zea mays
  Clone ID: LIB3150-097-P1-N1-A9
gaaacagaagaggaaaaggaatccatggcggcgacgctggcgaggagggcggggcgctccgtggcaacgaccctatgatgcgcgtccaggtacttagcatcatgggc

SEQ ID NO: 12779 - DNA, 412 bp, Zea mays
  Clone ID: LIB3150-097-P1-N1-B2
gcgatttcgatctcgcagccaccttttttttgttctgttgtgtatctagtagttggaggagatatgcagtttgcacttgcattggacacgaactcaggtcctcaccagataagatcttgtgagggtgatgggattgacaggttggaaaaattaagtattgggggcagaaagcaggagaaagctttgagaaataggtgctttggtggtagagttgctgcaactacacaatgtattcttacctcagatgcttgtcctgaaactcttcattctcaaacacagtcctctaggaaaaattatgctgatgcaaaccgtgtatctgctatcattttgggcggaggcactggatctcagctctttcctctgacaagcacaagagctacgcctgctgtacctgttggaggatgttacaggc

SEQ ID NO: 12780 - DNA, 323 bp, Zea mays
  Clone ID: LIB3150-097-P1-N1-B3
tcgcttttcctgctcctaccgcagctcttcctcaggtttagtgttcgcagtggcggccttcaacaagctaggtggccttctaaggcacagcgctctggtgagcggtatcactggtggctcttctcctgcagtgatcaatgctgcacggttcatgtctaccaagctatttattggtggtcttgactggggtgttgatgacttgaaactaagagaagcatttagcagctttggagaggttactgaagcgagggtgatcacagacagggagactgggaggtcaagaggctttggctttgtgaactactccgacagtgatgctgtca

SEQ ID NO: 12781 - DNA, 348 bp, Zea mays
  Clone ID: LIB3150-097-P1-N1-B4
ctttcactagaatatcatcaacagtccagacagctatggaggatgcgcttcttcgtattttgaccccaaagggctttattgacatactgagggatgtgcacccttccaaagagcgtgggaggccatatgttattggttttgttggggtgaatggagttggcaaatccaccaatcttgcaaagggtgcttattggcttcttcagcataacctcagtgttacacttgcagcatgtgacaccttcagatctggtgctgttgagcagctgagaactcatgcaaggaggcttcagatacctatatttgagaagggttatgagaaagatccggcagttgtagcgagggaggcta

SEQ ID NO: 12782 - DNA, 391 bp, Zea mays
  unsure at all n locations
  Clone ID: LIB3150-097-P1-N1-B6
cttccgtcgccacccagcgtgctctctctccctctttctctctctctcgtggcggcgcctgggcagccgtcgctgccgcctgcgctaggtgccaggtcttcttcgggcccttcgccggcgacgagtaccaccaggttgtacatgtgtacacccatgtgctttactgggtcggaccctactcatcctccacactaaggccatctccatagactgcactgtttagactccactgtttagagagtggagatagggagtgagatagagagtggaatancggggatgctggagatagcctaaggttgccactgagtgtgtgcatgattcagaggcaatgtcatcacaaactggaggtggcaaagagagtgacgccggccctgggcaacacaggcag

SEQ ID NO: 12783 - DNA, 325 bp, Zea mays
  Clone ID: LIB3150-097-P1-N1-B8
cgctcctctcccaacccagtcgctcaaaaccctagagctctcgcctgctcgcctccgccgccggagcgagctccccatcttcatccgtcaaccatggcgacccagatcagcaagaagaagaagttcgtcagcgacggtgttttctacgccgagctcaacgagatgctgacgcgggagctggcggaggacggctactctggcgtggaggtgcgcgtcacgccgatgcgcacggagatcatcatccgcgccacgcgcacgcagaacgtgctcggcgagaagggccgtaagatcagggagctcacctccgtcgttctgaataggtttc

SEQ ID NO: 12784 - DNA, 414 bp, Zea mays
  Clone ID: LIB3150-097-P1-N1-C1
ctagcatccgcagttcccccgcgcccgagacgcaaccccgcgccaggagtaagtttgttcttttatcgatattatcgatatggcgagggaggagaatgtctacatggccaagctggctgagcaggccgaaaggtatgaagagatggttgagtatatggagaaggtggctaagactgtagatgtggaagagctcactgttgaggagcgtaacctcttgtcggtcgcatacaagaatgtgattggggctcgccgtgcttcatggcgcattgtctcttctattgaacagaaggaggagtcccgtaagaacgaagagcatgtgaaccttatcaaggaataccgtgcgaagatcgaggctgaactgagcaatatctgtgatggcatcctgaagctgcttgactcccacctagtgccttc

SEQ ID NO: 12785 - DNA, 412 bp, Zea mays
  Clone ID: LIB3150-097-P1-N1-C2
tactaatccagcccatttcgaactctctctagacgcttcctcggtctctctgttcaccgctgccccgtaccgtactcctcttcgcgccgtagaaatggcgctgccgaatcagcagggcgtggattaccccagcttcaagctcgtcatcgttggcgacggtggaactggtaaaaccacatttgtgaaaaggcatcttactggcgagtttgagaagaaatatgagcccaccattggtgttgaagttcaccctctggattttagcactaactgtggcaaaattcgcttttattgctgggacactgctgggcaagaaaagttcggtggccttagggatggctactacattcatggtcagtgtgccatcattatgtttgatgtcacttctaggctgacatacaagaaatgtccgaca

SEQ ID NO: 12786 - DNA, 409 bp, Zea mays
  Clone ID: LIB3150-097-P1-N1-C3
gtttgaggagcgtggtgacatctgatacatagctagcaacgtatgtagttaactaactagcttgacctttgacttgcacctttgtcgagcttctatgctgctctgcagcagccatcaggagctgaggtgatggcctgccgtctagtaggcactatatccaattactttacactagttggacctatttcaccatcaagctgctacggaagcctgatttctgtatccagttgaggcgatgcatgtttagggatgggttagaccttgatattaatacggtggggtactgggctcactttgacaaacccagtaacaaactggtgtaagcttcggtccatggaccctcttgtgaggcccgttttggtgcttaaggctgtccttatcagtggggcctaaaatggctttataaaaa

SEQ ID NO: 12787 - DNA, 146 bp, Zea mays
  Clone ID: LIB3150-097-P1-N1-C4
ggcctgttcccttctatttctcgccccctactgattaaattttcttcgcacgaggaaaaaaaaatcaagtggcaagggcttgatctggtgggcgacccatggtgaaagggatggtagtggccgtgccgaatggggtgaaggcggat

SEQ ID NO: 12788 - DNA, 393 bp, Zea mays
  Clone ID: LIB3150-097-P1-N1-D1
gcgaggcaaaagcattgcgaccacagacagcgcgcgcttcaaggcctttttttttgagataacaaggaggagaggaggagatggcggtcacgatcacgtgggtgaaggcgaggcagatcttcgacagccgcggcaaccccaccgtcgaggtggacgtgggccttagcgacggcagctacgcgaggggggccgtacccagcggcgcatccactggaatatatgaggccttggagttgagggatggaggatctgattatcttggcaagggtgttcttaaggctgtcagcaatgtaaataacattattggaccagcaattgttggaaaggaccccactgagcaggttgagattgacaacttcatggtccaacagcttgatggaacctccaatgagt

SEQ ID NO: 12789 - DNA, 408 bp, Zea mays
  Clone ID: LIB3150-097-P1-N1-D2
cattgttagtattagacactttctagttcatcacccatggcaaagttcttcaactacaccatcatccaaggactcttgatgctttccatggtacttctggcatcgtgtgctattcatgcacacataataagtggggaaactgaagaggttagcaacacagggagcccgacagtgatggtcacgatgggggcaaaccgaaagataattgaagataataaaaatttattgtgctatctaagggctctagagtactgttgtgcaaggaccagacaatgctatgatgacataaagaagtgcttggagcattgccgtggttgaaaggtgtaataaaggatatgctttctttggatcttagttggtgatcagaaaaatgttctaccaattcatgcatgtaccaaaggataatat

SEQ ID NO: 12790 - DNA, 403 bp, Zea mays
  unsure at all n locations
  Clone ID: LIB3150-097-P1-N1-D3
cgataccgagagctagtgcttgattcggtcgtttttgggcaccgaacacgttcttgggaccgccgccgccgccctacttccagtcccagctgctcaggtctccatcggcctcgagccctttgccggcgacgagcactcacaacaccagggtgtaacaatgtcttcttcaatggaatcgtcataccttcctgctacaactgagtcattagcccaagctcaagaggctaaggatgcttcagagtccatttcaatcctttaccgtgtcattcaggacccatcttcttctgctgatgcactgagaacaaaagaagttgcaattacaaatcttacaaactacctcactaaagaaaacagagctgaggagctgcgtaatcntttgacccagctcagaccattttttgca

SEQ ID NO: 12791 - DNA, 401 bp, Zea mays
  Clone ID: LIB3150-097-P1-N1-D8
tcatagtaattattagacactttctagttcatcagcgcatggcaaagatctgcagctgcaccatcatccaaggactcttgatgctttccatggtacttctggcatcgtgtgctattcatgcacacataataagtggggaaactgaagaggggagcaacacagggagcccgacagtgatggtcacgatgggggcataccgaaagataattgaagataataaaaatttattgtgctatctaagggctctagagaactgttgtgcaaggaccagacaatgctatgatgacataaagaagtgcttggagcattgccgtggctgaaaggtgtaataaaggatacgcttcttttggatcttagttggtgatcagaaaaatgttttaccaattcatgcatgtaccaac

SEQ ID NO: 12792 - DNA, 395 bp, Zea mays
  Clone ID: LIB3150-097-P1-N1-D9
ttcgtttctagaagcatcccacctgggtggacctcgtggtccggagccccgggggtggacacgacttcgttggccggagctatgccggtgaggccgccgtgccgcaggtctgcgactacgcgcttggcgtccttgacaaggcctacggcactctcaggatcgtgcccatcgctggcaaaaagattctgaggcttgagccacatcttgaagtgcagcatccagcgcattcgcagcactctgaggtggcatcagaagcggcttcagctgcaggaaatgatgaattgaatgttcaggatctgacaacgatgtatggtgccaagacggacagggacaaggacaataagtggagatcgttaaaggaacaaaggaatgatcctttcgcttatgatgacatt

SEQ ID NO: 12793 - DNA, 409 bp, Zea mays
  Clone ID: LIB3150-097-P1-N1-E1
ccggcacgagaagcatcccacctgggtggacctcgtggtccggagccccggcggcggacacgacttcgttggccggagctatgccggtgaggccgccgtgccgcaggtctgcgactacgcgcttggcgtccttgacaaggcctccggcactctcaggatcgtgcccatcgctggcaaaaagattctgaggctagagccacatcttgaagtgcagcatccagcgcattcgcagcactctgaggtggcatcagaagcggcttcagctgcaggaaatgatgaattgaaggttcaggatctgacaatgatgtatggagccaagacggacagggacaaggacaataagtggagatcgttaaaggaacaaaggaatgatccttccgcttatgaggacattgatcttggaatatca

SEQ ID NO: 12794 - DNA, 381 bp, Zea mays
  Clone ID: LIB3150-097-P1-N1-E12
aatcctttacctttaacccattcctacttttatgttattgctgaaaaaatatcacattgggcggttatttaaaaagaggggggccaccttaaactattgctaccttcaaggtttcaactcctcctcatgcttatgacgttcatgatcgtcttacaaaacttctccattccaatgttacccctgcaattgctcaatttacaccgatattttatcgaggttcttgcaaatttatctaactgcaaataacttgcaactcaaccatatgttgatttattttcttgttcatgcatcctcattttagcctgaattcaattacatcatcaactttgccactgtcacgcttttatcttctctacttttttgactttcattgcacctgta

SEQ ID NO: 12795 - DNA, 408 bp, Zea mays
  Clone ID: LIB3150-097-P1-N1-E2
gcgccgccgccaacgcaacccttgcagccccaatccctcacagcaaccatggctggcgcgcaggagtccctctctctggtgggcacgatgcgcggccacaacggcgaggtgacggcgatcgcgaccccgatcgacaactcgccgttcatcgtctcctcctcccgcgacaagtccctgctggtgtgggacctgaccaacccggtccactccaccccggaatccggcgccaccgccgactacggcgtccccttccgccgcctcaccggccactcccacttcgtccaggacgtcgtcctcagttccgacggccagttcgccctttccggctcctgggatggagagctccgcctctgggacctctccaccggcctcaccacccgccgcttcgtcggccacgagaaggatgtc

SEQ ID NO: 12796 - DNA, 407 bp, Zea mays
  Clone ID: LIB3150-097-P1-N1-E3
attcggacggaaggaagacgagaaggccccgaggcgagcgggggatcaaagaagaagatgaaggtccgtgcggcggtgaagcgcctgtgccggttctgcaaggtggtgaagcgccggggaatcgtcttcgtccaatgcacggccaatgccaagcacaagcagcgccagggcttctccaccatcgccgaagcagccgccgtctcgtgcgttcacctgcctccgccgccgcccgctagcggttccgcctccgccgcagcgttcgcagaggcttcgaaggtggcgaggcaagagatgtctatgaagttcaattggcggctgggtttagctgccctgttcaagaatggagaaaaataatgtatcaggcctactaccatacgctaacatttttaagcagatgttgaataggg

SEQ ID NO: 12797 - DNA, 406 bp, Zea mays
  Clone ID: LIB3150-097-P1-N1-E5
gacgacgaggacgatcccaagaaccgccgcgcgagcaacagcgaggcgcgcttgccgcccgtgtctgctggctcgggtcccgtgtcctcgttcctcccgcctccgaagcactcgctcgggctcggcgccggctctggcgcgggagcgaggaggtcggcaatcgatacggctgcgccggagaagccaaatctcggcaccgctctgccttcaagctcggttgccaacacaggagccccggaaaggcctgacaccggcgcaaccgacgaggacgattcggaggatagtggcagtgagggtgacatgcctgcgccggagctggaggatgagcatgaaaaccagcaggcttttaatgccgcaaccggggagcagcagcaaagctatgatgctggagccgggagcactagtg

SEQ ID NO: 12798 - DNA, 408 bp, Zea mays
  Clone ID: LIB3150-097-P1-N1-E7
tctcggcatccagcagacccatgcatgaaccagcatgcactgcggatcgatgggtcgccgatacccccgtcaggctttattctaagttaaatcctaaggaaaaaaatggcgcttattggcgctcgcgacttgacaaggccttccatcgtctcatgatcccgcccaaagaatcctaatagtgtggtaacgttacagccacagtccagaagagccgcatacagctgcattcccagcactctcaggtggcatcataagcggcttcagctgcacgaaatgatgaattcaaacgtcaggatctgacactgctgcacggagccacttccgccaggcacaaatacaataagtggagatcgttaaaggaacaaacgaatgatccttccgcttatgaggacgatgatctatggatat

SEQ ID NO: 12799 - DNA, 252 bp, Zea mays
  Clone ID: LIB3150-097-P1-N1-E8
ttttcttacggcaacgcaacccttgcagcgggaggccctcacagcagccaggggtgggacgcaggagcccctctctgtggagggcacgatgcgcggccacaacggcgaggagaccgcgatcgcgaccccgatcgacagcacggccaatatcgagtacaacttccgccacaggttcttgactcatgtgcgacctagccaacccggtccactccaccctggtatccggcgccaccgccgactactgcgtcccct

SEQ ID NO: 12800 - DNA, 425 bp, Zea mays
  Clone ID: LIB3150-097-P1-N1-E9
gcgcgcgcacgcgagcgtaagactccgcataccgctagagccacacccacctttctttttcctggtctcctgcgcccgatggctgcgttccctacatatgcgggtgggacaccttcaaacccaagaccgcaaatgataaccacatacatgatgataggaaagagatggggctgacgttcaccaagctgatcagacgactgttcgccaagaaggagatgcggatcctgatggagtgactgtgcgccaccggaaagaccaccatcctctacaagctgaagctcggttagatcgtcaccaccatgcccaccataagattaaatgtacaaactgtggagatcaaaaacatcatactgactgactgggatgttggtggccacgacaagatcatgccactgtggaggcattactttcagaacacccagggt

SEQ ID NO: 12801 - DNA, 407 bp, Zea mays
  Clone ID: LIB3150-097-P1-N1-F1
ctctccttcccggtctcctccgcccgttgccttcgtcccctccatctccggctgcgacgccggcgagcccgacaccgcgaatcggatccgccgacaaggcgagagggaagagatggggctcacgttcaccaagctgttcagccggctgttcgccaagaaggagatgcggatcctgatggtgggactcgacgccgccggaaagaccaccatcctctacaagctgaagctcggcgagatcgtcaccaccatccccaccatcggattcaatgttgaaactgtggagtacaagaacatcagcttcactgtctgggatgtcgggggccaggacaagatcaggccactgtggaggcattacttccagaacacccagggtctcatctttgttgtggacagcaatgatagggacc

SEQ ID NO: 12802 - DNA, 376 bp, Zea mays
  Clone ID: LIB3150-097-P1-N1-F12
aggaggttgtcatggcaattgaatggcgcatagaactgttggaggggctctatactgaaatcgattcccgccatatcactttgacgagcaaaatggtgcaagagcatagtggacttcacgtgcagccacataaagctattgctggtgccaatgcgttcgctcatgaaagtggaattcatcatgatgggatgcttaaatataaaggaacttacgatattatatcgcctgatgatattggtctaacacgtgcaaacgaatttggtattgatcttgggaaactcatccgatggcatgctgtgagatctaagcttgtttagcttggatatgaaattcgtgactaggaatttgaggacttttttaatcgctacaaataggt

SEQ ID NO: 12803 - DNA, 403 bp, Zea mays
  Clone ID: LIB3150-097-P1-N1-F2
agcagagatcggaggcaggcgaagatggggcgcggcaaggtgcagctgaagcggatagagaacaagataaaccggcaggtgaccttctccaagcgccggaacgggctgctgaagaaggcgcacgagatctccgtcctctgcgacgccgaggtcgccgtcatcgtcttctcccccaagggcaagctctacgagtacgcctccgactcccgcatggacaaaattctagaacgttatgagcgatattcctatgctgaaaaggctcttatttcagctgaatctgaaagtgagggaaattggtgccacgaatacaggaaactgaaggccaaaattgagaccatacaaagatgccacaagcacctgatgggagaggatctggagtctttgaatccaaaagagctccaac

SEQ ID NO: 12804 - DNA, 374 bp, Zea mays
  Clone ID: LIB3150-097-P1-N1-F3
tcttgcgccgccgccgccgccgccgctacgcgccggacctcgcttcatttcgggtcgccaagatgacgaagcgcactaagaaggcaggaattgttggcaaatatggaaccaggtatggtgctagcttgcgtaagcaaatcaagaagatggaggtatctcagcattccaagtacttttgcgagttctgtgggaagtttgctgtgaagaggaaagcagttggaatttgggggtgcaaggactgtgggaaggtgaaggctggtggtgcttacaccatgaacactgctagtgcggtcaccgtcaggagcacgatccgccgcctgagggagcagactgaagcatgatatagctctttatattattggggtttcctgtag

SEQ ID NO: 12805 - DNA, 407 bp, Zea mays
  Clone ID: LIB3150-097-P1-N1-F4
caaaggctattgctgaaaaaatatcagattggacaaatattgtgttggcatatgaaccagtttgggctattggtaccggcaaggttgcaactcctgctcaggctcaggaggttcatgatggtctgagaaagtggctccactccaatgttagccctgcagttgctgaattgacaaggataatttatggagggtctgtaaatggagctaactgcaaagaacttgcagctcaaccagatgttgatggattccttgttggtggagcctcattgaagcctgaattcgtggacatcatcaagtctgccactgtcaagtcttcatctgcctagtgttttgactttcaatgcacctggatgcttgtcgtactgaatgctgttgatcttttaaagctattgccattttaccatctc

SEQ ID NO: 12806 - DNA, 365 bp, Zea mays
  Clone ID: LIB3150-097-P1-N1-F7
tttcttttttccgggctactccaacctttggctcggtcccctgcatctgcggctgggacaccaccaagcccaacaccgcgaatccgtatccgaaccacaaggaacagatggtgaatgagataggggcgtcacgatgaactcaagctcactacgacgcctggtgcccaagaaggagattccgaccctgaggcagggactagacgccccccgaaagaccaccatcctctacaagctgaagctcggcgagatcgtcaccaccatcctgaacatgctattcaatgttctaactgtggaggacaagaacatcagctccactgtctcagatgactgaggccaggacaagatcacgccactgtgtgaggcat

SEQ ID NO: 12807 - DNA, 363 bp, Zea mays
  Clone ID: LIB3150-097-P1-N1-F9
tttgcttattgtcgtacttgaacatgtaggtgatgtattcgttgctgatgaggtgaaggttaaggactccaaaacccttctctttggtgagaaggaggttgctgtgttaggcatgcaggaaccctgaggagatcccgtgtggttcggttggtgccgcataagttgttgaggctactggtgctttcactgaccaggagaaggctgcagctcacttgtagggtggtgccaacaaggatgttatctatgctcctagcaaggatgcccccatgtttgacgatggtgtcaccgaaaacgattacaagtctgacattaacattgatttcaatgctagctgcacaaccaactgacttgctcttttgctaa

SEQ ID NO: 12808 - DNA, 405 bp, Zea mays
  Clone ID: LIB3150-097-P1-N1-G1
gtgcacagtgtcgtacttgaacatgtaggtcatgtagtcggtgctgatgaagtcaaggtgaaggactccaaaacccttctctttggtgagaaggaggttgctgtgtttggctgcaggaaccctgaggagatcccgtggggttcggttggtgctgaatatgttgttgagtctactggtgttttcactgaccaggagaaggctgcagctcacttgaagggtggtgccaagaaggttgtcatctctgctcctagcaaggatgcccccatgtttgtcggtggtgtcaacgagaaggagtacaagtctgacattaacattgtctccaatgctagctgcacaaccaactgccttgctcctctcgctaaggtcatcaatgacatgctcggtatcgctgagggtctgatgacc

SEQ ID NO: 12809 - DNA, 314 bp, Zea mays
  Clone ID: LIB3150-097-P1-N1-G12
tcttgtctatcggtgcttgccctccaagagggggctgttgcatacctgggggggctgtgtaaacacaccaacctgtgcgccatccatgctaagcgtgtgaccatcatgccaaaggacattcatctggcaaggaggatccgcggcgagagggcctaatcgccacctcaaacatcgtgacaaaaacatgaagtcctggggttattgttaatctggtgccattgtaaggacatatgagtagggtttgtattgtggatcgtaagtatttcattttgatactgttgttgctacctttgctggtgttataagctaggtgt

SEQ ID NO: 12810 - DNA, 400 bp, Zea mays
  Clone ID: LIB3150-097-P1-N1-G3
gttctttatgcccaaggattcagatggacgcccttcttatcttgtcgatgatgctgatgagagtgagcctggaacttgcaaagatagagaaatcatgcgccatgacccccacaagcttgtggaaggatgccttattgctggagttggaatgagggcatcagctgcttacatctacattagaggtgaatacgtgaatgagcgtctcaaccttgagaaagctcggcaggaagcgtatgcagctggacttctgggtaagaatgcttgtggctctggttatgattttgatgtgcatattcattttggtgctggtgcgtacatctgtggtgaagagaccgccctactagagagccttgaagggaagcagggcaaacctaggctgaagccacctttcccagccaat

SEQ ID NO: 12811 - DNA, 406 bp, Zea mays
  Clone ID: LIB3150-097-P1-N1-G4
cttctttggaggaggttgtcatggcaattaaatgccgcagagaactgttagatggtctctatactggaatcgattcccgccatatcactttgacgagcaaaatggtgcaagagcatagtggacttcacgtgcagccacataaagctattgttggtgccaatgcgttcgctcatgaaagtggaattcatcaggatgggatgcttaaatataaaggaacttacgaaattatatcgcctgatgatattggtctaacacgtgcaaatgaatttggtattgttcttgggaaactcagcggaaggcatgctgtgagatctaagctagtagagcttggatatgaaatcggtgacaaggaatttgaggacttctttaaacgctacaaagaggttgcagagaagaaaaagcgcgt

SEQ ID NO: 12812 - DNA, 342 bp, Zea mays
  Clone ID: LIB3150-097-P1-N1-G5
tctcatgtcgccgagagtgactcccacacgacccacctaccccgacggcggcgtcgccgcattcccctcgattccgtctggcgatcgggggctcccagacacatcacagatacaccacgccaagccaaatcgagcaacgcctatcaccatattataatttcccctcattcatcttacaggcccaggcctcccctccctcctgccccgtcgtcaactaacctccaacccccagccgatcgcgtcggagatgctgggcgtcgcgcggaggcggctcggatccggatgcgtgctcgcccagctggcgcaggccctccgccccgccgtcgtatcggcaggacctac

SEQ ID NO: 12813 - DNA, 347 bp, Zea mays
  Clone ID: LIB3150-097-P1-N1-G7
tttgtttattgttgtacttgaacatctacgggagggtatcaatactggggaggcgagggtgaaggactacacaacccttctctttgttgagaaggaggttgctgtgtttggctccaggaaccctgaggagatcccaggacgatcggttgtgtgctgaatttgttgccgagtctactgcagtattcactgaccaggagaaggctgcacctcacttgaagggtggcgtcaacaatgatgtcatctcttctcctagcacggatgcccccaagtaggcaggaggcggcaactaaaaagattacaattctgacattaacattgtcttcaatgctagctgcacaaaccaactg

SEQ ID NO: 12814 - DNA, 293 bp, Zea mays
  Clone ID: LIB3150-097-P1-N1-H1
taatttttaaaaaaaaaaaaaaaaaaaaataaaaagaaaaaaaaaaaaaaaggggaagataaaaaaaaaaaaaaaaaataaaaaaataaaaaaaaaaaaaaaaaaaaaaaaaaaaaaaaaaaaaaaaaaaaaaaaaaaaaaaaaaaaaaaaaggtggggtttctccccaaaaaatatcggcgaggactatagggatggacactttcaattattggaagggctttaaagtttatggtaaaatatagcaataaaatattttttggaaaaatattatttcgtcaataaatcaaaaa

SEQ ID NO: 12815 - DNA, 401 bp, Zea mays
  Clone ID: LIB3150-097-P1-N1-H2
cctagctcccgcaactgccgccgccactcccacgcccgcagccatgccggccaagctcgacccgtcgcaggtggtggaggtgttcgtccgtgtgaccggcggcgaggtcggcgcagcgtcttcgctggcccccaagatcggcccgctcggtctttcccccaagaagatcggagaggacatcgccaaggagacggccaaggactggaagggcctccgcgtcaccgtcaagctcaccgtccagaaccggcaggccaaggtctccgtcgtcccctccgccgcggcgctcgtcatcaaggcgctcaaggagccagagagggaccgcaagaaggtcaagaacatcaagcacagcggcaacatcagcctcgacgacgtcatcgagatcgccaggaccatgaggcaca

SEQ ID NO: 12816 - DNA, 373 bp, Zea mays
  Clone ID: LIB3150-097-P1-N1-H3
caaatccatccatcctcgtttgctgcgtcccgcagcaagtggggccgggtggccaaaatcaagatcgggatcaatgggttcggcaggatcggaaggctggtggccagggtggccctgcagagtgacgatgtcgagctcgtcgccgtgaacgaccccttcatcagcaccgactacatgacctacatgttcaagtacgacactgtgcacggacagtggaagcaccatgaagtcaaggtgaaggactccaaaacccttctctttggtgagaaggaggttgctgtgtttggctgcaggaaccctgaggagatcccgtggggttcggttggtgctgaatatgttgttgagtctactggtgttttcactgaccaggaga

SEQ ID NO: 12817 - DNA, 408 bp, Zea mays
  Clone ID: LIB3150-097-P1-N1-H4
gagccatgcggtgcttgccctccaggaggctgctgaggcataccttgttggcctgtttgaggacaccaacctgtgcgccatccatgctaagcgtgtgaccatcatgccaaaggacattcagctggcaaggaggatccgcggcgagagggcctaatcgccacctcaaacatcgtgacaaaaacatgaagtcctggggttattgttaatctggtgccattgtaaggacatatgagtagggtttgttttgtggatcgcaagtttctcttctgctactgttgctgctacctttgctggtgttattgctagggtcgaatacttaagttaactatgcgctgacagtctggactagcagtgttatgtgcgctgctggaccttgcgcgcaatgctgtggccgatttgttcgttaat

SEQ ID NO: 12818 - DNA, 214 bp, Zea mays
  Clone ID: LIB3150-098-P1-N1-A1
taggtatactcttcggcgacatccccagggctatctcttgagggaccgaggggtggaactcacactcaccacggtgcaactagggattgctaggccagtacacaaatctattccataatgcaccgtaacacagaggctgccaacaactaatataagtgatacgcttaagtatatgctgccaatgcaacctatgatggagcttataatggagctg

SEQ ID NO: 12819 - DNA, 399 bp, Zea mays
  Clone ID: LIB3150-098-P1-N1-A10
tcccagcatccgagagagctccacaggccaggtccccatcgccgcggggcttgccccacctctcccccgcccggtagtagcctcgccgccgttgccgagatggggttcgtgtccttcgtcgggagggtgctcttcgtcgccgctttcctcctctccgcctaccaggagtttaatgaattcggtgctgatggtggaccagcagctaaggcccttcggcccaaattcaacgtgtttgtcaaaaatgtatctgctcatctgggagtagctgtgccacacattgagttgaagcatgtgattgctgctacaattggtcttaagggtcttggaagcctcctttttattttgagcagctctctcggtgcttatctcctgctgctgtaccttgctttgatcactcct

SEQ ID NO: 12820 - DNA, 365 bp, Zea mays
  Clone ID: LIB3150-098-P1-N1-A12
ttgttccgtctctctcccgtccggcacttcgtccgatcgactagcctgcgggggcgccggcaccggcgaccagcggccatgcgggtggcacccagggtgctcttcctcgtccgcgacgccgcgggctacggcgctgccctcgccgacgcgctccgcccgccgcccgggctaacgagggagtcctcgcccttcgagctcccccttggaaagtacggcctcgacggagagaaggcgtgcgccgagctcctgagcttttccgattccagtggctctccacaggtgaccatttttgttctgccagactataagccacctcttgcagcgtgtgttgtaaatggggtcttggaactgatttcttctgaagc

SEQ ID NO: 12821 - DNA, 216 bp, Zea mays
  Clone ID: LIB3150-098-P1-N1-A2
tttaacaaaccgcggccactccaaggaaggtgatcttcatcgaagggacggggggaccgcaccaggggatctcacctggctgactgtttttttaaacaactcctttcgggagaagcagcccacgaacggtattgctaatgagcgtctcaccaaggcacccagcaaccattacaaataacacttctacaggtgctcaggctaaacaaacaagaaaac

SEQ ID NO: 12822 - DNA, 394 bp, Zea mays
  Clone ID: LIB3150-098-P1-N1-A3
tgaagaacccgatcgacaccatgagggtgtggctcgttgccctcgctctgctggctctcgctgcgagcgccacctccacgcatacattctgctgctgcggctgccagccaccgccgccggttcatctaccgccgccggtgcatctgccacctccggttcacctgccacctccggtgcatctcccaccgccggtccacctgccgccgccggtccacctgccaccgccggtccatgtgccgccgccggttcatctgccgccgccaccatgccactaccctactcaaccgccccggcctcagcctcatccccagccacacccatgcccgtgccaacagccgcatccaagcccgtgccagctgcagggaacctgcggcgttggcagcaccccgatcct

SEQ ID NO: 12823 - DNA, 367 bp, Zea mays
  Clone ID: LIB3150-098-P1-N1-A4
cgcaagttgtggagtcaaaggatggaaccatctcagttgcttctgcgttgggtgctcatcaggaagctgtacaagacagggatcacaaattcttgacaaaagcagtggaagaagcataccgaggagtcgattgcggcgatggaggtccatttggagcagttgtcgtccgtaatgatgaagtggttgttagctgccataacatggttctgaagcacactgaccctactgcgcatgctgaagtaactgcaattagagaggcttgcaaaaagctcgggaaaatcgagctctctgactgcgaaatttacgcgtcctgcgagccatgcccaatgtgctttggtccagttcatctctcccgaatcaagaggct

SEQ ID NO: 12824 - DNA, 399 bp, Zea mays
  Clone ID: LIB3150-098-P1-N1-A5
tctccttcttctattcatttcgccgagaggcgagagaactgcttgggagcgacgttactgctgaagatccagccggcacaccatcggcgaagaagaggccggagagaggatgatactggccgtgctcttcgccaactccgatggaaacatccttgtcgagcgattccatggggttcccgcggaggagaggctccactggcgctccttcctggtgaagctcgggtccgagaacctcaaagggtccaagaacgaggagctccacgttgcctcccacaagtctgtgtctattgtttataccacggtcggggatgtctgcctctacattgttggcaaggatgaatatgatgagcttgctttggctgaagtgatctttgcaattacatcagcaggcaaggatgt

SEQ ID NO: 12825 - DNA, 399 bp, Zea mays
  Clone ID: LIB3150-098-P1-N1-A6
ctcctcgtctgtggcgcagtcgagtactgcgaccggacctacgatcgcgtgacccccagggccgagcgtcgcctcgagcgcttcaagtcgcggaacttcttcaaggtcaccactaccgacgaccccgtcatccgccgtcttgctgagaatgacacggccacggtcttcgccaatgacaccatcctggccgcactcatgtgtgcgccccgtagcgtccagtcctgggatatcgtaattcagcgtgttggcaacaagttgttcttcgacaagcgtgatggctctcagcttgatcttctcaccgtcaacgaaaccgcccaggaggcactccctgaggccaaggaagacatcaactccgcgcattcgctggcggttgaagccacatacgtcaatcagaacttc

SEQ ID NO: 12826 - DNA, 357 bp, Zea mays
  unsure at all n locations
  Clone ID: LIB3150-098-P1-N1-A7
gncctcactccncaccannncccaaaccgtacccanacccccgccggcggcgccgccatgccgcccaagcncgacccgncgcaggtggtggaggtcttcgtccgggtgacgggcggcgaggtcggcgcggcgtcgtccctggcgcccaagatcggcccgctcgggctctccccgaagaagatcggcgaggacatcgccaaggagacggccaaggactggaagggcctgcgcgtcaccgtcaagctcaccgtccagaaccgccaggccaaggtctccgtcgtaccctccgccgccgggctcgtcatcaaagcgctcaaggagcccgagagggaccggaagaaggtcaagaacatcaag

SEQ ID NO: 12827 - DNA, 256 bp, Zea mays
  unsure at all n locations
  Clone ID: LIB3150-098-P1-N1-A8
gagcccacccacgcgtcctacatatcctggcaagtttcgctcagggggtacttgaatttgagacaggaggtatctccatccaagtactatgtcgcggagcatctttattatgaaaaacgagtactacctgcttgggtaaacgtgctttacattttcagcttccacttatcaccattggaatgaatagtagngaacaattcttctgatgctcgggctaaaaaaacaagaaaactgaaaccaaccccccaagtggcag

SEQ ID NO: 12828 - DNA, 205 bp, Zea mays
  unsure at all n locations
  Clone ID: LIB3150-098-P1-N1-A9
cccactctttttttcactccctctcacaaanaacaacgaaaccctataacaaagggggggcggcacacactcccactccattatcaacgacaataacttcttttccgnaaacccaacaaccaccgccgcctagcgcctccgctctacggctccacttcccgccccctcacgccagtccgtccccgacttcgctttcgcgaccgca

SEQ ID NO: 12829 - DNA, 301 bp, Zea mays
  Clone ID: LIB3150-098-P1-N1-B1
ctcaacacagcacaggcagttcgagagagagagagagagagagagagatagaagatgtcgtggttcgggcaccaccaccacaaccagcctttttccccggcgtcgggccccaaccaggtgttcaagatcttctgccgcgccaacgagaactactgcctggccgtccgcgacggcgccgtcgtgctggccccggtcaaccccaaggacgacacaccagctctggcacaggcacatgctctagaacaccggtcaaaggcacgaaaaacatatccgcgttttcgctcttcaacaaaggcacagg

SEQ ID NO: 12830 - DNA, 385 bp, Zea mays
  Clone ID: LIB3150-098-P1-N1-B2
tctttaaacaagtgccagcgccctctcgcgggggccgcaatggagagcacgggggatcatgatcaagcctgacggcgtccacaggggcctcattggtgagatcatcagccgttttgagaagaagggcttctacctcaaggccttgaagcttgtgaacgtggagaggtcgtttgctgagaagcactacgccgatctcgcctccaagcccttcttccagggccttgtggactacatcatctctggccctgtggtggccatggtctgggagggcaagagcgttgtcacaactggcctgaagatcattggcgccaccaacctcctggcttctgagcccggcaccatacgtggcgactttgctgtcgacattggcaggaatgtcattcat

SEQ ID NO: 12831 - DNA, 337 bp, Zea mays
  unsure at all n locations
  Clone ID: LIB3150-098-P1-N1-B3
gacccggaccaaaccaatcangcgggtggggcgcggcggggacgcgagggcaaggaggccggacgttggggggaccggggctcgacgccagccgtggatcgcgtgcggagggggacaagcgtctgcctcatgtcccgcgacggcggggaatagggcgacggcgtcggcggcggggatcggttgcggcggcgtgacgaggcggctgctgcggcggctcgggagggaggcggcaccatgtctgcggtagtctgtggcaagaggtcctccttcatcttcgccgactagctcctcccgccgtcttctttcttccctcactccttccaccagccggcgggca

SEQ ID NO: 12832 - DNA, 401 bp, Zea mays
  Clone ID: LIB3150-098-P1-N1-B4
tttccttgcatagggtttatcttctcccgtgctctgcccccatgtcggtgggggcacacggcagccggattccgaagcgcgccccctcggccccagccaaaagcatcgcagtttctaatcgtttggagagcacacaagaatgtcgttcgtgcagctctctggtgctggagtcgctgcagtggccttcacgaacaagagcctagtctctcggcacgcagcgctacgggtctgctcgtcgaggcgctcgatccgtagcctggtcgttaaggctgcaactgtcgtcaccccaaagtacacttcactgaagcctctgggagatagggtgcttgtgaagcttggtgccgcagaggagaagacagttggtggcattttgcttccatctactgcccagactaaaccac

SEQ ID NO: 12833 - DNA, 219 bp, Zea mays
  Clone ID: LIB3150-098-P1-N1-B6
gaccaggtaagcagcagcaggaacggtagcaccgccgcatgcgcaggcatgggtatcgacctcgttgccggtgggaggaacaagaagaccaagcgcacagcgccgaagtccgacgatgtttatctcaagctccttgtcaagctctaccgtttcttggtcaggaggaccaagagcaacttcaatgctgtcattcttaagaggctcttcatgagcaaaacc

SEQ ID NO: 12834 - DNA, 154 bp, Zea mays
  Clone ID: LIB3150-098-P1-N1-B7
cgcgcgtacataaacttaaatcctctatattctacccactctttttttcttaccatataaccaccaacagggagcggtatcaaaacaagatcgggagccacaaaaatcaacctctttaccacttcctattttcttttttaccaatcccacatct

SEQ ID NO: 12835 - DNA, 359 bp, Zea mays
  Clone ID: LIB3150-098-P1-N1-B9
tttttgaagcaccagaaccttgcaagacaggggaacttgagataaagggggcgaggaaagagttgatgagaaacagagtagcaaatgcagaagaaactcctggtttcacagtatatctgaatcgaaggccagcaagcttggttgaggccatgaaggacatcgactgtcagttctcggggatatgtgacgctgctcgggaaatctcagtaatgttggaggcaagtagagctcagtactcaacctcaaacgatctttctgcgaagatgctgaacccagttgcacttttgcgttctgcgtcatcccgttcatcattatctcgttttccttttgcttcctctagcttaatagatgatctcttt

SEQ ID NO: 12836 - DNA, 395 bp, Zea mays
  Clone ID: LIB3150-098-P1-N1-C3
cttttcgtccttgttcctcaacgtcgccggtgcgcccgcctcctgcctctgtccccctgcgagcgatcgtgaggggatcgggatggcctcccaccattccgagcccctcgaccccgccgacgctgacgacccctcagataacaacccagaattaccatgcccctcctatcatatcgttaccaaacctggtcaactcccagtcgagtttcttgaaccctcagctgcccagaagttggtaattggatttgactgtgaaggtgttgatctctgccgcaatggtgctctctgtattatgcagcttgcattccctgatgctgtttacctagttgatgctattgagggtggaaaagaacttattcaagcttgtaagcccgcacttgagtctgatcatatca

SEQ ID NO: 12837 - DNA, 327 bp, Zea mays
  Clone ID: LIB3150-098-P1-N1-C4
ttcccaccgcggcagatcttcgacgcctccgagggcgatggaggaggacggcggctccggcagcgatagcatggagttcgtcgcgggagcggagactagcgctggcgcaggcacaaacgccggcaggaaccgcggcgtgggtgcagggaccagcgtaggcggtggcggcggcacgaagctgccgcatgtgctgcaaaagagtttcggcgaggtgcaagggattctggagcacaaccgcgtcctgattcaggagatcagccagaaccaggagacgcgcgacgcggacggtctcagccgcaacgtggcgctaatccgggagctcaacac

SEQ ID NO: 12838 - DNA, 328 bp, Zea mays
  Clone ID: LIB3150-098-P1-N1-D1
tcgccgccgccaggctcctcctcactgcactgaacgaaaaacggcagcaggggggccgcccacgcccacgcccacgccccgcccaccgacccgacaaaaatgccggggatgttggcggcgcagtttacggctctctctctatcccagtcaccttcgccacagtccagcttacgccttgccatccgcccttcgctggcggcgagggcccgctttgtcgctccgcggacagcagcctctgcggccgccgtatccgctaaaccggcggcggtttcgtctcccctaattgaggaccgcactgtcgtccgtatcgggctccccagcaagggcc

SEQ ID NO: 12839 - DNA, 402 bp, Zea mays
  Clone ID: LIB3150-098-P1-N1-D2
tctctctcgagtctcgactctcgactgcgccgctacagcctgacgcgatggcctcgtcggcgacgagagaggttctcatgcttgaggcgcctccgccgtccgaccccgctgcggggccctggcgcgcggaggccattgacgcgctgccctacatcgacggcgactacggcgatgcggcggtgaagcgggaggtcgatcgcctcgtcgaggaggagatgcgccgagggaagcgcaagcctgcagacttcctccgggacctgccccctgttcccaccgccggattcgagaatcatcctatgcttgctaaagaatatgaacgtgttagggctggcaaacctccttttatgctagatatgtctcgctatggtttggagccacctccaatgaacaagaagaatgatg

SEQ ID NO: 12840 - DNA, 398 bp, Zea mays
  Clone ID: LIB3150-098-P1-N1-D3
ctccgccaccgacctggccgcgcccaccggtgcctggtcgcttgccttggtaggcacccccggcgccgcgtcctactcctggccgcccacacccacccaggccaggctccgcgtccaggagaacgtccgccggtacgcgcgcaactacgccgcgctcaccatcctcgtcttcgcgtgctgcctgtaccggatgccgatggcgctgttggggatgctggtcagcctcgccgtctgggagggcgtgcgctactgccgggaccattggggtcttaccaccagggctccaggggttgcccaggctctgctgcactgtgcgcagattgctaccgccatactcctgtacgtctgcaacctacagtttgctctcgtgtacgccatcggattgagctatgcgttga

SEQ ID NO: 12841 - DNA, 372 bp, Zea mays
  Clone ID: LIB3150-098-P1-N1-D4
ttttaacttccttcaattcgacccggcaccgcggcaaattgagccagacacagactcggaaaaccccagactactttttgtaattgtggtggtgaccttaacttactggtgttgatgctcctcttttccgcagcatcagggtctgtagatcatctgtccttagatatgggttccatgagcccgacctgtacgtctcccaattcttttgtttggagattttgttgccgcttaacgatctttatacaatatgttaaaaagttaaatgccattggatttttcttcgttctgttgtacgtcgactttgtattatttgtagacggtgaatggaagtcgcagcaggaaagccaagctcctgctatggtttttgtttgc

SEQ ID NO: 12842 - DNA, 389 bp, Zea mays
  Clone ID: LIB3150-098-P1-N1-E1
cgctgaacgcttccgccccgccgccaccgggcccgctctcctccctccggtcgcctccgcttccgttccgcgccctgcccccggaaggcaagcaaagccctcgctacttgcggagcgtcgttggtcaaaccctagcacacgtacgagcaggccagccccgcccgctcccattcccaggccctcatccatggcggcgctctccgtgcccctccacgccgccgccggatcccgcgccgccgcggccgaccccgtcaaggttccgtgcgtgaggagcactggttcagcccattttggccgcgcctccccctccgtcgcggtctcctcttcggctgcgaggcgcatcgagccgatgagagcgatagctacacaggcgccccctgccgtgccac

SEQ ID NO: 12843 - DNA, 347 bp, Zea mays
  Clone ID: LIB3150-098-P1-N1-E2
tcgtgcctcctcagtgctccggcgcctagcgagctgctcctgcccccgccggggccgtgcacgcacagccggagcaggagcagcgctgcccgcctttaccgttgcccatggagaactctgccgccgccgccgccgcccggccgtgcctcacccgcgcagccgccaagcgctcagccgtcgtcacggctgtggccgtcgccgccaagcgcaagcgcgtcgcgctcagccagctgcccacgctccccaacgccgtgctcggcgcgcacgacgacgacgacgacaagcccgtcaagaagcagcgccttcttcccggcgtcaagcccaagcccaagcccaaggcagcgccc

SEQ ID NO: 12844 - DNA, 396 bp, Zea mays
  Clone ID: LIB3150-098-P1-N1-E4
tcgatttccagatggagcgctatgcctgggagcgccgcaccgacgggagtgtacatcatcaaccttggcaagacatgggagaaactgcagcttgcagcgagggttatcgttgccatcgagaacccgcaggacatcatcgtccagtccgcccgcccctatggccagcgtgctgtcctcaagttcgctcagtacactggcgctcatgccatcgctgggaggcacacccctggtaccttcactaatcagctccagacgtccttcagcgagcctcgactgctcatccttaccgacccaaggactgaccatcagccaattaaggagtctgctctggggaacatccccaccattgccttctgtgatactgactctcccatgcggtatgtcgatatcggcatc

SEQ ID NO: 12845 - DNA, 389 bp, Zea mays
  Clone ID: LIB3150-098-P1-N1-F1
ctacaggtaaggaagaggaggagggcaggaggtcgcaccgtaagggggagcacccgaggcacggctccctcggcttccttcccaggaagcgctcctcccgccaccgcggcaaggtgaagtcatttcccagggatgaccccaagaagccttgccatctcactgccttccttggctacaaggctggcatgactcacattgtccgtgaggttgagaagccaggatccaaactccataagaaggaaacttgtgaggctgttaccatcattgaaacccctcctcttgtcattgttgggctcgtggcatatgtgaagactcctcgtggcctccgcacactcaactcttgttgggcccaacatcttagcgaagaagtgaggagaaggttctacaag

SEQ ID NO: 12846 - DNA, 321 bp, Zea mays
  Clone ID: LIB3150-098-P1-N1-F2
gtgtacctggcggcgaagagcgaagctgagcactacaaccgggagctgcgagcgcgagcaggacgagatcgacaccgtccccgacgtcgaggccgccgagatcgccgacatcctgtcgcagtacgggctgggcccggaggagtacggccccgtggtgacctccctccgcaacaaccccaaggcgtggctggagttcatgatgaagttcgagctcgggctggagaggcccgagccccggcgcgcgctggtgagcgccgtcaccatcgcgctgtgctacgtcgcggccggtcttgtgccgcttcttccctacatgtttgtgcc

SEQ ID NO: 12847 - DNA, 402 bp, Zea mays
  Clone ID: LIB3150-098-P1-N1-G2
tcttctacgcgtccgcccacgcgtccgcagaacgggtccattaggacctatgagaggggggcacataggacggcatctatagagacgctgatgaaccatttgcaggaaacggcactcaatcatgtgaagaccgctgggctgctaggtgatggatttggctccacaccagagatgagtaaacgaaacttgttctgggtggttagccaaatgcaggccatcatcgagcgttatccatgctggggtgatactgttgaagaagatacatgggttagtgctaatggtaaaaatggaatgcctatggattggtatatacgcgtacctattaacaggcctcacgatactgaaggcaacaagtaaatgggttttgatgcacaaacccactaggaagcttgcagaatttca

SEQ ID NO: 12848 - DNA, 212 bp, Zea mays
  Clone ID: LIB3150-098-P1-N1-H1
ttgttgtaatccaaaaattcatccatggaacagggggcttatattgcacctgtggtggctatatacatccagctgaaatacaacattgatgttatctgtgaataccttgtgaagaaaatccccatccctgaaaggaactttacctcaccttccaacatgaatgatattcgctcctttgatgttaacaagcctggttcagaggttgatgaaat

SEQ ID NO: 12849 - DNA, 361 bp, Zea mays
  Clone ID: LIB3150-098-P1-N1-H2
ggcgctcgcgcgggcggagccatggcggacgacgattacaacgaaatcgacatgggctatgaggatgagcctccagaacctgagattgaggaaggggccgaagaagagcttgagaacaacgaagatgcccctgatgatgtcataggtggagagggtgaagataaggaacaggaaaagaccaagcgtgagcgcaaaacaacaaaatatatgacgaagtatgaacgtgcgcgcattcttggtacacgagccttgcagataagcatgaatgctccagtcatggttgagcttgagggagaaactgaccctcttgagaatgcgatgaaggagcttagagcgcgcaagatacccttcacgatcagac

SEQ ID NO: 12850 - DNA, 284 bp, Zea mays
  unsure at all n locations
  Clone ID: LIB3150-098-P1-N1-H4
tctttttcttgttccgaccgcgtccgcatccgcggcggctttttgaacgcgggggcgcgtcacggatccactgggcgtgcgcgttaccggcgggaggcgagggcaggcggtggtcgcgatggcgttcgccgacgctcgcttggcggagattgccttctccatcnnnnttattctcgtcttttccaagccagggatcaagttccaggacattacgacactgttgctcgaccccaaggtgtaccgtgacaccatcgacctctttgttgagcggtacaaggaccaat

SEQ ID NO: 12851 - DNA, 423 bp, Zea mays
  Clone ID: LIB3150-099-P1-N1-A1
tcgcaactcgccgtctgccttctgcgcctccatttcggcctctgtcccttgcaagttcaatctcacctccaaccatgggtaaagagaagtcccacatcaacattgtggttattggccacgttgactctggcaagtcgaccaccacaggacacctgatctacaagcttggaggcattgacaagcgtgtgatcgagaggtttgagaaggaagctgctgaaatgaacaagcggtccttcaagtacgcatgggtgctcgacaagctcaaggctgagcgtgagagaggtatcaccattgatatcgctctgtggaagtttgagaccaccaagtactactgcacggtcattgatgcccctggacaccgtgacttcatcaagaacatgatcactggtaccttccaggctgactgtgctgtccttatcattg

SEQ ID NO: 12852 - DNA, 379 bp, Zea mays
  Clone ID: LIB3150-099-P1-N1-A10
tttttatgccaagccgtgggtgggattaccgggggcactcttactgggaggacgcgggatggcttctgctgatagtcagttggtagttgccgtcgaggggaccgcggcgctttggccctactggtccaccattgtggcggagtacgtctagaagatcgtgaggagcttttgtgcaagtgaactgcctggccagaagcttgtgtgtactccgtctgaacttgcattagttgtttttcatacccatggaccttacagtgcttttgatgtgcagcgaagtggatggacaaaaaatgtcgatgctttcctatcatggttatcttgaatatcgttcattgttggaggattctaataaacttttactttataaatttttttctta

SEQ ID NO: 12853 - DNA, 361 bp, Zea mays
  unsure at all n locations
  Clone ID: LIB3150-099-P1-N1-A12
tcttctatcctcccgaccacccgcggtgccggttctttttaaggcagggggccagacccctctaccccgatccctatcggtcgctggcgaggcggcgtgacctacccctgctcattctttcaagccagactgtctggctgctgtgcattcccgttttggcggctaccttacctttggcaaggcaatcccccctcacccctggcaagcacgggagaacatnnnaagtgcttcagatgtacaaatgcaacatcttgctgaagattccgagactacaattgagatcaaaatcaatacattggattcccagacatacaatttgcgtgtgaataaatgtgtgccagtttctctgtttaaagagaaa

SEQ ID NO: 12854 - DNA, 436 bp, Zea mays
  Clone ID: LIB3150-099-P1-N1-A2
caaggtggtgctcatcggcgactccggcgtgggcaagtccaacctgctctcgcgcgttacgcgcaacgagttcagcctcgagtccaagtccacctcagggccgtcccgaccgaggacgccaaggccttcgccgagcgccagaacgccttcttcatggagacgtcggccctggaggcgatgaacgtggaggacgccttcaccgaggtgctcgcgcagatctaccgcgtcgtcagcaagaaggcgctcgacatcggcgacgaccccgccgcgcctcccaggggccataccatcaacgtcggcggcaaggacgacgtgtccgcggtcaagaagtctgcctgctgctcgtcttagcttgggaggacaggatagagcgtgtacttgggtttggttgttgatacttcagcactagagggcacatgacgttattgcagtcatg

SEQ ID NO: 12855 - DNA, 392 bp, Zea mays
  Clone ID: LIB3150-099-P1-N1-A3
cgcttccaagatgtctaagcgagggcgtggaggttcggctggtaacaagttgcggatgtcactgggtctaccagtggcagctactgtgaactgtgccgataacactggggccaagaacctgtacatcatttctgtgaagggaatcaagggtcgccttaacaggcttacttctgcctgtgttggtgacatggttatggcgaccgtgaagaagggaaagcctgaccttagaaagaaggtgatgccagctgttattgtgaggcagtgcaagccatggcgccgaaaggatggtgtctacatgtactttgaagacaatgctggagtgattgtgaacccaaagggagagatgaaaggttctgccatcactgtgcccatcggaaaggagtgcgctgatc

SEQ ID NO: 12856 - DNA, 78 bp, Zea mays
  Clone ID: LIB3150-099-P1-N1-A4
aacaagtcaatgtgaatgagagagagaggaaggtaattgctctgccaccccgcgagacgcctgagcatccacacccac

SEQ ID NO: 12857 - DNA, 444 bp, Zea mays
  Clone ID: LIB3150-099-P1-N1-A5
tagatagcttgaagaagctcgatcggctgattggaacaactacagctccaggccagttgcatcttgttgaaaaccttgactacaagttatccccatggcagaaagaagctctgtattctgcacgtgttcttttactgctccatgcaaataaaactgaacaggcacatgagttggtcagggggctgcttggtatgtttccagatagtgtattccctgttttacttcaagccgctgttcatgttaaagaaaagaagattcacaaagctgaagatgttcttagccagtacgctgagaagcgtcctgagaattctaaagggctcctccttgcacttgcccagattgctgctaatgccaaccattttcagcttgctgctgactcactatccagaatacctgacattcagcacatgcctgcaacagttgctacattagtggcccttaaag

SEQ ID NO: 12858 - DNA, 441 bp, Zea mays
  Clone ID: LIB3150-099-P1-N1-B1
ttttcttccccgccactgcgcagcgcgagtgcggcgacagccagtcacacactcccactccctcgaccgctctcggccctcggccccgtccgcgtcgccgcagggcgaggaggcaatggcggcgggcgggaatggcgccggcggggacaccaaggcggccttcgcgcggatctacaagacgctcaaggaggagctgctcaccgacccggccttcgagttcaccgaggagtcacgccagtggatcgaccgcatggttgactacaatgtactcggaggcaagtgtaaccgtgggctctctgtggtcgacagctacaagctgctcaagggcgctgatgctctgggcgaggaggaaacgttccttgcttgcaccctcggctggtgcattgaatggcttcaggctttctttcttgtgcttgatgatatcatggatgactctcacac

SEQ ID NO: 12859 - DNA, 167 bp, Zea mays
  Clone ID: LIB3150-099-P1-N1-B10
tctttggcaaaagctcatgagatccaggctggtgtgcttttgcacccggggttgggttaccgttgacgatatcaaagaggtcaagtgcgcaatttctatccttggagctgagattgacaaaatgtccccaccggagcttatcaaacaattcgagcaggttccttttt

SEQ ID NO: 12860 - DNA, 352 bp, Zea mays
  Clone ID: LIB3150-099-P1-N1-B11
aatataaaataaaaaaatataaaaaaaaataaaaaaaaaaatataaaaataaaaatataataataaaaaaaaaaaaaaaaaaaaaaaaaaaaaaaaaaaaagaaaaaaaaaaaaaaaataaaaaaaaaataaaataaaaaaaataaaaaaaaaaaaaaaaaaataaaaaaaaaataataaaaaaaaaaaaaaaaaaaaaataaaaaataaaaataaaaaaaaaaaataaaaaaaaataaaaataaaaaaaaaaaaaaaaataataataaaaaaaaatgagaaataataaataaataaaaaataagaaataataaaataaaaataaaaaaaaaaaataaatataaatataaat

SEQ ID NO: 12861 - DNA, 441 bp, Zea mays
  unsure at all n locations
  Clone ID: LIB3150-099-P1-N1-B2
gctcaaaccacgcttcttcggncctacaacgacgtcgctgtccgcctcgccctgctgccatggacccgtctccacgacgtcttccacgtgggtctcctcaaaaagttctagggactaccaccggaggttcctctgtccctgctgctcatccaccatggggcggtgatcccggagctggaatgagctgtcaagacacgcatcgctcgctgggtgcgccaggtcttggtacagtggaagggccaaactgtggcgtcagcaacttgggaggacatcgagccgttcgtcaccaagtatcctactttccagcttgcggacgagctgcctctcgaggaggggagagatgtcatgtggggactcaagtatgccaggtgccgtatggctagggatgtgcggcgggcggctgaacgtgcggctcatgcagaagctgagcgcagcaacacg

SEQ ID NO: 12862 - DNA, 416 bp, Zea mays
  Clone ID: LIB3150-099-P1-N1-B3
tcgtttcctgtggggtttcaggttttgtccctgcgtggcagcgacccagcgccagcgagcatcgaggcatggaaccgggagccaaatcggaagcaaagcaaggtgaggcaggatctggcgcgggggaaagcggcagcggcaaggtgtatcatgagaggcagaggctgcaattctgtctcctccatgctctcaacaaccttatgcaggaaaaggaatgtttcacccgtgctgagttggacggcatcgctggaaatcttgttctcaatgatccaaacaagggccagtggactcctctaccattcatttttaaacctcaccacaatgttataactgggaactatgatgtgaatgttctcatcacagcattagaagctagaaacaagaaggtggtttggcatgatcgtcgtaaaggggca

SEQ ID NO: 12863 - DNA, 430 bp, Zea mays
  Clone ID: LIB3150-099-P1-N1-B4
tagaagcgcccctctccctctctctctctctcttcgccgtccgaagctccggaccccaatctaatcgacacctcgccgagatgggccgcaagttcttcgtcggtggcaactggaaatgcaatggaaccacagatcaggtcgagaagattgtcaaaaccctgaatgaaggacaggttcccccttcagatgttgtggaggtcgttgtcagccctccttatgtcttccttcctgtggtcaagagccagctgcgccaagagttccatgttgcggctcagaactgctgggttaagaagggaggtgctttcaccggtgaagtcagtgctgagatgctcgtcaaccttggtgttccctgggtcattcttggacacctctgaaaggagagctctgctgggagaatcaaatgaatttgttggagacaaggttgcgtatg

SEQ ID NO: 12864 - DNA, 404 bp, Zea mays
  unsure at all n locations
  Clone ID: LIB3150-099-P1-N1-B5
attcccttaaaaatcaggngaggggtagactgtatctggagtatgcgcggatatgttatattactgatgcacttgacatatgtttcttatctgatgagtcaaaacaagttgctacgataatcaagaacatgctgcagcttgctttggagttacgatcatgctttcatagtgtgacacttgtgatttatcagtaaatcaactcagtaatttgcaataccttataaacttctctcaggtggatgtaattagaacaaaattcgaggatcacatcaaagatctctatattttgcattcgaaatcttcaaaatataccgtgcttgggcttttccggtttctggcggttttttgaactacaattgagatcattctacgaaagtcagcaaagatatggacaacttctattt

SEQ ID NO: 12865 - DNA, 344 bp, Zea mays
  Clone ID: LIB3150-099-P1-N1-C12
aaaaaaataaaataaaggaaaggtttttttaaaaaaagggggtcttaaaataatattaaaaaaaaaaaaaatataataaaaaataaataattattaaaaataaaaaaaataaataaaataaattttatataaataaaaataaaaaaattaaaaaataaatataaaaaaaaatataaaataatatattataaaaaaaaatttataaaaaaataaatataatataaaaataaaatataaatattaattaattataattataataaaaaataataaataaataaaaattataataaatataaattataaatataataataaatataataaaattaaaaaaattataa

SEQ ID NO: 12866 - DNA, 425 bp, Zea mays
  unsure at all n locations
  Clone ID: LIB3150-099-P1-N1-C2
ttgttgctcaagtgccacagaagacattcacatactaccatccagagtcaagagggcttgatttctcaggattgatgaatgaaatcaagaatgctccagacggttcattctttttgcttcatgcatgtgctcataatcccaccggtgtagatcctacggaggaacaatggagagaaatatcccatcagttcaaggtgaaaaaacattttccattctttgacatggcataccaagggtttgccagtggtgatccagagagagatgccaaggcaatccgaattttccttgaagatggacaccaaattggatgtgctcagtcatacgcaaagaacatgggactntatggacaaagagcaggatgcctgagtattctgtgtgaggatgagatgcaagcagttgctgtcaagagccaactgcaacagatc

SEQ ID NO: 12867 - DNA, 336 bp, Zea mays
  Clone ID: LIB3150-099-P1-N1-C3
ttcttcttctccccctccggttcgggttcgggttcgtgaggttctccggggggcggtttcatggataagcggatcgagatggcggcgtcggatgttgagtaccgctgcttcgtcggcggcctcgcctgggccactgacgaccactccctccacaacgccttcagcacctacggcgaggtcctcgagtccaagatcatcctcgatcgggagacgcagaggtcccgcggcttctgcttcgtcaccttctccacggaggaggcgatgcggaacgccatcgagggcatgaacggcaaggagctggacggccgcaacatcaccgtcaacgaggcccaatcc

SEQ ID NO: 12868 - DNA, 444 bp, Zea mays
  Clone ID: LIB3150-099-P1-N1-C4
gtccatctacagcagctactgcacctggtaaaggttttggtatgaaattaggcaagacacagaagacaaatcaattccttgagtctttgaaagctgaaggagaagtcattttggaggatgtacaaccaagtgcagtttctacaagatcatctgctcttccaccaagtgaccctgtcacagtgaacatagaagagaagctcaatgttgttgttaaaagagatggtggtattagtaactttgatgttcaaggaacacttgctcttcaggttcttaatgatactgatgggttcatccatttgcagattgaaagccaagatatgcctgggcttagcttcaaaacacacccaaatatcaataaggatttgtttaacagtcagcaaattttgggagcaaaagatccaaacaggccctttccgagtggtcaaaatgaaactcctctggtga

SEQ ID NO: 12869 - DNA, 442 bp, Zea mays
  Clone ID: LIB3150-099-P1-N1-D1
ctcctcttcctctcccacgcaccgcgccaaggaagacagtgagagatcgacgctcctcttctctccgtcggtggtgcggttgaccgccctactcgagcgagatctcgctgcagtccctcgagatctggtcacagatctatccgacaagatggtgaagatctgctgcatcggtgctggctatgtcggtggcccaaccatggctgtcattgccctaaagtgcccagacattgaggttgtcgttgttgacatctccaagccccgcattgaggcatggaacagcgacaccctcccgatctacgagcccggcctcgatgatgttgtgaagcagtgcaggggcaggaacctcttcttcagcactgatgttgagaagcacgtcgctgaggctgacatcatcttcgtctcggtgaacacccccaccaagacccgtgggcttggagctggc

SEQ ID NO: 12870 - DNA, 418 bp, Zea mays
  Clone ID: LIB3150-099-P1-N1-D2
gtgaaagacagggcaccggcagcgacgatgtcggggcgcggcaagggcggcaaaggtctgggcaagggcggagcaaagcgccaccgtaaggtgctccgtgacaacatccagggcatcaccaagcccgcgatccgtaggctggctcggaggggcggcgtgaagcgcatttcggggcttatctacgaggagacccgcggcgtcctcaagatcttcctcgagaacgtcatccgcgacgccgtcacctacaccgagcacgcacgccgcaagactgttaccgccatggacgtcgtctacgcgctcaagcgccagggccgaaccctctacggcttcggaggctaggctggatgcctcttctccttgctgtcgtggatgcctgtttgttgttaagggtatttcgtttagttccttggctgtgacg

SEQ ID NO: 12871 - DNA, 429 bp, Zea mays
  Clone ID: LIB3150-099-P1-N1-D4
gccgcccgcaaaccctcatttttctctctgctgcgccgcgacgtccctcggcttcgccgccgaatccgagactccgatctcgggttcaccgcagcgcacagagcagccccgactcccggcccgatccgcgctctcctctccgtcgcttcagtcatggcaggaatggcacctgagggttctcagttcgatgctaagcactatgattctaagatgcaggagctgctgagcaccggtgagactgaggagttcttcacttcatatgatgaagtttttgagagttttgatgatatgggcctccaagagaatcttctgagaggcatttatgcttatgggtttgagaagccatctgcaattcagcagagaggaattgttcccttctgcaagggtcctgatgtcattcagcaagcacaatctggtacaggaaagaca

SEQ ID NO: 12872 - DNA, 368 bp, Zea mays
  Clone ID: LIB3150-099-P1-N1-D6
tttctctggcctcggttctctcctccttgagcgcctgtctttggagtacggggggatatccaatctgggcttcactgtgtacccatctccccaggtgtcaacctctgttgtggagccttacaacatcgtcctttccactcactcacttctggagcacactgatgtctctattctgctcgacaacgaggccatctatgacatctgcaggcgctccctcgacattgataggcccaactactccaacctgaatcgccttgtgtctcaagtgatcttatctttgactgcttccctgaggttcgatggtgccctcaatgtggatgttgaactagttccaaaccaacctgtttccttacccaaggatccacttt

SEQ ID NO: 12873 - DNA, 421 bp, Zea mays
  Clone ID: LIB3150-099-P1-N1-E1
ctcagctcctcccgacctccctatatctctctgctcccccaaaccctaatccctggcataacacaacaatctctctcccctcactccctctctgcagcgcgcagctttcaaagcgttgggagagatggcagaggagacgcaaccagaggccgtcgcagccgccgccgcgcccgccgcggccgaggtagtcgtgaccgaagctgctccggcggaggcggaggtgcctgcggcggcggaagctgaagccgaggccaaggatgagaagaaaggtgacgaggcggagctcaccgccgatgacgcgggggtggggaccggctcgttcaaggaggaaagcaacctggtggaagacctgcccgacccggagaagaaagcgctcgacgagttcaagcagctgatcgctgccgccctcgccgccggtgag

SEQ ID NO: 12874 - DNA, 433 bp, Zea mays
  Clone ID: LIB3150-099-P1-N1-E3
ttcattacaatggtgaagatcctagatcacataaggatcctttggttctttctacgtttcatggttcttgtggcatcctttgttggtcatgcacagataataagaggtgaaaccaaagaggacaacgacaccaagagcatgacgatgacaacaatgagaccaggaagctatgtaactagcatggatgaaaaatctagcttgtgctttgaggatataaaaactttatggtacatctgcagaacaacttatcacctttataggacattgaaggattgcctgtcgcattgcaacagtatgtgatgcaccatgttggaaaaaaagaactaataagaggccatgctttctcaagattgtagattgagatggtgaagatgttctacccaatcatccatgcatgtaccaagggataaaaaaactataagaataattatta

SEQ ID NO: 12875 - DNA, 440 bp, Zea mays
  Clone ID: LIB3150-099-P1-N1-E9
tttgacgcgtgggcggatggcctccatccgtggagccctccaagcccagctacgtgccggctatgaccaagatcgtcggcactctcggccccaagtcgcgctccgtcgacacgatctccgcctgcctcaaggccggcatgtccgtcgcccggttcgatttctcgtggggggacgccgcgtaccaccaggagacgctggagaacctcaagctctccatcaagtccaccaagaagctctgcgctgtcatgctcgacaccgttggcccggagctgcaggtggtgaacaagagcgagaccccgatctccctcgaggagaatggcacggtcgttctcacccctcaccggggccaagacgcctccttcagcttgctgcccatcaacttctctggactcgccaaggcggtgacaccaggggcaacaatattcgtgggacaatacttg

SEQ ID NO: 12876 - DNA, 433 bp, Zea mays
  Clone ID: LIB3150-099-P1-N1-F1
tcagcagcagaccaagatcgagggagggaggaagacagacagacagacagacagacagagagatggatcggatgagctcgtcggtgcagtcctgggtggaggaacacaagctctcgtccatcggagccgtgtgggcgacggcggtgggcgcgtccgtggcgtacagccggcggagggcgccggcgcgggccacgagcctgcgcctcattcacgccaggatgcacgcccaggcgctcacgctcgccgtgctcggtggagccgcgctcgcgcaccgctattacggcagcagcgagaggaggcagaggcaggaggacctggactacggctttaaatcccagctgccgccggccaccgacgccgagggcaacgagaacgagcgctggagctggtagtggcagggcagactatcagtgagtgaccagtgagccagtga

SEQ ID NO: 12877 - DNA, 446 bp, Zea mays
  Clone ID: LIB3150-099-P1-N1-F2
tcatatcccctgcccccaaaatattgctagggattcgaggggaggaaaatccaggcgcccaggcctggcaatccgttcgtcggagaggccatgagctcggcgcaggatccgttctacatcgtccgggaggagatccaggagtcgattgataaattgcaaagtaacttccaccgctgggagcaaactgcttcaaacacaggagaatatgttcatctgacaaaggagcttctgaccagctgtgaaagcatcgagtggcaggtagatgagctggaaaagacaatctcagttgcatcaagggatccatcatactatggacttgatgaagttgaactttccagacgaagaaactggactggttctgctcataagcaggttggtacagttaagagagctattgaaaagggcaagagcaatgtagcaacttcaaaataccaggatacaaacga

SEQ ID NO: 12878 - DNA, 368 bp, Zea mays
  Clone ID: LIB3150-099-P1-N1-F4
tgtttatacactgcccccaaaatattgctaggggttctaggggaggaaaatgcaggcgcccaggcctggcaatacgttcgtcggagaggccatgagctcggcgcaggatccgttctacatcgaacgggaggagatccaggagtcgattgataaattgcaaagtaacttacaccgctgggagcaaactgcttcaaacacaggagaacatgttcatctgacaaaggagcttctgaccagctgtgaaagcattgagtggcaggtagatgatctggaaaagacaatctcagttgcatgaagggatccatcatactatggacttgatgaagttgaactttccagacaaagaaactggactgagtctgctcata

SEQ ID NO: 12879 - DNA, 435 bp, Zea mays
  Clone ID: LIB3150-099-P1-N1-G1
tgagcagcagcagcaggcggcgccgaggagcggcatcccactcagtgcttgcaaccatggctaggggattgaagaagcacttgaagaggctcaatgcgcccaagcattggatgctcgacaagcttggcggagcttttgctcccaagccatcttctggacctcacaagtccagggagtgccttcctctgatcctcatcatcaggaacaggctcaagtatgttctgaactaccgtgaggtcatttctatcctgatgcaacgccatgtacttgttgatggcaaggtcaggactgacaagacctaccctgctgggttcatggatgtcatttccatccctaagacaatggagaactacaggctgctttatgacaccaagggccgcttccgtcttcacccaatcagggatgaggatgccaagttcaagctctgcaaggtga

SEQ ID NO: 12880 - DNA, 411 bp, Zea mays
  Clone ID: LIB3150-099-P1-N1-G10
tagaagctcgatgctgcttatcaagaagctcagtcgaagggttctgcgtgccctatattcttgtttttctcagtgaatacaagtgggcagtttgttggtgttgctgaaatgacgggggctgtcgattttgagaaaaccctggggtattggcaacaggacaagtggaatggttccttctctgttaagtggcacattgtcaaggacgtgcctaacaacattctcaaacacatcatcctagagaacaacgagaacaagcctgtcacgaacagccgtgacactcaagagatacacctagaacaaggccttcagatgctcaagatattcaaggagcatgtcagcaagacgtccattctggatgactttcccttttatgagagtcgccagaagctgatgcaggattagagggtcgaa

SEQ ID NO: 12881 - DNA, 417 bp, Zea mays
  unsure at all n locations
  Clone ID: LIB3150-099-P1-N1-G2
ttacttaaaccaaagaggataatattctacagggttggcgtcagtgagggcgagtgctaccaagttctggtgtttgaacttgatgccattaaaaaggcctgtgcgtcattggagtctgactaccagcctccagttacttttgtcgtggtccagaagcgtcatcacaccaggttgtttgctaataatcacaatgataatcgtgctgtcgataaaagcgggaacatactgcctggcaccgtggtggactcgaagatctgccatccaactgagtttgatttctacctgtgcagccatgctggcattcagggaacaagccggcctgnccattaccatgttctgtgggatgagaacaactttacggctgatgggttgcaaactctcaccaacaacttgtgttacacgtatgctaggtgcaca

SEQ ID NO: 12882 - DNA, 441 bp, Zea mays
  Clone ID: LIB3150-099-P1-N1-H1
ttcacgcgttcgcacacacacaaccagatgtgcgcgcatattcacccgtcggcgacgtgcgcttcaagatgcagatctttgtgaaaaccctgaccggcaagactatcaccctcgaggtggagtcgtctgacaccattgacaacgttaaggccaagatccaggacaaggagggcatccccccagaccagcagcggctcatcttcgctggcaaacagcttgaggacgggcgcacgcttgctgactacaacatccagaaggagagcaccctccaccttgtgctccgcctcaggggaggcatgcagatctttgtgaaaaccctgaccggcaagactatcaccctcgaggtggagtcctctgacaccattgacaacgtcaaggccaagatccaggacaaggagggcatccctccagaccagcagcggctcatctttgctgggaagc

SEQ ID NO: 12883 - DNA, 444 bp, Zea mays
  unsure at all n locations
  Clone ID: LIB3150-099-P1-N1-H3
tttctggtgaagccgtcgccgctgcagtgtgcatatccaccgcaggagacgtgagagggttncttttgtcaagacccacaagagcaatgcgtacttcaagcgtttccaggtgaagttcaagagaaggcgcgctggcaagacagactacagggccaggataaggctgattaaccaagacaaaaacaagtacaatacacccaaatacagatttgttgtgcgatttaccaacatggacatcacagcacaaatcatctctgctagtatagcacgtgatatggttcttgcttctgcttactcgcatgagttgccacgatatggtcttgaagttggtctgaccaactatgcagctgcctactgcactggccttctgttggctcgccgtgtgctcaagacccgtggtttagataaggaatatgagggcaatgttgaggccactggtgagga

SEQ ID NO: 12884 - DNA, 429 bp, Zea mays
  Clone ID: LIB3150-099-P1-N1-H9
ttacagtagctcagatgaggatgaaaaacctgcggctagcctaaagaagcctgttgttgcctctgtgcaaaagaagacccaagaatctgatagctctgacagtgattctgatgaggatgaatcagaagatgatattcctgctaaagctcaagtagtagccaagaaaaaggaagagtccagtagcagttctgattctgatagtgattctgagtccgaggatgagaaacctgctgctaacctaaagaagcctccggttccctctgtgcaaaagaagacccatgaatctgacagctctgacagtgattctgatgaggatgaatcagatgatattcctgctaaagctcaagtagtagccaagaaaaaggaagaatctggtagcagttctgattctgatagtgaatctgagtctgacgatgaggatagcaatgc

SEQ ID NO: 12885 - DNA, 365 bp, Zea mays
  Clone ID: LIB3150-100-P1-N1-A1
cttttagtaacctttcaataggcgtcccccaagaactagtaaacatggcaaaactgttgagcctgttcttagccctctcctttgtagcagctatgtttgccataggctctcatgctgatggagactgtgagaatgacctccaaagcctgataagtgactgcaagacatacgtgatgttcccagctaatccaaaggtccctccttcggatgcttgctgtggtgtcatcaagaaggcaaacgtttcttgcttgtgctccaaggtcaccaaagaaactgagaaggttgtgtgcatggagaaagttgggtatgttgctgagcagtgtaagaggccatttgagcatggctttcagtgcggaagctacaag

SEQ ID NO: 12886 - DNA, 348 bp, Zea mays
  Clone ID: LIB3150-100-P1-N1-A2
gggaccttgagtcgaagcacgtcgtgcaggacctcaagcctgacatccagatctccaagaaccagatcctgtactgcacaagcttgagctggagcgccgatggaagcaccctctacactggctacaccgatgggtctatcagggtctggaagatctctggatatggctacgcaggctagatgtcgaaatccagtcgagggtctaggaggtcttgttctgcgaaacattgcaatgcggaacatagttttttttatgtgagttacatcgtctgcttggtactttatggtcgcccaactatctaagcttagctttgttaaatgaagttattaaatttgcttggttggtttt

SEQ ID NO: 12887 - DNA, 207 bp, Zea mays
  unsure at all n locations
  Clone ID: LIB3150-100-P1-N1-A3
tgatggacgaggtcgaggacatcttcgtgcgncacgtgggcacgctacagccggcgcaaggccataaattacctgaggcccgcgcagcgcagggactctcacgccggcaccttcttcacggggctcatggccggctgcttcgccgcgctgttcgtgggctactgcgcatgggcgcacatggcggggatgtacaactactactctacc

SEQ ID NO: 12888 - DNA, 398 bp, Zea mays
  Clone ID: LIB3150-100-P1-N1-A4
attctcctcgcgagcccaaaccctaaacctaaaccggtcacccgccggcggcgccacgaccagcactgccactccgccaccaccgtcccgaagccccctcccagcgccatcgacttcatctcggattgaagcaatgtcgtcggacgatgaggtcagggaggagaaggagctcgacctctcctccaacgacgttgtcaccaagtacaaggctgccgccgaaatcctcaacaacgctctgaagattgttgtgtctcagtgcaagccaaaagtcaagattgttgacctttgcgagaagggcgactctctcataagagagcaaactgggaatgtttacaagaacgcaaagaggaagattgaaaggggtattgcttttccaacctgtgtatccgcaatgacac

SEQ ID NO: 12889 - DNA, 397 bp, Zea mays
  unsure at all n locations
  Clone ID: LIB3150-100-P1-N1-A5
gaaccgcagaagtgcagcagaacgatcggatctagcagaattctctcaacctcatcggcggcggcgaagagcgtgcggatcggagatggcgacaagcgggtggaggaggagagcggcngcncgggcctcctggagccacaccacggtgtacctgtggctcgcgctcgccgcagcagcactgacgctcgcccaggctaagaaggacctaacggaggttacccacaaggtctacttcgatgtcgagattgacggcaagcccccaagtcggattgtcatggggctttttgggaagactgttcctaagacaggagagaacttccgagctctttgcacaggagagaaaggaattggcaagagtggcaaagctctccactacaagggaagtaccattcacaga

SEQ ID NO: 12890 - DNA, 163 bp, Zea mays
  Clone ID: LIB3150-100-P1-N1-A8
ttatactttctatatggcatagctgttctgtggaaatgtatcctacaattccacacatacaccgtaagcataaatgtaacctgggtcctaatgaggacaactaataattgcgtggctactgccgtttagtcttaacctgcttccactgataatgaatggcaac

SEQ ID NO: 12891 - DNA, 339 bp, Zea mays
  Clone ID: LIB3150-100-P1-N1-B1
gcaggaggcggacaaggtaagcagcaatggcaggaaccctagcgccggcggacccgcaggaatgggtatcgacctcgtcgccggtgggaggaataagaagaccaagcgcactgcgcccaagtctgacgatgtctacctcaagctcctcgtcaagctctaccgtttcttggtcaggaggaccaagagcaatttcaacgctgtcattctcaagaggcttttcatgagtaaaaccaaccgaccaccaatctccatgcgccgccttgtcaagtttatggaaggaaaggagaagaacattgctgtcattgttggcacagtcacagatgacaaaaggatccagga

SEQ ID NO: 12892 - DNA, 403 bp, Zea mays
  unsure at all n locations
  Clone ID: LIB3150-100-P1-N1-B2
ctgactctgccttcttcgttcagccagcgccgaaagagagggagagccaagtcgccttccgccgcgacgcacgatggatcgcgcgcagttgctcctcgtcggactcccggccttgctcttcttctccgacctcactcacatattcgcgccgccgcctccccacctccgccacccccatcaccaccctcctcaccaccaccatccgcatccgctgcatcatccccactcgcctcatccccacccgcacccgccgcatcatccccacccgcacccgccgnaccaccaccagcaccccgacccctccacggcaatcatacaggagccacgtgtggatgaggctggattcggcagcacagtggagctgcaattctgtgccttctgctcgtacaagggaactgcagtg

SEQ ID NO: 12893 - DNA, 382 bp, Zea mays
  unsure at all n locations
  Clone ID: LIB3150-100-P1-N1-B3
aactcgccgtctgccttctgcgcctccagttcngcctctgtccctggcaggttcagtctcncctccaaccatgggtaaagagaagtcccacatcaacattgtggttattggccatgtcgactctggcaagtcgaccaccacaggacaccttatctacaagcttggaggcattgacaagcgtgtgatcgagaggtttgagaaggaggctgctgaaatgaacaagcggtccttcaagtacgcctgggtgctcgacaagctcaaggctgagcgtgagagaggtatcaccattgatattgctcttgggaagtttgagaccaccaagtactactgcacggtcattgatgcccctggacaccgtggcttcatcaagaacatgatcact

SEQ ID NO: 12894 - DNA, 373 bp, Zea mays
  Clone ID: LIB3150-100-P1-N1-B5
ctaatgtccgccagacatttgcagaggaagatcaagaaaatttgtacaatcttgttcaggataaagctacttctggaaagcagggtcttggcatcaaaggcctgccaatgaaagttgctggccaacgttggaagggaaacaaaacttcgtttgttgatagtgatgatgataattcagcccagcccgatgaatattcagaaatcgaagagaatggcgatgaggaagaacatatcagtgcttctgaatcaatagacacagataagaatgcagacaaagaattgcttgtggctgctagacccaaaaccaaggtcaagaaactttgcaaaagaatacttcgtcaggccccatctcagtcaatgaaattgaaggatct

SEQ ID NO: 12895 - DNA, 360 bp, Zea mays
  Clone ID: LIB3150-100-P1-N1-C1
gacacagttactccccagtacaagccaaagtttgatgctgtgattgctgaattaaaggaggctgagaaagagcatcagaaggagtcagaaaggatagagaaggaacttgctgaaatggaggaaatgaggaaaaagatcagtacaatgacagcagatgattactttgagaagtaccctgaactcaggaagaagtttgatgatgaaatccgtaacgataactggggatattgaagagattggagagaactcttatgatgccatttccatgtccgtgaagaaccaataagtttcctgtggcctgaattgggtggtttccatagcatgtgcacggggtttgggtggaatgcctacagatcgact

SEQ ID NO: 12896 - DNA, 405 bp, Zea mays
  Clone ID: LIB3150-100-P1-N1-C4
ccaacttctgagcactttctcctcgtccgagacaagccaatcgaagccgagatacgaccatggactccaccggcaccggagcagggggtaaggggaagaagggagcggccgggcgcaaggtcggcgggccaaggaagaagtcggtgtcgaggtccgtgaaggccggtctccagttccccgtcggccgcatcgggcgctacttgaagaagggccgctacgcgcagcgtgtcggcaccggcgcccccgtctacctcgccgctgtcctcgaatacctcgccgctgaggttctggagctcgccggtaatgctgccagggacaacaagaagactcgcattatttcgcgccacgtgcttctggcgatccggaacgacgaggagcttgggaagctgttgggcggcgtgacca

SEQ ID NO: 12897 - DNA, 257 bp, Zea mays
  Clone ID: LIB3150-100-P1-N1-D1
tctgcgaggtaaaagcattgcgaccacagagagcgcgcgcttcaagggcttgtttttttgagataacaaggaggagaggaggagatggcggtcacgatcacgtgggtgaaggcgaggcagatcttcgacagccgcggcaaccccaccgtcgaggtggacgtgggccttagcgacggcagctacgcgaggggggccgtacccagcggcgcattcactggaatatatgaggccttggagttgagggatggaagatctga

SEQ ID NO: 12898 - DNA, 393 bp, Zea mays
  unsure at all n locations
  Clone ID: LIB3150-100-P1-N1-D2
actcaccagtcaccagtctccactctgggactcccctcatcctccacatggccaccgcatcggaactaggaaggcgaagccgaaggcgcggcgcggatcgagcgatggcggtggcccctactacggcggcggcgctggagcagctaagcagcagcaagatgttcgatggcttcaatctccgcttccgccaccagagcgccacccttggctgcgccatgactttctcaatctacctgcccccgtccccggcgtccaaccttcccgtgctgtactggctctcgggtctcacctgcaccgacgagaatttcatcataaagtccggcgcccagcgcgccgccgctgcccacggcatcgccctcgtggcacctgacacctncccacgtgggttaaata

SEQ ID NO: 12899 - DNA, 407 bp, Zea mays
  Clone ID: LIB3150-100-P1-N1-D3
attttagtcgccgccgctgctcatctcgcgatccctggagaagacgcctggtcctcgccgatcgatacgatggccgtcttctccgacctccacaccgccgacggcctcaagtccctcgaggctcacctcgccggcaaaacctatgtgtctggtgactccattactaaggatgacattaaggtcttcgccgcggtgccgtcgaagcctggcgctgagtttcctaatgccgcccgctggtacgagaccgtctctgcggctgtagcctcaagattccctggtaaggctgttggtgtaaatctgcctgcgggatcagctcctgcggcagctgctcctgcggatgaggctgaggatgatgatgaccttgatctttttggtgatgaaactgaggaggacatgaaggcagctga

SEQ ID NO: 12900 - DNA, 346 bp, Zea mays
  Clone ID: LIB3150-100-P1-N1-D4
cggatcgtgaatcttaaatcgagcaagaactggtttcggatcaatcaaggtagcttccaggttccaaggttttgcaagacaagcgtgtgtgtgagagagagacctgcattgtttggtcgccactactaccatgcgcgatggccgcgtcgctgtcctcggcgctgagctccatggaggtgatgctggacgcgctcatgcagcgagggataggcaagccggaagaagccagcagcaagcccaaagaagaggagccgccaccggcgctgcccagccgcccgacggggcgaggcagactcccggcgctgcataggcccggcggcacagcagcggcttcgtggatccaccg

SEQ ID NO: 12901 - DNA, 401 bp, Zea mays
  Clone ID: LIB3150-100-P1-N1-E1
gatttccttccccacccgctgtcagtctgactcccgccgcgcgcgctctgtctttcctcgccttcgccgccggcgacgagcttgagctcgagctggttcctcgtatagaagacgacggccgcggtatggagcccatgaacgtagacaacggcggctgcggaggccttgacgcgcagatcgaacagctgatgcagtgccgcccgctcgccgagcaagaggttaaggcactgtgcgagaaggccaaggagatattgatggaggaaagcaacgttcagcctgtcaagagtccagtgacaatatgtggtgatatacatggacaattccatgatcttgtagagctttttcgaattggcgggaagtgtccagacaccaattacttatttatgggagattatgtagat

SEQ ID NO: 12902 - DNA, 389 bp, Zea mays
  Clone ID: LIB3150-100-P1-N1-E11
acgaagctggatccttagagtctacctttcgtttttcactacagcgaactcccggacagggggctttggaggaggtggggggtgcccatagccttcaagctggtcaccaagcccgcggcggcgtctcccgctgcttctcactgtatagatctctccctgtgtccttatgttactagccgcgttgccttcttaccatctcccatgaacaattggctcctcacggccaacaactccgcatcgcccatggctaaagaagagaggtttgatcgaatttaaaaattatcatttaatatcatcagacaagtttcgattttactagaatacaacattatatttgtacttttggagagagcacaattttgttacaacgctgacacatatgatatcaa

SEQ ID NO: 12903 - DNA, 401 bp, Zea mays
  Clone ID: LIB3150-100-P1-N1-E2
gcgccggctcgccttccaacgcctgcaaggcgaaacccctcaagggaaaggctagcagcaacgagcgcgcgtcgcccagccctactcagaggcagcatcagcaggagacggaggagctggagctggaaccggtgccgatggtcgtcgagcttgagcacggcgaggagtccgccggcagccacgaccaccaccaccaccacttgcagccgcagggatcgtcggaggacaccgacgtggaggccgcctcccacgtgagccaggccgaggccgagccgccggtcagcagccagagccaggcgctggtggcggaccaggagggagaggaggtcaggctggagctcacgctcggcttcgagccagtcgtcaggcagcagccgaggctgtcgtgctgcgactcgagc

SEQ ID NO: 12904 - DNA, 401 bp, Zea mays
  Clone ID: LIB3150-100-P1-N1-E3
ttatatttttactcgccgaccccctccatggtccctggccccatcgcgatggcccggatcaacttacacgagctgccgaggaagagcaaggcggatctgcaagcgcagattaaggagtttaagtcggaactctccctgctactcgtagccaaggacaccggcggggctcccaacaagctctacaagatcaaggttgagcgcacctacatcgagcgcgtgctgaccgacatctatcagaagcacaactccgacctgcgtcaggcctacaacaagaagaagctgatccctctcaacctccttcccaagaagacccgcgccattccgaggcgccttaccaagcaccagctttccttgtaaaccgagagggaaaagaagcgcgagaagtattcctcatgatgaag

SEQ ID NO: 12905 - DNA, 385 bp, Zea mays
  unsure at all n locations
  Clone ID: LIB3150-100-P1-N1-E9
ttgtcatctatctcgntacaaaggcatccagcctcttttgcgcggggccgcagcatctcaaccccatggccaagatcaagatcgggatcaatgggttcggcaggatcggaaggctggtggccagggtggccctgcatagtgacgatgtcgagctcgtctccgtgaacgaccccttcatcagcaccgactacatgacctacatgttcaagtacgacactgtgcacggacagtggaagcaccatgaaatcaatgtgaatgactccaaaacccttttctttggtgagaaagatgttgctgtgtttggcttgatgaacccttaggagatcccgtggggttcggttggtgcttgaatatgttgtcgtgtttactggttgtttcactgacc

SEQ ID NO: 12906 - DNA, 397 bp, Zea mays
  Clone ID: LIB3150-100-P1-N1-F1
taatttttgaaaatcacgcaaagtcatgtgctgttcaatgttcaaggctaagcagcattcatgtggtcaccctcacccgtctagtactgttcatggagcctaaccgtaagcgacaggttattcatcataactaacaggccatatgggaacaggatgggaagcggttccttgtatgtggtctagcgggcctgtttccattacacttgtctagctggctgctcagatttgtagcttaccttttttctgttcagaaacagatgcctggaagcctttactgtgttcgtgttgccaatttcagatattcgctgacatggaggaagtaggtgtgcgtccggacgaggatacagcgagacggatcggaaaggcattcgtggctttcggcccaagagaaaaagag

SEQ ID NO: 12907 - DNA, 382 bp, Zea mays
  Clone ID: LIB3150-100-P1-N1-F2
acgaggcctccgcgccgacggagtcggacatcgaggagacgctcaagcgcctcgtctcgcagctcggcaagtcgcgggaggaggtcttcgacgcgctcaagaaccagaccgtcgacctcgttttcaccgcccaccctacacagtccgtgaggaggtctcttctccagaagcatggaaggatccgtaactgcctgaggcagctttatgccaaggacatcactgctgacgacaagcaggagcttgatgaggcacttcagagggagattcaagctgctttcagaactgatgaaatccgcagaacccctcccactcctcaagatgaaatgcgtgctggaatgagttacttccatgaaactatatggaagggtgtaccaaaattctt

SEQ ID NO: 12908 - DNA, 335 bp, Zea mays
  Clone ID: LIB3150-100-P1-N1-F3
ttcctgcttaccccgaccccgtcggcatctcggagggtcgcggcggtcaaagcccagcctaccccacctcgcgccgcgtcgccgcggtttccgcgggccagtgctctcgggagtcgggagctcagatcaggagggacgggctaggtagggttcgcgagcgagcgagggtgctgccgtcgagcgccggtgtccgagtagcaagaggagagatggacgcgttcctgcagaggctcaagcggttggacgcgtaccccaaggtgaacgaggacttctacatgcggacgctttccggcgggatcgtcacgctcgttgccgacggtgtcatgctgcttctc

SEQ ID NO: 12909 - DNA, 202 bp, Zea mays
  unsure at all n locations
  Clone ID: LIB3150-100-P1-N1-F5
tttcgatgttttactttggaaggactgntgcggcggacatccgcgacacctggtcgctgctcgtcctcaacatcagcttccgaaccacggccgacgaccttttcccgctcttcgagcgctgcggcaaggtcgtcgacgtctttatcccgagggaccgcaggaccggggactcgaggggttttgcgttcgtgcggtacaagtt

SEQ ID NO: 12910 - DNA, 270 bp, Zea mays
  unsure at all n locations
  Clone ID: LIB3150-100-P1-N1-F6
tgaagcataccaccgcctccccgatctcgtgagaggaagcccaatcccggggccgtcgccntattccaatggcgcccaaggccgagaagaagcccgccgccaagaagcctgcggaggaggagccggcggcggagaaggccacggcggggaagaagcccaaggccgagaagcggcttcccgcgggcaagtccgcaggcaaggagggtggcgagaagaaggggaagatgaatgtatagaatcttgtgtgagactttcattatctacattttt

SEQ ID NO: 12911 - DNA, 407 bp, Zea mays
  Clone ID: LIB3150-100-P1-N1-G4
tgaaatgtgcagcctgtgggttcgtctgagatgttggtatgagggacaagctcacaaccttcatcctgaaaaacccaccagaacagaagaagggcggaaaagacaagaaggccatgaggagagctgagaaggaacgcctgaaggaaggtgaggctgctgatgaggagcagaagaaactgaagaaggatgcaaagaagaagggttccaaggattccactgctaagggtttgaagaagaaggctactactgctactggctctgatgaggaccactcattctcttcaactcgcagccatgatggtgacaaagcagctgcagatgatgatgacgatgatgtccagtggcagactgacacttcaattgaggctgcgaagcaacgcatgcaagagcagctgagtgcagcaact

SEQ ID NO: 12912 - DNA, 449 bp, Zea mays
  Clone ID: LIB3150-100-P1-N1-G7
aaaatataataatataaataataaaaaaataaaaaaataaaatttaaataaaaatataattaaaatgatagttaaataaaattgataaaaattaaaaaataataaaaaaaaaataaaatataaataataaaataataattaaaaaaaaaaaaaaatataaataaaaatattaaaaaaaataaaaaaatataaatataaaaaaaataaaaaatttaaaaaattaataaaatataaaatattttaaaaaataaaaaatatatatataaaaggatagaataataaaaaaatatataattaaataaataataaataaataaaaattattaataaattaaataattataataaattataaaaaataaatattaaatataatataataaataataaaaaaaaatagattaataataataatatataaataaatataataaaatatataataatat

SEQ ID NO: 12913 - DNA, 404 bp, Zea mays
  Clone ID: LIB3150-100-P1-N1-H1
ttgtagccgtaactgctactgctcgatgagccgacaaatcatttggacattgagaccattgactccctggcggaggcactgaatgagtgggatggtggtttggtcttggtgagccatgatttcaggctgatcaaccaggttgctcaagagatttgggtgtgtgagaatcaggcggtgacaaggtgggaaggtgatatcatggatttcaaggcacacttgaagagcaaggctggtttatctgattagagggctttttccagcaaccatgagctttttaactctgtatcacgaagtcccagttttccaatagcgaactatcagagttactttattgatcggatttctttgacttgcattgcaacctgattaccttatactacctggaaatatttattatatatctt

SEQ ID NO: 12914 - DNA, 328 bp, Zea mays
  Clone ID: LIB3150-100-P2-K1-A3
gtccggattcccgagcggccgcccttttttttttttttttttttttggaaacaaaaaaacagtttttctgtgtggaaaacacataaacacattgggggctagacattgacggctgggggcgtgttatcggcccatataacagccaggaacttgtggctaaataacggaattgatttcaaacagacacatactctatacctgacggggttattaaattgtgggtaagtgaaacgaccacgctcctttaggcctgctcattctgggaggccggctccagaataagtcgctgcacctgctgcacttgcttatacgtcttgtgccaattttt

SEQ ID NO: 12915 - DNA, 152 bp, Zea mays
  Clone ID: LIB3150-100-P2-K1-A4
gcaaacagaaaacaatttttttacatttatgacaggcaaacatttacaaagagaatttttttacacgggacgatttatatataaaagtcaatatcattcttattcaaatcaaatccttgttcatttctcatacattacttctccattaaata

SEQ ID NO: 12916 - DNA, 84 bp, Zea mays
  unsure at all n locations
  Clone ID: LIB3150-100-P2-K1-A6
aaaaaaaanaaaanaaaaaaaaaaaaanttttttaaaaaaaaaaaaaaaaaaaaaaggggggaaaaaaaaaaaaaggggggggg

SEQ ID NO: 12917 - DNA, 462 bp, Zea mays
  unsure at all n locations
  Clone ID: LIB3150-100-P2-K1-A7
caacaactcaacacgcaaacttcttttattttcttttcaacacccaacaaaacggcagtggtctttttaaaaaacggggggggtataattcacattttttgcgcaaaaaacaatatatttgacacctatattttttataaaagtcatatttttttctttgagaaatataaaaaaaatcctccagtaaaatttccctgctttatttatttaacaactctttctttanaaaattaacaactgggatactctttttttggccaagaaatttatttataantttttaaacactttccaattcatgaccattgtttttaagcaaaaaataacttattactacttttgtttgccattattaaaaaaaatactttttacttattgggggactaaaaagaaaaaccctcccttcccaccctcccccgattatttaaatccccacattctattgcaattacattttttgtt

SEQ ID NO: 12918 - DNA, 130 bp, Zea mays
  Clone ID: LIB3150-100-P2-K1-A9
cttccgaatttccgggcggccaccttttttaaaataaaaaattttaaatacaattttttttttttatcaacaaacaaaacaaaattttgttaaatataaaaaaaatagtcggtgctattataaaattaaa

SEQ ID NO: 12919 - DNA, 397 bp, Zea mays
  Clone ID: LIB3150-100-P2-K1-B12
cttttttttttttttttttttttttattatttatttttttttttttatattttttttttaatattttttttaatattatataaaaaattgggggcctttatactaatatcataataaactatattatacctttaaatatacacacaaaaaaaaacaattataaatttaaaaatcaaaaaataattttttattaaatatatacaacattaaaaaaaaacttttttaaaaatttttaataataaaaaataccaacttattttatataaaaaaaaaaaaattttttattttataaaaacaaaacttataataatcccatctaaaataataatttacccttttaatattttaataaaaaaaattcatttacttaaaataaaaatttatataatattttctt

SEQ ID NO: 12920 - DNA, 386 bp, Zea mays
  Clone ID: LIB3150-100-P2-K1-B4
ggccgccctttttttttttttttttttttttttttttttttagagaccattcgtccatgcttgacaaacagcagcggtacaagaacatcatctcaactgggggtccacattcacgggcttatctacacgcttattcaaaagatactcgatcatgccggcgccagacctgcggcctggtcgcagccccgcgtcctccggcccgccttttactcctcgtccatgccgtcctcgtcctcctccatgatcctcatcttcttgacggcctgcgcggcgtcgctcctggtggagctgttggggacctggatcaggatgtccgactttatccccgtgttagcggtcaccaaaccgccggttcggttcaaccttgataccagctcggtcttgcc

SEQ ID NO: 12921 - DNA, 447 bp, Zea mays
  unsure at all n locations
  Clone ID: LIB3150-100-P2-K1-B7
anantnnatnaannagagaaatgataaaaataaaggagaagggtgtataattaaataaaaataatttttattaataaattagttaatttaaaattaaattaaattaaaaattgaatttatattatataattataaaaaaatttatattataataaaattttaatttaaaaattttgtaaaaagttttaatattattgtattaatatattaattaaaattttaaatttttaaatataaataaatatattaatatattatataaaatatttttaataattataaatatagttttatataattaaatataagtatttattaaaaatttataatataaatattattataatatataatataaaaagttttaaaatttatttataaaaattaatatattaatatatttaaataaatttaaaataattaataaatattttaaattatatattt

SEQ ID NO: 12922 - DNA, 103 bp, Zea mays
  unsure at all n locations
  Clone ID: LIB3150-100-P2-K1-B8
tcccgggcggcgcctttttttnnnanaaaaaaagacnanntttagtttaaaaaaaaaaaaataagggggggaaaaaaaaaaggggggggaaaaaaaaaagaaa

SEQ ID NO: 12923 - DNA, 228 bp, Zea mays
  Clone ID: LIB3150-100-P2-K1-C11
cctttttttttttttttttttaatttttatatttaatttttttttttttaattttattttatttaattatcttaaaataaaaaaaatttcgggcttcttattaataaaataaaaaaaataatttatatatttttaaaaaaaaaataaacaataaaaaataaaaatccaaaaaaaaaaaaaaaaaaaaaaaatccacaaataaataacaaaaaaacaaaaatataatat

SEQ ID NO: 12924 - DNA, 433 bp, Zea mays
  Clone ID: LIB3150-100-P2-K1-C5
ggcgccgccctttttttttttttttttttttttgagcaaatgacatcttttttttttattgtattgtcttgcaaattacgcagcgtgtttacaaaatagccgggggatctcacaacatgctacagccaatccgggtaggttcacatccaggaattacaaaacttcacttactgctgagtgcggaacaaaacctaacacgaccataattatgacattgcaactagacgaccacccagagttcaggacagtaatacagaaatataaatgactgtttacttcttcttggcgtcaccagccttggtcttcttgacaccacggatcttcttggccctgttcttccgctctttcatttgcttgcggtacttttcaaccttattagcaagaccattcctgttgaggcggtatttgtgcttgaacttcttggcagactcga

SEQ ID NO: 12925 - DNA, 219 bp, Zea mays
  Clone ID: LIB3150-100-P2-K1-C6
tcccgggccgccgcccttttttttttttttttttttaaaaaacaaacaacaacttttttttttataaaaaaaaaaaaaaaatatctcttctttattaaaaaaaaatctttggctcactaaacatattatatacaatcctcttatttttatatactatcatttacataactttatttactccttttttccttcacaaaactctatacattatcttaatta

SEQ ID NO: 12926 - DNA, 202 bp, Zea mays
  Clone ID: LIB3150-100-P2-K1-D10
ataaaaaataattttcgtccattatctaacaaaccaaaatctttattaaattcatactataattataactcaacaaatttaatttttatttttttttctaaataccctttcatataaatatctaatttcttacattctatttcttatatttaatatcttatttaattttattctatcttaaaatatttttattatataaaat

SEQ ID NO: 12927 - DNA, 124 bp, Zea mays
  unsure at all n locations
  Clone ID: LIB3150-100-P2-K1-D3
anaaaaaatataaatatatttgtttggataatataaaaaaaaacgccgctcnttattatacaaatctctataattattacaaattttttttccccacctatttatctcttccaaattttttttt

SEQ ID NO: 12928 - DNA, 253 bp, Zea mays
  Clone ID: LIB3150-100-P2-K1-D6
gccgcccttttttttttttttttttttttttttagctcgcttcccattcatagggaaaataattatcgaacacccttgcggaccaatagcacattagggtggggaaatataacttcttatttctaggaggccacatacatcagccaaaaaacttcattattgaatgacaactaataagcaatctaaaagagggcaccgccaatgatgtgttgttggtagaaagctgctgggtttgtcaaaacaagtttggcaa

SEQ ID NO: 12929 - DNA, 321 bp, Zea mays
  Clone ID: LIB3150-100-P2-K1-D7
tcccgggctgccgcccttttttttttttttttttttttttttaaattattttttttttttaaaataacccaattcaattatgcagttccaaaaggtacacaagggtgattcaaataaatgactactctttgcacatacccaagagatgaatttatacaaactatccaatggaactttaatactaaaattagatttttaaaattgcaaatactttaaaaaatcaacagctatcattacttcaagtattcatttttttttaaagttaaaacactttttatattaataatttacatttttaatttttttattccatacaattta

SEQ ID NO: 12930 - DNA, 338 bp, Zea mays
  unsure at all n locations
  Clone ID: LIB3150-100-P2-K1-D8
accgtccgnattcccggagcgccgccctttttttttttttttttttttttttttttttttttttttttttttttttttttttttttttttttttggggacaaaagattggacttggggaaaatggaaacaatttccaaaccatattcgaaaggcacaagcctataaggcagtttttttaacaaaaaaagacattactatttaaactactcatggaacataatcttaaactcaagctgcggggaaagccttttttcctgcagcaacaaatccaactggaattacttttacaacaattaacctctacaaattttgatagggtccttcacttggccaaata

SEQ ID NO: 12931 - DNA, 289 bp, Zea mays
  Clone ID: LIB3150-100-P2-K1-E10
tcccgggccgccgcccttttttttttttttttttttaaaaaaaacacacaatttttttttatgacccaatcttaaaaatctgcagggtatacacaatacaagctgggggcacattcactaataatatataaacacaatgcctaaattcacatttaattaccttaacaaaccttataacaattttcaaacacccaatctaaccatctttaaaatcaaacataattgtaatgatattttatcttttatattattctcatcttattattcaccatttttattattaactttt

SEQ ID NO: 12932 - DNA, 101 bp, Zea mays
  Clone ID: LIB3150-100-P2-K1-E3
ggcgggcggcctttttttataaaaaaaaaaagaagaaaataaaaaaaattttttaaaaaggaaaaaaaaaaaagggggggaaaaaaaaaaaggggggggat

SEQ ID NO: 12933 - DNA, 370 bp, Zea mays
  unsure at all n locations
  Clone ID: LIB3150-100-P2-K1-E5
aaactaaaacaccgataagtattnnctcanttataaaacagcgttaaataacaattgcgctataatacacaaaaaacttgtggcatttatattttatattacattaccctacgacgaatttatgttatatctactaataattataattatatttatttaaaacatatttaatttatttaataatcttattcataaattatattttatttattttttattatttaaattattttaattttcaatttatattatattataattaatttatattatatacatttttataaaattaacttatattacactataatacctttcattatattacctctttataattatatatattattttctatcatttaaatata

SEQ ID NO: 12934 - DNA, 268 bp, Zea mays
  unsure at all n locations
  Clone ID: LIB3150-100-P2-K1-F3
cgtccgnattcccgggcggccgccctatatttctcgccatctagagctcgtcgtgctgcttcttatcattagaatccttgctatcctcggcatcagagtcggccttgtcctcgtctggcgtggtcatcgtcttcctcatcctctaggtcatcatcctcatcatccccacccttggcggcatcctcttcttccttctttttctcggcctcatcaaaagcagccttttctgccttcttgtgcttgccccaagtctcctttgtaaaagtct

SEQ ID NO: 12935 - DNA, 74 bp, Zea mays
  Clone ID: LIB3150-100-P2-K1-F6
gccgcccttttttttttttcactcttataaaacaaaaaagaccctttttttttttcacaatcccaaaataacat

SEQ ID NO: 12936 - DNA, 470 bp, Zea mays
  unsure at all n locations
  Clone ID: LIB3150-100-P2-K1-F7
ataaaaaaataaaaattaatttgtggataaaaaaaaaataaaggtgggaaaataaaaaaaaaaaaaataaaatacattataatatttttaatatttattatataaattaaattataattattattttataaaaatatatataatttttaataaaaataattataaataaaataattaatttatatttaatatataataaattatttttaatataattatataataaaatatttataaaataattttttatatattaattaaatattaatataaatataatntaaaatatatatataataattattattattatatatataaatatttatataatttatctataataatttaatataaaataatatttatatattaaaataaataatattaattaaatatctttaactataattataaatacttattactttataaacttatattataatataaatataataatattaata

SEQ ID NO: 12937 - DNA, 150 bp, Zea mays
  Clone ID: LIB3150-100-P2-K1-G1
aaaacacaattaccttatttttttttttttttcttttcttttcttatatttttttttttttttacaaattggggggccttcttaatctttatttccaccacaaaaaaaccatacataaaatcgccacccccaaaaaaaaaatcaaacaaa

SEQ ID NO: 12938 - DNA, 442 bp, Zea mays
  unsure at all n locations
  Clone ID: LIB3150-100-P2-K1-G11
cgtccgnnatcccgggccgccgcccttttttttttttttttttttttttttttttttttttttttttttttttaaattttttttttttaaaaaggaaaaccaaatgcatttattgggcatccatattgaaatcgaataaaaataccgatatccattttaaccgtttcagcaaataccaataattcggatcttcaaacattcatttccagtcctacttataagtgtctgatccaaacttcccaacaacattgggctcaaattatattttcccttatatttaaaatttttcaccattgcaactgcaaaattatgttttccacaaccatacccaccaccctgtgacaaacgatttcaacaatattaaccatcaaaagccatttttatcactcccgggtttacttcaaattttttttttacttttcacctcttttaaaaaccccca

SEQ ID NO: 12939 - DNA, 277 bp, Zea mays
  Clone ID: LIB3150-100-P2-K1-H2
ctaaaaaaaaaaaaaaattttttttttttttaaaattttaaataatattttttttttatatatataaaaaatattgggaaaattttttattattttttttttaaataaattttatatttacacaaatccataacacatttttaaaaaaaaaaaaaaaaaaaaacccttttataaaaaaaaagggcgccacaaaaaaaaaaacccccccccgatcaccaaaaaaacaaaaaaaaaacccaccccacaaaaacactaaaaatcacaaaaaaaaaaaaca

SEQ ID NO: 12940 - DNA, 404 bp, Zea mays
  Clone ID: LIB3150-101-P1-N1-A1
caggcgtcttcgtactcgcctatctccgcgacccaaagcgttcccccttctcccattcttctctcatttctcaccaccgccgccgctaccccctttcgacaacaccatgagggagtgcatctcgatccacatcggccaggccggtatccaggtcggaaacgcgtgctgggagctgtactgcctcgagcatggcattcaggctgatggtcagatgcccggtgacaagaccattgggggaggtgatgatgctttcaacaccttcttcagtgagactggcgctgggaagcacgtcccccgtgctgtttttgttgaccttgagcccactgtcatcgatgaggtgaggactggcacctatcgccagctcttccatcctgagcagctcatcagtggcaaggaggatgcag

SEQ ID NO: 12941 - DNA, 341 bp, Zea mays
  Clone ID: LIB3150-101-P1-N1-A2
agatgattggccgactaatgcatcaaagttagcctacgaaaagtctgtttttactaaaactctaaagacaaatgcacggacagaagctgagataacattgtttgatggttatattgtcgtttacaagtttgtacatgaccttcacttttttgtcaccgctggagatgatgagaatgagctcatcttagcaagtgtactacatggtttttctgattctgttggtcttctactcaggggtgatgttgagaagcggactgcgcttgagaacttggatttgatacttctctgcattgatgaaattgtagatgggggaatcatcctggaaacagatgcaaacacca

SEQ ID NO: 12942 - DNA, 402 bp, Zea mays
  Clone ID: LIB3150-101-P1-N1-A4
ccactctccttcatgtagcaggcacatgagcagaaccagctgcgttttttcacggctgcggcgtctacactgtggcatacaagctgctactcgtggcttccttgcacgacagagagtgcgagagatgcgccggcagatgctcgaggcagccttggtgacggttgacctcggcacacgggggcgcgacctcatcctgtcagacggccatcaacagtggcaccaggccgctatcttcaagtgcgagtatggtatgtgtcccgcgggcgacgaacttcaactctacgacagcggcggtagggaaggcactcacctcatcatcaacaagggcgcactatttagtgccaccacattccgctaccggccgtcacgagggcgcctccgctggttattgttgcgacctat

SEQ ID NO: 12943 - DNA, 375 bp, Zea mays
  Clone ID: LIB3150-101-P1-N1-B1
ctggcttctcctccccctcttaccaagtcctgttcgggttagggttacttaggggtttgtggaggggcgatggcggcggctgatgtggagtaccgttgcttcgtcggcgggcttgcctgggccaccagcaacgagtcgctggagaatgccttcgcctcctacggcgagatcctcgactccaaggtcatcaccgaccgggagacggggaggtctcgcggcttcggcttcgttaccttctcctccgagaactccatgctcgacgctatcgagaacatgaacggcaaggagctcgacggccgtaacatcaccgttaaccaggcccagtcccgttgcggttgcggtggctgcggtggctactgcggttgttgtggtggt

SEQ ID NO: 12944 - DNA, 355 bp, Zea mays
  Clone ID: LIB3150-101-P1-N1-B2
gtccgattggagcacaagacattgaagcttctgaagtattggacctggcaatttgttattgttaggccagtatgttccattctgattattgcactccagcttcttgggctgtaccccagctgggtcagctggacgtttagtattatactgaacttttcagtctccatggccttatatgcattggttctcttctaccacttgtttgctaaagagctggcacctcacaagcctcttgcaaagttcttgtgcatcaaagggattgtcttcttctctttctggcagggttttgcgctcgatgttttaacccaagcaggcgtgatcaaatcccaccatttctggctggacgtggagcaca

SEQ ID NO: 12945 - DNA, 406 bp, Zea mays
  Clone ID: LIB3150-101-P1-N1-B3
ggggcgctttgctttaaagccccgaccggcgggatttacattattaaccttggcaagacatgggaaaaacttcacttgcagccgggggttatttgtcctctagaaaacccaggggatttattttcacaccgcccccccctatatgcagcgtgctgtgctcaaaattgctcaatacactggcgctcattccatcattgggagggacacccctggtaccttcactaattagcttcagacgtccttcaacgaggctcgactgcttattcttaccgacccaaggactgaccatcagccaattaaggagtgtgctctggggaacatacacaccattgccttctgtgatactgactctcccatgcgggatgtcgatatcggcattccagcgaacaacaaggggaggaacagc

SEQ ID NO: 12946 - DNA, 410 bp, Zea mays
  Clone ID: LIB3150-101-P1-N1-B4
gttcttttctgcaaggggcttgatgtcattcagcaagcacaatctggtacaggaaagacagcaaccttctgttctgggatcttgcagcagcttgactatggtctggttgaatgccaggccctggttcttgctcccacccgtgagcttgcacagcaaattgagaaagttatgcgcgcacttggtgactaccttggtgttaaagtccatgcatgcgttggaggaacatctgttcgtgaggaccaaaggattctcgccagtggtgtgcatgttgttgttggtacacctggtcgtgtgtttgacatgctgcgtagacagtccctccgccctgataacatcaagatgtttgttcttgacgaagctgatgaaatgctttctcgtggtttcaaggatcagatttatgacatcttcca

SEQ ID NO: 12947 - DNA, 414 bp, Zea mays
  Clone ID: LIB3150-101-P1-N1-B6
gcggcctcgatcagagtcggaggcgaacacccccatggcggcggctggcggcggcgcaggagggaaggtatccttcaagatcatcctcacctccgaccccaagctccctttcaaagtgttcagcgtgcccgaggcggcgccctttaccgcggtgctcaagtacgccgcggaggagttcaaggtcccgccccagaccagcgccatcatcaccaacgatggaattggcatcaacccccagcaaagtgcaggcaacgtgtttctgaaacatggttcggagctgcgtctcatccctcgcgatagggttggagctgtagtcatgtcttccggttagaggatatatacagtccaatgcataatgagcaaaacttgagagaaataaagctttgatgttggccttgcttggctgtaggatgt

SEQ ID NO: 12948 - DNA, 400 bp, Zea mays
  Clone ID: LIB3150-101-P1-N1-C1
ctgggaattgggtcgttcggtaaagtgaagatcgcggaacatatattgactggtcataaggtggcgatcaagattctcaatcgcaagaagatcagaagcatggatatggaagagaaagttaagagagaaatcaagatactgagattatttatgcatcctcatatcatacgcctttatgaggtgatagatacacctgctgatatctgtgttgttatggagtatgttaaatctggagagttgtttgattacatcgttgagaagggaaggctacacgaagaggaagcccgacacttttttcagcagatcatatctggtgttgaatattgccataggaacatggttgctcaccgtgatttaaagccagagaatcttcttttggattcaaaatgcaatgttaaga

SEQ ID NO: 12949 - DNA, 165 bp, Zea mays
  Clone ID: LIB3150-101-P1-N1-C2
cggtcagagacccgcctccgtctctgaatcggccgctgccgctaccgccgccggcggcgacgaccatgccccgcgccgctacgggtgcgatcactgcggcgttcctgcgcgcgcaggccccgcacatggcgccgctggcatcgcgcatcgcgcgcgcgttccccg

SEQ ID NO: 12950 - DNA, 337 bp, Zea mays
  Clone ID: LIB3150-101-P1-N1-C3
ctcgatccagccgctttacagtgctggcgttggcctcttcgaccggctcgagaatgccattcaagaggtacgtggagatcggtcacgtggacctggagaactacgggaaacactatggccgactcctcgctaatcacgatgttgtcgaccaaaacagggcactagtggacccccctgatatgggcaggcgccacattaacttcaaacgggtttaacttactgacatcaagattgacatcaaacgcgttcccaagaagtcaaccgtgatcaaggctatggtggaagctgatgagaagactaactgggaaaacagttcatggggcatgaagctgattgt

SEQ ID NO: 12951 - DNA, 233 bp, Zea mays
  Clone ID: LIB3150-101-P1-N1-C6
ttgtgttttctatggagtttggacaacatccggtagattcccctaatggcttagctggtcgcctattaagctctgctgcaggtcccagttttgcagatctcacttcctcaatcaacaatttacaactggagttgtgttcaattctttaggccagtcttaactgtctctgatgattacgaagaatccaatgcttgaagagaagagtgtgaacaaatcgtactagattacatcac

SEQ ID NO: 12952 - DNA, 395 bp, Zea mays
  Clone ID: LIB3150-101-P1-N1-D1
ttttgatggaacctctagtaattcatctcgttatggagatttcttcgaagactattctagcatgaatggaggtcgccaagatggcaagcttcatggtggataccagagacgtacacagagtagaaactctcctcttgcagcttctccaggctcagcaaagtcattgtcgcaaggtgttgctagggacagcttctattcaacgtttcacactaccccagagaggaggaaattctccaaagaggaatacgaagcattcacgagagaggagacaaagaaagctatgaaccaactgttgtcctcaccagatttcaacaggtgggcgttggctaacgcggacagaatatctgtggctccacccagaggaaactacagcagcagcaacagcaaccagcagc

SEQ ID NO: 12953 - DNA, 409 bp, Zea mays
  Clone ID: LIB3150-101-P1-N1-D2
ctactacactccaaaatgtgctttaaccaggggttgtgtttactgtaccccagttggggatttgccagtagaccaggaagtcatcgaggaactcagtgctactggaaagtttgaatttatggaccttaatgtggatgaagctgaacatagcatggaaatgcatttgccctaccttgctaaagtatttcaaggacataatgtgaaagtcgtccctatccttgttggtgcacttagctcccaaaacgaagccttgtatgggcagctgctctccaaatatgtggatgacccaaaaaatttcttttccgtgtcgtcggacttctgccattggggatccaggtttagctacacatactacgaaaagaagcacggtgccatccataaatctatcgaggccttggaccgtatgggc

SEQ ID NO: 12954 - DNA, 406 bp, Zea mays
  unsure at all n locations
  Clone ID: LIB3150-101-P1-N1-D3
gtctccaccaaacaaggcaacaagggagaagtagatgtgcatctgcnagaggaggcagcggnggtggtgatgatggagagccagccgctgcaggccccgacggccacggctccgccccccggatctgcggagccagccggagccccgccggccgtcacccccggcaaggagttcacgcgcacctgcaagggcctcgtcgtcgtgctcatcggaggatacgtgctgctccagctcctcccttcgtcgctcaactacctcgccatcatcccatccaagacaatcccctatgtatggaccgttttcactgctggttacatcgagcaagtcctcccaggggccattggcagttctcttggtcttctcttttgtggaaaggacattgaaccagcatggggccgcaaggaat

SEQ ID NO: 12955 - DNA, 163 bp, Zea mays
  Clone ID: LIB3150-101-P1-N1-D4
gagaaccctgaggacatgggtcggcctaatattgtggtctacggttactgcaaaaagtgactatgagggggcaaagtgattttgtctacaggatcccagtctgtgggacagagatcagttactacattgcttaagtctgcaccatgcttgtcgtgtagataat

SEQ ID NO: 12956 - DNA, 406 bp, Zea mays
  Clone ID: LIB3150-101-P1-N1-E1
tttaattgcaaatgagttctttgcgaaggcaactgaatgtttccagaaggctgctgatgtggaacctgcaaatgagctgtacaggaagtcattagacttgtcagcgaaggcacctgaactgcactcggagatccacaggcaaatggcttctcaagcggcaacacaagcatcctcagcctcaaatccaacgcaatcaaggaagaagaagaagaaggacaccgacttctggtacgatgtttgtggatgggtgatccttggcgcgggcatttgtgcttgggttggattggcaagagcaagcatgcctcccccaccggcaccagccacgtgaagctgatcgagtggcaagaatgctttgcaaatgttgttaacatgcccccatgttaaggtgcctcaggcatgggatctt

SEQ ID NO: 12957 - DNA, 90 bp, Zea mays
  Clone ID: LIB3150-101-P1-N1-E4
aaaaaaagggcgccccaaaaaaaaaaaaaaataaaccaaaaaaaaacgcccccccacccaaaaatccaacacatacctcaaaccaacaac

SEQ ID NO: 12958 - DNA, 416 bp, Zea mays
  Clone ID: LIB3150-101-P1-N1-F1
ttcaaacgccggcgcaaactctcgcccgagcccgacagatcttcaattccccattccgcccaccgatcgaccttcacgccagtctcggtctcttccgaaggcgtcgcgcgcggttgtttgagaggagaggaggaagatgagggagtgcatctccgtccacatcgggcaggccggcatccaagtcggcaacgcgtgctgggaactttactgcctcgagcacggcatccagcctgatggccaagtgcctggagataagaccgcgggacatcacgatgatgccttcagcaccttcttcagccagactggtgctgggaagcacgttccccgtgcaatcttcgttgatctagaacccactgtgatcgatgaggtgcgcactggcacgtaccgccagctcttccaccctgagcagctcatca

SEQ ID NO: 12959 - DNA, 317 bp, Zea mays
  unsure at all n locations
  Clone ID: LIB3150-101-P1-N1-F11
ccctntcaccctcatngccaagatcaagatcgggatcaatgggttcggcaggatcggtaggctggtggccagggtggccctgcagagcgacgacgtcgagcttttcgccttgaacgaccctttcatcagtaccgattacatgacctacatgttcatagttgacactgtgcacggacagtggaagcaccattatgtcaaggtgaaggactccaagacccttctctttggtgagaaggatgttgctttgtttggcttcaagaactctgatgtgattccatttggttcccttttgcgctgaatatgttgttgagtttact

SEQ ID NO: 12960 - DNA, 344 bp, Zea mays
  Clone ID: LIB3150-101-P1-N1-F12
tatattttttttttttttctttttttatcttttcttttttttttaatttttttttttttcttttttatttattttttattttctcttttcttctttttttttatacttttactattttcttttttattttttctttttatttttttttttttcttttctatttttttttttatattttttattttttatctttacatttttctttttttctttttttatttttttttctatttttatatttttttttcttttttctctcattttttttatttctttttttttaatttttttttctttctcttatcttttttatttttttctattttttattttttttctttttt

SEQ ID NO: 12961 - DNA, 413 bp, Zea mays
  Clone ID: LIB3150-101-P1-N1-F2
tttgaacgagatcctctccgacttgtccatcgcgaactccacctggccacaccttgtcccggcgatggagaacatccaccggagcctccgcaagaggggcatcagcagcgtcaagatcggcaccacgctcgccatggacgcgctcgccgacggcgccttcccgcgcccaccgtcggccgccgcgttccgcgccgacatcgccgagacagtcgtgcgcccgctgctgcacttcttgaacgggaccaactcgtactacttcgtcgacgcgtacccctacttcgtctgggccgacaacaacctcaccgtctcgctcgactacgcgctcttccagggcggacgcacccgctacgtcgacccgggcaccgggctcacgtacaccaacctgctcgacgaaatgctcgacgcggtggtca

SEQ ID NO: 12962 - DNA, 328 bp, Zea mays
  Clone ID: LIB3150-101-P1-N1-F6
cgggaaaacaccactgatcaagctctctccaaagaaaacatgggaaggctttataggtgcatcagtgacaacattgctttctgcatttgtggttgctaatttcatgggccatttccagtggttaacatgcccaagaaaggatctatcaactggatggctttattgtgacccatgtcccatgtttacaccagaaggttatgatctaccgggatggataccacaatggtttccatggcgagaaattgcaattatgcccgttcaatggcatgcattagctcttggcttgtttgcttcaataatagccccatttggtggcttttttgcaagt

SEQ ID NO: 12963 - DNA, 316 bp, Zea mays
  Clone ID: LIB3150-101-P1-N1-G12
cgcatgctaaacatgggatttgaacctcaaattaataaaattgtttctcagattcgtccagatctcctaacactttactggattgctacctggccgaaggaagttgagcatctagcaaggaatactctttttgacccatacaatgtcactattgtttctgaagacttgaaggctaatcatgccattgatcaacatgtagagatattatctgaaactcacaaacattacaagctgattaatctactggatgatataatataaggtccgccaaattttattatttatggacaccaagaagggatgcgatcagactact

SEQ ID NO: 12964 - DNA, 372 bp, Zea mays
  unsure at all n locations
  Clone ID: LIB3150-101-P1-N1-G4
ccgggcccaagcacaagacccgcatttttttctaaaggtgggctgccaaaaccaacaagaagagccatctnggcaacgagtgtaagaaacccttcgttggatcatcccacgcaaagggaatcgtcctggaaaagattggcatcgaggccaagcagccttactttgctatccgtaagtgtgctcgtgtacagctggtgaagaacggttagaagattgccgcctttttgcctaacgatggctgcttgaactacatcgaggaaaacgatgaggtgctgatcgcggtgttcggtcgtaagggccacgctgtggtagatattcccggtgtccgtttcaaggttgtgaaggtcttgggcgtttccctgttcgcccttt

SEQ ID NO: 12965 - DNA, 147 bp, Zea mays
  unsure at all n locations
  Clone ID: LIB3150-101-P1-N1-G9
gggggtataaaaaaaaaagaggggcgacacaaaaaaattntaaatataatacacaacaacaataaaaaaaacacagacaaaaaaaaaacaaaaaaacaaaaaaaaaaaaaaagaaacaaaaaaaaaaaaaaaaaaaaacaacaacag

SEQ ID NO: 12966 - DNA, 259 bp, Zea mays
  Clone ID: LIB3150-102-P2-K1-A12
gaaaaaaaaaaaaaaaaagaaataaaaaaaaaaaataaaaaaatacaataaaataaaaaaaaataaataaaataaaagagaaaagaaaaaaataaaaaaaataaaaaaaataaaaaaaaaaatgaaaaaaaaaaaaaagaaaaaaagaaaaaaaaaaaaaaaaaaacaaaaaaacaaaaaacaaaaaaacaaaaaaaaaaaaacaaaaaaacaacagaaaaaaaaaaaaaaaaaaaaaacaaaaaaaaaaaccaataaa

SEQ ID NO: 12967 - DNA, 366 bp, Zea mays
  Clone ID: LIB3150-102-P2-K1-C6
cgaattcccgggcggccgccctgtcccgcgcgccgtcctcatggacctcgagcccggcattttttacttcgtgcgctcggggcccttcggccagatcttgcgccccgacaacttcgtcttctgaacaatccggcgccggcaacaactgggccaagggccactacaccgagggcgccgagctcatagactgcgtgctggacgtagagcgcaaggaggccgagaattgcgactggcttcaagggatccaggtctgccactcgctgggaggaggaactggttcaggaatgggcaccctgctcatctctaagatcagggaggagtacccggatcggatgatgttgacatgctctgttttcccgccgccca

SEQ ID NO: 12968 - DNA, 306 bp, Zea mays
  Clone ID: LIB3150-102-P2-K1-D1
gccgccctttttttttttttttttttcatttgtggattctttattatttatttaaaaaaaaaccctcctgttgcaggggtttatcaaagagataaaaggtccacaaaccatgtttcaatcgaacaaagcatggaaacccccacacaatttcccattttcatacagttcagggtttaagacacaagaacagacatgtgggttgttacatggccatggcccaaccgttgaagccatttcttattgggtgggaaacaaggaacatgacttgcacactcctgtttattttggaaagggggggggggaaac

SEQ ID NO: 12969 - DNA, 183 bp, Zea mays
  Clone ID: LIB3150-102-P2-K1-F1
ggtgcaaaaaaactaatctgcttggtgtccgtacccattggtaatgggcaaccagaatcattcatagtctttaaatcaagggtttgcctttcaaaacaaatttcttcccaagaacacatattttcaacccgcacttgaacagacttaccaggtaacaataacttacgggcctacatgaaggcg

SEQ ID NO: 12970 - DNA, 66 bp, Zea mays
  unsure at all n locations
  Clone ID: LIB3150-102-P2-K1-F3
gggggggcggcctcttttttttttatttnatttgtctattcaaacccctccattttttttttgccc

SEQ ID NO: 12971 - DNA, 189 bp, Zea mays
  Clone ID: LIB3150-102-P2-K1-G8
aaaggaaatcaactttgctaacatagaccatagaaggaagaaaattcagttatcaaagctggaaaaaccacaagccacaacagatgataccacaacaattcagacacattttggcttctactaacactctttaactcatagaagaattggtcttgaaacaactaacttgacggcgtcagcctaattagt

SEQ ID NO: 12972 - DNA, 311 bp, Zea mays
  Clone ID: LIB3150-102-P2-K1-H11
cgtccggattcccgtgcggccgccctttttttttttttttttttttttttttttttttttttttttttttttttttttttttttttttttttggtttttttttttttttttggggcaaccgccccaaacaaatttattggtaattaatactaaacaggtgggggcttaaaaccttaaaaaattccgggtccagaatggaaccacagaaaatgcaaacccggggcaacacccagggacccctgcacttgtgtttgccataacaaaagccagctcaagccaaatggtggtttttggagaaattcttgttacac

SEQ ID NO: 12973 - DNA, 209 bp, Zea mays
  Clone ID: LIB3150-102-P2-K1-H3
atactatatttttttttttttttttcaggcaattcccggcccaatttattccggcccacgccgggaaaaaaaaggttttttttcttggtaatttaaaggggctggtccatggctaagaaaaatggttttcccttgaaaggtttttttcctgggggaaggaccctttgggggcctttgaaaaacttgttgtggggcccttttggggtttt

SEQ ID NO: 12974 - DNA, 386 bp, Zea mays
  Clone ID: LIB3150-102-P2-K1-H6
aacagaaagcacaagttattttattatcgacggcaatggtaggttgatgttggactagcactcgatccttagatggatcagaatgcatacgggcgacaaggaatggaagaacatacgtccccacaaaaagtgtcatggggcaacaccacaatcgtctgcatttaagcagtaatgccgaatatggagtttcgacttcatttcattttcatcccatggcatatttctgggtccagctgcgggctgttgcctcgtacttaggccgatcccgtttgtacatgtgagcaatcttagggacaagaggatcgtctgggttgggaacagtaagcccggagctgatttaaagcaaaaccttatagattgtcaaagcatggcttcactggttctta

SEQ ID NO: 12975 - DNA, 309 bp, Zea mays
  Clone ID: LIB3150-103-P2-K1-A4
aaaaccccaaacaacaaaaaagggggggggttttaaaaaattttttttttccaaaaaacacccccgacaaggaaaacccccggggggattaaaaaaatttaaaaaaaaaaaaaacagacaaaaaaccaggataacccccggaaacaacagggaaaaaaaaaaaaaaaacccatggggccaaaaaaaaaaaaaaaaagggtaacccaaccataagggccacacaaccccagggaaaaaccaacaaccccagaagcccccgccccccccgggaaaaaaaaaggggggacaccccaaaaaaaaggggggaaa

SEQ ID NO: 12976 - DNA, 194 bp, Zea mays
  unsure at all n locations
  Clone ID: LIB3150-103-P2-K1-A9
cggattcccgggcggccgcctttttttttattattttatttggtcaacatttaatancatcggacaaaaaaagctgcgggcagggaccttgcacaatctttttttttctcgaaacacagcgggagcaaccaaagggaacaacaggggtaccaacacctaatccaaaggaagaacggacactaacacggtggcag

SEQ ID NO: 12977 - DNA, 319 bp, Zea mays
  Clone ID: LIB3150-103-P2-K1-C12
ccgtccgtattcccgggcgccgccctttttttttttttttttttttatattatataaaatttttattattatacaaaaacaaaacaaaataaggggttttttataaaaatttttttatctaaaaaacaaaatatattaatataaaaaataaataaaaaaattaaaaagataaaaaaaaaaaaaaaaaaataaaataatatcaaaaaaaaataaaaaaaatacaataaaaactaatcataaaatatacaaaaaatacaaaaaatattcaaaaattaaaaacataaataaaaataaaaaaaaatataaaaaataatatact

SEQ ID NO: 12978 - DNA, 146 bp, Zea mays
  Clone ID: LIB3150-103-P2-K1-C5
aaaaaccaggaaaggggagcatccaatcatgttttgtgacccaaaacacaaccctgggaaagggtaattccccgacctgacaagcgacaaccggaactggcaggaagatcaaaccatttcaaccactcactaacgaaaggggtaga

SEQ ID NO: 12979 - DNA, 227 bp, Zea mays
  Clone ID: LIB3150-103-P2-K1-C9
taaaaaaatttttacccaaaaacaccccccacaacaataccaataacactacaacataatcaaaaatacaaaaaatttaataacaaccccaccccccacaaaaaaaacacaaccaaaaacccccaaaaaaaccacccaacaccccaaaactaaacccccacagaaaaaaaaaaaaaacaaaactaaatccacaacacaataacctcaactaccacccaacccccccc

SEQ ID NO: 12980 - DNA, 342 bp, Zea mays
  unsure at all n locations
  Clone ID: LIB3150-103-P2-K1-E7
ttcccgggcggcgcgcgctttttttttttttttttaataaaaatggtccgaggttctttattaattacgaccaccacaacacggggggaatttaacaaatggtttttgatcccacaaaacgnccaagacgcaattgacacagttacaccatatcaactcaacactaaggaacagcatcaccaacagcccattcactgttcaaacaaaaaagaaaaagaaagaaaagggtcacaggcatgtgtcccgaaaggtgacagtcaccaacagctatatgacatctgttttttgaacaaattatacagtgttccccagcagctaaccacttccaaaatagagccaaaa

SEQ ID NO: 12981 - DNA, 480 bp, Zea mays
  unsure at all n locations
  Clone ID: LIB3150-103-P2-K1-G1
accggccggaattccgggcgggccgccttttttttttnnttttttttnntnggcttaagcaacctttatgtatctagcaaaaagaaactgtcctgatactggcagtagcagctacaaaccgggtgcttcatattattcaccatttggagcagaagcttatgaatccaagtctacaatgttacattacatcgcagccacagtcgttcaatcatacgtccagtttctgagctcagtagctaaacaatcacaatccttgccatcttatagcctagtaaacctcgacgtgccactgcttgttctttttcagctgtgacagcttctggtcccagctctcgcctcttttgctcagccaccttcttgagcgtgtcctggatccccggcatcatccccttcaaaccacaaaagtagatgtgcgcaccgccatctagcagtctgaagatttcgtcgctgtactcctcgatcttgttctgcacgtacatc

SEQ ID NO: 12982 - DNA, 183 bp, Zea mays
  Clone ID: LIB3150-103-P2-K1-H2
ttttaaagttaaaaaaaaccccaaaacaagggaaaaaacaggagcaataaggggtaaccgaagggcaaaacccaaggcccaataaaaaaaaaggccaaaagcaaaagagaaaacccgcgggaaccgcaacaacaaaaaccaaagcaaaatctaaacagggggaaaaaaaaggacccccatccc

SEQ ID NO: 12983 - DNA, 320 bp, Zea mays
  unsure at all n locations
  Clone ID: LIB3150-103-P2-K1-H3
ccctcccccccccccccatcncncgttggaaaaaaaaaccccccccccccccccggggggggaaccccccaagtccccgccccccccaaaacaaaaccaaaaaaggccccccccttcaccaaggggcgttttaaccccgtgggacccaaaaaaaccccccccccaaaaggggttcacacccccccaacaaccgtttaaccccccaaaggggttgaaagggggcccccggaaccaccccccccaaaaaccacccaggtggggggacaccttccccccaaaaccccttaaaaaaaaaaaaagggcattgttccccccccccc

SEQ ID NO: 12984 - DNA, 240 bp, Zea mays
  unsure at all n locations
  Clone ID: LIB3150-104-P2-K1-A10
ttttttttttttttttttataaaaaaaaattcaaaaaatgctcaaaaaccccaccannaancacaaaaagggggggttttttaaaaaaatttttttaccccccaaaaaacacaannnnnagnaaaanaaaaaaatatcaaaaaaaaaaaataataaaaaaaacaacaaaacaaaacaaacaaaaacaaaaaaaaaaaaaaaaaaacaacacaaaacaaaaaacaaaaaaaaatatcaact

SEQ ID NO: 12985 - DNA, 239 bp, Zea mays
  unsure at all n locations
  Clone ID: LIB3150-104-P2-K1-A11
aanaaaatannaaanatgcctccctatcgaaaaacanngcaaacaaagaggcattctttacaggttatatatcccttcccaaccaangggctaaacaaacaacaacctttgcatagagaatcccatgatgatacaaccatgaaaaagatccaaagtttctagaaacaacagaccccatgaagacaccccaactagttgtacaccatatacttaggtgttaccccgaacttctagaaacc

SEQ ID NO: 12986 - DNA, 190 bp, Zea mays
  unsure at all n locations
  Clone ID: LIB3150-104-P2-K1-A3
acnnnnnaaaaaaagggggtttttaaattttttacaaaaaaaaaaaacaaannattaaatataaaaaatataaaaaaaaaaaaataaaataattttaaaaaaaaaaatataaataaaataaaaaaaaaaagaattaaacccttaaaaaataaaaattataaaaaaaaaatataaaaaaatcttataatta

SEQ ID NO: 12987 - DNA, 217 bp, Zea mays
  unsure at all n locations
  Clone ID: LIB3150-104-P2-K1-A4
gtccttattcccgtgcgccgccctttttttntttttttttaaaatttacaatggctacaatacaaacaaacattgaggggggattttaaccaaattatatctcccaaaaacacctagaaccaaaaaaaaattacaactccactaatacaacaagactaataccctccaacaaacaaacaaaaaaaccctcctcacgccactttcttcttaacaaaac

SEQ ID NO: 12988 - DNA, 140 bp, Zea mays
  unsure at all n locations
  Clone ID: LIB3150-104-P2-K1-A6
gccgcccttttttttttttggccaatctaaaaccacnagcaacgccctcnccttcccccnaagaaacaaacaaaagtgcggtttttaaaagattttttaaccctcccaaaccccccgagnnaaaaagaaacaccagcccc

SEQ ID NO: 12989 - DNA, 301 bp, Zea mays
  Clone ID: LIB3150-104-P2-K1-B2
ccgtcctgattaccgggcgccgcacccgacctggaacgccacgctccgcttctgcgcctagctcattcgccggctccctccacgtactgctgggtgcctagcgcgccctctttgaccgcgacgtcagcgaggtccacatcccgatgtccgagctactatccggcaccctcaacagtcccgaaccacgcaagttcgttgcctacaaggagcgcaagacctaatccagcaagccgcacaaccatgtatacatctaccacaaaatcaaggaggtccagaccctctacaccattgctatcgagaa

SEQ ID NO: 12990 - DNA, 394 bp, Zea mays
  Clone ID: LIB3150-104-P2-K1-B4
attccatattataaataattaagggggaatttttaaagattttttttatcctaaaaaaaccccaagaaaaattatacattaatacccaaaaacactaataaaaaattcccactaataaacaacccaacgtccaccaacaaaaaaaaaaaaaacacccccccccccccaaaaaaaaaaaaaatctataaaaaaaaaaaaaaaaaaaaaaaaaccccccccccaaaaaaaaaaaccaaaaaaaaaaaaaccccccccaccaaaaaaaacaaacccaaaaaaaaaaccccacttacaacgaggaaaaaaaaaaaaaaaagccccacaactccccccctcaaaaaaaaaaatccacactaaaataaaaataacaccccccccccaaaacacacaaaaa

SEQ ID NO: 12991 - DNA, 340 bp, Zea mays
  unsure at all n locations
  Clone ID: LIB3150-104-P2-K1-B5
cggccgccctttttttttttttttttttttacatanttccggaactttttcttatctgaattgggntattgcgacgggggaaatgttccaaatgacggtctcgaaaagtttaaaaaggtcggcatgcagcacaacaccctactacgttacaactttgggtacacaggagtggtcgcaggcagcccggcactttggcgcgagagcagataaaattaccggtaccctcggtggaatcagtgcctaaactggagtacagagtccgagtccgtaacgctgacgtttacggggagcactctagccgcattagcctgcggaatccccaggccacatgcatttgctg

SEQ ID NO: 12992 - DNA, 255 bp, Zea mays
  Clone ID: LIB3150-104-P2-K1-B7
ttaaaaattttaacaaaaaaaaaaaaaaaaaaaaaaaaaaaaaaaaaaaaaaaaaacaaaaaaataaaaacaaaaaataaaaaaaaaaaaaaaaacaaaaaaaaaaaaaaaacaacacaaaaaaaataaaaaaaaaaaaaaaaaaaaaaaaaaaaaaaaaacaaaaaaaaaaacaaaaaaaaaaaaaaaaaaaataaataaaaaaaaaaaaaaaaaaaaaaaacaaaaaaaaaaaatagtaaaaaataacaacat

SEQ ID NO: 12993 - DNA, 294 bp, Zea mays
  unsure at all n locations
  Clone ID: LIB3150-104-P2-K1-C10
cgtccgattccgggcggcgcctttttttttttttttatataaatttttaaatttgtttaacaaaaaaaataaaagggaattttaaaattttttttaaaaaaaacanannnngaaaaaaaaaaaaaaaaaaagggttgaaaaaaaaaaggggaaaaaaaaaagaaaaaaaaaagagccaaaatgggaaaaaaaaaaagttaaaaacaaaaaaaaaaaccaaaatttaaaaaaaaaaaagaaaaaaaacaaatttgatttttttagacaaaaaaggaggaaaaaaaaatatttaag

SEQ ID NO: 12994 - DNA, 286 bp, Zea mays
  unsure at all n locations
  Clone ID: LIB3150-104-P2-K1-C11
tccgtcctattcccgtcgcccccttttttttttttttttttaattttaaatttttttttttttaaaanaaattggggtttttaaaaattatacaancaaacaagcttaataaacaaaaacatattttataacccatcccaaattaacccaaacatctccccccaaaacccaaaaaaaaaaacccataaatttccttgccaaaaaaaatttgttaacccaaccacaattaaccaaaaaaaaacttccacacccatcccccacttatttttaaaccaaaactttccaa

SEQ ID NO: 12995 - DNA, 350 bp, Zea mays
  unsure at all n locations
  Clone ID: LIB3150-104-P2-K1-C4
ccgcccttttttttttttttttttttttaaatattttttaaaaaaaattttttaccccananaaanaattaaaaagagggttttttaaaaaatttttttccccccaaaaaccccccnnnnatatttacaaaaaaaaaaaaaaaaacctaaaaaaaaaaaaaaaaaaaaaacccccccccccaaaaaaaaatcccccaaaaaacccccccaaaaaaccccaaactcctctccctgcccaaaaaaaaaaaaaaataaccaaccaacaaaccaaaccccaaaacccaattccctacaaaataaccaaaaaaaaaatcccccccccccaaaaaaaaaaaaccaatccaaacccc

SEQ ID NO: 12996 - DNA, 408 bp, Zea mays
  unsure at all n locations
  Clone ID: LIB3150-104-P2-K1-C5
cacaaaattggtgnatccccccacanacnnacaaaaaaaaagagtttttaaaaaatttttttccccccaaaaaccccccnannannnaaagngnaaaaaaaaaaaaaaaaaaaacataccccaaaaaaaaaaccccaaaaaaaaaaaaaaaaccccaaaaccacacccgcccaaaaaaaaaaaaaaaaaccacaaaacccaaaaaaaaatccaaaaacaaaaacctataaaacccccaaaaaaacaaaaataaaaaaaaaaaaaaataaataaaacccccactaaaaacacaaaaaaaaccaccccccacaccaaaaaaaaaaccaatcctaaaaaaaaaaaccccctacccccaccacaaaaaaaaaaataataaaaaaaaaaaaacaccaacaacacaaaacaaaa

SEQ ID NO: 12997 - DNA, 101 bp, Zea mays
  Clone ID: LIB3150-104-P2-K1-C7
ctttttttttttttttttattaatttaaatatttaaaaatggtttcgtaaacccaaaaaaatattaaaaaaagaaatttttaaaaaattttttcccccccc

SEQ ID NO: 12998 - DNA, 389 bp, Zea mays
  Clone ID: LIB3150-104-P2-K1-C9
tccgtattcccgggccgccgcccttttttttttttttttttttttttatatttttttaattttttttttttcataaattaatttttttatgggggggtttttttaaaatttttttttctctaaaaaacaattatttttttttttaataaaaaaccccaaaaaacccgcccaaaacccttacaaaaaaaaaacaaaaaaatagaatcaacaaaacaaaacttttatttcaaaaccaaaaatccctaccccaacctcccaccccatattttttaaaaaaaaaaaaaaaataccctccccccccccctaatcaaaaccataacccaaaaaaaaccccctaccccacccctaaataaaaaaacccaatcccccccaaaaaacccccccccccc

SEQ ID NO: 12999 - DNA, 371 bp, Zea mays
  unsure at all n locations
  Clone ID: LIB3150-104-P2-K1-D10
aggatgtaaataccctcgcattattnnatangtgacanncctaagaccnaaactactgccgggggtggttcctgtctgatattattttgtagtttagcagtttaaggtcgaccgcacccggtgtcttcctgacatnatttcaatcgccacacgcggcattggaaccgcatgctctcgacggtgaagcatcgtctctctgtcgacgaccgaagtgaaggcgaggtgggtgnngaatggatgtgtcgccanntggtgcgtcttggttgccgacccccgatgtgtgaagaagtgcggcccgccatctctctgcgcgtaagaagcacgaagtctctccgggcccatcatcctgggtgacccacccctgacgttct

SEQ ID NO: 13000 - DNA, 342 bp, Zea mays
  Clone ID: LIB3150-104-P2-K1-D2
ccttacttttttttatccttatcattccatttagtcctgcgtcccactcccccttttttttcattaccggagggacatttttaaaatttttttttaccacaaaaaaacccaaacaccccttatccaagtacaaaaccaaaaaaacccaacttcaccttaaatccaaaaccccaaaaaaacaaatggttcaaacaaccacaaaacccaaggtaaagcacaaaacaataaaccccaaaaaccgccactaaacaacccaaacaccctacatcccacccaaatcacaccaaacacaaaacaattcaaagagaaaaccccccccaaacccccctaaaacacaaaaac

SEQ ID NO: 13001 - DNA, 317 bp, Zea mays
  unsure at all n locations
  Clone ID: LIB3150-104-P2-K1-D3
gccgccctttttttttttttttaaattnaaattctttcaacatttttcgttacacccaaaacataccacaacacgtgggctttttaaaaatttttttggcccaaggaccaaccacaaaaacaaaaaaatctgccaaccacaaaaaccagggaaaaacattccccccagaatataaaaaaaaaaaagacccccaacctcccttcaaaaataaaaccaaaccacctcccaaatcttgggcaaataccaagatcccccaaacccaccaaaaaaatccttcctaaaacaaaatcaaaagaacctaaaaaacggcgaaaaac

SEQ ID NO: 13002 - DNA, 219 bp, Zea mays
  unsure at all n locations
  Clone ID: LIB3150-104-P2-K1-D6
attnaaaaaaaataaaaaaaacncctaacaatcaanngggcacaaaaaaagggggagaattttaaaaaaattttttcccccaaaaaacaccaanngngacaaaaagtaccacacccacacacaaccaaaaaaaacttattacactacacccaaacacaccacacccatacccacaaaaaaacacccacacttcaacgcacccacaaccactccaccaaa

SEQ ID NO: 13003 - DNA, 331 bp, Zea mays
  Clone ID: LIB3150-104-P2-K1-D8
gattcccgggtcgccgccctttttttttttttttttttttttttttggggatcggattaaatcctacacaattggattccaaattctgggtgcatgatgcattcctacattcatatacagaaagcaaagatatgtcacactttggtccgaagtagaaaacagcaggaagcaagcggagtcctggccacacggaaacagaacagggcgtcatgtggaggaacagaatcggaacggtgcccagctcctggcgcgtccgggcggaacttaagcgttgctccggtaggacccgagcttggtggcgctggccctcatcacgtactggtgggaggcg

SEQ ID NO: 13004 - DNA, 403 bp, Zea mays
  unsure at all n locations
  Clone ID: LIB3150-104-P2-K1-E12
accgtccgtattcccgggcgccgcccttttttttttttttttttaacaaacttaaaatttttatttttcacacanacccaaaaaagggggccctcccaagttttttaataacaaaaacacccacgcccgacgaacataactgatacatcctaccgaataaaggaccagaaacaaaaaaaaagagaatggtaacacagggctccaaaaaaagctcgctatcacaagtaacaatgcgaggacgatcttcccgaataagcaggcaaacaaaaatgcgtaaaacaacgaacaaaggggcgcaaaacctcatcaattccaaaatcaggggccaccattaaaatccatttttttagggcatgcccccactgacaaaacaaaaaaactttagagaaaaagctaaacacaa

SEQ ID NO: 13005 - DNA, 158 bp, Zea mays
  Clone ID: LIB3150-104-P2-K1-E2
ccgcccttacccttcgacagccggatcaagccactagggcccacgtcccacaccaacaagaagccacaaagagggggggccacatgaaaatttgtgcggacagaaacacaacagacagaacaaaaaagcaaaaacaaggccgcagagactacaccacc

SEQ ID NO: 13006 - DNA, 150 bp, Zea mays
  Clone ID: LIB3150-104-P2-K1-E3
cacatcaaacactctaaacctgcgtaaacacccacgaacaacccaaaacagggggggttcttaaccagttttttttccccacaaaaaccccaccatgaaaaacctttcaaaaccaaaccacaacaacaaaccgtcctaccaaaaacaaaa

SEQ ID NO: 13007 - DNA, 230 bp, Zea mays
  unsure at all n locations
  Clone ID: LIB3150-104-P2-K1-E8
aaaaaatatagaaaaattttttnttacaaaaanaaanaanaaaaaaaggggagagntttttaaaaaatttttatacccacaaaacacccccgacatataccacaattacaccacacaacattaataaattcaataacctttccaaaacataatccagacaacagataaccaccaaaataatacctacaacatccaaaacactaaagcccaccaaaatccaacaatataac

SEQ ID NO: 13008 - DNA, 255 bp, Zea mays
  unsure at all n locations
  Clone ID: LIB3150-104-P2-K1-F10
ccctaccgtccgattcccgcgcgcccccttttttttttttttttacaaaaaccctaaaccanctcaatcacaaaacaaaaaaacaggggactttaaaaattttttcccccacaacccacccanaaacaccacaaaaaaacccacaacaaaaccacccaaaccaaacacatcataccaaaatacccccacaaacaaaccttcccaaaaaaaaacacaccccaccacaaccaaaacacaaaaaaacccaaacaaaaa

SEQ ID NO: 13009 - DNA, 339 bp, Zea mays
  Clone ID: LIB3150-104-P2-K1-F11
ccctttttttttttttttttttttaaatttttttattttttttaattttttttttttttttttatattagggggttttttttaaattttttttaataaaaaaaaataaattaattttaaattttatatatttttttttttaaatttttttagaaaaaagaaaaaaaaaaaattttttaaaaaaaaaaaaaaaaaaaaaaagaaaaaaaaaaaaaaaaaaagggtaaaaaaaaaatttttaaaaaaattaaaaaaaaaaaaattaaaaaatggtgtggggttaaaaaaaaatattttttttaaaaaaaaaaaaaaaaaaaaattttataataatattaag

SEQ ID NO: 13010 - DNA, 313 bp, Zea mays
  Clone ID: LIB3150-104-P2-K1-F2
cgcccttaccttccgtacagccgcatcaacacacaagacctcatcctattcgatccatgttccaacaaaagcgggggtctttatgcggttctggtcacctcctacaggaaaacaaacggagagactttgcacatcctgacctaaatcaaccatggagcacggaaaataaaaatcaaacacagtccctccccgcacgcaccaacatgagtgattactcggcaccatggcatactggcatatgcaaacaagaggcccagttcaaatctcggaagggtggcgcaaacacgaaccacttggaagaggaaaagaacca

SEQ ID NO: 13011 - DNA, 377 bp, Zea mays
  unsure at all n locations
  Clone ID: LIB3150-104-P2-K1-F5
aaaaaaactttaatttcttnanaannnaaaaaaataagggggttttttaaaaaatttttttccccccaaaaaccccccaaaaaaaaaaaaaaaaaaaaaccccaaaaaaaaaaaacaaacacaagggaaaaaaacaatttaaaaaaaaaaccaataaaagggaaaaaaaaaacccaaaaaaaaaaaaccccaaaaaaaaaaaaaaaacccaaaaaaacccaaaaaaagggctttccaaaaaaaaaaaagacagacaaccccaccccaaagaaccacaaaaaaaaacaaaaaccccgatctccctgaaaaaaaaaaaaaaaaaccccccaaaccccacaaaaaaaaaacaactataaaaaaacaccaaaaaaacaacc

SEQ ID NO: 13012 - DNA, 191 bp, Zea mays
  unsure at all n locations
  Clone ID: LIB3150-104-P2-K1-F7
aaaaaatattaaaaaanngttttttccacccnancnaaaataatatggggggtttttataaaatttttttcccccccaaaaccaaacagaaccgacaaaaaaaaaaatacaaacaaacaacaaaataacacaaaaatacaaaaacagaacaatcaaacatcaaaaaacattcaaaaaaaaatatccaaaaa

SEQ ID NO: 13013 - DNA, 210 bp, Zea mays
  Clone ID: LIB3150-104-P2-K1-G1
acatcaacacttaaaccttcgtatcacctacaaatacaaaacaggggactcttaaccagttttttccccaacaacaccgacacaaaaatctccaaaacaaaacagacaacaaattcactacaatctcaaacaaattacgaccaatacccccaccatcaaacacacggagcactaactcatacaacacccaggccacaaccagtacaaacc

SEQ ID NO: 13014 - DNA, 160 bp, Zea mays
  Clone ID: LIB3150-104-P2-K1-G11
aaactttgtctatttatagtttcacaataatacaccagtctaaatgcttcgtaagacagatcaaaacttttctattcaagtttcatgttacatatccttgaactcatcttaagcatacatagcaaatatcaaaaggcaacccacccatcacggggggttt

SEQ ID NO: 13015 - DNA, 386 bp, Zea mays
  Clone ID: LIB3150-104-P2-K1-G12
accgtccgattccgggcggcgcctttttttttttttttgcggacatccatcagatttttaataacgaataagaaatgcgagaacgcaaaattcattcttatagagggagtgcactgcaaactgagacaagaaagcacaaactgatggcggtgttatcgcactgtacatttcttaggtcacatcttccaagaaacatagatgatcagggttatccaatgggcacaaatacttcgcatgcttagagaggtgttgatttctaggaacttattttagtctatccattttattccattcaagtctctgaattaccaaatactaaactaaataagtttgattccgtgttggaattagggacttaaatgaaaaaatggagactaaattaatcc

SEQ ID NO: 13016 - DNA, 300 bp, Zea mays
  Clone ID: LIB3150-104-P2-K1-G2
ccgcccttttttttttttttttttttaaggccaatcatgaaatggtactatgattcaagccatactgctgcaggagggcttttggtacaacacataggacacaacacgaccattaaaccaaccaagccacaaccacgattcatgacacacaaaccacagatgtttattagacgacgactacgcatatacccaggtacagcagcagcttaaatgaaccatggcttactgaccaccacggaggcggatcaccaagtggagagtgctctccttctggatgtggtagtctgctaaggtgcgacc

SEQ ID NO: 13017 - DNA, 438 bp, Zea mays
  unsure at all n locations
  Clone ID: LIB3150-104-P2-K1-G6
tcccgggtcgccgcccttttttttttttttttttttttttnccaaacgtatcagttaatcagttaaatgagttcccataatcgcgggaggctacggcaatctccaattggtaatggcaacggtaatgataatgatttggcatactgctgcggcctgcagatgttcgcctagctcaggccttcttcattcagggtggtggcacagggaaagaaaatggcgacataataaaaacggttcgaaagcgtctcgcaggaaagcaccacaacttcggcaaggatttcaaaggttcgagttggccgccagccttgatctgagctcgtcagcaacagcgtcaatgaactcctccgtgttcaggtaatggctcctcgtgatatttgaagatccgtgaacgagaagggcaaggtccttggtcatctttccaaactcgacggcttcaac

SEQ ID NO: 13018 - DNA, 176 bp, Zea mays
  Clone ID: LIB3150-104-P2-K1-G7
ggcgaccaaaggaagcatggggggaactttatcaataatgttttgagcataacactaggaggcccaagtaaagacagaacgtaaattttagggcaagtcactgggatcggccagtgccacaacttaaaattttgtccaccgattcaacagaattaacttgacaattcaactagttt

SEQ ID NO: 13019 - DNA, 398 bp, Zea mays
  Clone ID: LIB3150-104-P2-K1-H1
tcccggtcgccgccttttttttttttttttttttttttttttttttttttttttttttattttttttggacggggggtttaatctaattttctctaaaagccacaacatattcgggccccgaaacattacagcgaaaataaatgccgtccctaggtttaagggaaaacagcacgtgtggggggggatcatctggcagttttacaaacaggcctatttagagaatgagtccaccttgcacaaaaaaagtggaggtcaagaataatatttcaagccccctaagcaaagcaacaacaaatttcagttcccgagcattttaaagaattctgtttaacatgcatgccattttgaaccggttttattttcgaaaagggaattttatccgtgggttagttttttt

SEQ ID NO: 13020 - DNA, 285 bp, Zea mays
  Clone ID: LIB3150-104-P2-K1-H2
cgtcctgattccgggcgccgccctttttttttttcgatcaggtttttagctttatgtttacgacacagcaccacagggggagatcttcaaatttattggcaaacaaacgaaaacccacttatacccggcagagcaaccgaaaatgccaaaaacctcaacaaatggaaaaataaaccatcacagagctagctgggtaagataaacgaagcatgcacgcgacactatggcccccccatcttgcttaccagaagggccaaagctgaggcattcagccttggctcaaca

SEQ ID NO: 13021 - DNA, 343 bp, Zea mays
  Clone ID: LIB3150-104-P2-K1-H3
ttcccggtgcgccgccctttttttttttttttttttttattttttttttactttggtcctaaacaacataaagacataattggcacgggtcttttttgaaattttttaatctttgctcccagaagcaaagatcaaggcatagcgttcttctaaactcaggtttgcacagaacgggaaaattttcaacatgaacacacaataggttcatactactgctcagtgtgagcaaaattgttcgcactagagtaacacagaaagaccaaacaaacaacctagtatccgcccttaatatcattgaccacatcttacgggatgggattgactatctctatggtattcccct

SEQ ID NO: 13022 - DNA, 294 bp, Zea mays
  unsure at all n locations
  Clone ID: LIB3150-104-P2-K1-H7
attccccctanattttttttattaggggggttttttaaaaaatttttttcccccccaaaccccccccnnaaaaacccaaaacccatgcaaacccaaaaaccttaaaaaaaaaaacaaccacccccccgtttaaaaaaaaaaagtaaataaaaaaaaaccggccccccccaaaaaaaaaccccacccaaaatggttaaaaaaaccccaccccccaacaacaccatccaaaaaacccaaaagggaaaaaacgggatcccaaaacaaaacttaccagccaaccccctcccccccccc

SEQ ID NO: 13023 - DNA, 264 bp, Zea mays
  unsure at all n locations
  Clone ID: LIB3150-105-P2-K1-A4
ggcggccgtccttttttttttttttttttttttnttttttttaaattttttttttannnannnnnnnnnnnaaaagaaagaaactacgggggaatttattgcccaacctaaaacaaagctaaatgatattcaaatcgagtaaccaacaggtgaatgctttataggtaggcgggtgaaacaaaacggcgcatgggaataccccttctgattggaaaagaaggggaggccgcacttgccgaataaggggcggtagaaatggatgac

SEQ ID NO: 13024 - DNA, 435 bp, Zea mays
  unsure at all n locations
  Clone ID: LIB3150-105-P2-K1-C6
gcagaacaaaagaaaagnacnnctatgttttacgatgttcagcacgagataagcaggttcacacaaggcactgtaataccccatacacttaaaattcatgttgcacaaagcaaaataagataggctaaaccaaaacgtctggattcgcattccaactgtagattggacttaagcaacggcctcgaggaaagccttcccaggagcacgcttctcaagtcttccatggttaccgagcagctttgcgttgacaccatcaggaacaattctaccctcactcttgtacttcaggtagtcggcacggctgaacttggtgaagccccactttctgctctcaataatcttttggcggccagggaacttgaacttggcgcgacgcagagcttcactggcatgtgcagcattgttgtccttgcatcgaacagaaaggaggacctg

SEQ ID NO: 13025 - DNA, 310 bp, Zea mays
  unsure at all n locations
  Clone ID: LIB3150-105-P2-K1-F3
aaaaaaaaaaaggggggaaaaaaaaaagaaaaataaagaaaaaaaaaaaaaanaaaanaaaaaaaaaggaaaaaaaaannnnnaaaaaaaaaaaaaanaaaaaggnanaaaaannaaaaaagaaaagaaaaaaaaaaggaaaaaaaaaaagaaaaaanangaaaannaaaaaaaaaannngaanaaaaaanaaaaaaaaaaaaaaaaaaannaaaaaaaaaaaaaggagaaagannanaaaaaaaaaaaaaaaaaaaaannnaaaaaaaaaaaaanggaaaanaaaannaanaaaaaaaaaaaaaaaaaa

SEQ ID NO: 13026 - DNA, 211 bp, Zea mays
  unsure at all n locations
  Clone ID: LIB3150-105-P2-K1-G4
ggaattaaaaaaaaaaannnnnngggaggcaaaagacaaaaaaaaaacaaaancnttttaaaaaaaaaagaaaaatgtgaagcgccaaaaatattggtgattccaacgaaaccaaaaattgggaaataaaaatggttcataaaaatttttaaaacaagggttagcctggaaaaactttttttaaaacctggaaacattttaagatccaacc

SEQ ID NO: 13027 - DNA, 266 bp, Zea mays
  unsure at all n locations
  Clone ID: LIB3150-105-P2-K1-H4
cggccggaattccgagcggccgccctttttttttttttttttttttttanaaattttaatntattttttttttnaaanannaannaannnaagggggggggaaataaaaagaaatttttgatattcaattanaaaaaataaaaaagtttttatgtgtataaaaaaaaaaagggtttttaaaaaatggaaaaaagntnggnaaaaaaaaaaaagggttgnaatattaattaaaaaaaaaagggttttttttgataaaaaggataatt

SEQ ID NO: 13028 - DNA, 289 bp, Zea mays
  unsure at all n locations
  Clone ID: LIB3150-105-P2-K1-H8
ataaccacatttcctgagaccatctgatccaaataaacattttttagcggatccttttccaaagaaactttgcgtaaacatttttaacaatccaggtacggtagtttttggaaaataaaagacacgaagctgtataacagcaaaattgatcagggcgctccaaaattacgaagtactggactagaaagctgcagctttgttgcaatacttaacttttttgctttcttcggtgccccggtagtgggagctgnggctgaaactggtggtggaatttcttttgggccctggg

SEQ ID NO: 13029 - DNA, 424 bp, Zea mays
  Clone ID: LIB3150-106-P2-K1-A10
cgtccgtattcccgtgcggccgccctttttttttttttttttttttataaaccaaagccttttctcatggaagatcatgtatgatttctacaagacataatcaatacacactgcgagtataaaatataagccacaccttcctcgtatggcatcaggttatagcagaactagaatctgtcaacgacaacgatgtgaaaaatccaaacaagcaaataggcttcctgtatcttccaatgggatagaactagtcatcatccttgtagggggattcctccgggacttgcttgataagtatcacccgcatcttataggcattatccccgcgaagcatgttacgtacccatttcacctccgtttttatagacaccatttccaatgcccccctaataacttcacttaacaaattgcaatactgaatggcctt

SEQ ID NO: 13030 - DNA, 353 bp, Zea mays
  unsure at all n locations
  Clone ID: LIB3150-106-P2-K1-A2
aactcanaaaatgcttaattcagtacttataaaaataaggaaaatcttgagggggtgccttctattatttcttaatgcataacaataccanccagaatnttgncnaacaaatttgtggcgctcataaccataagccatacagnntngctgcataacacatacacacaacgtagcaataaataggagtaaaatgaaccatcttccgtcgtcagatactgtagcacgtttaagtgttaagattctggaacagctcatgcagatgggcattcgtgagcttgtttcgctttgtgatctcacgctgcttctttttgggcttatccctaggttttacaccattgaatcttggcaattgt

SEQ ID NO: 13031 - DNA, 144 bp, Zea mays
  Clone ID: LIB3150-106-P2-K1-A4
gacctaaaaggtttgtaacaaccttcatcacccgttggttagacaataataagaaaaattatttggagattcggaagaaacaaattttgatgttcatatttgatgttatagtgtattactggtgtatgggggtcagtgccactt

SEQ ID NO: 13032 - DNA, 280 bp, Zea mays
  unsure at all n locations
  Clone ID: LIB3150-106-P2-K1-A5
aaataataaaaataccctacnttttttaaananaanantatttgggggggttttataaaaaatttttcctcccccccccccccccgcaaaaaaagaaacacaaaaaccacacccctcccatcccccctaaaggaaacaacaaacccaaccccacccccccccccccaaaacccccccccccccccacccttacccaccccaccccaaacccccacacaaacccccccccccccccaaacacccccaccccaaaaccccccccccccaccaaaaaccaaaa

SEQ ID NO: 13033 - DNA, 334 bp, Zea mays
  unsure at all n locations
  Clone ID: LIB3150-106-P2-K1-A7
aactcagaaaatgctngttttgttataataaaaataaggaaaatcttgagggtgtgcctcctattatgtcagaatgcataagtatatcatccagaatcttgacaaacaaatttgtggcgctcataaccataagccatacagnatagctgcataacacatacacacaacgtagcaataaataggagtaaaatgaaccatcttccgtcgtcagatactgtagcacgtttaagttgttanattctggaacagctcatgcagatgggcattcgtgagcttggtccgttttgtgattctacgctgctttcttcttgggcttagccttgggatttacgcc

SEQ ID NO: 13034 - DNA, 103 bp, Zea mays
  Clone ID: LIB3150-106-P2-K1-A8
ataaaaaacatctttttttttttttaaaaaaaaaaaaaacgagagggggtttcttaaaaaaatttttcgtccacaaacaaaaccaagaaaaaacactctcaaa

SEQ ID NO: 13035 - DNA, 107 bp, Zea mays
  unsure at all n locations
  Clone ID: LIB3150-106-P2-K1-B1
ttcccgggcggccgccccgttttttttattnnngcacaggtaaacaaaagggcaattgaatgggacaaaacgggcngacaccaagggcggggctcataacgagccac

SEQ ID NO: 13036 - DNA, 241 bp, Zea mays
  unsure at all n locations
  Clone ID: LIB3150-106-P2-K1-B11
ccgccctttttttttttttttttttcaagacataaagggcanagtccccttttattanngantataaactgagggggtgtaattcgatgtgttttgtaccctatcaagcacagaaggcaagccacatgtatttacactaattgatttgcctactgatttactataaattatatatctgatcactataatttttatgttattttcataaaattatcatttttcttttaacttatcttctgtt

SEQ ID NO: 13037 - DNA, 213 bp, Zea mays
  unsure at all n locations
  Clone ID: LIB3150-106-P2-K1-B2
aaanaaaaaaacgcaagaacttaattttttatgnncaacacacgcaaaagcaaggactttatagaagataccacccctcccaacatcaaaacataaccaacacaaaaacaaacaaaaaactaaaagaagcttaacataaaaggacaacaactacaaataacagagcaaacaaaatgcatccaccataaaactcaaaataataaaaatataaac

SEQ ID NO: 13038 - DNA, 424 bp, Zea mays
  unsure at all n locations
  Clone ID: LIB3150-106-P2-K1-B3
ttcccgtgcggccgcccttttttttttttttttttttttttttttnntttttttaattgttcccgggcaccataagaagtacatactggaaatccaatcaacagccaacgtaaattagagagcattgcaaccagggacagagaggcgaacacaatattatggaaccattttaaacgcaaaagttcgcttgcaacaagaagcaggcaattatgatgtttcatcacaaaatctatgacatcacgacagttcagagttctttctcagggattttgatcccagaatctgatactacgcatctcacactagaagtctagaaccaacgactagtgacaggcttgctgatgctctgaatcagtccacaagtgtgcccaaaatgtcgggctctctgaaaaggaggtactctttattaggtgaaagcttaact

SEQ ID NO: 13039 - DNA, 232 bp, Zea mays
  unsure at all n locations
  Clone ID: LIB3150-106-P2-K1-B6
attattggcaaacacctgagagactccgtgattctcatatgggnccctgcnagcgacggccttattaaaacctgtgttgctaccaaaccggacggcagggggcatattgtagcctatcctgctttcattttttacaaattccttaacccattatcatctactgtagtgaggtagtattatattttccttgtctccttttcttcatcttctatgattggtcatctctcatctt

SEQ ID NO: 13040 - DNA, 79 bp, Zea mays
  unsure at all n locations
  Clone ID: LIB3150-106-P2-K1-B9
ccctttttttttttttttaataaaataaaaaaaannacattccatctttcaaaacaaaaaaaaaacggaagggttttat

SEQ ID NO: 13041 - DNA, 279 bp, Zea mays
  unsure at all n locations
  Clone ID: LIB3150-106-P2-K1-C1
gccgccctttttttttttttttttttttgggcaactcaaagaatncactttanttccaacaaaacaaaaggacagcgtggaggctcttctgttccatcaggcccaaaattaccataaactttggatcttgttgagccaaaagtttggatggcaaggaaatagaaaatgagaaattatatgtggattgctttatcgaaggtttgcaagcaagccttcttgagggcctcgctcacggtagggtgtgcgtggcatgttcgaacatcatactaactgtatgct

SEQ ID NO: 13042 - DNA, 368 bp, Zea mays
  Clone ID: LIB3150-106-P2-K1-C12
cggccgccctttttttttttttttttttaaaaagtttgacattttggtttttcagtaacaatggtttctcaaagcagggaatgtttcacaaaactaagccccgaaactaattccagaacttaggtacgaggagcagcagcagctgcagctgcaggagctgcaccgcctgggcgcggcgggccctgaccaggccttgggccatcatcccggcgtctgaagcgctgcgggggctcacggttcctcctgttctcacgagagcggacacggacaatgtgcgcatggattgcgcatgagacacattgatgatacctttgcatacaatttgggtagaacattttcattatgtacacaaggcctcctgcacattt

SEQ ID NO: 13043 - DNA, 177 bp, Zea mays
  Clone ID: LIB3150-106-P2-K1-C5
acaaaaaaacaaacaaaaaaataacaaaataaaaataaaaaaatacaaataaaaaaaaattaaatcaaaaaaaaaacaaaaaaaataaaaaaacacaaaataaaaaaactaaaatttaaaacaaaaaaaaaaaacaaaaaaaaacaaacaaaacaaaaaaaaataatacaatactaa

SEQ ID NO: 13044 - DNA, 364 bp, Zea mays
  Clone ID: LIB3150-106-P2-K1-C6
tccgtattcccgtgtgcgccgccctttttttttttttttttttttttagagtataatatatggtttgtttccccaactacagctacaaggttggcgggtttcaaatgatccgtgtattatcgaaattttatttctgacactaaggactgaacaagaagctaaacaaaaacggctacaacatttacaccacaacatttctagcatgtcgtggtagggaagtgcaaaaggcaaagtaatgcttaaccacaactcaattggcgtggctgtaactagtgttcagaagattgcaacttaagattctgatggttctcagcaccaaccgttttaatccgctacatattaagacatacttatgctcaggaag

SEQ ID NO: 13045 - DNA, 332 bp, Zea mays
  unsure at all n locations
  Clone ID: LIB3150-106-P2-K1-C8
cgccgcccttttttttttttttttttttttatacaaaggaacacctgcntttatgctcacgggcactgcagcgagggggttctttcacatgttcttatcacgattagacaattttttttgaccccattgcaacatttcacaaatttgctctcatcaagcaagaggggtattcagtcggccccaaactatggaaatgttataacatcacatctgaaacaacacttggttacaatgccccacttgcatacaggcgagttcactccttcgctgtctcaaaagctttagctttatttgatttccagtgtttcacaatggtgtctgagagaggttca

SEQ ID NO: 13046 - DNA, 111 bp, Zea mays
  Clone ID: LIB3150-106-P2-K1-C9
tccgtccgattccggcgccgccttttttttttttttttgaaaccacacacccgtgctttatacaagaaaaaaggaggttactaggcatgtttccggaacagcacaccgtgt

SEQ ID NO: 13047 - DNA, 197 bp, Zea mays
  unsure at all n locations
  Clone ID: LIB3150-106-P2-K1-D5
gccgccctttttttttttttttttttnnnnanatttaacagaaaagctccttcacccatccgacaggnaaaaaaaacacagggttccaaaagatatttgtttcaccccaacacaaacacggaacanncacagaatacacaccagaccccaacacatgagaccaccctagaggacccaaacatacctacccaaccaac

SEQ ID NO: 13048 - DNA, 365 bp, Zea mays
  Clone ID: LIB3150-106-P2-K1-D7
gcgccgcctttttttttttttttagtttgtgtaattaatcttttttttgtctccaaacactaattttaggagggtgtctcaattcattcttttttaaacaaacattttaggggcgctgtacaacaaaagctccataaacaacttttacgggatgcattatccaacagaacggttgagatacaagactcagaatattgagacacgaaactattgaacagcaaaattcttcaggtgctccaaagtcatgcttatatagtaccaaaaagctacaggtttgtttccatacttcacttttttgctttctttggcaccccattagatggagctggggctgcgacaggtgcttgtaggtattttgggccctg

SEQ ID NO: 13049 - DNA, 509 bp, Zea mays
  Clone ID: LIB3150-106-P2-K1-D8
ccgtccggattcccgtgcggccgccctttttttttttttttttttgaacacgggtaacattattttataccggaacggtgtttcgaattaaagcagagttaactctggtactggttcattcgactcgaataggatccaaaaatactcacggcaatatcactggccacacaaagcagacatatagctatggaaaaattaggctggtgcattgcccagccaccaccatcgccagcaccccaggggaaggactgatcgaaagtcacgcctagatcttgttgaaggcaacgatgtcgcagctctggacgtactcgttaactggctcagcgcacagatagtcctcaatgagagtggcgacagagacaagatcgtcgactatggtcattatgatttgcaggttcttgataccatatccgactgggacaagcttggatgcgccccagagcagcccttccatctggacactcctaacagcttcctcaagcttggccatgtcagtcttatcgtcccat

SEQ ID NO: 13050 - DNA, 299 bp, Zea mays
  unsure at all n locations
  Clone ID: LIB3150-106-P2-K1-E11
cggccgcccttttttttttttttttatatatttgaatancttctcntttctttttaggacccaactaccaatggggggattacccagaacgttacttaaacaaacataagnnaagggngnngattacccattacggtactaatatgggaatgaaaaggcatcattggatctttcacctaggactggggcagggcgacttctggttagcctttgccttttcttatcaggggattcaaatgctggtttcccccaagaaacttgaggaaattgaacaggaagggaacgtatttatgcttcct

SEQ ID NO: 13051 - DNA, 417 bp, Zea mays
  Clone ID: LIB3150-106-P2-K1-E3
cgacgggattattctttctccccgcgtgctctcttactttcccctctttctctccctctgcccgacgactaggccgccgtcgtcaccgccccgccgccgccgccgccgccgtgcccaggtctttgtcggtccttgtccggcaacgagcaccctacagatggctgggaggcacaccattattctgatgcagccatctcaaaatagggcttctagaacatttatggattacaattcgattaatcatgcattggatggaatctgtgggctttatgaaaggaaaattagggatatcaacccaatgatcccaaacataacttatgacatcagcgacctctataacttcattgatggcctagccgacattagtgcgctggtttatgaacactcgattcaggcatttctgccatatgatcgaca

SEQ ID NO: 13052 - DNA, 391 bp, Zea mays
  unsure at all n locations
  Clone ID: LIB3150-106-P2-K1-E5
ttcccgtgtgcgccgcccttttttttttttttttgaatcaaagcactgaatcacanttttaatagccaaactgatttgcctagaacggcagtacacgattgcaggacaagaagcgatagattccatcccctagttcagacactacagaaacaggaagacagagcagcaatcaggccctctcgcccctgatgcggcgcgcgagctggatgtccttaggcatgatggtgaccctcttggcatggatggcgcagaggttggtgtcctcgaagagacccaccaggtacgcctcggtggcctcctgcagcgcggcgacggcggaggactggaaccggaggtcggtcttgaagtcctgcgcgatctcccgctccagccggtgtaaggtcattttccg

SEQ ID NO: 13053 - DNA, 197 bp, Zea mays
  unsure at all n locations
  Clone ID: LIB3150-106-P2-K1-E8
atattatacactanatatactcaaacataatatattaaagaggggttttatataaaattttttcccccccaccaacaccaagcaaaaanactnaacttgttttaaaaaaaccaacaacaatgaaatggcccaacccaataatacacctcacccacaacacaaaatcaacaaaaaaccccaacccaacaacatacaaa

SEQ ID NO: 13054 - DNA, 393 bp, Zea mays
  unsure at all n locations
  Clone ID: LIB3150-106-P2-K1-F2
tccctgtcagccgccctttttttttttttttttttttttatnctaatgcagattatgnctcttctatggacatgcctagacaaaggttgaggacataaaacacaatttcaaccactctgaaacacctataaatctggtgtgggtgaaaaacacatgcttcaggtggttgatctcccagtcctcacatacactaacgtctatggtcatcgtattgttgccgtccttccctgtcccgggagacgacaggaccctgcagcaattccgtattggagacttgtcccacaatgcgggatcgggctttttaaccacgagcacgctgtccagcagggagtcggagtacgatatctttcaccgtctaaccgggcgtgcttttacccgacttcgtcaccgttg

SEQ ID NO: 13055 - DNA, 393 bp, Zea mays
  Clone ID: LIB3150-106-P2-K1-F5
tcccggtgcgccgccctttttttttttttttttttttttttttttttttttttttttttttttttttttaaatttttttttttggtggggtttttttttttaaaaaggcgaaaaatccaagggcgcattttggcacaaaaaaaacgggttttaaaagaaattttaatgggtcacggaaacccaaaaccttaaatttggggctaaaagtctaaacgggggaaaaaccccaagaaaaaattcccccggccaaaaacgtttttttggggcaggggccccaggatccaagccccactaaagggggggcctgggaaacaccctaaatttggccctttttttggaggggcaacctggtggaaaacccctgggcagggttgatcaaccctttgggagggc

SEQ ID NO: 13056 - DNA, 328 bp, Zea mays
  unsure at all n locations
  Clone ID: LIB3150-106-P2-K1-F7
ccctttttttttttttttttttttaaatnttaaaatttttccttttttttccccaaccatttataatgaaggtattttttaaaaaatttttttttcaaaaaaaaccaaaaaaaattataatattaaaaaaaaaaaaaaaataaaaataattttatctaacaaaataaaaaaaataaaaaaataaataatacacaaaatataaataaaactacatttacatataattaaataaaaaaataataaataacaaaaaacaataactaacatataaaaaaaaacttccaaacaacaaataattataacataaactcaaaataaataatacaac

SEQ ID NO: 13057 - DNA, 322 bp, Zea mays
  unsure at all n locations
  Clone ID: LIB3150-106-P2-K1-F8
cgccgccctttttttttttttttttttnttttttttttggatttacatatttcaacacccaagnggcttatggggggcaatacttgaatggttgcttcatcttaaataaaccttgcttaaacaactcatcagcaatagataaaaccatccagcatgcatttgggccagctactgctactactctctgggattccagcatcaggatcaaaccgtgtaacggtttttcaggcctttgtccatcttttttgcatcgctatgaacaatgaatccaatgtagtccttgtagtccagaaattcctttcactgctttcccatgcttacc

SEQ ID NO: 13058 - DNA, 400 bp, Zea mays
  unsure at all n locations
  Clone ID: LIB3150-106-P2-K1-G12
accgtccgnattcccgtgcggccgcccttttttttttttttttagccgntacatatatatttattttttggtaaacctatcattagatttagatgggcgatatatagtgccgtgagagaactctctcagaactccacccctaaaccatactctctactacatgcgaacaagcaagttccaggtcctagatatcaccaccaagaccaggtatacctacaaaagctttgactgcaagcatgttcctaacgctgctgcaggtttgttcttcatcaacttctcaccgatgaatttccttgtgtgcgcacccttcacattgaattccatcagcagatcttcgtacagcaccttcaagcttggattgaatgagctgcgtttcttcgtagggattgccanaatcact

SEQ ID NO: 13059 - DNA, 498 bp, Zea mays
  Clone ID: LIB3150-106-P2-K1-G4
cgtccggattcccgtgcggccgcccttttttttttttttttttaagctatacattctcgtaactttatttttgattgcgtcagtcctccgtatgctacggcaatgaccagagcggaggctttgattaaaacttgtacatattggggattggatgccagcagcatgtatgctcgttgcactaaaaaaataacagcttataagatgcgccccctcaaaaaaaggcataggtgcctcgtctagtgccctcagtgccaagtatatactacagctaatccatttttgtctcaatactgccaccatttgtctcaagtccttatttttataatccgctggggtaaatcaagaactggcaagattctcagctcacaagtagattccaatcagtcactagttctttgccttttagaattaggctcatcaatttggtcgcggttatgttgacgggaactcgtagaatcatttgggacatccctagctctgtctgcactcccagatgca

SEQ ID NO: 13060 - DNA, 439 bp, Zea mays
  unsure at all n locations
  Clone ID: LIB3150-106-P2-K1-G5
ccgccctttttttttttttttttttttttttactttctttgggagtgatcttattngattaaaagtttcacggggacacatttacctgacaaaatatgagccattaatgctcaaccaaccactaggatacacccaacatagtttcagacattccgatggaaaaaaatttattctcggaagcacttttctccgggggggaagaagacaactcgctcgtatcaccagaccttgagttcttcatcttagttggtgctgttcatgtggcggatcaggtcgaccacgcgggtgctgtatccccactcgttgtcggaccaggacacgagcttcacgaagttgccgttcaaggcattgccagccttagcactaaagaagcttgacctgctgatacccttggaaatcgggggaaacatggtccttcttaacgttacccatgatgccc

SEQ ID NO: 13061 - DNA, 183 bp, Zea mays
  unsure at all n locations
  Clone ID: LIB3150-106-P2-K1-G6
atatattctaaaaacgcgtaccnttanaannaaaanannaaaaaagggaggttaatatgaaaatttttttttcacaaaaaaaaaaaaaaaaanngggaaacacccaccaacaccacagacactccaaacgaaaaaaaaacaacctccaaaacactctaccccaataaaaaaaaaaacaaccac

SEQ ID NO: 13062 - DNA, 416 bp, Zea mays
  unsure at all n locations
  Clone ID: LIB3150-106-P2-K1-G8
tccctgtgcggccgccctttttttttttttttttttaatacaacagnatttttcttgactcataccgcaaaaacaaacgagggggccagaacggggaaaacatccgccaggaaaacccaccacaacacagaaacatctgagacacaaaagtgggaacaagccaatgactataaaaatggtgcagacgagggcgagcagaccctgaactaaaaacaggaaaaaaaaggggagcggaacccacacggcccaagtgtgtgtggcctcaacataccttcgactgaggcgatcacacgtcatagactgtatccagcctgacggatatatatccgtaaaggaatacactgtttacattgaggggcaggggagcaaaagcttgaaagggcgcaaaagcgagatcgtgggctaaagctctaaca

SEQ ID NO: 13063 - DNA, 362 bp, Zea mays
  unsure at all n locations
  Clone ID: LIB3150-106-P2-K1-H11
cggctcgcccttttttttttttttnnntttttttttttggggtttttaatatgaacaaagccgaacccccttgaattattgtcccttgaaaattatcttagaaacgcatccatcccttcgcggggcttattatccagccatataaactagctacaacctaattcctcaagcactatgctcttcgaaactactagaaggacatgttctcgccgcctagaattcagtaacaaatcaataacccacttcttggagtccacgatgaacctggtcttcttacctagggtggtggtgattgcattttcttcctccctccgcatgtcccccattttcttccccttgcggtgtgcgagtaagtactgatt

SEQ ID NO: 13064 - DNA, 176 bp, Zea mays
  unsure at all n locations
  Clone ID: LIB3150-106-P2-K1-H9
aatgaatcacagatttatcncacanacnnanaaaaagaaacaaagggggctttttataaaaaactttttacccccaaaaaaaaanntaagtagccaacaaaaataccaaatcccattcaaaacaagcataaaatccaattccaccacaaacaatacaacactctgtgaatacacaa

SEQ ID NO: 13065 - DNA, 350 bp, Zea mays
  unsure at all n locations
  Clone ID: LIB3150-107-P1-N1-A2
cgaccgccgacgcccgacggcaggtgcaccaggtgttcgtcgaccccttcgcaaggcctcggttccatccttcgccggaggcgaccgcccgtcaacaggacttgatctactactcactagcggtgtagaggcgaagagaagaacttgaccatgagcagcataggcacaggttacgatttgtctgtcacgactttctccccagatggtcgtgtcttccaggtcgagtatgccaccaaggccgtcgacaacagcgggactgttgttgggatcaagtgcaaagatggcattgtccttngtgtcgagaagctggtaacctcaaagatgatgctggaaggatcaaaccgaaagat

SEQ ID NO: 13066 - DNA, 420 bp, Zea mays
  unsure at all n locations
  Clone ID: LIB3150-107-P1-N1-A3
ctttggggcccttcgccgcgatttgcttcgcttgtcggactaggttgaggggccttttcnattctcagaaaaagactggctctgcactcggataattttaaaatggatagtgcacagcagcccactggggaattgaacaattcgttcgatactcttatggtttctggaggtgaccagagtcgacagcctcaggatgctggcaatgaaacgagcttcacgaattggaaagacctccccatggagctgctcctgcgtatcatttcactagttggagatgacaggatagtcattgtggcctccggtgtatgcacaggatggcgtgacaccttgggggtgggggttgcaaatctttcactatcatggtgccaggaccgcatgaatgacttggtgatatcactggctcacaagttcacgaagctg

SEQ ID NO: 13067 - DNA, 262 bp, Zea mays
  Clone ID: LIB3150-107-P1-N1-A4
gtcgccgtcgcaagcgacgatgctcgacatcaacttgttccgcaccgacaagggcggcaacccggaccttattcgcgaatcccagcgcagtaggttcgcctccgtcgagctcgtcgacgaggtcatcgccctcgacaaggcatggcgcgaaaggcagttcgagctggataagatccggcaggagctcaacgctaccagcaagaagatcggcaagctcaaagccagcaaacaagaagaggaagcgaagaagctcatggagagc

SEQ ID NO: 13068 - DNA, 365 bp, Zea mays
  unsure at all n locations
  Clone ID: LIB3150-107-P1-N1-A5
ggagttcaagcgcaagcacaagaaggacatcagcggcaacccacgcgcgctgcggcgtctgcggacggcctgcgagcgggccaagcgcacgctgtcgtccaccgcgcagaccaccatcgagatcgactcgctgtacgagggcatcgacttctacaccaccatcacccgcgcccggttcgaggagctgaacatggacctcttccgcaagtgcatggagcccgtggagaaatgcctccgcgatgccaagatggacaagaacaccgtgcacgacgtggtgcttcgtgggcggctccacgcgcatnctcaaggtgcagcagctgctccaggacttctcaacggcaggagctctgcngagcataaccctg

SEQ ID NO: 13069 - DNA, 357 bp, Zea mays
  Clone ID: LIB3150-107-P1-N1-B1
ttctattcccgcttccacacgtcggtcggcgcccttcgcgatcgtgtcgttgtttgccgcagcctgcctgcgtgtggggtgatggctaggcacttcaagtacgtcatcctcggcggcggtgtcgcggcggggtacgcggcgagggagttcgccaagcagggcgtcaaccccggcgagctcgccatcatctccaaggaaccagtggccccttatgagcgccctgcactcagcaagggatacctcttccctcagaacgctgcaagactgccaggcttccacacgtgtgtgggcagcggtggagagagactacttcctgaatggtactctgagaaaggcattgaactgatcctgagtact

SEQ ID NO: 13070 - DNA, 465 bp, Zea mays
  Clone ID: LIB3150-107-P1-N1-B11
aaaaaatcctctacatcacccaccccatctttctattcacccgcctacttcctctctccggctgggatctatacaataggggggcgggatttacttccaccattcctatcccctctacccctactactcttaccacccctcacataacaacccacaattaccattccccttctatcatatcttaaccaaacctattcaacttccagtttagttttttaaaccctcaactttccataaatctgttattctatttcactttctaatatttttatctcttcctcaattatgctctctctcttattcaactttcatttcctaattcttttttacctatattaatactatattatgttgtaaaataacattaatcaactcttttaaccccccactttatctttattatttcacccaactttttattattttttaattaacatttaatcctttcttcttcatatttacatt

SEQ ID NO: 13071 - DNA, 349 bp, Zea mays
  Clone ID: LIB3150-107-P1-N1-B2
cggagctcgacgaggacgaccgacgacgcacgcagagatccggcgtactggaaattttgaaaactgaactgtaagatggcatcagcagagctttcccgtgaggaaaatgtgtacatggcgaagctcgccgagcaggcggagaggtacgaggagatggttgagttcatggagaaggtagccaagactgttgactcggaggagctcactgtggaggagcgaaacctcctgtctgttgcatacaagaacgtcattggagcccgccgcgcctcatggcgcatcatctcctccatcgagcagaaggaggagggccgaggcaatgaggaccgagtaacactcatcaaggattatc

SEQ ID NO: 13072 - DNA, 366 bp, Zea mays
  Clone ID: LIB3150-107-P1-N1-B4
tcggttccaactcctgagcactttctcctcgtgcgagacaagccaatcgaaggcgagagacgaccatggactccaccggcaccggagcagggggtaaggtgaagaaaggagcggccggacgcaaggtcggcggaccaaggaagaagtctgcgtcgaggtccgtgaaagccggactccagttccccgtcggccggatcgggcgctacttgaagaagggccgctacgcgcagcgtgtcggcaccggcgcccccgtctacctcgacgttgttctcgaatacctcgcacgtgaggttctggagctcgccggtaatgctgccagggacaacaagaagactcgcattatttcgcgccacgtgcttttggcga

SEQ ID NO: 13073 - DNA, 383 bp, Zea mays
  Clone ID: LIB3150-107-P1-N1-B5
ggcaatccgcggagaattcaatgcctaaaatatcttgtccttgccaatatggggatggagtctgaagtgaatccttttgatggacaagaggccaagccgtacaagaacgatagtgaaatccttgcaatgacaaaccttattgcagcgtaccagaagaatgacatcatggagtttgaaaagatcctgaagagtaatagaagaacaataatggatgatccttttatccgtaactatattgaggatctgttgaagaacatcagaacccaagtgctgctcaagcttattaaaccgtatacacgaatcaggattccattcatttcacaagaaactcaatttcccggagaaagatgtggagcagctgttggtatcgctcatcctggaca

SEQ ID NO: 13074 - DNA, 385 bp, Zea mays
  Clone ID: LIB3150-107-P1-N1-B6
gccggtgcgcccgcctcctgcctctctccccctgcgagcgatcgtgaggggatcgggatggcctcccaccattccgagcccctcgaccccgccgacgctgacgacccctcagataacaacccagaattaccatgcccctcctatcatatcgttaccaaacctggtcaactcccagtcgagtttcttgaaccctcagctgcccagaagttggtaattggatttgactgtgaaggtgttgatctctgccgcaatggtgctctctgtattatgcagcttgcattccctgatgctgtttacctagttgatgctattgagggtggaaaagaacttattcaagcttgtaagcccgcacttgagtctgatcatatcaccaaagttattcatg

SEQ ID NO: 13075 - DNA, 398 bp, Zea mays
  Clone ID: LIB3150-107-P1-N1-B9
ctcgtctgctcgcatttcctcccaatccagcccgcctccaaacccgggctgcaagtcgccccgcatcgatggcgcccaaggccgagaagaagcccgcggcgaagaagccggcggaggaggagcccgctgccgagaaggcgccggccgggaagaagcccaaggcggagaagcgtgtcccagcaggcaagtccgccggcaaggagggcggcgagggaaagaggggccggaagaagggcaagaagagcgtggagacctacaagatctacatcttcaaggtgctgaagcaggtgcacccggacatcggcatctcctctaaggccatgtccatcatgaactccttcatcaacgacatcttcgagaagctcgccgccgaggccgtcaagctcgcgcggtacaac

SEQ ID NO: 13076 - DNA, 413 bp, Zea mays
  unsure at all n locations
  Clone ID: LIB3150-107-P1-N1-C12
aaacacccaaaaatcttcacccgttcgttctttaacaagaggagctgccgctataataatccttcaacattcatccttcactactaaagactcctataatacctcctttctgcttctttatcttcaattttactttttcattccattcctcacaaccctactttattatattctaccatctaacacntttaacatatttatcatcttattagatcaaaatcacttctttccttctttttacatttccttattaactctattcaagtgtaagtcttatcataaattctcattcattacttatattttatacttatgatttataacatttaatttctcataactactcttataacattttatattatttataacatattctctcttttatcattttatttaaaactttccattta

SEQ ID NO: 13077 - DNA, 366 bp, Zea mays
  Clone ID: LIB3150-107-P1-N1-D1
cttgcatagggtttatcttctcccctcctctggccccatctcgcttgtcggacacggcagccggattccgaagcgcgccccctcggccccagccaaaagcatcgcagtttctaatcgtttggagagcacacaagaatgtcgttcgtgcagctctctggtgctggagtcgctgcagtggccttcacgaacaagagcctagtctctcggcacgcagcgctacgggcctgctcgtcgaggcgctcgatccgtagcctggtcgttaaggctgcaactgtcgtcaccccaaagtacacttcactgaagcctctgggagatagggtgcttgtgaagcttggtgccgcagaggagaagacagttggtggcatt

SEQ ID NO: 13078 - DNA, 353 bp, Zea mays
  Clone ID: LIB3150-107-P1-N1-D2
gaggcactacccactcttgtatcccaggcctgcggcatcgtcgccggctgggcaccacttctcctccgctagacggtccaccaagaaatctgccccaaaggcgccaatgggctcttccattcctgccgcaaaggcgctaatagactcttccagagagcccttctatgtcatccgcaagggggatgtcattggcgtctataagaacctcagtgattgccaagcccaagccagcaaatcggtactccatccttcagtcactgtctacaaaggctattctctgcgtaaagaaactgaggaatatcttgctgcacgtgggttaaaggaacgctgtctattccattggtgcagcggat

SEQ ID NO: 13079 - DNA, 297 bp, Zea mays
  unsure at all n locations
  Clone ID: LIB3150-107-P1-N1-D3
ttgagcgcaagggagcgatgcggcggcggcgggcggctatttggaggagagcatggcggcntggctggttgccaagaacaccctcaagatcatgcccttcaagctcccgcccgtcggcccttatgatgtccgcgtgcgcatgaaggcagtggggatttgcggcagcgatgtgcactacctaagggagatgcgcatcgcgcacttcgtggtgaaggagccgatggtgatcgggcacgagtgcgcgggcgtggtctaagaggtgggcgcccgcgtgacccaccttgccgtgggcgaccg

SEQ ID NO: 13080 - DNA, 434 bp, Zea mays
  Clone ID: LIB3150-107-P1-N1-D4
gtttgttgattatgccaaacaagtctcatgtgaaagtcattggtttgagacgtggacgagagcaaagtacgtcgtgctggacctgccgagaatgttcgtgtcaaattgtccggagttgaggaggaggatgtaatggctggttttgtactttcaagtgtcgctaatcctgttggtgccgttaatgaattcatcgctcagttacagattttagagttgcttgacaatgctattttcacgggctggctacaaagctgtgttgcatatccactctgttgtcgaagagtgtgagattgttgaactcatagaggaaattgacatgaagaaaaagaaaggagatccgaagaagaaaaaaccaaagaggaagcctctttttgtgaagaatggtgcaatttgtgtttgccgcattcaggtgaataacttgatatgcatagaga

SEQ ID NO: 13081 - DNA, 389 bp, Zea mays
  unsure at all n locations
  Clone ID: LIB3150-107-P1-N1-E1
ttaagacgatgctgccgccgaggtccgccggcggcgctccatgctcgggtggaggacttctgttccaccgattctcatcctactcgtcctcttctgtctattctgtccgccaccacgcctcgtctgctctctcctcccagccctccacccgccccaccaccacctggtcctcttccccccattccagcagccgcaggatcagggggtttgcggcctgtgcttcggcgccggggccggcggngtctgcggattccctcgctacaaaaggcgctagaggctaagatcaaggaagcagctggaggcggacaacagtcacggttgtggatacctttggagaatgccgccatgtttgcatagacgtgatttccaaaggcatttgagggaaaatc

SEQ ID NO: 13082 - DNA, 399 bp, Zea mays
  Clone ID: LIB3150-107-P1-N1-E2
ccgtcccccatggacgatccctcctccgggtccaacaagcacaagcgcaagcgggggcgcaagcccaaggcgtcgccgccctcccccgaccgctcctccccctctccctcggccgcgcccgctccggctgggcgccgtggccgcaagccgcgacgtcatgagtcccccgccgacgcggacgccacgcgtccgccgtccccgccccgccgcggggagccgaagccggtggcaaacggaggcgatgtggtggcagtggcggagtcaggccccgcgagctgggatgaggtggtgagggtagtgccgtgcatggaccctgtggtcaaggtgttctgcgtgcacaccggagcccaacttctcgctgtcgtggcaacggaagctccagtacagctccagtaacag

SEQ ID NO: 13083 - DNA, 416 bp, Zea mays
  unsure at all n locations
  Clone ID: LIB3150-107-P1-N1-E3
ttcctactatcgcctggagaaggagcgccggggggagcttttaccacggccggctgccntctgaccctccgagatcggaagcggcgccggcgccggccggcgatggcgatcccgctcgtgctcgtcgtgctcccgctcggcctgctcttcctcctgtccggcctcatcgtcaacgccatccaggccgtcctatttgtgacgataaggcccttttcgaagagcttctaccgtcggatcaacagattcttggccgagctgctgtggcttcagcttgtctgggtggtggactggtgggcaggtgttaaggtacaactgcatgcagatgaggaaacttacagatcaatgggtaaagagcatgcactcatcatatcaaatcatcggagtgatattgattggctcattggatggatattggc

SEQ ID NO: 13084 - DNA, 268 bp, Zea mays
  Clone ID: LIB3150-107-P1-N1-E4
gagcactcgccgtcactcaccagcaaattgccgagccgccccttacggatgtgctttcgcgacccatttgatcgattcctgatggcgcccaacgccgagaagaagcccgcggagaaaaagctcccggaggaaaaggccgaaaagaaaccaagggcggaggaagcgcgtgcctagcaaggagggcggcgagaagaaaggaaagaagaaagcgaagaagaagcgtccagacgtacaaagatctacatcttcaaagtgctcaagcaagtgc

SEQ ID NO: 13085 - DNA, 302 bp, Zea mays
  Clone ID: LIB3150-107-P1-N1-E9
tctttaaaaactaatatggtacaactacagtggtttatctccagaagagggaggcagataccagtggtagatggttatttctgcagttgcagtacatcttgatcatgtaacttaagatctagcgctacagcctacatgtaagtgtactatcttgctgatcgatcagacaacagcatcacctaacattcctgtgatttttattcagttaccagtgctgatttcaaaagtcaacaatgtcatatatctaagaatggaggtagtacaatttatttgtgatttttatttgaccgatcactggattt

SEQ ID NO: 13086 - DNA, 266 bp, Zea mays
  Clone ID: LIB3150-107-P1-N1-F1
cacacactcgcgaactccatttcgatcccatttgaaatcaacccatcctcggttcctccgtctagcagcctctcaccctcatggccaagatcaagatcgggatcaatgggttcggcaggatcggaaggctggtggccagggtggccctgcagagcgacgacgtcgagctcgtcgccgtgaacgaccccttcatcagcaccgattacatgacctacatgttcaagtatgacactgtgcacggacagtggaagcaccatgaggtcaag

SEQ ID NO: 13087 - DNA, 354 bp, Zea mays
  Clone ID: LIB3150-107-P1-N1-F10
ggagaggaaaaaaaaaatctaaccctagcatccgcagcgctagggggggggggttgcgatggcggcggcggcgagacagcgggggacggtgaagtggttcaacgacaccaagggcttcgggttcatctcccccgaggacggcagcgaagatctcttcgtgcaccagtcgtcgatcaagtcggagggcttccgctcgctcgcggagggcgaggaggtggagttttccgtctcggagggtgacgacggccgcactaaggccgtcgacgtgaccggccccgacggatccttcgtcaggggcggcggaagcggaggaggaggcggcggcggctacggctcccgcgggcggggcgatct

SEQ ID NO: 13088 - DNA, 364 bp, Zea mays
  Clone ID: LIB3150-107-P1-N1-F2
caccggggaaccctacccgagcatcagccatggcgatcgcggcgcgcgtcctgcgccgcctcccgctccacctctacccctcgctcgctcgctctttctgcgcagtttccccggccgccgcctcggccgccccggcgtccgcctcggccgccccggcgtccgccaaggtcgccgatcgcatcgtgcgcgtcctcgccatcgatctcgagggggcgcgccgcgaggtcgtcggcctctccgggcagacactcctccgcgcgctcgccaacgcggagctcatcgagccggcctcccaccggctcgaggatatcgacgcgtgctccggccaatgcgaggtccacatcgcgcaggagtggctcgacaa

SEQ ID NO: 13089 - DNA, 314 bp, Zea mays
  Clone ID: LIB3150-107-P1-N1-F3
cggacgcgtgggtgagtttgctaagaagcgagcatctgttgctgaccgttgtgtgaatgatgcttttggcacggcacacagagctcatgcttcaaccgaaggagttaccaagtatttgaagcctgctgttgccggcttcctcatgcagaaggaacttgactaccttgttggagctgttgccaacccaaagaagccatttgccgctattgttggtggatccaaggtctcaagtaagattggtgtcattgagtccttgctggcgaaaggtcgatatcctcatccttggtggtggtatgatctacacattttacaag

SEQ ID NO: 13090 - DNA, 390 bp, Zea mays
  Clone ID: LIB3150-107-P1-N1-F4
tatcttttcatgccacacagaatacaacccgggagcctctctcggtgggcaggcgccttctcctccaacaccgtacgctccacgcctcctccaataaagcgagagcttcttcataagaacaacaaatcaaaagcgcgatcaactcactgccaacaaaacctcaacaaccaatactcatatctgatctcgaccaacagcttccatcttcctttgatccgtatgctcaggcaaatgctgtagactatcttgctcaccctggaacgaatgattatctgcatgtacgcatccagcagcacagacctagacagactctcactaacactcaacgtctgaagaaagagttcagctataacaagatcctcaaggatctgaagaaggaattctcctgca

SEQ ID NO: 13091 - DNA, 140 bp, Zea mays
  Clone ID: LIB3150-107-P1-N1-F9
tcttttcgccaactacaactcccaaaaccctgcctacatataaatgcccgctagtctccaataatttccattctaaaacactcccaaccctctcttctaatctactacttcttgtatttactatctacatcaacctactt

SEQ ID NO: 13092 - DNA, 408 bp, Zea mays
  Clone ID: LIB3150-107-P1-N1-G1
cgcatctcccccctgcctcggttcctcccctttcgccctacttgcttcccacgccagggcccgagctccgagctagggtttcctctctcgccgccgccgccgccgacgtcgacggagaagaggagtaggtgaagccgagttattagcgccaggggaggaacatggggacgccggagacgtcgcgggagccatgcccggaccggatcctggacgacgtcggcggcgcgttccggatgggcgccgtcggcggctcggccttccacttcatcaagggcatctacaactcccccaacgggatgcgcatgttcgggggcgcgcaagccgtgcgcatgaacgcgccgcgcgtggggggcagcttcgccgtctggggcggcctcttctcaaccttcgactgcgccatggtctacg

SEQ ID NO: 13093 - DNA, 381 bp, Zea mays
  Clone ID: LIB3150-107-P1-N1-G10
tctgcgagcctcgactgctcatccttaccgacccaaggactgaccgggagcgcaattaaggagtctgctctggggaacatccccaccattgccttctgtgatactgactctcccatgcggtatgtcgatatcggcatcccagcgaacaacaaggggaggaacagcattggatgcctgttctggcttttggccaggatggttctgcagatgaggggcactatcctccctgggcacaagtgggaggtcatggtggatttgttcttctacagggacccagaggaagcaaaggagcaggaggaggaagctgctgttgcccctgagtttgccgcaatcactgattaccaaggagctgatcagtggggtggtgaccagtggacctct

SEQ ID NO: 13094 - DNA, 305 bp, Zea mays
  Clone ID: LIB3150-107-P1-N1-G2
gccgtcgcctccgccgccgttgctgtgttccgtctcttcgccgatggcttcggccaagttcggtgctgcccagcaggtggagaaccgaggcgcgctgtccaaaaggtcacgtaacgacgtgtctgtaagggagggggactggaattgtcctcagtgtggtaatgtcaacttcagttatagaaatgtttgcaaccgtggagcctgtggtgcaccccgtccatcaccgagtccaagtccaagaatgatgccaggacctcctgcttctggatatgaccggtcacctctattttaccggaggaggtggt

SEQ ID NO: 13095 - DNA, 211 bp, Zea mays
  unsure at all n locations
  Clone ID: LIB3150-107-P1-N1-G3
gttattagcactgaagcggagccagtggaggaggtggtggatgctaaggcaaagaaggcagccaagaaacgtgggctgcagctgaaaattaagattgggaacccacatttgaggaggctggttagtggagctattgcaggtgctgtttccaggacttgtgtggcaccactggagacgatcaggactcactngatggttgtgagcaacggtg

SEQ ID NO: 13096 - DNA, 415 bp, Zea mays
  unsure at all n locations
  Clone ID: LIB3150-107-P1-N1-G5
gtcgcctcctccgacgaccaccgtccaccggcgacaaggacagcgacgatgcagtcggcggcgtggaggcgtcacctcctcgaccaccacctctccccttccacctcggctgccatcgccgccttcagatccgcctcccagcccgggctcgctccccaagggttgtttggagcggatggcgcaagatgcatgtctgcgagggcgccggcggtcaaggggtccgggcatctcgtccgcaagggcaccggagggaggtcttctgtgagtggaattgtagccacggtgtttggagctactgggtttcttgggcgctatcttgtgcaacaacttgccaagatggngtctcaagtgcttgtcccattcagaggttgtgaggattcttctcgtcacctgaagattatgggcgacttgggtt

SEQ ID NO: 13097 - DNA, 357 bp, Zea mays
  Clone ID: LIB3150-107-P1-N1-G9
tacaagtgggacatcatggtagatcggttcttctacagagacccagaggaagcgaagcagctggaggaagaagaggctctggttgcacctgactatggcgcggttgcagaatacactgcaccaggcgctgacaactggggcggtgaatggggtgctggcgaagctgcagctccagctgctagcattccagctgctggcgcagactgggctgctgctccagctcctcctgctgacggtgtctgggacgcagctgtggctccaccttcagcagcagcccctcggatgggaacaaggcgcggtccttgttgcggcgtcttcctctacctgggagtattttataaagagtatatgagcatg

SEQ ID NO: 13098 - DNA, 417 bp, Zea mays
  Clone ID: LIB3150-107-P1-N1-H2
tccttgcctcgctatcccacatcaggaggttacatgagcccagggacgccaccgtcgatgtaccttggtggtggtgctcccccatatggctcttcaatgtttaacgggcctgcaatgacgcgctatggtatcacacagttccctgggggttctgcgtatccatatggatatggtggccgcatatcaatggggagcccctacgggccaatgcaaatggctgggccaaccgcatactctggtggatctatgatgggagcaggtggaatggatggaatgcccatggacaggtatgggctaatacctgctggttctggtccaatgggcacgagagctggctcatattctgatgaagattctcagaagaagtctgcaggagctggccgtgataatgattgggagtgttcaattgccacaaca

SEQ ID NO: 13099 - DNA, 373 bp, Zea mays
  unsure at all n locations
  Clone ID: LIB3150-107-P1-N1-H3
tcactccaaacacttgcgccgccactgccggacaggtaaggccgccatggggtccggttcgggcgtgtgcgcgaagcgcatcgtggtggacgcgcgccaccacatgctgggccgtctctcctcgatcatagccaaggagctgctcaatgggcagaaggtggtcgtcgtccgctgcgaggagatctgcatgtcgggcggcctcgtccgtcagaagatgaagtacctccgcttcctccgcaagcggatgaacaccaagccgtcccacgggcccatccacttncgcgcccccgccaagatcctgtggcgcaccatccgcgggatgattccgcacaagaccaagaggggggaggcggctctggcgaggctcaagacg

SEQ ID NO: 13100 - DNA, 285 bp, Zea mays
  Clone ID: LIB3150-107-P1-N1-H4
cacaacgcaacctgacacactgccttcgtggctagaactgtggcgtgcaacacacatctttaccacttgcgctaaccacattcttgctcgtatcaatgaatgtaacctcatttgcacccattgcgagaccaaaccagctgctgattagaactatggcaccacaagcgatcattccacccaccgagtaatccagatcatgcgtacataccaccatgacgttgtgaggctctactatattgacgatatgctcgatatcacagaagtgcagacatatcttatcaatag

SEQ ID NO: 13101 - DNA, 263 bp, Zea mays
  unsure at all n locations
  Clone ID: LIB3150-107-P2-K1-A1
cgcccttttttttttttttttttttttttttttttttttttttttttttttttnttntttttttttttttttttgaaaggaaaaaaatatttttggggtagttaaattaacatttgataaaaaaaataatttataaaaattttttattttttttttaaaataaaatttacaatttcacaataaaaaatttctccaaaaaaaaattcacctatcccaaatatttttaaatatttaaaattttttactgaaaaaatattccttct

SEQ ID NO: 13102 - DNA, 432 bp, Zea mays
  Clone ID: LIB3150-107-P2-K1-A2
aatccccggtgcggccgccctctttttttttttttttgaaaaattgagtatagaaatacattaattattatccggttacatggaataagcaaataaaaaataaagaagctacaggcaagtaaacaaactgaacactattttaggaaacaggctacacgaggcagttcctcagccttctctacaagattttgcttcgccttgaaatcaagctctgactcccaagactacaagcaataaactcaatttccactaaggtgcttggtggtcctcactatgtcgccgagaagttcagcgatgcaatcattcttccatgtcatgtccaagatctgctcgtgctcttgctcgagtctgataaacttttcttcctccgctgctgctgccgctgctgcaactactgttgtagctgttgtgatgctcattaaatcgctcaag

SEQ ID NO: 13103 - DNA, 233 bp, Zea mays
  Clone ID: LIB3150-107-P2-K1-A3
tcccgttgcggccgccctttttttttttttttttttaaaatttattatagaaatacatttattttttttcgtttcatttttatagcagatgaggaataaagaagctgggggggggtgaacaaacttaacactattttatgaaacatgctttaaaaaaaaaccccttttccttttttccaagagtttgcctcaaccccaactcgggcggtgacttccaacactacaatcaattt

SEQ ID NO: 13104 - DNA, 216 bp, Zea mays
  unsure at all n locations
  Clone ID: LIB3150-107-P2-K1-B1
cgattcccgtgtcgccgcccttttttttttttttttttttttttttttttnttttttttttttttttttttnnggaaacgaaaattaaatatcagcttttgttaaacgatggaaggggggtttccttgttgatctatcaaactggccgaattaaatgtgccggagggcagttcaaccaagctggatccctgaacatcacaggatccccaacaatgc

SEQ ID NO: 13105 - DNA, 416 bp, Zea mays
  unsure at all n locations
  Clone ID: LIB3150-107-P2-K1-B2
cgtccgnattcccgtgtcgccgcccttttttttttttttttttttttttttttttttttttttttttttttttttttnnntttttttttttttgggttttgtttttttgggggtgggaaagggggaacttttttttcataaacattccatttccaattggcaattttttggaacttggggccccccaaattttttttgtttttttgttccccccaatttcctaattttttgttaaaccacaccagctttttttttgccctcccaaactttgaaagaacccttttggattttaacaaaacacaattttttgccttcactttttatgaggaaaatcctttccccctgttttgtttaaaactaaacccttttgaaaaaaaacccggaaatgccagtgttttttcaaccaaccccccccc

SEQ ID NO: 13106 - DNA, 328 bp, Zea mays
  unsure at all n locations
  Clone ID: LIB3150-107-P2-K1-B3
cggtccgtatttcctgttcggccgcccttttttttttttttttttttttttttttttttctttttttttttttttttttatnaancnttttttatagccgagccaaaaataaatactggcaggcctaaccatttttttcaccaaataaacatattcacacaaatcacttttttaccccatacccttaaaattcatttttcccaaaacaaaataccatattcttacccaaaacctttgtattccctctccaaccctttattttacttaaaccaccacccttccttattcctttccaaaaaccccctttttaatttttcctcttttaccc

SEQ ID NO: 13107 - DNA, 376 bp, Zea mays
  unsure at all n locations
  Clone ID: LIB3150-107-P2-K1-B4
cgtccgtattcccgtgtcgcgcgccctttttttttttttttttttaagcgttaggataggtacacacatatccacttataaggttgtccatatatggatagtacaaactttttgtaggtgtggaagtactagataaggtgcctactggcatatcggtcagccactacgttattccaagccatggctgactatgggctatggcattcgagaataccagcacattacattacgattgtaggtaacagtttcatcgcatggggcaagctcacgcatcatcgtcgccttcaacagtgttgacacgctcacacttcataatccattcactatatatatcaataggctcagngagtgcattaacagttgtgctgaagttttt

SEQ ID NO: 13108 - DNA, 296 bp, Zea mays
  Clone ID: LIB3150-107-P2-K1-B5
accgtccggattcccgtgcggccgccctttttttttttttttttaccgaaaagaagaattaccgtatttcttaaggtttgccagtagccgcgataacatggaaccgaccgactatcacgaggtgcaaaaaaaataaccaccacaaaagtaccagcccaccacaaataaagtttaagcggacacaccgcaccgaccgacgacgataactcgcggcagcgactgggccagccagcaactgcagcacgctcaagactgacaacaaaccgcttagtccacctcctcgatcttggggccag

SEQ ID NO: 13109 - DNA, 52 bp, Zea mays
  unsure at all n locations
  Clone ID: LIB3150-107-P2-K1-C2
gnnngggnagggactcgaatttcagtttcatcattagacacaaaaattattc

SEQ ID NO: 13110 - DNA, 469 bp, Zea mays
  unsure at all n locations
  Clone ID: LIB3150-107-P2-K1-C3
taccgtccgtattcccgtgcagccgccctttttttttttttttttttttttttttttttttcttaatttttttttttttttntnttngggacccaagggggggtttaattacacacacagacgggcccagattcgtttactggtttacacaaaaacccaaggttcctttgctcaatccggcggtttttagcagcccaacaaccccacttgagaaattcatactagttactggctggatctgcatcaccacaagtcccaaacaatttgggcattcattccgatccatcctttaacaaagcgcttataatactaatgtgccgtgccaaacaacaagaacactccacccaacaagaaactgaaggcccaaatattccacactcactactggtcgcagtttgcacaatccaaccccaaaaaaaaaggggggggggggggggggggggtttaattttttattcctcaatttttt

SEQ ID NO: 13111 - DNA, 252 bp, Zea mays
  unsure at all n locations
  Clone ID: LIB3150-107-P2-K1-C6
cgccgccctttttttttttttttttttttttttttttttttttttttttttttttttnttttcnnnnnttnaaacaatgaacattttcttataaatagggagggacattttcaaggtaaagccatcaattacagatgtttgtcttattagataagtacacaggttgtttaaaagaagatggtttatttacaggtggatttcaaatatttccccctaagagctttcttggtcaaagaacatcccagtttttct

SEQ ID NO: 13112 - DNA, 361 bp, Zea mays
  Clone ID: LIB3150-107-P2-K1-D11
aaatattcaatcataggagggtttttttttatggggggcgggacgataaaatgtaccattcataacacaaattaaaaacatgttactctgcgtcagaaaacacaggtaaacactcatcattccaacaacttcaaaaaaactacataatattattataatggattaacactacttggccattctaacttcacatcctaaaaaacaatatccactccaccacttcccttgttttaaatatttttcttcacccttcactacaaaaaattcatagtattggctttacagtaaaaaaaaaatttacttcttagactccacccttaccatcaataatgtgtcactaactaaaatactttcaaccctc

SEQ ID NO: 13113 - DNA, 113 bp, Zea mays
  unsure at all n locations
  Clone ID: LIB3150-107-P2-K1-D5
atcttaataaaaaannaaatttttctcntttttttttttttttctctttagaaaggtttttttcaaccacgaggagacaccctctttttttntaaacatccactttaaaattt

SEQ ID NO: 13114 - DNA, 136 bp, Zea mays
  unsure at all n locations
  Clone ID: LIB3150-107-P2-K1-D7
annnnnncaccnaatctattgtatttaattccnnatcataaacatggcatggaaactttacatatggggcatgctttacatcctcctctctatatcaaaaatagacccatacattatttattactccactacactt

SEQ ID NO: 13115 - DNA, 334 bp, Zea mays
  unsure at all n locations
  Clone ID: LIB3150-107-P2-K1-E11
ataataaaaaaaaggaattattatttttttaattaaataaaaaaaaaatttatatttaaaaaaaataaattttttaaaaaaagaaaagaaaaaataaaattttttttaaaaaantaaaaaaaaaaaaaaaaaaaaagttatattttttaaaatttataaaaaattaattaaaaaaaaaaaattaaaaaattaaaattnttttaaaaaaaatgtaaataaaaaaaaaaaattataattgggaaaaaaaattaaaatataataaaaaaaaaaaaaaaaaaaataaaaaaataaatatataataaaagttaaaaaaaaaaaaaaataatatataaaa

SEQ ID NO: 13116 - DNA, 198 bp, Zea mays
  unsure at all n locations
  Clone ID: LIB3150-107-P2-K1-E2
ttttttttttttttttttttttttagattttttttttttttttttttnaantttttttttttttttgtgttgggttttattgaaaaagaggtaaaagaaaaaaattaaaaaaaaatattttaaaaaaaaattataattaatttntaaaaaaaaaaaccccttttttttatttttataaaaaaatgttataataatttt

SEQ ID NO: 13117 - DNA, 413 bp, Zea mays
  Clone ID: LIB3150-107-P2-K1-E4
cctgcagtaccgtccgaattcccgtgcggccgcccttttttttttttttttaaattaagctcaggagccaggaccacatcaactcagtaacagaggtaccaatataataagacagaaactactgctggatttatgttccaacctcaaacagatctaaatgatattcaaatcgagtaaccaacaggtgaatgcttgataggtaggcgggtgaagcaaagcggcgcatgggattacgccttctgattgtagacgtaggtgaggccgcacttgccgcattagtggcggtcgaagtggttggccatgaatacacccgcaccgcactcggtgttggggcacttcttgcggaggcaggttaccttgccggtggcggtatccacctttgataactgcaggacagcgagctttaccttctt

SEQ ID NO: 13118 - DNA, 227 bp, Zea mays
  Clone ID: LIB3150-107-P2-K1-E9
cttaaatcaatttatttttttcaggggtgttcatatacaacaacggtccgcgcccccaaataataaaacaacaaaacccttccaacaaaacagacaaaagccccaccctcccatatcccaacatttcacactacaacaacacccatcacacacaaaacttgttactcccaaaacaacacactgctaaaccaaactcccaaccacatcattcctactaagcaaccccc

SEQ ID NO: 13119 - DNA, 296 bp, Zea mays
  unsure at all n locations
  Clone ID: LIB3150-107-P2-K1-F1
ccgccctttttttttttttttttttttttttttttttttttttttttttttttttttttttttttttttttttttgggttgttttttttttgggttgggtgggtttttttnnggggggggaataaaacctcccccacccttttttatttttttcccccttttaaaaaaccaaattccccggttttccaacccccttgttcacattttggggggggtttttttgaaaacccccaccaaggggagggcccaaaaaaaaaaccctgttttccattttttttttttgtaaaagcattttt

SEQ ID NO: 13120 - DNA, 423 bp, Zea mays
  unsure at all n locations
  Clone ID: LIB3150-107-P2-K1-F11
tgcaggtaccagtcacgaattccaagagagtccgcccttttttttttttttttttttttttttttttttttttttttttttttttttttttttttttttttttttttttttttttttgaggggggagaaattaatttaaaatattaaaaaaaaaattttttaaaaataaaaaaaaaaaaaaaataaccccaaaagaaaaaaaaaactaaaaaaaaaaaaaaagtaaaaaaaaaaaaaaaaatgganaaaaacaaaaaacgccataaaggagaaaaaaaaaaaaaaagaaattaaaaaaattacaccaaataaaaattttcataataaaaaaaaaaaaaaaaactccccaaaaaaaaaattaaaaaaaaggggttaaaaaaaaaacgaaagataaacacttaataaagaaaaaaaaaaagggag

SEQ ID NO: 13121 - DNA, 183 bp, Zea mays
  Clone ID: LIB3150-107-P2-K1-F7
ccgcccttttttttttttttttttagcagggaaggcacggattcatttatattccaaaacaagggccccagagctaagattcccattacaatcgggcggcgtttatgaatcaagcatgctatctactggcctttgatcaccctacgagaacattaacgatttcacaagacatacatatgcttt

SEQ ID NO: 13122 - DNA, 319 bp, Zea mays
  Clone ID: LIB3150-107-P2-K1-G11
accgtccggatcccgagcggccgcccttttttttttttttttttttttttttttttttttttttttttaatttttccattttctttttctagtatttaattttaatttgtgccgaggccacattaattcaacattcatttcatcaaaactcaccaccacccattttcacaatacacaccaaaaccaatcccaacatttttaaccaaaaaaaaaaacatcaccaaactctccaattctataacaacacgcaaccacttccccccccgaataaaccccaactctactaacaacaacccaaaaaccccccccctccctttaa

SEQ ID NO: 13123 - DNA, 423 bp, Zea mays
  Clone ID: LIB3150-107-P2-K1-G4
ggctgcaaaacgttgcccttttttcatttcaattatcgaacgataagagtggattacattcgaaacagggtcaggaatactactaacaatagtccaacacgtcacagacaaggaactaaacgaaataaccctaacaacaaacaggcattcacgacagcaaggagaagaggcatccagcctagcctccgaagccgtatagggttcggccctggcgcttgagcgcgtatacgacgtccatggcggtaacagtcttgcggcgtgcgtgctcggtgtaggtgacggcgtcgcggatgacgttctcgaggaagatcttgaggacgccgcgggtctcctcgtagataagccccgaaatgcgctttaacgccgccccttcgagccaagcctacagatcgcgggcttggtgatgcccctggatgttgtcac

SEQ ID NO: 13124 - DNA, 272 bp, Zea mays
  unsure at all n locations
  Clone ID: LIB3150-107-P2-K1-G6
taatnnnttttttttttttnnnnngggcccggtggactggacgctgataatgccggttggggacggcttggtgttcttcagggccttgtcgatctcattgtcgtcaccaattgcatacttttgcagaatctttgggtccacaggagcttcatttgcgggtcttttctgttcctctacttccttggctggttttgcaagggccccatccatcgatttgctaagagggggcattttaatcttttttaggcgagggaagggtggtttgatttttt

SEQ ID NO: 13125 - DNA, 256 bp, Zea mays
  Clone ID: LIB3150-107-P2-K1-G9
cgcctgcgtaccgtccgtattcccgtgcggccgcccttttttttttttttttttttttttttttttttttttttttttttttttttattttttttttaagggaaaagctttgtttcttaccatgtgagtcattccattattactgattgagagacatgaaacgaccgaaatgcaatccaaggcaaatggatggatggatggagatgactaccgaaagaaagggttcactctgatctggcggcgttttgttccacct

SEQ ID NO: 13126 - DNA, 458 bp, Zea mays
  unsure at all n locations
  Clone ID: LIB3150-107-P2-K1-H10
attaaatatatttatttttttttttttttatttattnnanattttaagtttttttttaaattaaatgaaaaattttttattatttaaaaaatattttaaaattatttttttttttttngggaacccaaggaccccccccccccccaaaaaaaaaaaaaacccccccccccttttccaaaaaaaaaaccccccccccccctaaaaaaaaaccaaaaatttcccccaacccccccccaaatattccccccccccccaaaaccctaaaaccccaaaaaaaaaatttctcctcccccacagataccccccccccccacccttttttctccctacaaaaataaaaaaaaccccaaaaaaaaacacacccttacccccccttttcccccccccccaatttaatttttcccacccaaaaaaaaccaccggcccccccccctaaaaaaaaaaaaaatttccccccc

SEQ ID NO: 13127 - DNA, 149 bp, Zea mays
  Clone ID: LIB3150-107-P2-K1-H3
ttaaaccaaggaacctgttttataccaatggatggggtggatcttcttaatttaaagatcaccccttctataaatttacagccaaacatttttcactttgttaaccaaattccaaccaaagctttttcaaaaattataagcaccccctt

SEQ ID NO: 13128 - DNA, 300 bp, Zea mays
  Clone ID: LIB3150-107-P2-K1-H6
aaaacaatatacatgcatattacagcgcttggaaaggattataccccaggtatatataaacaaccacatggtttgatattgacaatgcagtaatttcatcaggtgttgtaattcacctcgcactgtaatggcataccagtattagactgattttttctcatcgtcataacaattccgttttctttttgaaacagaatttaattgttgtactcccgttgtgatacaaacatttagattctttaattcgtcgactgaggtgcctgccctacaaacagtccgggtgtgataaaatgccatgag

SEQ ID NO: 13129 - DNA, 344 bp, Zea mays
  unsure at all n locations
  Clone ID: LIB3150-107-P2-K1-H9
attaattagtttttataaaaaaagaaggagggattataaaaattttcattaaaataatttaataatattattaaaaaaaataatattaaaaaatnaaatttaaaaaaaaaaaaataatttaaataaaattaaaaaaaaaaatataattaaaataaaattatattatttataaataaattaaaaatatnnnnaaaaaaatttaaaaaaaatatatataattataataattaaataaaaaattgttaatattaaaattaaattaataatataaaataaaatattaattataaaaaaaagttttataatatatataaaaaaaaataaataaattataattataaata

SEQ ID NO: 13130 - DNA, 401 bp, Zea mays
  Clone ID: LIB3150-108-P1-N1-A10
tcttttattattctcgtctgaaaacgaagagagcacaacttacacccctatgcgaacctatcgatgatggaactcaatggccggtggagaaagacacttaaagttcatcctgacgacatgctttgtcgtggtggttgtaatcgtttcccaatactgcaaagcaaaagggcgtcatcctccccaggttgtggccaccattctgatttgcatacgatcgtgaatactggacgccatttcactgcggcaaagtttgccaagagtacaacttccctgctaagaatggcggctactgcgataaacgtggtgacccatggaagtgctgctgtccatattgaaacgtacaaaatgcatgcatccattcgggctgctacctgatcgatatacatgtcaatcatcatcaa

SEQ ID NO: 13131 - DNA, 387 bp, Zea mays
  Clone ID: LIB3150-108-P1-N1-A11
tcttttttagtcgtcctcgctcctcatagcgcgggcgtcgagaagacgcgtggggacaaggacatgatcttaaggacccgttttaaggactacacacggatgccggccttaacgctcgtcaacatgaccatggcgctaaacatctatgcacttgtgactcacattactcacgatgacattaaggttttcaccccggagccggaggaccctgtcgctctgttgactaataccaaccacttgtacaagaccttctgttgcattcgaatgctaaaaatcactggtctgaattttgacgcctatcatggctacaagaacacactgctgcgggcactactgctccggatgaggcctatgatggtgatgacctggctataaccagagatgaaa

SEQ ID NO: 13132 - DNA, 236 bp, Zea mays
  Clone ID: LIB3150-108-P1-N1-A3
ttttgtgaccgggtccgtatggacgcgtaccactccgctcgtcttccggagcgcgcccaacttccagggcaaggtggtccttgacgtgggcaccgggagcggtatccttgctatctggagcgcgcaggccggggccaggaaggtgtacgccgtcgaggcgactaacatggcggagcacgcgcgcgagcttgctcgcgccaacggcgtcacggatatcgtggaggtgatacagggca

SEQ ID NO: 13133 - DNA, 166 bp, Zea mays
  Clone ID: LIB3150-108-P1-N1-A4
ctcattcaccgcttgcctatggactcaccccgttgtaactttttacgacgggcgccctactttcaaaacaaaatgttccttgacatcgacaccataaaccttattcttcctatctgaagctcgcaagcacgaatcactaatatactcctcctcaaggctactaaca

SEQ ID NO: 13134 - DNA, 406 bp, Zea mays
  Clone ID: LIB3150-108-P1-N1-A5
ctagtctcctcttcgcacgagcgcaacaccatgcacccaccagttcgaagcggaggcgaccggcaacctgcggcggagatgtcaggcaggggcaagggcggcaaggggctcgggaagggcggcgcgaagcgtcaccggaaggtgctgcgcgacaacatccaggggatcacgaagccggcgatccggaggctggcgaggaggggtggcgtgaagcgcatctccgggctgatctacgaggagacccgcggcgtgctcaagatctttctcgagaatgtcatccgcgacgctgtgacctacacggagcacgcccgtcgcaaaaccgtcaccgctatggacgtcgtgtacgccctcaaacgccagggccgcactctctatggcttcggcggctaggttaggtgtgggtaat

SEQ ID NO: 13135 - DNA, 391 bp, Zea mays
  unsure at all n locations
  Clone ID: LIB3150-108-P1-N1-A6
cggtattaaccctaangaaacccaccctccctcgaggcgttctcgacccccgcgcggcggcgccgccatcacaacccagagcaccccctccccaccccaccctgtcccgatggctgcggacgccgccgctgcggcgatgtccgcgacttccctctgcgacgatctcgagcccgccaccgtgcgcacccgcatccgcgatgtcctggccgcaggtgccgcgcgtgccggggaccgcgtcgnggtcggtgggtgggtccggacgggccgggagcaggggaagggctctttcgccttcctggaggctaacgaccggttctgggctggcacgctttaagccatcgttgacgccgccgtgcacccggtagcgcgccttaccggcaccggcaccttc

SEQ ID NO: 13136 - DNA, 389 bp, Zea mays
  Clone ID: LIB3150-108-P1-N1-A7
ttcccgttagactaggttaggctaggctagggtgtcgaccagctcgcggtggtggtggccttcaggttccatcagtaccaggtggtggggcgcgcgctgccgacgcccggcgacgagcaccccaagatctaccgcatgaagctctgggccaccaacgaagtccgcgccaagagcaagttctggtacttcctgaggaagttgaagaaggttaagaagagcaacggtcaggtcctggccatcaacgagatcttcgagcgtaacccgacgacgatcaagaactatggcatctggctgcgctaccagagcagaaccggctaccacaacatgtacaaggagtaccgcgacacaaccctgaacggcgctgtaaagcagatgtacaatgagatggc

SEQ ID NO: 13137 - DNA, 140 bp, Zea mays
  Clone ID: LIB3150-108-P1-N1-A8
agagctagacaggggccggggacctaagctctatacattaaccaaccacctttttttaccccagacaattcctaccgggggtttttatcaactcgggccacttcaataaattcatcataccacggcaccggcacccctcc

SEQ ID NO: 13138 - DNA, 378 bp, Zea mays
  Clone ID: LIB3150-108-P1-N1-A9
tgtttctctaagggaggttcaatgggaagcggatcaaaaccattcgctggatgagcttaacgctcagcgtcagtatgccacaaacttggagaaaccaattcaaaaacttacacaaaaattaacatcagctgatgcacactacaagcagaaggtgacagaagagagggacaaacttgttgaggtcaccaaagagttgagcgagttgacacaaaaagtaagcgagagtattgaattggagaggaaggtgcaggaccttgagcagaagctgcagctagcttattccaagtctgacgaacacgcagtggatactgtggagtcgagatcccgtgaattcagcctggattcatcaacgacttcaggcaagcagcaagacaaaac

SEQ ID NO: 13139 - DNA, 327 bp, Zea mays
  Clone ID: LIB3150-108-P1-N1-B1
agctcgtccatgtcctcctgattcctcttggcgatcgagggagtggccaaccggtgataatctagctagccagcctcgccatgcctcgccagaggaccctcgcctccgcggcggcgggcgggcggctgctgctcgtggtggcggcggtcctgctgggcctgtccgggcctccggggggcgcggaaccccgggcggcgggggtggggaggttcctgggtttacgggcaaacttcccttcaagcactaacccggggacgtaacaattggtcgacatgagccacgaaagaaacacctgtgctactaccttgccgtctttgaaaggaaccc

SEQ ID NO: 13140 - DNA, 186 bp, Zea mays
  Clone ID: LIB3150-108-P1-N1-B12
cctttacaatgcaaataccctgcccctgcgcggggctgcagggcttgtacggcgctggcgccggcctgacgacgatgatgggcgccggcgggctgtttccctacgcggagaacctgaggcagccgcagagcagcccgctggcgggggggccctactacacccgttgtgggtagacgagcggggggg

SEQ ID NO: 13141 - DNA, 408 bp, Zea mays
  Clone ID: LIB3150-108-P1-N1-B3
cttggttctagttcaaatcaactggctccaaatcatataggcttccataatggtatagcatctcagactggagcacaatatgttgatctgaaccatgaagccagatctagttcatccagacatatctcaccagcaaatttcaatcataccggaactgttgatgcacaacctatctcaaaacaatacatggtgggtattcttcattttgatggtgcttcaaaagggaacccaggtaaagcaggtgctggagctgtgcttatgactgaagatggaagagtgatatctcggcttcgtgagggtcttggtgtcgctactaataatgttgctgagtatcgaggcctgatcttaggactgaaatatgcgattcggcatggattcaagagaattaaagtacatggggactctcaa

SEQ ID NO: 13142 - DNA, 405 bp, Zea mays
  Clone ID: LIB3150-108-P1-N1-B4
ctgtggacggagagcaaggacgtgggcaagggcttccgctgcatccgcatgggcaacaacacccgcctcaacttcgacgccttccacggcgacaaggaccacggcggcgtgcacgacggcaccggcgtcgtgctctgggagtggtgcaagggcgagaaccagagctggaagatcctgccgtggggtcccgaggccaactccgccgcggcccacgcgggaggcccgcacgccgtgcgcgtcttctgcaaggccggcggcgaggactacagcctcacggtgcgcaacggcacggcgtgcctggcgcccaccaacccgcgggacgagtaccagcactgggtcaaggacatgcgccacagcacccgggtgcgggacgaggagggctacccggccttcgcgctcgtcaac

SEQ ID NO: 13143 - DNA, 397 bp, Zea mays
  Clone ID: LIB3150-108-P1-N1-C3
gcagccttcacttcgaaggactcctggaagacggcggttctgctccttcagggtgaattgtactgctgcatgcctgtgctcacaaccctactggagtagatcctaccatcgaacagtgggaacagattaggcagctgatgagatcaaaatcactgcttccgttctttgacagtgcctatcaaggctttgcaagtggaagtcttgacaaagatgctcagtcagtgcgtatgtttgttgctgatggtggtgaacttctcatggctcagagctacgctaagaacatgggattgtatggagagcgtgttggcgctttgagcattgtatgtaaaagtgccgatgtagctgttagggttgaaagtcaactcaaacttgtcatcaggcctatgtattcaaaccc

SEQ ID NO: 13144 - DNA, 405 bp, Zea mays
  Clone ID: LIB3150-108-P1-N1-D1
ttcagcctccaaagccactcccaaacccccggtgccagaaccttctcgaaggtgcgcgccgcctcctccactcgcaccgatggcgaaggaaccaatgcgcgtgctcgtcactggcgccgcaggacaaattggatatgccctggttcccatgattgctaggggtgttatgcttggtgcagaccagcctgttattctgcacatgcttgacattccgccagcagctgaagcccttaatggtgttaagatggagttggttgatgctgcgtttcctcttctgaagggagttgttgctacaactgatgttgtggaagcctgcactggggtcaatgtggccgtcatggttggtggattccccaggaaggagggaatggaaaggaaagatgttatgtcgaaaaatgtttcaat

SEQ ID NO: 13145 - DNA, 191 bp, Zea mays
  Clone ID: LIB3150-108-P1-N1-D12
aaatctctctctctctccccattccccacccaacaccactactccatttccaatcccagctcccatacgtcaatctattattccaaaaatcctacctttcccatcccatttctggccgctacctcacaccttctcctcctcctaccaaaaaaacgcctccttcatcttcctcctaataccttatctacatt

SEQ ID NO: 13146 - DNA, 401 bp, Zea mays
  Clone ID: LIB3150-108-P1-N1-D2
gccaaggcaaccgttaatggtgttccaaatggtactggtcacactcacagttacagtggaactgtaccaagccaacaaagttcagcactgacgcctgatggaacttatagggcgcccttgctaggtggagttccttctgctggttacctagacacgacatattatgggtatgacagcacaggggcacaatttgcatggtatgatggctctgcttatgcaaatggacagcaaagaacaaccacaactaatcgttttccatcctcgtcattcagtggtaatggttcatctgcaatatatcagaacaagagctccaccacgcagcagatgggtatgcagaatagaagacctacaactacatcagcagctcctacctatcccaataggatgtaccctagcccccg

SEQ ID NO: 13147 - DNA, 408 bp, Zea mays
  Clone ID: LIB3150-108-P1-N1-D3
ggcgccgccagatcgtcagtcaccatgatcatctccaagaagaaccggcgcgagatctgcaaatacctcttccatgagggggtcttgtacgccaagaaggactacaacctggccaagcaccccaagcttgatgtgcccaacttggaggtgattaagctcatgcagagcttcaagtcgaaggagtatgtgagggaaaccttctcatggcagtactactactggtacctcaccaacgatggcattgagcacctccgcagcttcctcaacctgccatcagaggttgtgcctaataccctcaagaagtcttccaagcccccgtctcgccccttcggctctggcccacctggtgaccgccccaggggccctcctcgttatgaaggtgacaggcctaggtttggtgatagggat

SEQ ID NO: 13148 - DNA, 388 bp, Zea mays
  unsure at all n locations
  Clone ID: LIB3150-108-P1-N1-D4
tgttataaaaaaacggacaaganagggcgggggtgacactatacagggggggcgggcggagaaccatgatcggcgtctagctaaaagccccggcggcggtcatggccaccgcagaccacagccgtattttcatgaaggacgtcaaacgcgtcatcatcaaggtgggcactgcagttgtcacgaggcatgatgggcgagtatccacaggcaattttggcgttctttgtgaacaggtgaaagagataaatgctctaggataccaggtgatcattgtgtcctcaggtgctgttggtgtgtggaagcagatgctcaattacaggaagcttgtcaatagcagctttgctgatatgcaaaagccacagaccgagctggatggaaaggcttgcgc

SEQ ID NO: 13149 - DNA, 410 bp, Zea mays
  unsure at all n locations
  Clone ID: LIB3150-108-P1-N1-D6
tttttattgataggcgatccggcaaggagcgggggaatgatcccaaagtggggggaacnntnatgctggtatggtgaagatggttcccactaagcccatggtggtggagaccttttctcagtatcctcctcttggtcgatttgctgtccgtgacatgaggcaaacggtggctgtcggagtcatcaagagtgtggagaagaaggacccaactggagccaaggtgacgaaggctgctgccaagaagaaatgatctatctggctggtgacgaaggctgctgccaagaagaaatgatctatctggctggtgctgtgcttgcttgttggttacctcgtggaagcttaaaatatctcgtcttgttgacatccttgcagttgtcgcgtgaacaagtaatctatgatggcaatgtttg

SEQ ID NO: 13150 - DNA, 396 bp, Zea mays
  Clone ID: LIB3150-108-P1-N1-E2
tgatggctggtgaatcatggacggtgccgactccagtgaaagaactgggcggcctcgtggacgagccgccgagccggttcgtgcagcgggaggagcaccgccctggcagcctaatgctcgcggctgacatgccggatcccctccctatcgtcgacctcaacaagctgtcgaccgccgacgaggcagccaagctccgctcggcgctacagacctgggggctttttctggctaccaaccacggcatagacgcgtctctgatggaggatgtggtggaagcgtcacgggagttcttccaccagccgctccaggagaggcagaagtacagcaacctgagggaaggcacgcgcttccagctcgaaaggtacggcagtgatccagtggtggcgcaggatcata

SEQ ID NO: 13151 - DNA, 359 bp, Zea mays
  Clone ID: LIB3150-108-P1-N1-E3
ttaatcattgactattgatgcactcttgccgcggctgtcatagatgcgcggggccctcttcaccatctacctactcggccatctcgtgcaggcccgtcctcgtcgtggtctaccatcgtgaccccacccgctgcccatcatctgcagactccacctgctcggaaaccaaccgcaccgctccctcgacaggctcgccaagacccactgcccgctcgtgtcgctccgcctgggctcggtgaccacagtggtcgccttcttcccgaccgtctgccgggagatcctgcagcggcacgaccccgccttcagcaacaggttcgtgccggaccccccgggcgcccacgccaggaacttcacggtgt

SEQ ID NO: 13152 - DNA, 406 bp, Zea mays
  unsure at all n locations
  Clone ID: LIB3150-108-P1-N1-E4
cgttactcaacacagcacaggcagttcgcgagagagagagagagagagagagataaagatgtcntggttcgggcaccaccaccacaaccagccggctcccccggcgtcgggccccaaccaggtgttcaagatcttctgccgcgccaacgagaactactgcctggccgtccgcgacggcgccgtcgtgctggccccggtcaaccccaaggacgaccaccagcactggtacaaggacatgcgcttcagcacccgggtcaaggacgaggaaggcatgccggcgttcgcgctcgtcaacaaggccacggggctcgccatcaagcactccctcggccagtcccacccggtcaagctcgcgcctttcagcccggaccaagaagacgcgtcggtgcttgggacggagagcaag

SEQ ID NO: 13153 - DNA, 416 bp, Zea mays
  Clone ID: LIB3150-108-P1-N1-F1
ccgaagctgatccttaagcgcccacctccgattagctttatctactccaagcgcaagaacccatcgacaccatgaggggttgctcttccctcgctctcctggctctcgctgcgagcgccacctccacgcatacaagcggggctgcggtgccagccaccgccgcggtcatctaccgcgcgggcatctgccacctccggttcacctgccacctccgggcatctcccaccgcggccacctgccgccgcggccacctgccaccgcggccatgtgccgccgccggttcatctgccgccgccaccatgccactaccctactcaaccgccccggcctcagcctcatccccagccacacccatgcccgtgccaacagccgcatccaagcccgtgccagctgcagggaacctgcggcgttggcag

SEQ ID NO: 13154 - DNA, 402 bp, Zea mays
  Clone ID: LIB3150-108-P1-N1-F3
gcaagacagactacagggccaggataagggtgattaaccaagacaaaaacaggtacaacacacccaaatacagatttgttgtgcgatttaccaacaaggacatcactgcccaaatcatatctgctagtatagcgggtgatatggttcttgcttctgcctactcgcatgagttgccacgatatggtcttgaagttggtctgaccaactatgcagctgcctactgcactggccttctgttggctcgccgtgtgctcaagatccgtggtttggatcaggagtacgagggcaatgttgaggccactggtgaggacttctctgttgagccagctgatgagaggaggcctttccgtgctctcttggatgttggccttatcaggactacaacagggaaccgtgtctttg

SEQ ID NO: 13155 - DNA, 405 bp, Zea mays
  Clone ID: LIB3150-108-P1-N1-G1
ttcttttccctgctcctgtgggctgtggcgagcgcaaaccagcctcgcttggcaaaccctagctcctcgctctcccgcccgcgtggcctgccaggcaaccactcccggatcaactccgtacagcgtgcctccgcctcccggactccagcggcggcgggatgtggtctcactccaaggacttgctcgagatcgagcccctcgagctccgattcccattcgagacaaagaagcagatctcgtgctctatgcagttgacaaaccgaacagatgactacatcggctttaaggttaagacgacgagcccgaagaagtactgtgtccggcccaacagcggcatcgtgccacctcggtccaccagcgatgtcattgtgacaatgcaagcacaaaaggaggcgccaccggaca

SEQ ID NO: 13156 - DNA, 213 bp, Zea mays
  Clone ID: LIB3150-108-P1-N1-G2
tgttattttacgtctggatattaatggccgggacctcacagactggctaatgaaaaatatcactaagaggggttaattttggagaaactgcggtcagcgatgtattcttcgggacattgaggagacatttgagtatctcgctttcgactaccagcaagagttcgagactgagaaggacaggtcctcagagggaatgagctcagagctacctga

SEQ ID NO: 13157 - DNA, 407 bp, Zea mays
  Clone ID: LIB3150-108-P1-N1-G3
cttgggtatgcagatgttgttgaggaaatctgggttggggagggcaagggggtgaagatcactggtatcagggacatgggtaggaccgccactgtagttgtcaggggctcgaaccagttggttattgatgaagctgaacgcagtctccatgatgccctctgtgtcataaggtgcttggtcaacaagaggtttttgattgctggtggtggtgctccagaaatagagatgtcaatgcagctggctgcttgggcaaaggagcttctagggatggagagttactgcattaaggagtttgctgacgcacttgaggtcatcccttacacactggctgagaatgctgggctcaacccaatctccattgtcaccgaactcaggaatcgccacgccagaggtgagaagaacactgg

SEQ ID NO: 13158 - DNA, 180 bp, Zea mays
  Clone ID: LIB3150-108-P1-N1-G5
gtaagctggatccttaatcacagctatatgacagcggcgccggaattcgaccgggcctgagcgtaccaggtgcctataatagtctattaactgcgtatatggcatagctgttctgggaaatgtatcgtacattcaaacatacaccgagctaaggtaagctggtgctaatgaggactatac

SEQ ID NO: 13159 - DNA, 283 bp, Zea mays
  unsure at all n locations
  Clone ID: LIB3150-108-P1-N1-G6
actcactttttatattttcccncccccnaattacnnaccgccgctttttattaaaccacgcccccctataataaataatattaaatcttctcntaatcatccccataactatttcctatataaaataattatcccctcacaatttcatacaacatactacccncaatcataaaatacaaacccctcccttcctaatcacttaactaactcacattaattcccnttccctcacttcccccttttcaaacacaaaacctttccttccaatttcattaatcaatcc

SEQ ID NO: 13160 - DNA, 410 bp, Zea mays
  Clone ID: LIB3150-108-P1-N1-H1
ttttccagcggagtgagaaggagcaatccagcgccgattagggagatcaaggggcagaagctggtgctcaacatctccgtcggagagagtggggatcgcctcacccgcgccgccaaggtcctggagcaactgagtggccagtcaccagtgttctctaaggctaggtacactgtccgttcctttggtatcaggcgtaatgagaagattgcctgctatgttactgtaaggggtgagaaggcaatgcagcttctggagagtggacttaaggtcaaggaatatgaactgctaaggaggaacttcagtgacacagggtgctttggtttcggaatccaggagcacattgatcttggcatcaagtatgatccttcaaccggtatctacggaatggatttctacgtcgtccttgagcg

SEQ ID NO: 13161 - DNA, 223 bp, Zea mays
  unsure at all n locations
  Clone ID: LIB3150-108-P1-N1-H12
aaagagaantcccacatcaacattgtggttattggccacgttgactctggcaagtcgaccaccacaggacacctgatctacaagcttggaggcattgacaagcgtgtgatcgagaggtttgagaaggaggctgctgaaatgaacaagcggtccttcaagttcgcatgggtgctcgacaagcttaaggcttagcgtgagaaaggtatcaccattgatatcgctc

SEQ ID NO: 13162 - DNA, 319 bp, Zea mays
  Clone ID: LIB3150-108-P1-N1-H4
gagaagtcgaagtacccgttaccgccgccgcctgtcgcctagccgccggagaagcgccgctcgctcaggaggacagccatggcgccggagccggaggatgatattatgaacgagaagaatccccgcccgctcgacgaggatgacatcgcgctcctcaaaacctatggactggggccgtattcgaccagcattaagaaggtcgagaaggagatcaaggaaatggccaagaaaatcaacgacctctgtgggataaaggagtctgatacagggctggctccacctagccagtgggatttggtttcagataagcagatgatgc

SEQ ID NO: 13163 - DNA, 358 bp, Zea mays
  unsure at all n locations
  Clone ID: LIB3150-108-P1-N1-H5
ttgatttcgaagtacccgntaccgccggcgcctgtggtctagccggcggggaagggcctctcactcangangacagccatggcgccggagccggaggatgatattatgaacgagaagaatccccgcccgctcgacgaggatgacatcgcgctcctcaaaacctatggactggggccgtattcgaccagcattaagaaggtcgagaaggagatcaaggaaatggccaagaaaatcaacgacctctgtgggataaaggagtctgatacagggctggctgcacctagccagtgggatttggtttcagataagcagatgatggcaagagaacaaccgttacaagtagcaagatgttcaaaga

SEQ ID NO: 13164 - DNA, 452 bp, Zea mays
  unsure at all n locations
  Clone ID: LIB3150-108-P2-K1-B2
cgaattcccgggcggccgccctttnttttttttttttttttttttttttttttttttttttttggaacaatacttttttcttttcatttcaattgttcattcaggtcattggtcacactgacactgccacccatggtgatgcgtgacacattattactcaatcatcgccgctaaatgactcaactagctagctagccagcggctatactacagcacatagtttcttcagtgggggacaccgccggcagcagcgtaggggcatggagtcggctgctgcaggccgcacatcgccgtcagttgctgcgctatctgcgccgccaacagccccgcgacctggccgttttgcggctgctgctgcaggatggactggaggaccaagccgaagatcgcctggtaccggtgctgcggctccacctgcctgagcttgtggcaacactgctgccgcaacgact

SEQ ID NO: 13165 - DNA, 232 bp, Zea mays
  Clone ID: LIB3150-108-P2-K1-D6
gcggccttattttttttatttctctatttttctctatttttttttttttttttttttttcttttttttgttgttgggttttttttttttttgtgggggggttttttttttttaaaaaaaaacccgctccaaattttcttttttcccccttaaaataaaggggcccaaaaattgcggtaaaaataaaaccctggtttgttaattacccccaaacccaacccgggttaaaaact

SEQ ID NO: 13166 - DNA, 212 bp, Zea mays
  unsure at all n locations
  Clone ID: LIB3150-108-P2-K1-E3
ttcccgngccgccgcccttttttttttttttttttttttttatactaaatatttatttttttttttttatttaataatttaattttggtttgttttttctaacaaggggtaggattcaacatcaatacactaattaaacaagaaaactttccaccaacaacaaattcaatacaacaaaagcacccaaaaaaccacaaagcactcaccaaccc

SEQ ID NO: 13167 - DNA, 445 bp, Zea mays
  unsure at all n locations
  Clone ID: LIB3150-108-P2-K1-E8
cccgccgtaccgtccgnattcccgggccgccgccctttttttttttttttttttttttttttttttttttttttttttttttttttttttttttttttgttttggttanttttttattgggtttgggggccccaaaggaacacacattactgaacaaagcttggaaggggcaaaaaaatttcagggagggaaatttatcaggcccccccccttcgggggaaaaaacttgggattgttaatgcccggcgggtttgcccaaattcaaggaatcccccggcttggttacgggttctaagaaaaaaaacccattcagtttggtttaaacaaaaaaagggtgcccttttaatttccccaccctttaaattcaattcataaaccctctgatcctccctaaataaatggatccccaagcctttcatcccttggcccccctttttggggactt

SEQ ID NO: 13168 - DNA, 400 bp, Zea mays
  unsure at all n locations
  Clone ID: LIB3150-108-P2-K1-F1
ttcccgngccgccccccttttttttttttttttttctttttctctttttttttttttattttttttttttttttttttatcattatttcttttattattttttttggggcaccctccatttttaaataacctttcattttttcatttactttgagaaacccccccccttggtatgttaaaaacccccaagaacgatccccccccccccaacaaaaacaaatcaactccccccggggaaaacccctttcccaagccccactatcccttaaacccaccactaaaaaattccaccccccccacctccccttaaaccctcccccctttaaggagaaccaaatagccttatatactnaaaacccaaatccccccacccccccccttttatagggtcaccaaaccc

SEQ ID NO: 13169 - DNA, 343 bp, Zea mays
  unsure at all n locations
  Clone ID: LIB3150-108-P2-K1-H11
cgggcggccgtcgaccttttttttttttttatttagtataaataggtattatgatcttcaaacaccaaaacaaccagaggggatatgcaatgattgggccggggaacaaccaaaatagcacaaaacatagtacagtgcantaatgaagcatgtaacaattcattaactatcgtgaccattgatacattacttgtatcaataaggttacaaacaaaaatatcacaggttgatgattatgacaaatgggtcttcgctgaaacgtaataccttacgccttgagctagccaaagaacctctgcttctcatcaggagtctggaagcgaccgagcccaaatttggacga

SEQ ID NO: 13170 - DNA, 329 bp, Zea mays
  Clone ID: LIB3150-108-P2-K1-H12
gcggccgcccttttttttttctttttttttgggaccaaccaaacacattcttataccaatcacaactgcagagctagttactattaaattcacgatgactacacactacatgtgccgcccccatagccacaatggactgtaatgcaaaaacacactacatcgattaaaaaacaaaaaatgttttacatccagttgttacaagccattggtgaaacccttgacgaaagagaaagagctattctcgatgagaaaccagagaacaccataacatgccttatcttgtcccatctggatggcatcatgctctgtcactgattagcgctgctctt

SEQ ID NO: 13171 - DNA, 295 bp, Zea mays
  Clone ID: LIB3150-108-P2-K1-H3
cggccgccctttttttttttttttttttttttttttttttttgaaaatttaattttttttaattttaaggacctttaaagtgggactttttcatccgcggcggggcacccttttaggttttagacaatcagaaaagaaaaatttattttcggaagcacttccggggaagaaacacaaactttctttgcatgctttaatcactctttgcatgctttcatcagttggttcatttacttggtgctgttcatgtggcggatcaggtcgaccactcgggtgctgtatccccactcgttgt

SEQ ID NO: 13172 - DNA, 503 bp, Zea mays
  unsure at all n locations
  Clone ID: LIB3150-108-P2-K1-H4
ccgcgccgggattcccggtgcgggcgcccttttttttttttttttggctgtaaatatagttgaaatcgacgatgtatataaagcttacagccgcaacagcatcttgcgttaaacacagatgaacttcttcacacggtaatcatgttcctttgatctttagccacaacgctaaaactctcaacttacaagttacaaacaacagctaaggctcatcctaaaacttacatgggtccacgctccagcaactcccatctgaatgtgggcgcggcataaaccctgggaaaggtgtggaggagtatgcccacgcagacacagaccacagcaactcccatcacagtcaacattgctggcctgtaaaggaaggtcctcgatgtagaattcggatacacccgtgcctgacggctgcagaggaggcaacctggcactgatgcagacattggcatgcagatctcgaggctaacatcgncaggcttaacaccatcagttattacagagcatatact

SEQ ID NO: 13173 - DNA, 223 bp, Zea mays
  unsure at all n locations
  Clone ID: LIB3150-108-P2-K1-H5
aacancctgaagaggtttttttcaaaagggagggggggaaattccccccaaaaggggaaccttttaccttcccaagggggaaaaaaggccaaaactttaaagaaccaaaaccacgccaatattaattacaaacctgcccccccccaattaaaatcaaatcccaagtgaccgtgttcggggcccaaaaccaaataaaaatggtccgtgaacccccccctgggcc

SEQ ID NO: 13174 - DNA, 504 bp, Zea mays
  Clone ID: LIB3150-109-P2-K1-A2
ccggaacggcaggcgcggccggcctgtccttttttttttttcacttgaacatttatgacgagaagattgttgcagtcacaatacaaattccctgggcattaagttataaacaaagcactgttacatgaggataagcaaatttcatagccaagagagtaagcgcagccaatgcagaccaatgttcaatttctttgtgagcatggaagcatgaacatggctacatcagttcttctcgtcttctgttttgtctgacttgtcttccttcttctcttgctctccctggctgtgcaatgatgccagcaaatctttaacagatggatcattgggatcaacaccaggaagcgaattaaggatagatgacacaaacgttctgtcttcaaacaccttactcatatcagtgtcactggacatgtttgcatcctggacagacatttgaagagccaacgctaagtcagggtcaactgcaccagcttctgccataacggagtcagtcacagctgcaga

SEQ ID NO: 13175 - DNA, 384 bp, Zea mays
  Clone ID: LIB3150-109-P2-K1-B1
cgccgcccttttttttttttttttttttttttttttttttttttttttttttttttttttttttttttttttttttgttttttttttttaataatttggtatttttttttttttttttttttttttttttttttttttttaaaaaaaaaaaaaaaaaatgaaattttttttttttggtgaaaaaaaaaaaaaaatttaagtccccaaaaaatttcttaattttggtttggggtttaaaaaaaaaaaaaatttaacttctcaaacattctcaacatgggttacaacagaaaattaaaaataaataatatacctttttttttttggtcctttttaaaaaaaaaaaacccaaagggaaaaccttttttttaaaaataatattctccc

SEQ ID NO: 13176 - DNA, 482 bp, Zea mays
  unsure at all n locations
  Clone ID: LIB3150-109-P2-K1-E3
ttcccgnngcgccgccctttttttttttttttttttttttttttttttttttttttttttttttttttttttttttttttttttttttttgtttttttttttttttttttttttttttttttttttttttttttaaaaaaaagccccccaaattttttggggggggggtccttccttttccccctttaaaaaatgcccccctttccggggaaaaaaattttctccaccatttgaaatttaaggttttccctttaaaaaatttaaaaaccccgggggcaaattttttttaaagaaaaaaaaataaaatctttttttttaaaaaaaattattttcttaaaaaaaaaaaggttttttttttttttaaaaaaatttaaattttttttttttttttaaaacctttttgtgggtaatttttgggggtttaaaaacaacttttttaaaaaaaggaggggtttgttttcccaccctttttttttgtgggg

SEQ ID NO: 13177 - DNA, 462 bp, Zea mays
  Clone ID: LIB3150-109-P2-K1-F11
ctcccgtgcccctcactgtttagtggcgactactgggcgacagtcgccgccgccgcccgctaggggccgtgcccctggtctccatcttcggcgcttcgcccaccagatatgagcagctggcaattcgattttgaggccattatttgataacccgggacaagtgcactggttacctgaccattttagctttttgagatggctacacagttgccatgcttcacacagctcagtccaccgtcttgtagttggataaaagatgtcgggaactgcaaggctacgcctgatagggtagccagaagtgcccgagctttgggccactgtcacttccggtgctgtgcaggcccccgtagtgcaaactctttcaagaagaaagactctttcgagaagaaagactcttttctcgaacttcatccggaggtatctctgctccgtggcgagaagagtgccgaggttgtgccaatg

SEQ ID NO: 13178 - DNA, 381 bp, Zea mays
  Clone ID: LIB3150-109-P2-K1-G5
cttcgttcattcgaccagcaccggaaccatagtgtcacgtacatacatattgtgggttccactcctaccacgtttagagccggtaaaaatccacccttgcaaaaatgaccttgcccgaagaaaaaaacatttttatttgctggcgcattagtgcagatgtaccactcaatcccccttgccaataccttacaaaattggatggggcagagaacgctctcttgaccgaagcatccatcctagcctgatcataggctactcacagggcttcgggtgctctatagaagatgggtctcgaaacctaatgctgaaacctgacctgcttatcttgccatgagatgacacttaaatgggggagctctccatcatggactccctttgggg

SEQ ID NO: 13179 - DNA, 487 bp, Zea mays
  Clone ID: LIB3150-109-P2-K1-H4
gcgccctttttttttttttttttttttttttttaagcatgaactttagtttacacttcctcttattttggccaattgtattcacaaggtatgacgctactgatgaaactgcacaaagtccaccgaattgacaggcgcccttgggtacatagcagtgagactggaaaggtaacaaatggaatacggatacgtagataaccacggagacccagcaatgctaaggtattgtttggtcactgcataaccgacgatgatgatcacaacgcctcgtgatgcctcgtgccttaacagcaaccagatgatctctgggcccggttgccacccaccacgtccacggtatctggcacatacagttcttcctctggctcattcttcagagcgttcttcacgatacactggaaggcgtcttccacgttcgttccgtccttagcagacgtcttaaagtacgggatgttccctttggaagcacaccatgcctttgccttttt

SEQ ID NO: 13180 - DNA, 466 bp, Zea mays
  Clone ID: LIB3150-109-P2-K1-H5
ggaccgggactgactgggccgggcggccttcctttttttttttttttttttagcatttaatgaagcaactgcgaagtgtttataactcatagcagatacaacaagagcacaagattcatgtcgttggccctgatggccacatacattcactccaccagaaaagttgcgtagagcccaaagaactgcttattctagaacaagtcatgactatcatcatagcaactaatctctactctccatctttcccttgttaccaacgtagctgtgaactagtctatttcctccatctgcacagaggcactgcaatgtgcaatctcaaatacctgaacatggcaacaaaaatatgaaacaaaaaaaggcatgctgtctagatgatcatctatcattcactccatcacagcaacaccgccagctgcctttatctttgctatgatcgcttccgcttcctcctttgtgagcgattgct

SEQ ID NO: 13181 - DNA, 341 bp, Zea mays
  Clone ID: LIB3150-110-P2-K1-A2
accgaaccggaggtgcgggcgcggtcgtccttttttttttgaataaataatgcatcagcttatacaatcatattcgaggcccaaaagtggcgcaccccaagtagcatcacaacagtgcatggcgtgtaactaaatcataatcgtcttgcataactgatacaatacagtacaaagcttaagcatcgtcaatacagaaacatgcatgggaacgtcccgaataagctatgaaataacagaacgcggccgattatcggccatgttctgccaaatgggaaccgagcttcaaaaataaggtcttcgcgggcggcggaatctggggaatctcccataaccataaggac

SEQ ID NO: 13182 - DNA, 387 bp, Zea mays
  Clone ID: LIB3150-110-P2-K1-A3
cgggcggctcgtccttttttttttttttttttttttttttttttttttttttttttttttttttttttttttttttttttttgtttttttttttgggagggggggggccacaaaattttatttgcaaaaaaaaaccaaacccccctgaaaatttgggcttacaaaaaaatctaaaagcttcagcgggggcaataatggaagataaccttccaatcaaaaaaaacccggtttttgatggggggttcccatgacttccccccctaaaccgaccacttttagacattacctcctggatgaaactggtgtgggcttaaaagggacatgggaaagcaccgcttgggggcccggtttttaactctaatttataaataacggggacgggttctt

SEQ ID NO: 13183 - DNA, 208 bp, Zea mays
  Clone ID: LIB3150-110-P2-K1-A4
accggaactgaaggggcggctcggcctcggccttttttttttttttttttactgaataatttaatcttttttttaacatttatggtttcttttttccagggtgggtctctttaaatgaaggggggggcccctaaatagaacatacacatttgcatttaccaagtgtacaaattgttgatggtttattaaaccaaaccattgcttttcc

SEQ ID NO: 13184 - DNA, 255 bp, Zea mays
  unsure at all n locations
  Clone ID: LIB3150-110-P2-K1-A7
cggaatccccggagcgggcgcggtcgcccttttattttttttttttttttttttaattttttttgcatttcaaataggganctaaagagaagctgaagaaaaattacacttctttggttgggtgaatgaagcctgaaagagagagggagatgacggggggaaaaacgaaaatttgatccaacaaaacaatgccctgaaaagaccaaaaaaaagagcgaaaattaaaaaaaaattaaccaaggagaaacaggattc

SEQ ID NO: 13185 - DNA, 434 bp, Zea mays
  Clone ID: LIB3150-110-P2-K1-A9
tttttttttttttttttttaaaaaaaaaaaaaattttttttttttttttttaataatataatttttttttaaaataaaaaaaaaattggtggttatttaaatttaaatattaatttaaaaaaaaaaaaaatttttaaaaaaaatattttaaaaaaaaaaaaatttcacaaaaaaaaaaaaaaaaaataatccccccccaacaattcaaaatattaaataaatcaatactacctaatctaaacactaaaaaaaaaaaaattaaaactcaaaaaaaaaaaaaaaaataattaaaaaaaataaaaaaaaaaaaatataaaaaaaactaataaaaaaaaaaaaaaaaaaaaatattttattataattaataaaaaacacaaaaacaaaaaatttatataaaataaaataataaaaaaaaagaaaaacaaatatataat

SEQ ID NO: 13186 - DNA, 328 bp, Zea mays
  Clone ID: LIB3150-110-P2-K1-B4
accggattcccgagccgccgccctttttttttttttttttttttttttttttttttttttttttttttttttttttttggattttatttcattggagttatattgcatgagagggggggccaaacccaaaacaaagccccgccaacataaaacaaacaaatggaaacccacgtggcaaaaacctgaaaaaataacaaccggcaacctttcaccctggagccaataattcagaaaattaaattaccggttcccccaaaacaagaaccctacagaataaacgcaaaaaaaatattataaccaaccaacttaacacaaaaaccgagggaaa

SEQ ID NO: 13187 - DNA, 439 bp, Zea mays
  unsure at all n locations
  Clone ID: LIB3150-110-P2-K1-C5
ggcggccgttttttttttttttttaataacaaagaaaaatttaataattcatttcagnaaaataacaaaagggaaatttacggacacttggaagaagaaggagaacacatccaatcatacttctaatacaaccttattattaccatgaaccagaatacgcccgccccttctctacaaaatgcaataacaatatatagtcgcagtaatgtaaatgaatcgaggtgacaaatacacagtgcatgccttcaccatgccggaaattcacacgttttcagtttgactcaccaccaccggctgtgcaacaactgcaataagagatttttcacatgctcctaccacagatgattagattaagcagctgccatcggctcagttgctgctggtggagctgcctgtggcactggtgccttcacaggaaccttttacatgttaaggacac

SEQ ID NO: 13188 - DNA, 137 bp, Zea mays
  Clone ID: LIB3150-110-P2-K1-E7
gttaaaattattttttttggggggtattaattttaaacaaaaattacataaattaaaaaccttaacactaaaaatttaaaagatacaaaaaaaaattttatcagatcaaaaaaaaattattataacaaaaaagagac

SEQ ID NO: 13189 - DNA, 475 bp, Zea mays
  Clone ID: LIB3150-110-P2-K1-F7
gccgcccttttttttttttttttttttcaagttttaacccaacatttttaaccacctaccatgaattaacttgttcggttgttttgaacaagatgggggggtgaatagctgttatgtctctgaataacaaaaacagactggaacatggtaaacaaaaggatagtgaaacccacacgacccttgtctgtttgggcttcacatgcgttggagtgatgcaatctcctcttatagactgcatccagcctgacggatatatatccgcaaaggaatacactgtttacattgatgtgatggggtgcaaaagctcgatagtgtgcaaaagcttgatcgtgtgcaaaagctctcacaatcgaagtgcattcaggcccttcattagtgcatcagtgtgctcgggtttcccaaccgagatacgaatatagcctttcagttccttcttgtcatagtgccggatcataactcccatcttcgcaaggtc

SEQ ID NO: 13190 - DNA, 436 bp, Zea mays
  Clone ID: LIB3150-110-P2-K1-F8
ttcccgagcggccgccctttttttttttttttttttttttttttttttttttttttttttttttttttttttttttttttttttgtggttttttttttttttttggggggtttttttttttggcggggaaattttcccaaaaaaaaatgggggaaaaaaaaaaaggggggtccggaaaaacagttcccttttttgacccaaaaatttttcaaacaattcccccccttggaaaagggggaaaaaaaaaaaagggggcctccccccaaaaggggtcctgaaaaaaaaaaacatcttggggggggcccagggcaaattttgaaaaaacccaaacaaaggggtttggggaaatctcatttttaaccccaaaaggggccattttatcacggggggggtttgtgcacctaaaaaaaaacttctttggggggggtttttggag

SEQ ID NO: 13191 - DNA, 343 bp, Zea mays
  Clone ID: LIB3150-110-P2-K1-G3
ttcccggagcgccgcccttttttttttttttttttttttttttttttttatttttttttttttttttttatttgtatgaccaactttctcgtaattaacatcaaagtggcgggtttacatcaaattttttgataaaaaacaggcacatacgaagcaaggggttggaaaaaccaaaaaaaactttaaccagcaaatcagattcccaaaaaaaaaaattaagcgtaaattccataccggctccaaaaaaggaaaaaattcttaatggccgggcaaacattgccataaaaatttattgggtcacccaacaactttgggggtgtcaaacaaaaccttaaagttggcc

SEQ ID NO: 13192 - DNA, 480 bp, Zea mays
  Clone ID: LIB3150-110-P2-K1-G7
ttttttttttttttttttttttaaataataatatttttttttttttttttttttttttttaaatttttttgtatttttaattaaattggggggttttaaaaaaaattttattttaataaatataaaaataaaaaaaaaataaatttaatgataaaaaaaaaataaaaaaaaaaaaaaaaaaacttaataaaaaaataaaaaaaaataaacttgttaaaacaaaaaaaaaagaaaaaaaaaaacaaaaaaaaaattaaaaataaaaaaaaaaaacaatagtgtaaaaacaatataaaacaaaaataaaaaaaaaaaaaataatatatttaaagaatagtaattatactacaaaaaacaataaaaaaaaaatataaaacctcaataaaaaaaaaaataaaaaaaaaaattgtataatttaaatttataaataaaaatacaaaataataaaataaataaaaaaaaaaaaaaaaaatacataat

SEQ ID NO: 13193 - DNA, 298 bp, Zea mays
  unsure at all n locations
  Clone ID: LIB3150-110-P2-K1-H12
accgtaccgaaccggagtgtgcggcgcggctcgccctttntttttttttttagtaacactgattaattgattcaaatgtgaaatccaagttctgaacctatgaattgtacaaattgggcaataataatgcaccagacatcaagaggaaactaaataacgtaagtagaatgttataccacaataattcagaaaggtttagaacactaagctgagcagcaaattaagaacctgcttctttacgtcgccttgacggacctacgacttcgactctggtactctatgcttcttgatcttggat

SEQ ID NO: 13194 - DNA, 340 bp, Zea mays
  Clone ID: LIB3150-110-P2-K1-H6
gcctgcacgtaccggtaccggaatggccgccgcgccgtccttttttttttttttagtaacactggttaatgggccggcctgcattatctctgaaccagaaatcagaaatacagcgcacaacccaaaaccatgacatcgctcggctttgttgccattcatcagaaaccacccctaggttttaaaacaggtaggaaaccaatagaattttgacgtgcatcacctggtgaatgtggggggatccgggtattattattattattatcataaataggcgatcttagtccaatgccctggatctcaatggaggctgtgacaaaagagcagacatgcttatacattg

SEQ ID NO: 13195 - DNA, 345 bp, Zea mays
  Clone ID: LIB3150-110-P2-K1-H7
accttttttttttttttttttttttttttttttttttttttttttttttttttttttttttatttatttttttgaattttttttaaatttttttgttataaaaatttttttttttttaaaaaattaataaattttttttttttttaaaataattttttaaaaaaaaaaaccgggggaaaaataaaaaaaaaaaaattttaaaaacccccttttgccaagaaaaaattttataaaagaacaaaaaaaaaaaaaatacttgcccatttttcaaaaaaaaaaaaagaaaaaaaacctctctgaaaaaaaaaaaattaacttaaaaaaaaaataaaaattgcccagatt

SEQ ID NO: 13196 - DNA, 312 bp, Zea mays
  unsure at all n locations
  Clone ID: LIB3150-111-P2-K1-A5
aaaaaaaactaaattaaccaantttggtatcaacaaggtcccttaccaccattggccattatgtgcattaccatcacaagcacacaagcactaagggcctgacagtcgcccaagtccggatcaacggatgcagagtcaacatatgcacaggcgaatgggcaccctggacacacttaccaaccaggtgtgaaggcttcactaccctaattaggtccaggcctgtcgacagctacgataggtacatcatattctatcggaaaattcggcaaagacaaattgtctcaatctaaatcatgaggggaagactggata

SEQ ID NO: 13197 - DNA, 333 bp, Zea mays
  unsure at all n locations
  Clone ID: LIB3150-111-P2-K1-B1
anncaataaaaatataaaaaaaggtttcccaccccaaaaaaaaaaaaaaatggggggattttttaaaaaattttttaccctcttaaaaaaaaaaaaattttttagacaccangacaaataaaaatataaataaaaatataaaaagacaagaaaaataaaaaaaaaattaataatcaaataaataaaataaataaaattaaaaaataaaataaatatagtaaaaaaatataataaaaaaaaaaaaaataaataaaaaataatcaaataaaaaaataaaaaaaaacaacaaaaataaaacaaacatataaataaaatattaataaaaacataata

SEQ ID NO: 13198 - DNA, 272 bp, Zea mays
  unsure at all n locations
  Clone ID: LIB3150-111-P2-K1-B11
ccgtccggattcccgggcgccgccttttttttttttttttttttaattttgccaaatggtanatttatacgtcattcatgacaggaaaacatcatggactgtggcagggctattgcctctggacttatttgctcaaaatttcaggctaccaggatcgaaaaaacaaaggccccgcagcagtgacaaaggctgcagaatatcttaggaagacaatcaaaattntactattgagccaaagggtaacggcacgctgatcctaaaccgaattcctc

SEQ ID NO: 13199 - DNA, 54 bp, Zea mays
  unsure at all n locations
  Clone ID: LIB3150-111-P2-K1-C8
ccgcccttttttttaatgggaaaataaaaaaaatttaaaaacacntttcacttc

SEQ ID NO: 13200 - DNA, 224 bp, Zea mays
  Clone ID: LIB3150-111-P2-K1-D1
aagtgtcctgtagtctgagacaaggcatggcacaagataacagcttcgcctgcttcttctttagctacctcggattctcctcccgacatggcaaaaattgctcgcgaagttgaccctctaccggacgattctacccccgagttcaaaatgtatatggttggagctgagaatcggaacatgccaaaatgccacgctctgaacatgaccacacaccttgttcccat

SEQ ID NO: 13201 - DNA, 181 bp, Zea mays
  unsure at all n locations
  Clone ID: LIB3150-111-P2-K1-E12
ccgcctttttttttttttttaaaaaaaaaaaaactaaaaaannnnttttnatttatacaaaaaaaaaaaaaaggggggaccttgaaaagggtttttttcccccccaacaccccgaaaaaggaaacgaaaaaaacaaggaaatgaaaacaaaaaacaaaatctaccacaaaaccacacaact

SEQ ID NO: 13202 - DNA, 140 bp, Zea mays
  unsure at all n locations
  Clone ID: LIB3150-111-P2-K1-E2
cttctcctcctccgacggcgacgacgtgntccattccgtccactgcctcgacgacgcaccccaccgacgagggcaccccgcgccccccccacggagctcccagccccccggactccgataagccggtcgtcatgtttggc

SEQ ID NO: 13203 - DNA, 136 bp, Zea mays
  Clone ID: LIB3150-111-P2-K1-E6
gggaaaaagggacgacatcaaatatttcaaaataaaccggacaacaaagggcacaatctggacagaggtacaatactgcgactgtaaacacaaggtgactagcgaggaacacggaggcacaatttgttaaacctga

SEQ ID NO: 13204 - DNA, 305 bp, Zea mays
  unsure at all n locations
  Clone ID: LIB3150-111-P2-K1-F6
aaaaaaaaattaaaacatattaaattttnnnnnanaaaaaaaaaaagggggggattttaaaaaattttttttcctaaaaaaaaaataaaaaagccaaaagggtaacaaataacttttacaaaattttttttttgcaaaaggggaaataccaaaaaggccccaaaaaaatagaaaaaagggcccaggctaacaaagcttaaaaggtcacacaaaaacagtaacgaccaaaaaaaaaatttgtaaagaaaaaaaccaggtattgttaaaacaggcccaagaacgcataatttttttttggcaaaaac

SEQ ID NO: 13205 - DNA, 168 bp, Zea mays
  unsure at all n locations
  Clone ID: LIB3150-111-P2-K1-G10
gccctttttttttttttttttcataacaaattataaaaacagnttgccatatntnaaananannnanaaggggggnntttttaaaaaattttacctttttttataaaaaaatggtctccacatataaaaaatccctaaaggaaaaataaaacgccaattggtgcaatt

SEQ ID NO: 13206 - DNA, 54 bp, Zea mays
  unsure at all n locations
  Clone ID: LIB3150-111-P2-K1-G4
tttttttttttttttttttaaaaaaaaaaaaaaaancaaaatttcattttnnag

SEQ ID NO: 13207 - DNA, 415 bp, Zea mays
  Clone ID: LIB3150-111-P2-K1-G7
gggcggccgcccttattaaaaattaaaaaaaaaaaattaaaaaaacttacaatccccgacccaaaacaaagggggaatttaaaaaaattttttcccctcaaaaaccaaaaaaaaaaaaagaaaaaaaataaaaaaaaaaataataataaaaaacaacaaaacaaaacataataaacacaataaaaacaaaaataaaaaaaaaaaaaaaaaaacaaaaaaaaaaaaaaaaaaaaataaacactaatacaaaataaaaaaacaacaaaaaaaaaaaatgaaaaataaaaaaaaaaaacaaaaacaaatacaaatcaaaaaaaaaacaaaaacaaaacaaaacaaaaaatataaaaaaacaaataaatacaccaaaaacaaaaataaaaaaaaaaacacaaaaaaacaaaaacaaaaa

SEQ ID NO: 13208 - DNA, 168 bp, Zea mays
  Clone ID: LIB3150-111-P2-K1-G8
aaaaaaagaaaagaacacaaacaacgtaaaaaaaaaaaaaaaaaaaaaaaaaaaataaatagaaaaaataaacaaacaacacagaaaaaaaaaaaacacaaacaaaaaaaaaaaataaaaaaaaagacaaaaaaaaaaaaaaaaaaaaaaaaaaaaaaaacacaacac

SEQ ID NO: 13209 - DNA, 397 bp, Zea mays
  unsure at all n locations
  Clone ID: LIB3150-111-P2-K1-H1
tttttttttttttttttttataacagatttttaaaaaatnnttaatataacgcaaaaaaaacaaaaaagggggggttttttggggtttttttgtttttttttactcagggtagctttgtttcgaaaaaccccaccacgaattttaaaaaactttaaaaaaaaaacttattgtaagggggggggccccacaaaaggccccagcggccggtgtaactcaaaaaaaaaaaaccttgtccccaattgaaatgttgtgaaaaaaaaaagccccaaaaccccggggggggatgcgaaaaatagccggggaggacaaataaaaaaattttcacaacccctgaaaacccactgggttaaccaggaaaaggggggtttcaatggggccccaaaaaaaagggtgggc

SEQ ID NO: 13210 - DNA, 306 bp, Zea mays
  unsure at all n locations
  Clone ID: LIB3150-111-P2-K1-H3
ttnnaggcagcaccaagaagcaccttttttttccttaggatttaacttanaatgaagcctgacgggggtaacagcacccatcgatccgcagtccatgctggttgatgcatgggtctgctggagccgaggatgaacacagcactaacaactgacacagagcgaccttcaatcaaaaacacagatgggcaacaacaaacacgagacgaacgaagataaacactctggactagggtaaacaacacggtagcgaacaggataacttggccgcgcgggccccaccgctcagtttcttcaggtcccgtcgga

SEQ ID NO: 13211 - DNA, 219 bp, Zea mays
  unsure at all n locations
  Clone ID: LIB3150-111-P2-K1-H6
ttttttttattttgaaaaaaaaaaatttaaaacccacggtggantttttnnnaaaaaaaaaaaaagggggaaatttaaaagaaattttttcccttcccaccccccgaangcaagacaaaaagggaaaaacccggcggaacccaacctaaaaagccggcaaaaaaaaacaaaaaccgaagggaaaagagaagaaaaaaaaaataagacgcaccctcccac

SEQ ID NO: 13212 - DNA, 284 bp, Zea mays
  Clone ID: LIB3150-112-P2-K1-A11
cgccgcacggccggtccgaattccgggcggccgcctttttttttttgaagaatttaaaccaacactttttgtcaatgtttcagaaaagccggaagacaatagagtttttgaacattactccgaacaacacacactacataaagggatcgagtctccgttacacgaaatcctggaggacgaatgcagctatgcacgcaggcccctggatcttttattttatgagctaaaaaggcttcgagccaaggttaccatgggactctacttgttctgcagcaaggacaccg

SEQ ID NO: 13213 - DNA, 366 bp, Zea mays
  Clone ID: LIB3150-112-P2-K1-A2
cgcggtcgcccttttttttttttgaaaacaaacggtaacttatttattttttgcgacacgatcttcaccagaaaaggttacaagagacatgtagagatttattctatggagacagcaaaaaccccagtcgatatatcagataggatgattggtgataccaaagaaggaagcaaacacaaacacacaaagtttcagaagcacagctactgcttgctccctcaggcgaccttgacctcgatggtcttgggcttcttgggctccggcgggggcagcttctcgacggtcaccgtgagcacgccgtccctgcacacggcggcgaccttgtcgacgtcggcgttgtccggcagcacgaacttgcgcatgaac

SEQ ID NO: 13214 - DNA, 267 bp, Zea mays
  Clone ID: LIB3150-112-P2-K1-A6
ccgcccttctttttttttttttttttttttttttttatgagaatcctcttcatatcaaattttcacataaactggaacaggttgcttggaacaattaccaagagttcttcagaggcacagacaggacagcaaaattaactacggcaacaggaccaaaccaccacttctgagatccagatgacacacacaactctagtcgaacagggagaatcccatgtcggcggcgctcttttccttctcctcttccttcttttcctccttgggagc

SEQ ID NO: 13215 - DNA, 139 bp, Zea mays
  unsure at all n locations
  Clone ID: LIB3150-112-P2-K1-A8
gcggccgccgtgcctttcgccaggtttctggcttaagcagactctgangtgnttcccacaaaaggannncagcagggcggctgccttagatatacgctttttatagcccaacaccaggggtcagattagaataaaaact

SEQ ID NO: 13216 - DNA, 212 bp, Zea mays
  unsure at all n locations
  Clone ID: LIB3150-112-P2-K1-A9
cccgagcggccgccctttttttttttttttttttttttaaaatanaatttatntttattttaaaaaaannnnnananaggtagggttaaaaaaaaaccttttcgaatgattaaaggaaaaanaaaaaaagattcttncaccccggcaacagtcaaactcactttccgggagcaagaacgaaaacttttaataaactagcattgcaacaccct

SEQ ID NO: 13217 - DNA, 269 bp, Zea mays
  unsure at all n locations
  Clone ID: LIB3150-112-P2-K1-B2
ccgcccttttttttttttttnntttanaatanttaaaaaaaaagtttacttcttccaacaaagacnncaacaaagaaaggttatatccacaaactgtcccatccttcccaaccaanaaacccttacaacccataaaaaaaaccaaccctcatgataaaacgtacaacacacggcccggtaatgcaaaacactacactaatagcccagtacttttttcaaacacccctacaccccccgaagaaacaaattccccaaaaaaaaccacaccc

SEQ ID NO: 13218 - DNA, 459 bp, Zea mays
  Clone ID: LIB3150-112-P2-K1-B7
cgccgcacgtaccgtccgtattcccgagcggccgccctttttttttttttttttttttttttagtaccaccttttctatacatagtagcgccaggacgaaatataggatcgtccaaaaacatatccttaacaagagtttaattcaataaaacctcggtgccagaacctagcagacttcacaaaagagcatacttagaacaccctgtatggcttccccatggtgctcttgacgtagaggcatctcacattctgccagttcttcttcagaagggaaacaaggaagttcacgctcatctggatgttctgctggatctgcttctcctccatcgccaagttgccgacggcgacgcccatgcaaaggaccttcttgagctggaacttgacggttgccttagtctcgttcaccttggattcgagggattcctggagagtaaccagggtcgggaacttggctgcctt

SEQ ID NO: 13219 - DNA, 343 bp, Zea mays
  unsure at all n locations
  Clone ID: LIB3150-112-P2-K1-B9
ccgccctttttttttttttttttttttttttttttaaattttaattttttttnnnnnnntattntttataggagggtttttttggaaaacatttgtacctttcctacagggaaaaaacaacaagccccggaaatttccatgcacaatattaaaaaacattatttntttggataaaaaaaaaaaccactgtttttccaggcaccaaagtccaaacattaacatcccggtatttattgaataaaaaactaaacctggggcatggtaaccgaacctataaaaaagaaacaagcttaacaaaacagcagggtgataaagaaaaccgcccaattggttcagcgggatt

SEQ ID NO: 13220 - DNA, 444 bp, Zea mays
  unsure at all n locations
  Clone ID: LIB3150-112-P2-K1-C6
tcccgggcggcgcgcgcctgttcttttttttttttttttaattnatttgaaagcagtctcattatttggnnnannaaagaaggcancagccggctttttcaaaagctattttagctcaaactcatcaacaagccttcataaactaccgaatccaaaaccgatagaactctccaaaaggctacataaagaataacccgtatgataccagggttgctgttcctaaactcgttaatcgccaccactgaaaaaagtggggattatgatccataccatgaaatggtacctaatgacccaatggagtctggccggatgaagatgaagtcatgatgttcagagtttccgtcacaaaagacatggctctcagcgccgctttaagaacatcctgcgagcacccaagctttacaatcctttttaccttttacaaatattcctgcaaccttttta

SEQ ID NO: 13221 - DNA, 302 bp, Zea mays
  unsure at all n locations
  Clone ID: LIB3150-112-P2-K1-C8
tcccgagcagccgccctttttttttttttttttttacnaaggtcagaaaaaactgcnnctcccagaacaaaaaagancagggggggggtcataggaaggttttttgttccccaccaccccaaataaacggaacacatgcccgaacaactactacccataacaaaacatgtacacacagggcaactacgtacaagaacgacaccagcaataaattgagtaggagcgtaacgtactaagaagaacaacaacacattaaatcccataggtggcacaaccagacaaatggtctataacgagctagg

SEQ ID NO: 13222 - DNA, 346 bp, Zea mays
  unsure at all n locations
  Clone ID: LIB3150-112-P2-K1-D12
cgtccgtattcccgggcagccgcccttttttttttttttttttttatttantttanattttttagaattccgcaagaacnnccttcatcaggggacttcttcaggggccttttggcttaaagcaatacaagtccatcacagtttcaagtcacatgcactgcttgataaaaataagtcaccgaagaaacagatggtacaagcatcgtgccatcgcaaatcttatactgggacaagaacacaggctccaatcttgttggctcataatgtaaacgcttcttaccacatgatgggagttgagcccatattggaaaaactagtaagggcattattccttggtttgcccttt

SEQ ID NO: 13223 - DNA, 380 bp, Zea mays
  unsure at all n locations
  Clone ID: LIB3150-112-P2-K1-D5
ccgccctttttttttttttttttttttttttaataaaaaaaaaannattttattattttttaaatttttttttgggaggattttttaaagatttttttttttaactcaaaaatataatggggggntatttagaagggaaaaacacccccccccaaactaaaatacccaaaaaaacaggggggggcccaacttacccaaccaaaaaagccccccgggggggagttatacaagggggcccaccttaaaaaaacccaacccgacggggtaatgccgcccccaaccaaccccggaggggcgcgccccccccaatataaaaaaaaaaacccaccctaaatccccaacttttggcacccccccaacaagaaaaaagacgccctggg

SEQ ID NO: 13224 - DNA, 189 bp, Zea mays
  unsure at all n locations
  Clone ID: LIB3150-112-P2-K1-E1
ccgccctttttttttttttttatatgtaatgattggggcatnatacaatccattattgcacaaaacatanacactagagggctgtatcaaggaactatccattcaagaccggaccatgctcctaaaccatccggctacaaaacttggttcagcaaggttacaaacaaaagtatcacaatttgatgattt

SEQ ID NO: 13225 - DNA, 216 bp, Zea mays
  unsure at all n locations
  Clone ID: LIB3150-112-P2-K1-E3
ccgcccttttttttttttttttagccatataatgagttcttaatacctcaattacacgccacannaagntcaacgggggggttttctgaaaggtttttataagcaacaaaaaaccgcgagcacanaagcggggtgagcaaaaactagagcgaaaaggagcaataggcgggaggaccaccatcagacccccgcgaagcgcctagacgaactcctgga

SEQ ID NO: 13226 - DNA, 464 bp, Zea mays
  unsure at all n locations
  Clone ID: LIB3150-112-P2-K1-E4
tcccggtgcgccgcccttttttttttttttttttttttttttttttttttttttttttttttttttttnnnnnttttttttttgggttgtttttttaaaccagcccttttaaaagggccattcatactttgcacgggtgctaaaattacaacgcttttaaaattcaaatacatacaagggggacagtccaagccaaattttttacttttagtttttccggccccgcacaacaaaccaataatgtttgacaacccattttacaaaccaggtgttacaacaaacacagggggctcgcacatggattggggccccaacatacaaaggggggggcctttccccaagaagactttagggccgatggaaacaaacaaacgttttatgcaaatctgccacacattttttgggaattgggggggacattttttgggactaggtaacccccaggaatttttgaaaccctaaaa

SEQ ID NO: 13227 - DNA, 273 bp, Zea mays
  Clone ID: LIB3150-112-P2-K1-E5
ataaacttcaaacagctgaggtttaaaaccctccaaccaacaaggaggaatggtgtgggggggtgtttaattctttccacccaacaaagacaaagatacgggggtaacatagaggtctctcacaagatatcactaacatagctggacaaaaaaaatagatggctcgcggtgcttgaaaaaggttcattgatagcattgcagaacatcatcacttcagcagcaccaatggtagttccattggaaggtttagctttaagcgaatgggtactcgat

SEQ ID NO: 13228 - DNA, 90 bp, Zea mays
  Clone ID: LIB3150-112-P2-K1-E8
aaaaagtttttaagccacataaaacccccagcacataatcaatgatagcaaaaaccagaacaataaggaagaataagccgcaggaccacc

SEQ ID NO: 13229 - DNA, 458 bp, Zea mays
  unsure at all n locations
  Clone ID: LIB3150-112-P2-K1-F12
accgtccggattcccgtgcggccgcccttttttttttttttttgtgcaccatggttgcctttatctttaacaaaatgtggntacaataaacagacatgctgccactcagaagtcagaaggccgctgaggttgttctctgaaacatcagactaccgagagttcctagcttcacattcttcttgggccaaaaagtctaactcatttcaacagaaacattttctcctagaggctaagatgcctactatcggaactgccagacaaacggactctcgctataacctctaccaatctaccatcatcactaagccactgcagaagtgaaacatgcaaaaccatacgtcgtcagacaacagactgccacttcaatctctatgtcatcattcgtcgctgtagaagtgaacgtgccaacaccatttcaccagtcgtcatcagaaagcttgtcgctttaagctgtccat

SEQ ID NO: 13230 - DNA, 233 bp, Zea mays
  Clone ID: LIB3150-112-P2-K1-F5
gcaggagcgggcggcgccgttttttttttttttttttttactgtgaataggagtttaactctttacccgggaaaaagaaagaccgaggagtgttttacgatttcaattctcttctttcacccgtggtagggtttagacaatctaattagaaaaatttactctcggaagaacttccggggaaaaaacacaactcttttttgaatgcaactcatcactctttgcatgcattcatc

SEQ ID NO: 13231 - DNA, 409 bp, Zea mays
  Clone ID: LIB3150-112-P2-K1-F9
gcacgtaccgtccgtattcccgagcggccgcccttttttttttttttttttcatcacgaatctgaacctttctctgataatatccaacaatatcccaatagtgggcctacagattagccatccagctgactcgtttgcggactatttagtcatacaacatggttcaacacaagctcacaaaggcacaagcacctcgaagggtacagctctaggagcatgagaagacagatccaatgtcaattggggccatacttatggccaggaaactacttagggccaggaaactacataacctactcagagttttcacatgactcaattcctcggagcgcaactggccaggtgagccttgaaattctccagctctgtaagaacttcattctctgggcggtagatcaaatcactcatt

SEQ ID NO: 13232 - DNA, 352 bp, Zea mays
  unsure at all n locations
  Clone ID: LIB3150-112-P2-K1-G12
tcccgagcggccgcccttttttttttttttttttgcattagacataagtttcgattgctttcaatnntagccgctactgataggagacaaaggcacaccctctagtggcgctcgacgttgacgctacccaaacaacagggcacgccgcagcagagcttaacagtacacaataacagtaacaaccgcatacaaaacttcgggatggagtgacaagtcaggtattgcaaaagcagatacaggattaacgacaggttgcatcattttttgttggcagctgccttggtaaccttggcgccggtcggggccttcttcttcacactcttgaagactccaacagcaactgtctgtctta

SEQ ID NO: 13233 - DNA, 231 bp, Zea mays
  unsure at all n locations
  Clone ID: LIB3150-112-P2-K1-G7
tccagagcagccgccctttttttttttttttttttaaaaaaaaaaaaaatccnatccnttttgaagggaaaaangaaaagaaggggagtttacgaaagttattttgcccccttcaccccccaaaccnganaccctaacaaactcatgcctcataacacctaatgtaaacaactctaatacttatccccgactagccagccaaacaatatttcaagctacccaccaaaccct

SEQ ID NO: 13234 - DNA, 163 bp, Zea mays
  unsure at all n locations
  Clone ID: LIB3150-112-P2-K1-H3
aaaaaaaaaaaaaaaattccctcnnttcttnnanaannnnanaaaaaaggggggtttttaagaaattttttcaccccaaaaacccccccanaaaagcccccccccaaccgaataaccccgccaacacacctctcaaaaaacccacaaaataaacccccaccac

SEQ ID NO: 13235 - DNA, 262 bp, Zea mays
  Clone ID: LIB3150-112-P2-K1-H4
agaagaagtcaaaacttcaattatactacggatgtagccttgcagggacaccatagtattcgaatcatcgttttacccgatacaaacaaacagattttgactttctataccatagtatcatccaataccatagcattgcttcaaaaccggaaaaatactaagattccaaacagggcctaacagttctagaacgacagacggccaccagcaacttcttatcatcatgcttcgggatggaacatcagttcagctcgccgtcaca

SEQ ID NO: 13236 - DNA, 216 bp, Zea mays
  unsure at all n locations
  Clone ID: LIB3150-112-P2-K1-H6
ccgcccttttttttttttttttttttttttaattanaataaattttattttttttgagagggaaccgacnagaggaaaagtttcacggcgactcttatacctgacaaaacatgagccattaatgctcaaccaaccactagggtacacccaacatagtttcagacattccgatggaaaaaaatttattcttggaagcacttttcttcgggggggaag

SEQ ID NO: 13237 - DNA, 303 bp, Zea mays
  unsure at all n locations
  Clone ID: LIB3150-112-P2-K1-H9
ccgtccgtattcccgggcagccgccctttttttttttttttttttggcatcatatcatatttattccattcatgcgagggnaagagncataggggagttcattgcaaaatattttttttgtctcataccacaaaatgatgtagctattgcgtctctgatatggtagcaaaaaatagcaatactattgcccatagcattgaaatgcaccaccacattctgtgaccgccagcgctcatggtgacttgctttcagtgggggagccaccgcggtcagcatcatcagcatcgtcatcagcagaatcat

SEQ ID NO: 13238 - DNA, 283 bp, Zea mays
  unsure at all n locations
  Clone ID: LIB3150-113-P2-K1-A1
tttaaaaaaaaatnataaatataaaaataaaaaaattaataaaaaaataaaaaaataaaataagtaagaaaaaaataaaaaaaaaaaaaaaaaagaaaaagggaaagagaaagaaaaaaaaaaagaaaagaaaaaaaaaaaaaaaaagaaaaaaaaagagagagaaaaaaaagagaaaaagagagaaaaagagaaaaaaaaaaaaaaaaaagaagagaaaaaaaaaaaaaaaaaaaaaaaaaaaaaagaggaaaataaaaaaaaaaataaaagataaagaaaa

SEQ ID NO: 13239 - DNA, 232 bp, Zea mays
  Clone ID: LIB3150-113-P2-K1-A5
aaaatataaaaaaaaaaaaaaaatataaaaaaaaaaaaaaaaataaaaaaaaaaaaaaaaaaaaaaaaaaaaaaaaaaaaaaaaaaaaaaaaaaaaaaaaaaaaaaaaaaaaaaaaaaaaaaaaaaaaaaaaaaaaaaaaataaaaaaaaaaaaaaaaaaaaatataaaaaataaaaaaaaaaaaaaaaaaaaaaaaaaaaaaaaaaaaaaaaaaaaaaaaaaaaaaaaaaa

SEQ ID NO: 13240 - DNA, 201 bp, Zea mays
  unsure at all n locations
  Clone ID: LIB3150-113-P2-K1-A6
gggcgccgccgagcggcgtgggcagcgtcatccatggtgcacgtgaactnctancgcttctatggtaagactttcaagaagccaaggcggccttatgagaaggagcgccttgatgctgagttgaaattagtgggtgaatatggcctgaggtgcaagcgttagctgttactagttcattatgtctttatttttattttttaa

SEQ ID NO: 13241 - DNA, 291 bp, Zea mays
  unsure at all n locations
  Clone ID: LIB3150-113-P2-K1-A7
aaaannanatatttttatattattnnnncaaanaanaaaaatgggaaaatgttaaaatttttattaaaattttttacaaccaaaaaaacaaaannnaaaaaaaattaaataaaatattaaaaaaatataaaaaaaatatataaaaatatataaatattatatataaaaaaaatattaaaaataattataaaataatattaataataaatttatataaaatatttaaataattatataaaaaaaaaataataataaaataattaaaaaataaatataataattaatagataa

SEQ ID NO: 13242 - DNA, 318 bp, Zea mays
  unsure at all n locations
  Clone ID: LIB3150-113-P2-K1-A8
ccannacaagcaacaagcgacattgatcccaaagctgtccatgatctaaacaacacaactaacagcatggagaagctgaggaaaatccaaggaagagcaaaatcattccttcttcttggaagggggctggccttggcaatctcaacaatcgtccccgcttcggccgccctaataacctcggccgccctaatggccacaacaacaccaacctcggcggcaataatggccgtggcaccttcctccttaacaatagcctcaagaaccacaacttcaacaaacggaacacccccaacctctttcccaaagaaaaccccccca

SEQ ID NO: 13243 - DNA, 402 bp, Zea mays
  unsure at all n locations
  Clone ID: LIB3150-113-P2-K1-B1
ctcccgtgcccctcactgtttagtggcgacgacttgtcgatttacgccgccgccgcccgctaggggccgtgcccctggtctccatcttcggcgcttcgcccaccagatatgagcagctggcaattcgattttgaggccattatttgataacccgggacaagtgcactggttacctgaccattttagctttttgagatggctacacagttgccatgcttcacacagctcagtccaccgtcttgtagttggataaaagatgtcgggaactgcaaggctacgcctgctagggtagccagaagtgcccgagctttgagccactgtcacttccgaggctgtgcaagcccccgtagtgcaaactctttcaagaagaaagactntttcgagaagaaagactttttcctc

SEQ ID NO: 13244 - DNA, 221 bp, Zea mays
  unsure at all n locations
  Clone ID: LIB3150-113-P2-K1-B10
tccgtccgtattcccgtgcggccgcccttttttttttttttttttttgaagcaaaannttttgtgcttattattanaagaaccgaacgcaggatagtgagagtttttatgaattttttacaacaaaaccgccccacgaagagtaaaaaaacatatgtatacagacacaaactacattatggtaaccagtaaataccactgtttgagtacttataacattgt

SEQ ID NO: 13245 - DNA, 258 bp, Zea mays
  unsure at all n locations
  Clone ID: LIB3150-113-P2-K1-B2
cgtccggattcccggacggccgcccttttttttttttttttttttnaanaaaattaanaaaaattttattttatattnngnaaggaaaancaagggactttggggaataaacaatccaaattaagggttaaaacaacggancaactcaacttaaatatgattaactcaaatacttccaacaaaacagcttaagggggcaatgcttagcttttaatttttgagctggaatggaacaaaacaaaaagttttgggcattta

SEQ ID NO: 13246 - DNA, 345 bp, Zea mays
  Clone ID: LIB3150-113-P2-K1-C2
aaaatataaaaaaataaaaaaaaaataaaaaataaaaaaaaataaaaaaaataaaaaataaataaaaaataataaaaaaaagaaatatatgaaaaataaaaaaaaaaatttgaaaaaaaaaaaaaaaatttaaaaaaaaaaagaaataattataaaaaaagaaaaaaattaataaaaaaaataataaaaaataataaaaaataaaaaaaaataaaaaaataaaaaaaaaatataataaaaattaaaaaaaaaaataaaaaaaataaaaaaatatttataataaaaaagaaaaaaaaaaaaaaaaaaataaatatataaaagaaaaaataaaaaaaaataaataaa

SEQ ID NO: 13247 - DNA, 464 bp, Zea mays
  Clone ID: LIB3150-113-P2-K1-D10
gcctgcacgtaccgtccggattcccgggcggccgcctttttttttttttttttaagtgcccagatatcttaagagctattgtattacgagctgaacttacagtccaacacagtagttcagtacagaacatagataatcagatttaaaacatcggtgccggaaacgtctgagaggcaaggctgctgaaaaggtacataaaagagctacggctataatacttcgacaaaatggcctcgatcagcatgctgatatacttactgttccttgctgcgacaatgttgcagcctctttcttcacaggctcttccttctctgacaagatcagctcaatgtggcaaggtgaggacatgtagggattgatgcgcccgtgagcacggtaggtgcggcgcctctgcttttgggcttgattcacctggatgtgggaaacatagaggttgtccacatccaagcctttacattagcggt

SEQ ID NO: 13248 - DNA, 250 bp, Zea mays
  unsure at all n locations
  Clone ID: LIB3150-113-P2-K1-E10
gccgccgtccgtcggattccgggcggcgccttttttttttttttttttttgatttttttttatgttnnanatnaaaatatagtngtgtaaaatgtattaattttgtaaaaatngggaagtaaaatttggacaaaaaaatttgttgtagagaaaataaataagggttttaaaattaatatagtagatataaaaggggatagggaaatanggggtaggtataaaaggaagagttaattgtaaaatgtaaggg

SEQ ID NO: 13249 - DNA, 114 bp, Zea mays
  Clone ID: LIB3150-113-P2-K1-E3
tacaacggtatgactggtaaaacaaaaaggggacaaaactaaaccttaaaaaaaacaacgcccctacaaaaaaaaccgggccaaaaaaaaaacccaaaccaggggccaatcccc

SEQ ID NO: 13250 - DNA, 139 bp, Zea mays
  unsure at all n locations
  Clone ID: LIB3150-113-P2-K1-E5
ccccccctaatattttttctttcagaaacccaaaacccgggaaattggncatacnntatacattttttcaccccaaaacaccagctttacacacccacaggtgacaactcctaaactgattggtcagaagacttaacac

SEQ ID NO: 13251 - DNA, 460 bp, Zea mays
  unsure at all n locations
  Clone ID: LIB3150-113-P2-K1-E6
ccgggcggccgcgcggtctttttttatataaaaataaaaaaaaaaaaaaaagtatatatttatataaaanaanaaaaaaaaggggnnagggaaaaaagaaagagaaaaaaaaaaaaaaaaaaaaaaaaaaaaaaaaaaaaaaagagaaaaaagagaaaaaaaataaaaaaaaaaaaaaaaaaaaaaagataaaaaaaaaaaaaaaaataaaaaaaaagaaaaaaaaaaagaaaaaaaaaaaaaaaaaaagaaaaaaaaaataaaaaaaaaaaaaaaaaaaaaaaaaaagagaaaaaaaagaaaaaaaaaaaaaaaaaaaaaaaaaagaaaaaaaaaaaaaaattggaaaaaagaaaaaaaaaaaaaaataatgaaagagaaaaaaaaaaaaaaatgaaaaaaaaaaaaaaaaatataaaaaaaaaaaaagaaaaaaaaaaaaaaaaaaaaaaaaaaagaa

SEQ ID NO: 13252 - DNA, 106 bp, Zea mays
  unsure at all n locations
  Clone ID: LIB3150-113-P2-K1-F3
attaataaaaaaaaannttttttnttttttttnnaagccgagaaaacatacacaggaacattgtatacggaatttgaacatttggatccggatgctacaatttaac

SEQ ID NO: 13253 - DNA, 384 bp, Zea mays
  unsure at all n locations
  Clone ID: LIB3150-113-P2-K1-F6
ttttttttaanntttttttttttttttttacttatttttttttatatttattttctccatttttttgtaaatgttttattttaatagatttttaacaaaccaaaaccaaatataaaaaaaaataatcacgaaaaaaataattaaaaaaaaaaaaaaaaaaaaaaaaaagaaaaaaagaaaacaactaaaaaaaaaaaaaaaaaaaaaaaaaaaaaaaagtaataaaaaacctaaaaaaaaaaaaaaacgacaaataccccagcaagggaaaaaaaaaaaacaacaccatataaggacaaaaagtattcactagtatataaaaaaaaccgcctggcaaaaaaaaaaaatataaagaaaacaatcccacaaaaatatcataataat

SEQ ID NO: 13254 - DNA, 187 bp, Zea mays
  Clone ID: LIB3150-113-P2-K1-F8
ccgaacaaaaaatactcgtcttggaaaacaatacacaaagccagttgaaaaaaaaacaaagaggcccgcacccatcgtcaaaaaaaactgaaaacattcagaatgtcgaaggcgactcgcgctgaaaaaaaacacctagttcaaaaaaagaaacggaaacccgcagctaaacagattatcggggggg

SEQ ID NO: 13255 - DNA, 258 bp, Zea mays
  unsure at all n locations
  Clone ID: LIB3150-113-P2-K1-G4
ccggccgccctaaaaaaaaacaaaacgccancnacggacaccataactctttcagacaaaccagggnnaaaagggaccaggcaccaccaaccgggcaccaaagcccccaaaaacacctaatnaaatttacctngtaaatacccaaaatcaaaaggggcggaagaaaaaaaaaagcaaaccaacacacagggacaaaccaggaaaacactaacaacacaaacacacgaaaagaaacaagcaccaaaaaaaaaaaacaac

SEQ ID NO: 13256 - DNA, 282 bp, Zea mays
  Clone ID: LIB3150-113-P2-K1-G5
attgtataaacctattaaaaggttataacgtttaatttggaacaatacttttttggtttcagttcaattgtttattcatgttattgctcacacagacactgtcacccatggagatgcgtgacacattattactcattcatcgccgctaaatgactcaactagctagctagccagcggctttactacagcacatagttttttcagtgggggacaaccttcggctgttgcagtaagggtttggagacttctgcttttatgcctatattggctcttgtatcattt

SEQ ID NO: 13257 - DNA, 321 bp, Zea mays
  Clone ID: LIB3150-113-P2-K1-G6
gcgccgccctttttttttttttttttaggcaaagcacaggtaactcatatttagtttaacaaacaaagcttcagttctgcatcacgaacatggcggacttaaatatcagagttctgaagggaacatctaaatgacagtaattaaaattgtggcatcgcctctactacactgtccaagagatggcattcagatagcccgcccagctgacttcagcggtacttgatgaagccaatgtccttggcgttgctgcggaagcactgtctgcagtacattagcccgtactttctgatcagactatgagggttcgtacagaccctttta

SEQ ID NO: 13258 - DNA, 391 bp, Zea mays
  Clone ID: LIB3150-113-P2-K1-H10
tttttttttttttttttttaatgcatttttttttttatgtttttgagcaaagtgtccttggttttggggttttttttttttttttttttttttattaaaaaccaaaggggcttaaagggcccgactttaattacaaaggcaaattctagagccgttcaccagggggtggggggggggaacccccaaacttttcccggggcacaaaaaaagggttttaaacaccaaaacctgggtgggcgggcaaaaagattcatgccagcagataagtttttcttctccccgggggcggaaatattgcccccctttggggggaccctcttgtaattcctttttcaggggggggaggtccctgggggccttggaaaaaacccccttctttatgccccttccg

SEQ ID NO: 13259 - DNA, 318 bp, Zea mays
  unsure at all n locations
  Clone ID: LIB3150-114-P2-K1-A8
accgtccgtattcccgcgcggccgcccttttttttttttttttttattttttatttttannnnntaaaataaanatttccaaaaanannaaaaaaaaantttgggttttttttaaaaattttttttaccttaaaaacccgtgnntnnntnnaccaaaaaaaaaaaaattccccccaaaaccgtttaaaaaaaaacctaaaaccaaaccaacccctattcccaaaaacaaaaaaaaaacccccaaagggaagcaaaaaccaaaggataaacaaacccacacccccccacccaaaccaaaaaaatttccaaaataagaaa

SEQ ID NO: 13260 - DNA, 343 bp, Zea mays
  unsure at all n locations
  Clone ID: LIB3150-114-P2-K1-B10
accgtccgnattcccgggccgccgccctttttttttttttttttttttagggtttttcgacattaatcacttccattctcaaccnacccgccgggcgggaattttagcacatggaaccaacccctaaactctacagtccaatggatcattcaggccagtggtaacactgccactgacacccatggggaagcatgacaccttattaccccaccatcgcccctaaattacccaactaacaacctagccccccgctatacgacagcacatactgtccccagctggggacaccaccagaagcttcccaaaggcatggactagggtacttccggccgcacaacgccgt

SEQ ID NO: 13261 - DNA, 324 bp, Zea mays
  unsure at all n locations
  Clone ID: LIB3150-114-P2-K1-B7
ccgtccgnattcccgcgcggccgcccttttttttttttttttttttttttttttttnnnnttaaataatttttttanaaaaaaanaaaaagggggggacatttaaggcggtttatcgactcttaaagggggttaactggaaaatttcaacaacaaaaacaaccgggaaccggcgccttttaaagaagcaacttaagttaccatataaagaacctacaggggcaaagccctacaaatcgaactttataagacacatttaatcaccttacaaaccgcaagggttaataaatcaaacacccggagcttaacaaccccccccctttaa

SEQ ID NO: 13262 - DNA, 239 bp, Zea mays
  unsure at all n locations
  Clone ID: LIB3150-114-P2-K1-B9
accgtccggattccccgacggccgcccttttttttttttttttttgancgganagcaaccactaagtccntttattaaacactgaaaatgaaacggggaatggcactgcccattttttaattctataacccaaaaaagttttattgcgagaccaaaacgaacaaggggatatcaaactcacagcacccaaactcaaaactttatgcccatttaccgcacgggctgctggttgtaatgac

SEQ ID NO: 13263 - DNA, 277 bp, Zea mays
  unsure at all n locations
  Clone ID: LIB3150-114-P2-K1-C2
ccaacataattttttaaatgtncaaagctaaaggggggatttttgagcgggttttttcaaaacaaaacccccggggcatttaacttgttcaaaacatgtttaaaagctgaatggacattgccaacggactcttggnagacccccaaaaaaaaaaacaataatttcaaaggaataaacctaaaaaatggggggaaacaaaaccaaaacaaacatgccggacgccttgatctgctcaaaaaaaaccaaaaataacttcccgcgcaccccacctcttttt

SEQ ID NO: 13264 - DNA, 124 bp, Zea mays
  unsure at all n locations
  Clone ID: LIB3150-114-P2-K1-C5
accaacataatanattctgacccacaaaaacaaaacgcggggcccacaaaaaaagattctagctaacctcaaaccccccgcacaggaaacaaacagtatcacccccaaggcccacaaactacaa

SEQ ID NO: 13265 - DNA, 253 bp, Zea mays
  Clone ID: LIB3150-114-P2-K1-C6
cgcggcgcgtctttttttttttttttttttccccaattttaaaccacctttatatttccaagcggcccctaccctaagggaacgtttttgtgtccaggtccaccaaattttaaaaataaaaaccaatctatttggctggccctggatctggaaaacctgcaggacggctggaaatgacaggagttccctcgattggatggggaataaagtctccctcaagctattttgcaatggctgacgggattttccaaat

SEQ ID NO: 13266 - DNA, 425 bp, Zea mays
  Clone ID: LIB3150-114-P2-K1-D4
ggcaaagtatgatattccgtccattgaaataaggttccaagatacagatcataatcttttcgaaaacattgctaaagcacaaatggtgacatgcttcctctggctctcaaggtttgatgtgaaactttccatgtttacttctcgtagatccaggggtgctggctgctctgccaatcagcagggccctcggggaaccacagggcaatctccttattagcactctcaatgctgtcacttccatgaatgacattcctgccaatgtcgacagcaaagtcgccacggatggtgccgggctcagaagccagggggttggtggcgccaatgatcttgcggccagttgtgacgacgctcttgccctcccagaccatggccaccacagggccagagatgatgtagtccacgaggccctggaagaagggcttgga

SEQ ID NO: 13267 - DNA, 335 bp, Zea mays
  unsure at all n locations
  Clone ID: LIB3150-114-P2-K1-D7
taccgtccgnattccgggggcgccgcccttttttttttttttttttttttttttttttttttttttttgtataccgaccattgacgacgaaaggacataacgcagtgctgagaacacgatatcttatccatatccccaaagcaacaccacatataacataacatgggaagctgaataaatgtcagttacatcaaaatagcatctgacaaagcccacgaaaccgtgcgatacactttccctccccccccccccnccnnnnnnaaaattttttaaaaacaggggggtacagagatttaaaggggtgcattaaagttaaagccaatccgaaggtaatc

SEQ ID NO: 13268 - DNA, 487 bp, Zea mays
  unsure at all n locations
  Clone ID: LIB3150-114-P2-K1-E12
gccgccctctattccttcttgcgccactaaactttccgcacgataataaaaccccncgcgncacacaaaaaaagagggggattttaaaaagaatatttacacccccaaaccacccaccanttaaacaaaacaaggcctacaacaaaaaagacaaaccaacacaaccagtagaaaaaaaatgacaaatagctaaaacaaaaaccataaaaacctaccacaagccaaaaataaaatgataaacaagaaaaacaccacaaccaaaaaacaacgacaacaaacaataaaccaaaacacaaattccacacaaaaccacatataaacaataaatcactacaggacatcaaaacaaaaaaaactaaaaactaacaaaaacaattatactaaacaactaaacctccacaaaacacaaaaaaaataccaaaaatacaataactcaaatctaactacaaaccaaaaaaaactaataaaacacaaaaacaaaacaaaa

SEQ ID NO: 13269 - DNA, 243 bp, Zea mays
  unsure at all n locations
  Clone ID: LIB3150-114-P2-K1-E4
gggttttcagggggctgtatatacttggtaccaaccggccagtttagctgatcaggggctacaacaaaaaggccaaactaacagtagccttaggagctaactgtgggattgctagagctagacccattcagtcctnccacaagccttttctttgctggtttgctgcgatagcaccacacctcgaatgcctcggtgagaacaggatacctgaactggtctgggtctttatccactccgacagga

SEQ ID NO: 13270 - DNA, 150 bp, Zea mays
  unsure at all n locations
  Clone ID: LIB3150-114-P2-K1-E6
gaaaacccananangaagaacccatatagaggcgacaaaacccccaaaccccaaaatgcgaaacaatgatcaagtccacagcacttccagcacaggccccagatctgaacccggacaatccacccaccgtctacttcatccaaactaacc

SEQ ID NO: 13271 - DNA, 529 bp, Zea mays
  unsure at all n locations
  Clone ID: LIB3150-114-P2-K1-E7
tcccggtgcgccgccctttttttttttttttttattanaaaatttataaaaataaataatatttaatannaaaaaaaaaaaaaaggggatttttaaaaaattttttatattataaaaaacaggaaaaaaaaaaaaaataaaattaaaaaagaaaaaataaaaaaaaaaaaaggaaaatataaaaaaaaaaaaaattaaaaaataaaagaaaaaaaaataaaaagaaaaaataaatgaaaaaaaaataattaaataaaaaaaaatagatagtaaataaaaaaatataaaaattgattaaaatataaaattataaaataataaaaaataataaaattgaataaatattttagaaaaaaaaaataaatataaataaataaaaattagaaaaaaaataagataaataaataaaaaaaaaaaaatattataaaatattatttataaataaataaaataaatataaaaattattaaaaagatataaaaaaaaatataaaaaatatgtgtaaaaaaataatataaaaaaataaata

SEQ ID NO: 13272 - DNA, 219 bp, Zea mays
  Clone ID: LIB3150-114-P2-K1-F2
ttgagcgccgccttgggcgcgtactgcggcagcgctgggtactgcagcagcgcgacgaggtcggcgctggtgagcttgctcatatcgggcaggtccttggccttgaacgcgtcgtcgttgggcgcgaacagggtgagcgccttgtccatggcggcctggtacagtatttctaccccggtcgactcgttgaggtttctgcgaacttgttgctactcttct

SEQ ID NO: 13273 - DNA, 258 bp, Zea mays
  Clone ID: LIB3150-114-P2-K1-F3
gggaagggagcatgtacttatcgtatcacatgattctgaagccaccagtacattattaggctactattccagaagatttgcaccttgcataccaacgcatgtatatcaacaaaatgcagccttgttttggactctatgacagttcgcggcagcggttttgagcagcaacaacagcactaatcagcgttccacggaatgcgcccttctcgagctcctgaattccggcaatggtagtacctgctggagaagtaacctgat

SEQ ID NO: 13274 - DNA, 417 bp, Zea mays
  Clone ID: LIB3150-114-P2-K1-F4
caccaaaattatctaaatgggatagccgaatttatcaatccactaagttttttaacagcaaaacagttcaggcgctccaaaatttgactagagcttataaaagaaagtgcagtactggactagaaagctacagctttatttcaatacttcacttctttgctttcttcggtgccccagtagctggagctgtggatgagacaggtggtgttatttctcgtggaccctgggccaacctctcctccctcctagcgatcttcctctcacggctcgccttgctcttggcgcgcttggcctcaaactggtcagaaagtgtcttctctctggccttctcagccttggacttgtggatactctccataagcaccctcttgttcttgaagggcgttaccttgaccttcatgtacatgtcatgataca

SEQ ID NO: 13275 - DNA, 421 bp, Zea mays
  unsure at all n locations
  Clone ID: LIB3150-114-P2-K1-F5
aattcagcagaattattcttttgtgatagncgaatttatcaatacggggagttatataacagcttaacagttcaggcgctccaaaatttgactagagcttataaaagaaagtgcagaactggactagaaagctacagctttatttcaatacttcacttctttgcttaattaggggccccagtagctggagctgtggatgagacaagtggtgttatttctcgtggaccctgggccaacctttcctcccttctagcgatcttcctctcacggctcgccttgcttttggcgcgcttggcctcaaactggtcagaaagtgtcttctctctggcctactcagccttggacgtggggatactctccataagcacccttttgttctgaaggcgttacctttgaccttcatgtacatgttatgatacat

SEQ ID NO: 13276 - DNA, 181 bp, Zea mays
  unsure at all n locations
  Clone ID: LIB3150-114-P2-K1-F8
cgccgcccttattatttattttttctactcaacagtatccaagctaatagtctcccacacgcgacaccaaaccacggggataatttcaccgaaatttaatccacctacacaacccanaacaaccacaatgaccaaaaaaaccctcacaacacccaacttaacagaacagcaccacataacc

SEQ ID NO: 13277 - DNA, 439 bp, Zea mays
  unsure at all n locations
  Clone ID: LIB3150-114-P2-K1-G10
accgtttcgnattccggcgcggccgccgctgcggccgttgaggaggttgcggttgatcaggggagataattttctcaaccagncgcacgaggtcaggggggaactgctgatcttttgttctaggagatcgaacttggagaggagcagaaggaagtctgcttgctcgaatgtcggatggagggtgatgctctcgaacagctgcctgctctctaccatcttgttgacaatggtaccgtttgcatcttcgtagaactcatcgtagtcgctagcagcaacacagaagataacaagccttacgtcatcaaacatttgcagccatttgcagttcccatgcaaacctctactgtttatcctgatcaattggtaccttagcaaagtggcttgtgcatcgggctcatcaacacccagtccacccaaagacaggtgtaggaaagagaat

SEQ ID NO: 13278 - DNA, 70 bp, Zea mays
  Clone ID: LIB3150-114-P2-K1-G4
aaaaaaaaacaaaacttcctttccgagatgggcggacccaccaaggattcaaaggtctactcaaaatccg

SEQ ID NO: 13279 - DNA, 217 bp, Zea mays
  unsure at all n locations
  Clone ID: LIB3150-114-P2-K1-G5
aacacnnnnnnnncaancaacgggaaaccaaaccagaattccttttttcttaaaacccccgccgcgaaaaaagtgttcaccaaaaaaagggtccaaaggggataccccggcacacccaccataaatagagcagcgccggggcacaaactgcctctggatcctacacacaagaccgggaccatccgtttataccacccccaaaaatttggggccaggg

SEQ ID NO: 13280 - DNA, 142 bp, Zea mays
  Clone ID: LIB3150-114-P2-K1-G9
tcccggcgccgccctttttttttatccataaccaaataccaacgataattccaacacacaaacggggcttttaagatttattccttacaccccacacggcaactttaaaaccccccaaaacccaaaaaacgctacaaacaac

SEQ ID NO: 13281 - DNA, 437 bp, Zea mays
  Clone ID: LIB3150-114-P2-K1-H1
aaaaggcattgcacactgaaacaggttgtgttgcttattgagagttcccggagagagagtaacgtcaattcagattgtaacaaatagcgtcaacatacagctgtgcgcacctccacttgtcaagccttggacgccttacagtttggttcgaaaacatattttatcagcgactccttgatcgacaaaagctccgggaactctctcttcagtttggtctggtcaagctcattgttgctcctcggtgcgactatgacctttgcctgctcctccaggttgaagtttttccaggagaagcctggatcgatgtagtctctgtacatctctagtatctcgttgtggctcaccacgccggggttcgtgaaattccatattcccgtgaggtttctcttcgccatttcgatcgagatgggaaggagcttgtccagtactgtcattga

SEQ ID NO: 13282 - DNA, 388 bp, Zea mays
  unsure at all n locations
  Clone ID: LIB3150-114-P2-K1-H10
ccggtccgnacacccgcggcggccgcccttttttttttttttttttttnntttttttccccgttgattttttcccccnnnnngggccgcgtatgggggcttattatggatgtttgttaaaagggcaccaaattggcaagctaacaacttaaggaagaaaatcacagacagggccacagataggaaactcgaaatgacaggacagcgtttactgattaaaacacaaatattctgcacttaaaacacaaatgttcttagggcttggtccccaatccccactcaaggagagatgtcttgtggaagacctagggtgggaaacatttgcaggcgccgattgcaggaatagctccaacacaaacagtccttacaggtcaatgacccgtgaaagc

SEQ ID NO: 13283 - DNA, 385 bp, Zea mays
  unsure at all n locations
  Clone ID: LIB3150-114-P2-K1-H4
attaaaccggncaatccaggtaattgttgacactgacactgccacccatggtgatgcgtgacacattattactcaatcatcgccgctaaatgactcaactagctagctagccagcggctatactacagcacatagtttcttcagtgggggacaccgccggcagcagcgtaggggcatggagtcggctgctgcaggccgcacatcgccgtcagttgctgcgctatctgcgccgccaacagccccgcgacctggccgctttgcggctgctgctgcaggatggactggaggaccaagccgaagatcgcctggtaccggtgctgcggctccacctgcctgagctgcttgcaacactgctgncgcaacgactggcactgaggcgagcagt

SEQ ID NO: 13284 - DNA, 330 bp, Zea mays
  unsure at all n locations
  Clone ID: LIB3150-114-P2-K1-H5
ggaacaaatattcccgttgtaataacccccancaagccaaagcgggggactttcactgccacctttttttatcccaaacacaccannacncaaacaacgccgntaaatgactcaactagctagctagccagcggctatactacaacacatagttccttcagtgggacacaccgccaacaaaaccggaggcgcaaggagtccaaacaagcaggccgcacatcgccgtcagttgctacgctatctgcgccaccaaccaacccctagacctggccacattacagatactctgcaagaatgactggaggaccaaaccaaccatccccaaattcc

SEQ ID NO: 13285 - DNA, 337 bp, Zea mays
  unsure at all n locations
  Clone ID: LIB3150-114-P2-K1-H6
ggcgggcggcctttttttttttntttttttttttnnnntttnttnttgaatatgatatcctcttccattacatgaaaaaacagggcaatcaattacaaatgatttaaagcaacgttgtacagccgcgcacaacctaagtgaacctggagttatttaaaaagcaatgtatctcaggtttaggtcatttggaacgttggcggctcagatctgacataacttcccctaaagagaacacatgaaaattgaacgcagaaactcctaaagatcctcgttggtctgaccaaggtttgtgaggccaggaacaccttatgggttaaaaggcgcaaatactaccaca

SEQ ID NO: 13286 - DNA, 443 bp, Zea mays
  Clone ID: LIB3150-116-P2-K1-A12
aaggggcgggcgggcgcaccatcttgccgccgtcctcttcccctcgcaggaacattgagtcctttcgtacccgccgccctgcggcgggggcggctgctggtggtggtggtgcatgaactccggcccttcgatgccgcccttcttggcgcgccggatgccgacacataggtccccgttctccgtccgcatgaacactatggagtcccccgcgacgagcttcttctggttcacgaaggtgctccagccggtggtgagcaagtggcgccggggcgtgccgcggtagatgtggcggaacttacagaccacgccgtgcacgtccttggcgagcacggtctgcactggggggtggtctagtagtctagccgcgggaagaaggtctcggcgcaatatcgcggcacggataagccccctcccttgttggccatagactgcattagcgtttt

SEQ ID NO: 13287 - DNA, 124 bp, Zea mays
  Clone ID: LIB3150-116-P2-K1-A2
agatcacgggataagggcagcacactggcctgatgctgcgtcatcagcaaacttctctagtactcgtcaccctcgtcgccatcctcgccctcatcgaactcaacaccgacctcctcgtagtcct

SEQ ID NO: 13288 - DNA, 449 bp, Zea mays
  Clone ID: LIB3150-116-P2-K1-C1
ccctttcttttttttttttttttttttttttttttcttctttttataatttttttgttttttcttttttatttgtgggttttttaacaagaaaggggggaaaaacacaccttttaaaaccctctacaattaaaaccctttttttttccaccccccaaaaaaaaaaaacatacaaaattcccaacttgcataatacccaaaaaaaaaatacccaacattttaccaaatccaaaaaaattcttaataggaaatgtgacaccccccaaaaaaaaaaaataacccccccaacaaaattcgtaacccggagtttttccctttaaaaaaccaaatacaccctcccattccccaaaattaaaaaaaaatctttttttttatttttgtgggaaacccctttgtcctctaatttaatgatataaaaaaaaaatttccccacccccaagtgctttttta

SEQ ID NO: 13289 - DNA, 155 bp, Zea mays
  unsure at all n locations
  Clone ID: LIB3150-116-P2-K1-C2
aaccgtattcngngtacataactaataagatccaggtttgacccctgaagtaacaactcaacacaaacacaataaccaaataactgatgaagcagtaccaggcaagcgttacacagaggagcttcaacctgacagctcaactaaaacctacagga

SEQ ID NO: 13290 - DNA, 406 bp, Zea mays
  unsure at all n locations
  Clone ID: LIB3150-116-P2-K1-C3
tttttttttttttttttttttttttttttttttntaaatttttttttnnnnnnanntnntttaattttttttggggttttctcccggggagggggcagncaacacattttcaatttccttttacctttttttcctttcctttttttttttaaaaaaaaaaaaaaatttttcccccccccccaaacccacaaaaaaaaatggcccccccctttttttagaaaaaaaaaacacaaaaagggctgcactttttttataaaaccccccaaaaaaccccccgggaaaaaccctctttaaaaaacaaaaattattttttctccccctatttaaaaaaaatccttttggcccccccccccttttcccccccaaaaaaaaaaacatttttaacccccaaaaattttttctcccc

SEQ ID NO: 13291 - DNA, 102 bp, Zea mays
  Clone ID: LIB3150-116-P2-K1-D3
ctcgaaggaaccttttccaatacgtaagattctgcatctaggggttccaacaattcaacataacccggatagcaaaacctggcaacccttaacataaaaacg

SEQ ID NO: 13292 - DNA, 276 bp, Zea mays
  Clone ID: LIB3150-116-P2-K1-E2
caccggctaaaaaatgtgttcggaatagcactcaagattatactgtcacaacttttaaaacgatggatcagatgttccacaaattcagtacttgatcggagtaagaatgtccagctgggaccctaacttcttctcggctgtagcctcagcctttaggcgcagcttggccagctgctttcttctctataggccaccttagccttcttctttctcttcttctcaagcttcctgatggtgtcatgggagttccatccgacctccttagaaagctcacca

SEQ ID NO: 13293 - DNA, 253 bp, Zea mays
  Clone ID: LIB3150-116-P2-K1-E6
gtgccactcgaaacacaacacgctcattgcatagcacagtgacagcatcaaatcttccgagtctgcgtctgccagcgtagccgattccactggttacacaaatgtatgtcgggcgagctcttttcttctcccaggtcccagggagaacatacagcaagcgctgtgcaggatcaggaatccatggacagtcctccattattgggcttaagctgcctccttgaatatacgggggagcacttcatggatgccgatg

SEQ ID NO: 13294 - DNA, 146 bp, Zea mays
  Clone ID: LIB3150-116-P2-K1-F1
aaaagaaacagttactttttattgactcccatgctttatttcacccaactaggtacaatcatttcacagtcaccaacacacttccaagaggcacactgggttgtttgcagatctagagagttcacggggtcatatgcagatctaga

SEQ ID NO: 13295 - DNA, 92 bp, Zea mays
  unsure at all n locations
  Clone ID: LIB3150-116-P2-K1-F2
cttcncaactttattttannggggtnnntccnnnnagnaagagggaccaacacacttttattaattaaactgggtaagaacagaactaaaga

SEQ ID NO: 13296 - DNA, 212 bp, Zea mays
  Clone ID: LIB3150-116-P2-K1-G1
aagaatgagaacatgttcagttcgttgttactgaaattgataacaaaatattcggttgccaaattgcagactctctttggacagatgcacatacccccacgcttacctgaaacacacgcacattctgctacatgattgtgggcgcaagaaggcgacctaaacagaactcttttaggtacaactgggttagcactacaggggcttacaagaaa

SEQ ID NO: 13297 - DNA, 134 bp, Zea mays
  Clone ID: LIB3150-116-P2-K1-G2
gggacgcaaactgttgaacaaaacatattatacaaattcacgggggggtttgttagttccaaattttccaatttcagtcactttacccacagcagcgagggagtaaaagcttttttcacgacttatttttcaaa

SEQ ID NO: 13298 - DNA, 299 bp, Zea mays
  unsure at all n locations
  Clone ID: LIB3150-116-P2-K1-G5
ggccgcctttttttttttttttttttgttttttattttttcacaatttttttttatngnctctattaacttaacatttgtggggtcaattccctttggggaagggggaaagaaccaccctgtttatgacaactgggaattcataaaggtgatggtgaataaataacactttctttcaaaaaagagctttttttttggggccaagcaggacccaatcatacttgcttttacacttcagtgcccaagagaaggcacaattagttggccttgtcatttcccgaggcaggggttgaaggggtc

SEQ ID NO: 13299 - DNA, 424 bp, Zea mays
  Clone ID: LIB3150-116-P2-K1-H6
accgggaatgaccggggcggccggccttacttgtgttcttttcacatatagcagacacaggctaaactactcgtgcgtgcataaaaatactatgtttatggggaaatgcacatacaacacaaacatccaagacttgcaacaacttgacatgatgatgcacgataaaacagatcgatggatgctctgtcctctaaacataagctgagctactcaaaacttaactacagttgccgatcactgagtcacgccaagccactttgagaatgtatgaaactcggggcacgcgctgtccgagaccatggactcgtaccatgccttgcagcagccttaaccttggcatgcattcccgtaagctttgcctcttggagtcgagcttcgtctttctggtcttcacaccagcagccttattaagggtggacaattt

SEQ ID NO: 13300 - DNA, 124 bp, Zea mays
  unsure at all n locations
  Clone ID: LIB3150-117-P2-K1-A2
gccggattcccggacggccgcgcggtcgtccttttttttttttaaaaatttaaaaaaaaatttttttttttttnnnnnnnnnnnnnggaaaaaacagtattcttcggctggatttattagggcc

SEQ ID NO: 13301 - DNA, 313 bp, Zea mays
  unsure at all n locations
  Clone ID: LIB3150-117-P2-K1-B3
tcccgggacgccgccctttttttttttttttttttttaacgacattgcgccactngtggtaagttttcataacgagaacgcggtcggcaaaataaccataactgttattctctgaccacccgccaaagagaacaactgccagcacttggccctgatagccaaagacaattatactatacaagaatatatggtgataaaaacttcaggcttggagaaatttgaagcgtgcaacgcgccaaggcgagtgacaggcaaggcgactcgggcggccttacatcctcctgaccaacccgggcggttttcaaccttgcca

SEQ ID NO: 13302 - DNA, 447 bp, Zea mays
  unsure at all n locations
  Clone ID: LIB3150-117-P2-K1-C2
gccgccctttttttttttttttttttttttttttttttaattttttttttttttttttttnnnnnnttttttgagggggcggaagggcccaagggccaccccactcctggcaacgctaggacattttatacttgggtcctcccatcgggcaggggcaggggggaaacaccaaattatgcgaatggcatacaaaagggggggtaaaaggaagggggcaaacttgtttgggtgtcaacgggttttaggccagattggctggctaatactagatttttaaatccccagggccggttggttttaccttgaccaacctgggaagtgcccaccttattttagtcttttttttcgatgggggggcgttttttttcgggtttcccccaggggaatcttccgtggttccagccttttttggaaacctgggactgggaggattttcttttagcttta

SEQ ID NO: 13303 - DNA, 388 bp, Zea mays
  Clone ID: LIB3150-117-P2-K1-C6
cggccgccctttttttttttttttttttttttttttttttttttttttttattttttttttttaaaatatttattttgggtttttttattctcatttttttttctttcttcctaaaacacattttcctttcctattccaaaaaaaaaaaaaacccctttttcccccccccggcacacccccccgggctatttttttataccccgggccccggacacgggttcacaaagcacccatcacctaaccccagggcccccccgggggtttttcccccccctttttcacccaaaaaacccccccctcgccaaaaacttcttggccggcaaatgtatccatctggaaaaccccccttctttgacaaataaattccccccccggaaaccccccccc

SEQ ID NO: 13304 - DNA, 363 bp, Zea mays
  Clone ID: LIB3150-117-P2-K1-C8
taccgtccgattcccgggcggcgcctttttttttttttttttataaacacttttttattttttgagacgaacattgcgcatatataaacacatgacatgtaaacaaccaattcgccccgagacactatattgaactagtacgtacgttaacgtttaagcacccaaactgggaaaacaagtcgacagacagtaccacacatagaaatactccatttcgcatctcgcccatagtgctctgtaccgtctcccctttggcgccagggaatcatggcgcttttgacttgaccagctggcgatgacaggtggcaggaagtggaggtggcacggcagcagcagagaagtgtcaggtggccgggtgagttc

SEQ ID NO: 13305 - DNA, 195 bp, Zea mays
  Clone ID: LIB3150-117-P2-K1-D1
ggccgccctttttttttttttttttttttataattttttaaaataacttttcgttttcatattagcagcgggtataccccgaacaacttacgtaaatgctttgcacaggagtaaaattccactcgaagaaaatgtttacatgtaacaagtacaacatcgctaaagatcgtacggatgccatggtgcacacatggg

SEQ ID NO: 13306 - DNA, 381 bp, Zea mays
  unsure at all n locations
  Clone ID: LIB3150-117-P2-K1-D4
ttcccgagcggccgcccttttttgtttttttttttactttagattttccaagcttttttattttgtgnttgcgacgacaaaaattttgtgtagtgtgacctatatttttttactggccgtctttttacaacgttgtgactgggtaaacccaaacgggggcaacccccccgccgtggaaacatggggggggggaaaaaaaacccgttttttttggggtggggggcgcccacaaaaaaaaacaggggggggggctggaagaaaaacggcacacactttgtggcggcgcaccaaacacgtgaaaaaaggggggtacgcgctgttttacctccacaaaaaaaaaccccctacctcttttttttttaaaggggggcccaggggggc

SEQ ID NO: 13307 - DNA, 406 bp, Zea mays
  unsure at all n locations
  Clone ID: LIB3150-117-P2-K1-D5
cgtccgattcccgggcggcgcccttttttttttttttttttataatacaccaccttagagtcaccatgcatagacacgccttgtgtcggagaatacattcaaaccagaattattcttgcgccacgtaaaacagacggcgtgtctaggtctggaagcatactaaacatgtagagcatatatcacacatcgcggtcgcataaacacacaaattacgcgtttgcctctggacgggttgctgcaaaccatatccctaggccgctctgcgaagccaaccctagcttgccatagtcgaagacgggtggtagactcnatgaaaacatacccaagatccagagagggcacggggtggtgggatatccatagctgggaatcgtgatgcactgggcagctgtctcaccaaccttaa

SEQ ID NO: 13308 - DNA, 484 bp, Zea mays
  unsure at all n locations
  Clone ID: LIB3150-117-P2-K1-E2
aaaaaaaaaaatttaaaaaaaatattaaatgtttttaaaaaaaaaaaaaaaagggaaaagttaaaatttaatttattttttttaaatcaaaaaaggaanaaaaaaaaaaaaaaaaaaaaaattaaaaaaaaaattgaaataaaaaaaaaaaaaattaaaaaaaaattaaataaannntnntaaaaaatattaaaagaagaaaaaaaaaaaaataaagagaaatataaaaaaaaatataaaaaaaaaaaaataaaaaaaaaatataaaaaaatagatttatatataaataaaaagaaaaataaataatatattaagaaataaaaaaaataaatataaaaataaaaaaaaaaataaataaatagtataaaaaaaaaaataaaaatattaataaaaaataaaaaataataaaataataaataggaataaaaaaataaataaaatatgtaaatatataaaaaatagaataatatataaaataaatata

SEQ ID NO: 13309 - DNA, 390 bp, Zea mays
  unsure at all n locations
  Clone ID: LIB3150-117-P2-K1-E5
gggcgggctttttttttttttttacaaaatttccaagagtgctttatgtgtttgaccgcaatnacaaatgcgaatactggagcagttcaacaagtgatgatggaaggaaacacccaaacattacccaggacacaaacaaaggtttttcaacaccacaacctggctcgacagccaaacagattcatgcaagcagatcagtattcctcctcctcgtcgccgtcatcactgccgccctctgcggcgacctcctcgtagtccttctccagggcggccaggtccttgcgtgcctcggagaacttcccctccttcatgccctcggcgacgtaccaatgcacgaacgcgcgcttggcgtacatgaagtcgaacttgctgttgatgcgggagaacacc

SEQ ID NO: 13310 - DNA, 381 bp, Zea mays
  Clone ID: LIB3150-117-P2-K1-E7
taccgtccgattcccgggcggcgcctttttttttttttttttttttttttttttttttttttgtcggcagagacggaaaaaaaaataggttctcggatatattaaggggctaagcagaacgaagtcacaaaacctatacaaacatttgagccccaatgatgcatggcactgccactttgcagccatacagcacatagctacaacaaacttggaggtggctccactaagaattcctattgcattgctactgatgttacacctgggggcatccgaagactataccgggaggtggagagcaggaacccggatcgaccttgcagaggacgccgaaaggggaaagcgggcggaggctgccacagatcagcgaccttgtcgcacgga

SEQ ID NO: 13311 - DNA, 330 bp, Zea mays
  unsure at all n locations
  Clone ID: LIB3150-117-P2-K1-F3
ccgccctttttttttttttttttaatataaatagttacgttgatgttgataattttaaaacacttgcaatgtcgctgcagntcttaagcgtagaacaatccacagaagaccagaacatgctcccaaatcatactgctacaaaacttggtacagcaaggtaacaaacaaaagtttcacagtttgatgattttgacaaatgggacttgtcgctgcaccgcagcaccttacgccttgagcttaccaaagaacctttgcttctcatcgggaggctggaagcgaccatgcccaaatttggacgatgtggcgatgaacttgagcttgatcttcttc

SEQ ID NO: 13312 - DNA, 376 bp, Zea mays
  unsure at all n locations
  Clone ID: LIB3150-117-P2-K1-G4
gccgccctttttttttttttttttttttaaaaatttaaaaaaaagttttatgttttctcacaanaaacagcgagggaaaaggtgaaaagcaagtgacaacagtttaaagggcttcccaacccaaccagaccgggcttcagcgccccccgccacaaacgaggtgggacaccgaggccttgcccggcagcattttatacggggagcccccaaattttactgacgacagtgataacaagcgttgcacccaagaaaccaggttccagatcacattgcatagtggcattcgacagcaggaaacactagctactagtttctaggcacataaagccgggtttactgcccctcactcgaggcgcgcttgggtgcctccctaatt

SEQ ID NO: 13313 - DNA, 138 bp, Zea mays
  unsure at all n locations
  Clone ID: LIB3150-117-P2-K1-G6
ccgcccttttttttttttttttttaataaaaaattcacaacccaatttcccattttttannaanagcaanacctaccgatnacgggggatataataacagcgatcttaaanccngggtagaagcaggcatgtctacac

SEQ ID NO: 13314 - DNA, 239 bp, Zea mays
  Clone ID: LIB3150-117-P2-K1-H5
ggccgtcctttttttttttttaaaaatttaaaaaaatttttaatttattaaaaaaaaaaaaaaaaggggatttgtgggaaaaacattggtaatcgaaaaaaaggaaaccccggagggcaaagggaaaaatactttcccaaaccaaggggaccccaaaacaaaatttaaaaatacacaaaaacaaaaacaacccgattacaaatctaacaaacacgggccacgcccggttttccaaaaac

SEQ ID NO: 13315 - DNA, 364 bp, Zea mays
  Clone ID: LIB3150-117-P2-K1-H6
ggccgcgcggcgccttttttttttttttttttaaggttaacgttctacttttactcttacactcaagcagaattttggcatatgaaaaggctttataagcatagaaacgggccagaagaacatcaatctcagtaacattttcaacaccagcagagcacaatcaaaactacccaacattttactcgcccttttggctgcggagcctggcaagcttgttggtgaccacgatgtccatttgcgcagcacgcttgacaattttcttgcgcttgcgggtggacacattgtgggcaatctcaacgcagtaagttctgttgtgcattaacaaaaatttcagctcggagacattgggaacaacaaacttttt

SEQ ID NO: 13316 - DNA, 473 bp, Zea mays
  Clone ID: LIB3150-118-P2-K1-A10
taccgtctcgattccgggcgcgccgcccttttttttttttttttttttttttttactgcagtttaatttaaacactgaatcctcgaagggacttgcgagtacaagtgatgtcataacgcataaggtgacatactgaacagcagaattggtaaatggtccactgacgggaaatcaagatagaaaccaaatattcctagaacagttcagtctttaaaacttgaaaaacaccggcaagtcaatgtgagccccatcattgacaaaagcagaactataacatgccaactcacaaaaaccgtgttagtaatagctgaacatagtggaattatatgtttcctatctacagcacccaaaaaagcaacctattccaaggaacaagaatggggatcctttaaaacagacatgtatggcaaccacttaaaattgatcttacttagagcccacattaaacacccctctttcctaaaaattccttt

SEQ ID NO: 13317 - DNA, 373 bp, Zea mays
  Clone ID: LIB3150-118-P2-K1-A12
cggccgtctcttttttttttttttttttttttaatatcaatacattggtttagagctcaatcgcttttagaaaacagggtactaatcaggtctgaaaacatggcataacgctctgaacttgagacgattaaccaaaaaaagtgtactcatcaggacacacatttcggtgcaagacaatccatgagaatgctctaagctacagcgctcttgcccttcttcctctgtagcttcttcatgtagaactcaagctctttaccctcaaggatgtacccatcagctcggccacactgtccagggggggaagaaatgcatgccaacaacccggcactggcaaattggttctcaatgtgggggtcaaggggaccgcccttct

SEQ ID NO: 13318 - DNA, 110 bp, Zea mays
  unsure at all n locations
  Clone ID: LIB3150-118-P2-K1-A2
cctttnttttttttttttttactttagaggattcaagtttttttttgccacactgcaaaatattggaagactgtcataatatccaacattgaacagaggaccatggagag

SEQ ID NO: 13319 - DNA, 266 bp, Zea mays
  Clone ID: LIB3150-118-P2-K1-A6
cagaaaaaacatgtccaaacgacttcattttaatgtaaagagtgaacattgagagctcaagctctaaactaacagaaacagttttggtcacctcgcaaaacgttaaaacaaaaaagcctattgcagtactacaggttcccgcataagacagctcacaattgctgatcgctggattgagatagcactacttctatggcaattaactttacttgttgggctaatcgacgtcattagcaccaccggaggagctgagttggttgagcctt

SEQ ID NO: 13320 - DNA, 345 bp, Zea mays
  Clone ID: LIB3150-118-P2-K1-B10
ccaaaccatgcgaattttttttttttactttttcaactagtttcaggcggttaaaaaaatatctttggacaaggcggcaaaaccgggagcaggtttgtataaaagtttaagggcagcacatgcacccagcaaaatttgggcctgtaatgttcaacaaacccctagggtcccccgagcaaagtttgagacattccggggaaaaaaaaattaatttgggaagcacttttttccgggggggaagaaaaaaacttgttcgaataacaaggcttggagtttttaatttaaggggggggtgttaatgggggggattaggaaaacaccgcggggggggaattcccaccttgg

SEQ ID NO: 13321 - DNA, 293 bp, Zea mays
  Clone ID: LIB3150-118-P2-K1-B12
ttattttaaggcaaacaaaaattctcaaaccaggacaaactttaaccagttcatagcaagatataccagatcaacatagacattcaattagagggctaaacagctctggatacagcacactcacttgaagcatttcgcgtcaagcaaggccttaccctagaagggttcctggacctcgatcatggcattgacaccctccttatgggcctaatgaaagatgtccaccttggtccactcggagagctccatgtcatagaccctatccattacaaacttgggaacctcctggccac

SEQ ID NO: 13322 - DNA, 330 bp, Zea mays
  unsure at all n locations
  Clone ID: LIB3150-118-P2-K1-B3
attcccgnngcgccgccctttttttttttttttgagagaaaagtcattattagctttgtttattcctaaacaatgagtcgcatgcgatggcatgccgacttcattattgggtacaacacaaatgcttatatctagaatgcagcaccaacaaaaggctgctgtaaaaacatgggtgagatcgccatggctgtggggctggacatgaatggtaattggtggtggtggataatgggcgagatggaatcagagtaacaatggggcactgtcatcatgtttggcattatcattgatgacaccatgctcggcattatcatcggtggtatcatactt

SEQ ID NO: 13323 - DNA, 294 bp, Zea mays
  Clone ID: LIB3150-118-P2-K1-B5
cgattcccgcgcggccgcccttttttttttttttttttttcaaaccatgcgaattaggttgtatcacttctccaactagtttcatacgattaaaaaaaataacaatatagcatacagtactaccgtatgcaagtttttagtaaggttctagacacagtacatgcaaccagtgaccttcaagcatgccatctagcttaatatcggaaagccacaaggtgcaaagtatggggcagtttgtgaacggcaagaccaactgggcttaacaagacaatcaacaaatgtgaaatccagatc

SEQ ID NO: 13324 - DNA, 308 bp, Zea mays
  unsure at all n locations
  Clone ID: LIB3150-118-P2-K1-B8
ccgccctttttttttttttttttttctatacctcaccctttgaatagcgcagcncaattatgcagntccgaagggttcacatggatgatttatgtaaatgactactctgggcacatacgcaggagatgatgatatacaaacgatgcactggagctagaataccaaaaccagatggtaaaatggcaatatcttttaaagatcaacaggattcaattcgacaagcattcaagtgcattgaaaggtaaaacactaggcagatgaagactttgcagtggcagacttgatgatgtccacgaaattcaggcttt

SEQ ID NO: 13325 - DNA, 389 bp, Zea mays
  Clone ID: LIB3150-118-P2-K1-C10
gccgccctttttttttttttttttttttttttttttatattctttttttttttttggcattgcatagggcataccatcaatttagcatgacaaaccatgagtccaaaggggtcactacagatagataaacattttttggtcatttagctaaaaaggcaaaatggttcacgggttttggctgaactacaaaaatccaggttcttcttttcaagctgcccgcaatcatgctttggtctgctcccgcaggcgccggattgggctttttacagggaccgcactagcagtgttcattgtgtaggcgccaccggccttaacctttccacagtccttgcattcccagataccaactggttttctttttacggcaaacttgccacagaacttacaaa

SEQ ID NO: 13326 - DNA, 68 bp, Zea mays
  Clone ID: LIB3150-118-P2-K1-C12
aggttaaaccacaatatttttatttttggcaaacacaaccggaccacaccggcgagaggttaaatttt

SEQ ID NO: 13327 - DNA, 265 bp, Zea mays
  Clone ID: LIB3150-118-P2-K1-C5
taccgtccggattcccgcgcggccgcccttttttttttttttttttttttttatttttttttttggtaaaaaaaacagttcttttctgctttgggggctcccacgacaaaatcacctgagtagctctcgagcaaacacgaccatacatttattgcgaccgtacaaacattgtaacaaaaggcagcagcgagctagtatagctccacaagaaaacatccccatcctcttcctttcttagtagggctccactggtgccctgaacttt

SEQ ID NO: 13328 - DNA, 137 bp, Zea mays
  unsure at all n locations
  Clone ID: LIB3150-118-P2-K1-C6
gtattaaaaacaganaatttttgcttgggggggttctttgaaaaatttttttgctttttncncaaacaacacaaaaaccccttttttaaaacccaaccaacttggaacttaaccttcctcaaaatattatagctcct

SEQ ID NO: 13329 - DNA, 342 bp, Zea mays
  Clone ID: LIB3150-118-P2-K1-C7
ccgtccgaattcccgtgcggccgcccttttttttttttttttttttggtaaatgtaaagtttctttgagatgaagcaacaacgtaaacagccataattattctcaataacccggtagcaatgcaggggaattaacaactcttacaacatcaggtgttgtaaaccacacaatacttcagaacagacacacataacacgatagcaggagcaactctcggcagatcacgggataagggcagcacactggcctgatgctgcgtcatcagcaaacttctctagtactcgtcaccctcgtcggcattctcgccctcatcgaactcagcaccgacctcctcgtagtcct

SEQ ID NO: 13330 - DNA, 239 bp, Zea mays
  unsure at all n locations
  Clone ID: LIB3150-118-P2-K1-D10
cgggcggttaggtcctctaacaatggagnncaaacctgacagacttaatgagtacaaaaggtggacaacactagaatgcttcaaaaggaagcctttactgctacccaaatcaagcaaccataatttaaaatatttaaacgagtgtactggcaccagaacattccagttcatggatattgtaaccaatctcacaagctttgagtggcagccaacccctttatcttggtccccactcccca

SEQ ID NO: 13331 - DNA, 195 bp, Zea mays
  unsure at all n locations
  Clone ID: LIB3150-118-P2-K1-D12
gccgtaccgtccggattcccgtgcggccgcccttttttttttttttttntnnnnttttttttttnttnttttttttttttttnnnnngggcacgcaacacaggggaatctcaccaaatatggaaaagggaggcgaggccacacacaacaaggggtaggggtaggggcaccaccaccaccacatgccatgcttttt

SEQ ID NO: 13332 - DNA, 194 bp, Zea mays
  Clone ID: LIB3150-118-P2-K1-D4
aaggcaagagaaactgtttcaaggaaatctgatattcctcacattcaatagaacgacaacatagtccaactgaaagcagtttgaacagcacctcaagccctactgatcataactaagatccgataggtttagttgtcaccggcatattcaaacatacatgttagaatcaaattacattcacattttctcacttt

SEQ ID NO: 13333 - DNA, 237 bp, Zea mays
  unsure at all n locations
  Clone ID: LIB3150-118-P2-K1-D6
tacgggtcggattccggcgcggccgcnctttttttttttttttttttttttttttttttttttacatagaagggtgcgccaaagcatcaggtcacaaaatccaagcacagttcagacaacgggttcgaatataaaaatactatgttctcgcggaaatgcacaaacaacacgaacatgcaagacttgtagcaacttgttttgatgatgcaggataaaacagatggatggattcttttt

SEQ ID NO: 13334 - DNA, 426 bp, Zea mays
  Clone ID: LIB3150-118-P2-K1-D7
ccgtccgaattcccgtgcggccgcccttttttttttttttttttttttatcaatacattgttcttgagctcaatcgcttttagaaaacagggtactaatcaggactgaaaacatggcataacgctctgaacttgagacgactaaccaaaaaaagtgtactcatcaggacacacatttcggtgcaagacaatccatgagaatgctctaagctacagcgctcttgcccttcttcctctgtagcttcttcatgtagaactcaagctctttaccctcaaggatgtacccatcagctcggccacactgtccagggcgggaagaaatgcatgccagcaaccgtccactgccaaattgctcctcaatgtgtgggtcaagggtacgtccctccttgcgcttctcaagcttactcgtgacatggttgctcttttt

SEQ ID NO: 13335 - DNA, 407 bp, Zea mays
  unsure at all n locations
  Clone ID: LIB3150-118-P2-K1-E3
cnntaaaaacagccatcaatancctcaataacccggtagcaatgcaggggaattaacaactcttacaacatcaggtgttgtaaaccacacaatacttcagaacagacacacataacacgatagcaggagcaactctcggcagatcacgggataagggcagcacactggcctgatgctgcgtcatcagcaaacttctctagtactcgtcaccctcgtcgccatcctcgccctcatcgaactcagcaccgacctcctcgtagtccttctcgagcgccgccaggtcctcacgggcctcagagaactcaccttcctccataccctcaccgacgtaccagtgcacgaaggcacgcttggcgtacatgaggtcgaacttgtggtcgatgcgggagaacaccttcacaacactg

SEQ ID NO: 13336 - DNA, 94 bp, Zea mays
  unsure at all n locations
  Clone ID: LIB3150-118-P2-K1-E4
ccgttacgattttcaatccataccaatacatttgcttacagatatacacacatgcacaacatngaccaagcttaaacagattaatccacaaaat

SEQ ID NO: 13337 - DNA, 104 bp, Zea mays
  Clone ID: LIB3150-118-P2-K1-E5
ggatccttcaagcaatacttagagcggcgggagtacttataggagtaccaccattctgaaacatagtagcgccaggacgaaatataggagcgtgcaaaaacata

SEQ ID NO: 13338 - DNA, 161 bp, Zea mays
  unsure at all n locations
  Clone ID: LIB3150-118-P2-K1-F5
tccacagttatcaggctgcatnttgatcacttaaccattcattgggctgataataccaaccgaattgcaaatagttcatgacatatgctccataattgacttctaacattaaaagtgctaagaacacaaatagcaaaactttgaaaatgcaaccagagaca

SEQ ID NO: 13339 - DNA, 282 bp, Zea mays
  unsure at all n locations
  Clone ID: LIB3150-118-P2-K1-F9
accgtccgnattccccgcccgccccccttttttttttttttttttttaaaaactaaaacatttaattaatactccaacacacaaacnncccagcgccggcttcttttaaaaatttttttttcctcaaacacaccacaacactctaaaacaccccaaacaaatcaaaaaaacatccacaaaaacacccaaatcgctcaaaaaaacaccataaaaaaaaaacccccccaaaaaacacaacccccccccccccaatattcaaaaaaaaaataaccaccccccttt

SEQ ID NO: 13340 - DNA, 459 bp, Zea mays
  Clone ID: LIB3150-118-P2-K1-G3
aggcaaaagagtgaactgtttggttttaaagtttcacggcgacacatagacctgacaaaatatgagccattaatgctcaaccaaccactaggatacacccaacatagtttcagacattccgatggaaaaaaatttattctcggaagcacttttctccgggggggaagaagacaactcgctcgtatcaccagaccttgagttcttcatcttagttggtgctgttcatgtggcggatcaggtcgaccacgcgggtgctgtatccgcactcgttgtcggaccaggacacgagctttacgaagttgccgtttaatcgcagtgtcaatcttagcattaaagaggctggtcttgcagctattcagggtggtcacggacttccagaacccgtacacgccggtcaggggcattaagctttggagttgagcttccggggttcctttataaattttttgcagggcgctt

SEQ ID NO: 13341 - DNA, 253 bp, Zea mays
  unsure at all n locations
  Clone ID: LIB3150-118-P2-K1-G5
attcccgggcggccgccctttnttttttttttttttttttnttttnnntttttttttttttnnnnnnnnnnnnnnnnngggggggagctcgattttaacatttcattactgcaaagaaagatacatcttgatctcgatttcccagcactgttgggacacatgattccacccaataacgaagcacatcagagattttttaatttgataactttttacataaagccaagcagggcaaagggaactgaggaaaccc

SEQ ID NO: 13342 - DNA, 274 bp, Zea mays
  unsure at all n locations
  Clone ID: LIB3150-118-P2-K1-G6
attcccgggcggccgncctttttttttnttttttttttnnntttnnttttttntttttttttcacttccaataaaagggggttattagcctctttgtagtttgtagactccaacaagctacaaacagaaccacgatacagaaggggcaaaatttatgtgtaaataaggcctggttcaaaaaccggcgataacttgggggatggatgttcagcccccatgtggcaattagaaacaaacagcacccttttggaacatttttctacatgccgacaac

SEQ ID NO: 13343 - DNA, 434 bp, Zea mays
  unsure at all n locations
  Clone ID: LIB3150-118-P2-K1-G9
accggtcggattccggcgcggccgcncttttttttttttttttttttttttttttttctctttcttatttttttttttttttttttttttgggtggttttttgcccctaagggtaacattcaaccaaggaccccggaaaaagcacactgggagggggggaacccaaaggacggacaggacaaacaattaacatggggataaaaattattaggggcccattcaacttaaaaattttggaaaaggcacacttggacataaaaggcagaatagcataaggccggtgtagcttttgacaattttatttgggggaaaccagggaattttgggggaccattcgggggaaaaactgtaaacgggcaggggggttttaatcgaacaaggggaaacccaaatttttaaaaaactttttttttttttaaaacctttcttccttt

SEQ ID NO: 13344 - DNA, 210 bp, Zea mays
  Clone ID: LIB3150-118-P2-K1-H12
aggattgaataacacttatatatcaatgccaaaggcgtacgacacaaggcttaaaaagtccaaatatgaatgtacaacaccacacgttgaaggtcaaacagcatctagttatagaaccacataagctgattcgacgattgaaaaataagccacgggtacaggcatcgatctggcaagatgggacaacacaggcaactgtccgacaagagc

SEQ ID NO: 13345 - DNA, 433 bp, Zea mays
  unsure at all n locations
  Clone ID: LIB3150-118-P2-K1-H2
ccgccctttttttttttttttttttttaaaatttttctcncgctttggatatccaccccaaaanaaacaaacaggggggcattaattagaggacttttccggatacaaagatccggaggtggaaaagtccggccagtactctcaaaagaacgagctcctgactggccggaaagcgttcgacaggtgagcaagtacagcgctgcgacacttgaccctgcaacaaacaaaaacgatgactggtgcagcttctaagcaaggtcccagctatcgttggtccagtgggcgtcgccccagctgcacgacatcgaccagatgacgctggaggggctgtgccacgcgaagtcctctgcgtccaggtaagctgttgacgggtttagttgctgttcccgcctccagccatttgtgcggtgttccaaattggccggtttccggt

SEQ ID NO: 13346 - DNA, 264 bp, Zea mays
  unsure at all n locations
  Clone ID: LIB3150-118-P2-K1-H3
gcccttnnttttttttttnttttcnttagttttgttgaaacattagattatttgactncccnnacacgnngacggcggggggaattagaggactgtttcggatacagagatccggaggtggaaatgtccggccagtactctcaaaagagcgagctcctgactggccggaaagcgttcgacaggtgagcaagtacagcgctgcgacacttgaccctgcaacaaacaaagacgatgactgttgcagctctcaagcaaggtcccagc

SEQ ID NO: 13347 - DNA, 347 bp, Zea mays
  unsure at all n locations
  Clone ID: LIB3150-118-P2-K1-H7
ccgcccttttttttttttttttttttttttttttaccctnggtanatttttccnnnnnnnannnaaggacgggggaatacttagcacagaatcacctttggatccacgaccatacattaaaaactggtgattattggaaacattttataatacaaagacaacaacttgggaatagaagtacacaacttatacttccatgccaaactggaacaggaaatagggtagtttggggacaacattttccagacagaagaggatggaaccacaatcagtttgaggggaaagagttttttattgatgcccaagtagaccttctgggcaaagatcggaacgggtgttcaagaaaa

SEQ ID NO: 13348 - DNA, 604 bp, Zea mays
  Clone ID: LIB3150-081-C6-R1A
aatcataatgcagtaatatttttttggaacctgaagcacaattgacgccaaaccaaatgctcacttgtcaggtttggaccaaaacccaggtaagagtaagaaactgaaaactggagcacatgtaaacgaatgaggaacatcagggggttcatagatgatcaggtctctcccatggtgtatggtaacacacaacgacccttcacaaacaatggatatgacacgcaacaaaattacgagtctttcttctcttctggttccgcttcaggcacctccttcacctccgcagcctcctcaaatgtctctcctgggacaagctcagggacatcgtcatcatcctgtgcagctgcactggcgctggcttcggcaccaggtacctgcttctggaaatgctcagcaagcctcttgaggttctccaggttatcagggcccagttggttgataattgttggcagaaggtcttgtagactttttgtctggggtactccactgactacccatgtattagcaggaatggatgcttgcactttagggttctggaattggataacaatgtcatccttgaaaatgttggactcctcaataccaggaataatgttcactccaa

SEQ ID NO: 13349 - DNA, 568 bp, Zea mays
  Clone ID: LIB3150-093-A8-R1A
tatttcctttttttttttttttttttttttttttttttttgtttttttttttttttttttttttttgtatttttttttttttttttcgaagttggttgaagtgtttgcagggatgatgatgagggaagggatgtgaagggggagaagatgcgatgggtcggaaaaaaacaaaaaagaaggaaggggagaaaaaaagggggggagcaaaagagggaaaagggggggccgaaaccggaaaaaaacaaaaagaaagggggaggggggggaaaaaggggacccccaaaaagggggaaggcgagaagggggggggagagcggggggaccaccaagggggggggggggaaagggggaccgggagacgagggcggggagggcccccccggggggggaggtggacgggccaaaaagagggaaggggggagaaaacccggggggaaaaaaagagggagacgggacaaaaaaagagggggcaaaaaaagggtgggtgggagagaggggcaaggaggggggagaaaagggggaaggggggggaagaaagagaggggggagaagaggccgacgaaggggg

SEQ ID NO: 13350 - DNA, 459 bp, Zea mays
  Clone ID: LIB3150-116-A12-R1A
ggaacaatacttttttcttttcatttcaattgttcattcaggtcattgctcacactgacactgccacccatggtgatgcgtgacacattattactcaatcatcgccgctaaatgactcaactagctagctagccagcggctatactacagcacatagtttcttcagtgggggacaccgccggcagcagcgtaggggcatggagtcggctgctgcaggccgcacatcgccgtcagttgctgcgctatctgcgccgccaacagccccgcgacctggccgctttgcggctgctgctgcaggatggactggaggaccaagccgaagatcgcctggaaccggtgctgcggctccacctgcctgaactgctggcaacactgctgccgcaacgactggcactgaggcgaacattagggcgtcgccgtcgggctgcactgatgcctcaggaactcgacgcattggcc

SEQ ID NO: 13351 - DNA, 261 bp, Zea mays
  Clone ID: LIB3150-080-D2-F1A
attcggctcgagtcaaccgcaaaactcaccggtctggtcgtaggaagaaaaacagaagaaggtgggaccccaattatccaaagccgaataggagtggctataacttcttctttgctgaaaagcattacactctcaaaactctctacccaaacagagaaagggagtttaccaaaatgattggccagtcatggaacagtcttagcccagaagaaagaatggtttatcagaacattggcttaagagacacagaaaggtacaaga

SEQ ID NO: 13352 - DNA, 489 bp, Zea mays
  Clone ID: LIB3150-081-C6-F1A
aggaaatcccctctggtctccccgtcccccattccacccgccgccgccgacgcgccgcgcctgttcaagatgaatgtggagaagctcaagaagatggcgggtgctgtgcgcactggaggaaagggcagcatgcgcaggaagaagaaggcagtccacaagaccgcaaccaccgatgacaagcggcttcagagcacgttgaaaagaattggagtgaacactattcctggtattgaggaggtcaacattttcaaggatgacattgttatccaattccagaaccctaaagtgcaagcatccattcctgctaatacatgggtagtcagtggagtaccccagacaaaaagtctacaagaccttctgccaacaattatcaaccaactgggccctgataacctggagaacctcaagaggcttgctgagcatttccagaagcaggtacctggtgccgaagccagcgccagtgcagctgcacaggatgatgacgatgtc

SEQ ID NO: 13353 - DNA, 486 bp, Zea mays
  Clone ID: LIB3150-093-A8-F1A
ctggcgccggcctgacgacgatgatgggcgccggcgggctgtacccctacgcggagtacctgaggcagccgcagtgcagcccgctggcggcggcgccctactacgccgggtgtgggcagacgagcgccatgtaccagccgctccggcaacagtgctgccagcagcagatgaggatgatggacgtgcagtccgtcgcgcacagctgcagatgatgatgcagcttgagcgtgccgctgccgccagcagcagcctgtacgagccagctctgatgcagcagcagcagcagctgctggcagcccagggtctcaaccccatggccatgatgatggcgcagaacatgccggccatgggtggactctaccagtaccagtaccagctgcccagctaccgcaccaacccctgtggcgtctccgctgccattccgccctactactgattcatgatatttgggaaatctcctctatccatccctctctatctatatat

SEQ ID NO: 13354 - DNA, 470 bp, Zea mays
  Clone ID: LIB3150-116-A12-F1A
gctttatctactccagagcgcagaagaacccgatcgacaccatgagggtgttgctcgttgccctcgctctcctggctctcgctgcgagcgccacctccacgcatacaagcggcggctgcggctgccagccaccgccgccggttcatctaccgccgccggtgcatctgccacctccggttcacctgccacctccggtgcatctcccaccgccggtccacctgccgccgccggtccacctgccaccgccggtccatgtgccgccgccggttcatctgccgccgccaccatgccactaccctactcaaccgccccggcctcagcctcatccccagccacacccatgcccgtgccaacagccgcatccaagcccgtgccagctgcagggaactgcggcgttggcagcccccgatctgggcagtgcgtcgagttctgagcatagtgagccgacgcgagcctactgtcgctagtgc

SEQ ID NO: 13355 - DNA, 352 bp, Zea mays
  Clone ID: LIB3150-001-Q1-N1-A9
gcggttattctgcaaaaacttcaacacgtccagaccgtcgtcaaaggtgccgacaatctgcgtctggctatgctctttaattagccagctcagttcctgttgtgccaggaattcgtcttcaacaatgatgactttcacaatatcactccggctcaaagcaataacgtagcctgtgaggcgactggggtgcgttggttaggaatgtaaaacgcaatttccgtccccggctccaggcggcggatatgcagcccctcgccatacaataacttcacgcgatgatggacattcagcaggccaattttattgcccggcatttcattcgctttgacccgctcaatcacctttggatcga

SEQ ID NO: 13356 - DNA, 369 bp, Zea mays
  Clone ID: LIB3150-001-Q1-N1-C1
atggcagcgccgagctggatccggctccggcagtcgcgtgcaaccctcctcatcctgctgctcattgccctcaacatctccctttcctccgccgccaacttcgagggcttcgactccgacgaccttccctccgcggccggtggcctcgatgctgacgatgacgaggaaggtctcgacggcgtcgacctcccgccccctccgcccatctccctctccacctctgcgccatcacctcccgtcacgacgacatccgcgccgaaccctaaccccgctacgcgtacgcctcgggaccccaccccggcgctcgacctctgggacgaggacgagttcgagggcatccccgtgccggaagcgatccccttcgacgac

SEQ ID NO: 13357 - DNA, 422 bp, Zea mays
  Clone ID: LIB3150-001-Q1-N1-C2
ttgtgacccttcgcccgcgcgccctcacgacgggggccgtctccgtctccgccggcgccaaggccgccgcggcgttcgcgcacaaggtccagaaggagctggccgcgccggcgcagcgccgcgcgggcttgacccgccggaccaagccgtgcagcgtgcgcgccgtcgcttagcccgcgcgcgccccccgagccacgtgtgacagcgcctcgttgaagagcgcgattacgatgactgagaagatactggcgcggtcgtcggagcgcgcggcgcttgatcccggagagaacgtgtgggtcgactttgacttgctcatgactcacgacgattgtgggcccggcgccttcgacatatgcaagactgagttctatgagtgctggcatcctgaagctgcttgactgccacctagtgccttttctact

SEQ ID NO: 13358 - DNA, 426 bp, Zea mays
  Clone ID: LIB3150-001-Q1-N1-C3
ggggaacctgagctccatgagggagcacgccgatctactcagctccgtccgagacgacatcaccgagtccagggcctccggtggcatgtcgccaagagtgcatttgctcagggaacgagcttccattcatggcagcatcaaccagattgatgaggtaattggccaagctcaaagcacaagagtagctcttaacaatcagagggccatgtttggagacattcaagggaaagtgaagcagctgggtgaaaagttcccggtaatcagaggtcttcttggtgccatcaagcggaagaaatcaaaggacaccataatcctctcggcagtgatcgcggcctgcaccatcttcctgatcatttactggctttcgaaatgatgggtcgcacctgagagaagctccctagatcccttggcccggattagctggtt

SEQ ID NO: 13359 - DNA, 390 bp, Zea mays
  Clone ID: LIB3150-001-Q1-N1-D3
tctttaaaagccgaccaacccgtccgcccttttaaagaggggatcatcagattgggcttattattccttattactccaggcaaggatcggagttgctctgaattgactgaaccatggcggcgacaatggcagtgacgacgatggtgacgaggagcaaggagagctggtcgtcattgcaggtcccggcggtggcattcccttggaagccacgaggtggcaagaccggcggcctcgagttccctcgccgggcgatgttcgccagcgtcggcctcaacgtgtgcccgggcgtcccagcggggcgcgacccgcgggagcccgatcccaaggtcgtccgggcggccgacaactgcgacatcgcgcgccagcttggcgccgtcgttcccgggcagc

SEQ ID NO: 13360 - DNA, 409 bp, Zea mays
  unsure at all n locations
  Clone ID: LIB3150-001-Q1-N1-D6
agccaaagcaagttgctaggtcctttgaaccagcaactgaagcttcctcgtctcatcatcgagaccagtaagcaacatggcggctaatctcaagtgggctcctgttctagccctcctcgtcgtcgttgctgccatggttggcaccaccagcgccggcaacatcgcagtgtactggggccagaacggcaacgaaggcagcctggcggacgcctgcaactccgggctctacgcctacgtcaacatcgcgttcctcacaaccttcggcaacggacagaccccagttctcaacctcgccggacactgcgaccccggctccggcagctgcaccggccagagcagcgacatccagacctgccagtcgctgggcatcaaggtgctcctctncatcggcggcgccagcggcagctac

SEQ ID NO: 13361 - DNA, 111 bp, Zea mays
  Clone ID: LIB3150-001-Q1-N1-D8
gcccgatggttcaaagcaaaggtataccgcgaagcacattttgatcgcgactggtagccgtgctcaacgtgtcaacatacctggaaaggatctggctattacttctgatga

SEQ ID NO: 13362 - DNA, 415 bp, Zea mays
  Clone ID: LIB3150-001-Q1-N1-E1
ccgtttccaagatgtcgaagcgaggacggggaggttctgctggtaacaagttccggatgtcactgggtctaccagtggcagccactgtgaactgtgctgataacactggagccaagaacctttacatcatttctgtgaagggaatcaaggggcgccttaacaggcttccttctgcctgtgttggtgacatggttatggcaactgtgaagaagggaaagcctgaccttaggaagaaggtgatgccagctgtcattgtgaggcagcgcaagccatggcgccgaaaggatggtgtctacatgtactttgaagacaatgctggagtgattgtgaacccaaagggagagatgaaaggctctgccatcactggacccatcggaaggagtgtgctgatctgtggcctaggattgccagcgcg

SEQ ID NO: 13363 - DNA, 330 bp, Zea mays
  Clone ID: LIB3150-001-Q1-N1-E2
ttgaccaggaacccttcgagggcgaggcctggcttgacgcgaaatgcttcaagtgagtgtgctgtatccagagctgtttagccctctaattggatgtctatgttgatctggtatatcttgctatgaactggttaaagtttgtgctggtttgagaatttttgtttaccttgtcatcatttaagtgtttcgccgttacaattttggtcatgtttttgaatgcctgtttgtatccgcgtcgtagttgggactatttatgcagactattcgatttaagtagattcaagtggcattattctctaaaaaaaaaaaaaaaaaaaaaaaaaaaaataa

SEQ ID NO: 13364 - DNA, 392 bp, Zea mays
  Clone ID: LIB3150-001-Q1-N1-E4
tggccttctaccaaaacctaggggagggcggcaacatgtcggtcgacagcctcaacagcatgcagaccagcatgcatggggggtccatcgccatgtctgtggacaacaacagcagcgttggctctaacagtgactcccgcactggcatgcttggtcatcctggtctcaaggggcctgccattgtgggaagctactcggttgggcacagcatcttccgccctggccgggtgtcccacgccttgagtgaggatgcgctggcacatgctctgatggacaataagttcccaactgagacactcaaagattatgaggagtggactattgaatctgggaagctacacttgtgaatgccctttgcacaaggtgcctttgggaagctctacaggggaaca

SEQ ID NO: 13365 - DNA, 392 bp, Zea mays
  Clone ID: LIB3150-001-Q1-N1-F2
cggaggaggccgcctcctggacctcttgtgtgacgctacggtcgtcttgctgcgttgtttggtggtgacaaaagctaattttaccttatgtcattgaatatcttcatctgatgcatactatgaacatcatgaagtcactaccaggggtgagaatgttcctgctccatttatgatatttgagtccactggatccccagatattctgagagagggatgcttataaaggatttgcggacttcatacgactttttttgtttttggatgcttatagggaacgacatgacatagaaggcatgtgtaaatgtatctcatgcctatattatttataatgatttcctttggcattatatcagcttatttgattggtgtccttttaactgcgaatgctactc

SEQ ID NO: 13366 - DNA, 368 bp, Zea mays
  Clone ID: LIB3150-001-Q1-N1-G1
gtccacctccccaaacgacatcgcggttgcgtgacaagttggttggccatttcttggaggagacatgtgtgaatccaacatttatcatcaatcatccagagataatgagtccattagcaaagtggcataggtcccgacctggattgactgagaggttcgagttgtttgttaacaaacatgaggtgtgcaacgcatacacagagttgaacgatcctgttgtgcagaggcaacggtttgaggaacaactaaaggaccgtcaatctggtgatgacgaagctatggctttggacgaaacattctgtactgcccttgagtatggtttggcaccaacaggtggttggggcttgggaattgatcgcctcacgatg

SEQ ID NO: 13367 - DNA, 391 bp, Zea mays
  unsure at all n locations
  Clone ID: LIB3150-001-Q1-N1-G2
gggctatcctgaatatgttctcaaggaaggtggagagaatgcagaggtcaacatttgtaacttagaagagtatatttctttggttgtggatgctactgttaagaccggcataatgcggcaagtagaggcatttaaggcaggattcaatcaggtgtttgacatatcatcactgcaaatattttctcctcaagaacttgattatctgatttgtggtcgctgtgaactttgggagccggaaacactgcctgaacatataaaattcgaccatggttatacctctaagagtcctgcaattgttaattttcttgagatcatggcagaatttactcctgagcagcaacatgctttctgncagtttgtgactggtgctcctcgctttcaacttgggggt

SEQ ID NO: 13368 - DNA, 372 bp, Zea mays
  Clone ID: LIB3150-001-Q1-N1-G3
tttttaaggttttagatacagtgtgagaaaggctttcataatatatattttacatgttgtaaaaattatatagatttttttttagaaaaaaacaatgttgaagttcacaatatttgacttaggatctaactaatatgtttggcctgagaaatttgcaatcgattcttatgtagatgggaagggtcggggagaagctcgatatcgactttgttatatccacaggggacaacttctacaagaacggcctcaagggcgtgcgcgaccaggcatttgaagaatcgttcgtggatatctacacagctcagagcttacagaagccatggtactcatttctaggaaatcatgattacaggggcaatgcgctcgcacaac

SEQ ID NO: 13369 - DNA, 72 bp, Zea mays
  unsure at all n locations
  Clone ID: LIB3150-001-Q1-N1-G4
agaagagctaacacgncatgcgcgcgcacgtaaacctggaatctttaaaagccaacaagctaactagtgaca

SEQ ID NO: 13370 - DNA, 420 bp, Zea mays
  Clone ID: LIB3150-001-Q1-N1-G5
tacagatgatgtcggtgtttctactccagcgaaagaaggaattatgcaaggaaacggagcacgatgcattgtagggtttcctccatgcaaagataacaagtgctactgctgcattggggggcgaactcatgctcgctactctacgatggctgagtgtagacatgcctgcttcaaaactaaaattcccatatattattaatagcattacctaccattacaatgtatcccacgcgtccgcccacgcgtccgcccacgcgtccggaaagttagtaatatatgatgttgacttgcaagttgcaaccaccaaataatttgttggacgtccatagctagaatgctacattttgtgtagaataactaaacatgattaatgttttcagtgtggtgtagaccaactaaacatgattaatgttttcagtt

SEQ ID NO: 13371 - DNA, 138 bp, Zea mays
  Clone ID: LIB3150-001-Q1-N1-H12
tcgttcatgcgggccgacgaatgcacagtccgggagaatatcggagaagcaagggcttcatattgggttctagaccaaagaagcaatggaaaaggaatcatctgccacatacgagccaaaaaggaacagttcaataag

SEQ ID NO: 13372 - DNA, 281 bp, Zea mays
  Clone ID: LIB3150-001-Q1-N1-H3
ataccactacaagcctacctgaaggttctgaaatttatcgagtgtgttcaatatggcaaaaaggagcgtggccatgaaccaaaacgcgatgggatgatcaattatcataacctgtctaatggtacacatgcagaaataagaaacctctttacactggtggtttttgtcacactgtaccctacagacacggaggatgaaaatgactgcagttcttagagagacatcatgattgggatgaattcaatactttgccagacatcaataaatactccatttgtccc

SEQ ID NO: 13373 - DNA, 421 bp, Zea mays
  Clone ID: LIB3150-001-Q1-N1-H5
tagggagttcacctcgctcggtgtgcagggagcgactagattgttgactgcataacaaaacccatcgtcgtcggatcggagatgatgagttccgtcgtcgtggatgctgctgctaccagcagcagcgagaagaagacgtcgtggccggaggtggtgggcatgtccatcaaggaggcgacggagaccattctcaaggacatgcccaacgcgtacatccaggtgctgcctgttgggtcgcccgtgacgctggaccttcgccccgaccgcgtccgtatcttcgttgacaccgtcgccatgactccgacagttgggtgatacacaccaaatgcaataaacaaaccctacttttttattttatgtttccagttaataataaaccaggccttagcttcttgttgtccttccttggttggtgttagct

SEQ ID NO: 13374 - DNA, 295 bp, Zea mays
  Clone ID: LIB3150-001-Q1-N1-H6
ttctcccgtccctttccacgcccaccgcccggcatccaccccgaaaccctaggggatcgtcaccatggccgcaaccaccctccttcgccgcctccccgctgcccgggcccaggcccaggccccggcattcatggcggcgcgaccgatctacgactccacggcagcgctcaccatcgagacatctgtccctttcacctcccacctcgacgacccaccctcgcgtgatgtcaccaccacccccgctgaactcgtgaccttcttccgggacatgtccctcatgcgccgcatggagatc

SEQ ID NO: 13375 - DNA, 297 bp, Zea mays
  Clone ID: LIB3150-002-Q1-N1-A1
acggccgacggctacgacatcggctcttcatcctcacgagcaaccgagaatccgtcggcgctgagatgttggttgatcaagacctcctatctggcgacgagctcctgtcggattcattcacctacaaggagctcgcgaacggcgtactgtgggaggtcgagggaaagagggtcacccatggctctgatgatgtgcacattggtgccaatccattcgccaagggtggagaggatgaaagcatctatgacacagacttgaacgtggctgatattgaggacacattccgtctacaggagc

SEQ ID NO: 13376 - DNA, 272 bp, Zea mays
  Clone ID: LIB3150-002-Q1-N1-A2
cccccacacccacccgatccaaccgagtcccggcggcgatggcggcggcggcgacgaacgccgatgtggaggtggtcgacttcgacctcgatgacgacgacctcatggacgaggacgccgggccggatccagtaccgccccatcggtcccgcctgcgttccaccatcgcgggcgacgacgggacttttctgactaaaggacggggtttacgctaggagcctaactcctgcgggacccacgactggagctttggcgcggggggacacgccgac

SEQ ID NO: 13377 - DNA, 226 bp, Zea mays
  Clone ID: LIB3150-002-Q1-N1-A3
catgaggggctgtgatacactgtttcaaaaaatcgttttagtcagcagaacaaatgtgtagatgatgacatggctaacgaatgcgatcccgctgatcgctaacaaggtgggcacacagactcaggcgaggaagaagttattgcatgttcgagaaagagacagtctatgtgaagcgggcacgagcttacacaccgtgctatgaattcttcactaaaacgaaggaaat

SEQ ID NO: 13378 - DNA, 335 bp, Zea mays
  Clone ID: LIB3150-002-Q1-N1-A7
gcggtctgcgctgatctatccttcgacatgcgcggtagtgaagactaggccacaaaatcgctgtctcaagcagcagacaggtggggaagatgtcttacttgccgaatgcgatcccgcggcgcgctcacaaagagcgcagcccagccagaggcgaggaagaagttttggcttttggagaaacacaatgactatttcatgcgggcgcgagcttaccacatcaaggtggcaaccattgctaaactgaaggaaaacgcggcattcatgaatccggatgagttctattttaaaatgatcaacactaggactgttggtggcattcatagacctaaggctga

SEQ ID NO: 13379 - DNA, 151 bp, Zea mays
  unsure at all n locations
  Clone ID: LIB3150-002-Q1-N1-A8
tccgtacaataaggcttactcacagaagcttgtacggggtgcaaccacctcttttncaggctgcaagagaaccacatgggatgtacagtgaacgtggctaaaatcctgaactttattcaacttaaacaggtactcatttatgtttgggggg

SEQ ID NO: 13380 - DNA, 311 bp, Zea mays
  Clone ID: LIB3150-002-Q1-N1-B1
caagaggggatcatcagattgagcttattattccttattactccaggctaggatcggagatgctctaaattgactgaaccatggcggcgacaatggcagtgacgacgatggtgaccaggagcaaggagagctggacgtcattgcacgtccaggcggaggcattcccttgcaagccacgaggtgtcaagaacaggggcctcaagttccctcgccgggcgatgttcaccagcgtaagcctcaacgtgtgcccgggcttcccaacggggcgcaacccgcgatagcccgatcccaaggtcgtccgggcggccaac

SEQ ID NO: 13381 - DNA, 182 bp, Zea mays
  Clone ID: LIB3150-002-Q1-N1-B2
agggtctgttgtattgatggatgatgcttacacgcagaatggctttcaaatcagtgacatcctcccctgtattgagcctgctagatatcctcctgctacgtgcagagaacgtgctaaaactctgtagatgtctacaagttaacacagcctcttgatttagatccggcgtgggaggatatgga

SEQ ID NO: 13382 - DNA, 400 bp, Zea mays
  Clone ID: LIB3150-002-Q1-N1-B3
tctctaacttgctaaacgtacagaggactcgttgacataacagcaactagacggtcactgctctcacctcgtgcctggctctgtcagctgccagcgcctctgcaatgcagatgccctgcccctgcgcggggctgcagggcttgtacggcgctggcgccggcctgacgacgatgatgggcgccggcgggctgtacccctacgcggagtacctgaggcagccgcagtgcaccccgctggcggcggcgccctactacgccgggtgtgggcagacaagcgccatgtaccagccgctccggcaacagtgctgccagcaacagatgaggatgatggacgtgcagtccgtcgcgcagcagctgcagatgatgatgcagcttgagcgtgccgctgccgccagcagcag

SEQ ID NO: 13383 - DNA, 242 bp, Zea mays
  Clone ID: LIB3150-002-Q1-N1-B4
agctatgacgatcctgtacacgtgcgtcagctcggatgctgttgagtataccaatctttcgatgagactaggtgacatcagctgcctactagaagcatcagatgcgcatggcatatcaaactttcgcaggccgctagtgctacactctacaccactatgctgtcgtgctggctatgcatgcgcatacacaactgtatatgcttagtgctactcttcgccggcggttccttttcttcttcccc

SEQ ID NO: 13384 - DNA, 430 bp, Zea mays
  Clone ID: LIB3150-002-Q1-N1-B5
gcgcaccgatccatttcagccgccgccgcgcgtaggaagcaggagcagcaaggatgcgcggctggccacgggctgcgctcgcggacgcgcgacctgttcgcgcgccccttccgcaagaagggctacataccgctcaccacctacctccgcacctacaagatcggcgactacgtccacgtcaaggtgaacggcgccgaccacaaggggatgccgaacaagttctaccacggtcgcaccggtcgcgtctggaacgacaccaagcgcgccatcggcgtcgagataaacaagcaggtgaatggtcgcatcatcaggaagcgtattcatgtccgcgtggagcatgtgcagacgtcccgctgcacataagagttccgcctgaggaaggtgaagaatgatcagctgaaggcggatgcaaaggagcgcggcgaggtca

SEQ ID NO: 13385 - DNA, 152 bp, Zea mays
  Clone ID: LIB3150-002-Q1-N1-B8
acggtgttgggtgacaaaagcggggaccgattcggcggcgactacttgcgtcgcttggtagacatggtccgcggcgtccagaacgacatgctgcaggcactgatcgaacacacactagtaagcatgaacaaagcagacatggggatgaacga

SEQ ID NO: 13386 - DNA, 399 bp, Zea mays
  Clone ID: LIB3150-002-Q1-N1-C1
gtgcaagaaagttttagtggcaaagaatctaatgaaaaggttacacattcaggaaatgttctgacccagattgagttggtcagtgttgcaacatctcacaagaactggaacttggatgaaggtcaagaaaaatttaaagattccattgacagtgatatggtactgagttctgcaaaggattgttcctgcattgttccattctacaggtatatctagaactgaaccctcagcagacattccattggaatattccccattaaatccagtatgtgatattatggatccatccctgaactgccgaagtatcccaacaaacaactgtgaaaatagaactctggtagagaagtcagaacattgtccggatgattataatttggaaatgaagaggaaaagaaacga

SEQ ID NO: 13387 - DNA, 285 bp, Zea mays
  Clone ID: LIB3150-002-Q1-N1-C2
gcggcgatcccctcaacgactccttccggcggttgctcgacatggtcggcaacgtcgtgatggacatcccccacgcgctgttcgaagagaagcttgaagccatgaagaaagccaagggggtgaagaacgacaccgacctcaccgccaccggcctcaaagagctggtgagccagtacaaggacgtctacgtggaggctaagggagagccattcccctcagaccccaagaggcagctggagttggcagtgctggccgtgttcgactcctgggagagcccgagggcaa

SEQ ID NO: 13388 - DNA, 346 bp, Zea mays
  Clone ID: LIB3150-002-Q1-N1-D1
ggcgcgcaatgggaccgggtccacactacgctgatgcgccatggtaacccgctcccggggaaccaacttgctgacctggcggctatgctggagttctgcgaacacctggtgcaggagaagcgcatccagatcgagaccgacgagatcatacgggagcgcgtccgatggtgctaccggatcgaggggatcaaccaccaccagaagtgccgtcacatcgcggaccaggacctagaggctacacacttcgtgcctaggggcaaagatgcccgagggaactagttacacggaacgaatccgttcatgcctggtcttaccctttgatcggcatgaacgataggtctatatg

SEQ ID NO: 13389 - DNA, 497 bp, Zea mays
  Clone ID: LIB3150-002-Q1-N1-E1
gtgacactatagaagatgtatgacgtaggagtacactatagacgagctatgacgatgcatgcacacgtacgtaagcgtcgtgatgctgtatagaagaacgaacaggcgtttctggccggccatgaggcacacattgcgagcgcgcgggaaggaattgaatggaggcggaccaggaagccttgaagggaatcaaccagatcggcgtaatcagttgcagctagcagggttctgcgcaagctcataactcgagagactcacttgctgaggcaaagtcagatattgttgttaagattggtctccggaaaggttctaaatcttttgaagaagcccgagcagcaggattcaccgaagagagtgggacgctgggtgatatatgggagactgtatcaaacagtgatcttgttttgctactgatatctgattctgctcaggctgataactacgagaaaagtttctcgcacatgaaaccaaacagaattcttgtttgtcacatggat

SEQ ID NO: 13390 - DNA, 168 bp, Zea mays
  Clone ID: LIB3150-002-Q1-N1-F9
ttttaaaaatgcaaaaatttcttaacttggtgtggtctttaactagtaccacgcgcatttataaattgattcccattcattcgatcacaaacactttattgatcaccttcctcattcaattcccaacatccatagtctctatatcgcctctaacacaatcactcatac

SEQ ID NO: 13391 - DNA, 286 bp, Zea mays
  Clone ID: LIB3150-002-Q1-N1-G1
tccccttgcgctgaagcctgatcttcacctggttcgcagcaagggcgcaggacctcgatcacgaggaggcaggggagcagcatccacaaccacaagccatggctgggagggccaacattctcactaacaactccgcccttatcgcaatcattgccgacgaggacaccgtcactggcttcttgatggccggcgttggcaatgttgatctgcgcaagaaaaccaactacctcctcgttgacaacaagactacagttaaacaaatcgaggatgcgttcaaagaatttac

SEQ ID NO: 13392 - DNA, 287 bp, Zea mays
  Clone ID: LIB3150-002-Q1-N1-G5
cttctgttgcaacaattgcataaagtgctcgtgtgagcacctagaaccaggcacatttatcctgggatattcaattatttgttcatgtaaactcaagccatggctgggatggccaacatccccactaacaactccttccttatcgcaatcatggccgacgaggacaccgtcactggcttcttgattgccggcgtttgcaatgttgatctgcgcaagaaaaccaactaccttctcgttgacaacaagacgacagttaaacaaatcgaggatgcgttcaaagaatttac

SEQ ID NO: 13393 - DNA, 376 bp, Zea mays
  Clone ID: LIB3150-002-Q1-N1-H2
gcgtgtctaaagtctcacagacggcctttataatgagggacccgctgcggcaacacggcgtacactgccagtggggcccgctggaacagggtcgccgcctgaccggcgtcaactctacgatcgaggctcacatcgttgagatccctgtggggacagaggatgacgtgagacaccgcggtggcggtggcgcggccggtgatcaacaggaaccgcagacgggactgggcacgctcaacgagggacgcccgggccaagttcatacgggctatcgtcttcaacgtgatagagaggaaacctgctcttgctaaactagaggcacttgaaagttcgaagccttattatgaagcagaattggacatagatgatgtttttagga

SEQ ID NO: 13394 - DNA, 313 bp, Zea mays
  unsure at all n locations
  Clone ID: LIB3150-003-Q1-N1-D6
actcatctctcctgcacgccatactgaccgagtcctgacttcaataccacgaaccaaccacctcaaatactccctactagctacctctcaannncagcagacacctgcctgctaaaacccgacgcacaggggagtgtcgctgatgtggtgctcggattcgatggcttggatccgtacgtgaaaggcatgtcaccttattttggctgcatagttggccgtgtctctaatataatcaaggatgggaagtttacactaaacggacttgagtattcataacctgtcaacaatggacctaacagccttcatggtgggt

SEQ ID NO: 13395 - DNA, 106 bp, Zea mays
  Clone ID: LIB3150-004-Q1-N1-A3
cccaattttataattttaaataataaaattggtgtcaccaaaaaacccgcgcattatatttttactcactttttaaatgaattatcgctatattcttcaatatttc

SEQ ID NO: 13396 - DNA, 449 bp, Zea mays
  Clone ID: LIB3150-004-Q1-N1-A4
ctggattcttttaaagccacccaacccttccggaaaattggccgttgcattgaatgtgaagggaaggatttccttagtcccagctgtcatttgccttgtgtcgaaaataagtggattgcaaagctctcagggccttgtctggcacaagcattgcagatgtacccagacttcaaaataaaggttgttggacattcactgggaggtggtacagctgctctgttgacatacgttctgagggaacagaaagagtttgcctctactacttgtctggcatttgctccagctgcatgtatgacatggaaactggcagagtcaggagtgcattttatcactccagtcatcaacggagctgatctggttccaacattttctgctgcgtcagtagatgatcttcgttcagaggttacagcatcggcttggctaaatgatctccgccaccaaattgaaca

SEQ ID NO: 13397 - DNA, 348 bp, Zea mays
  Clone ID: LIB3150-004-Q1-N1-B10
cctccggtttcgtcccagtctgaactcatcttcgggcgccgccgacgacggtggacgcccaccgcgcagccatggcggaacagactgagaaggctttccttaagcaccctaaggtgttcctcaactcaaagaaatctggcaagggtaagaagccaggcaagggtggcaatcgattttggaagagcattggccttggtttcaagactcccaaggaagcaattgaagggacctacattgacaagaaatgtgcattcactggaaccgtttctatcaaaagcagaattattgctgggacatgccacagtgcttagatgaacaaaaccatcattgttcgcaagaactattttc

SEQ ID NO: 13398 - DNA, 369 bp, Zea mays
  Clone ID: LIB3150-004-Q1-N1-B12
cccaataattgaccgccgcctcctggcggcccaccttctcctattataaggagtcttataacagctcgtcatcatcatcatcatagctgcctgctggaaaaaattatcctctcataacaacacaccacatcctacccgccggcatcataaagagagcctcctgtgccgcctaaggaatcatcctaccatcattaactgcgcgctgactactggctgttcaccaggcaaaccacccgtgccacctgctttattaaataatccaacaccccgcgagaagcggcttgcttattattcgccaccatggttgttttttttatcaccaagacgaccaacaactgattatcgttcatcacctgctcctcataaaag

SEQ ID NO: 13399 - DNA, 411 bp, Zea mays
  Clone ID: LIB3150-004-Q1-N1-B4
gttcttcttcgttccaaatctcccttcgcggggggccagggaccctttgacagcgcgggagatggctgatcaggaggccccagttgcagttgaggcaccaaccccagttcttggagagccaatggacttgatgactgcgctgcagctggtgatgaagaagtcaagtgctcatgatggacttgtgaagggtcttcgcgaggctgccaaggccattgataagcatgctgctcagctttgcgttcttgctgaggactgtgaccagccagattatgtcaagctggtgaaggcgctctgtgctgaacacaatgttcaccttgtcactgttcctgctgctaagactcttggcgagtgggctgggctttgcaagattgactccgagggcaaggcaaggaaggttgtaagctgctcctg

SEQ ID NO: 13400 - DNA, 154 bp, Zea mays
  unsure at all n locations
  Clone ID: LIB3150-004-Q1-N1-B6
ctctacttttttccccctatctccactccctcgccaaattttaaaacctcctcgcctccacncactcactatccaaacacttactatactctctatacacatcctctctacactttacctccacctactatacaccttttatacaattccttac

SEQ ID NO: 13401 - DNA, 91 bp, Zea mays
  Clone ID: LIB3150-004-Q1-N1-C12
actcgggacgtctgacggcctgtgaactcctggggggatcctctaaccgtgaccgggtactcctactcctaggaggataagaactaggagg

SEQ ID NO: 13402 - DNA, 394 bp, Zea mays
  Clone ID: LIB3150-004-Q1-N1-C4
gttgtcctcctaacagcagttaccacggccgacgcaaatatgcctggtagttcgagggaagaacttgccgccaccaagatccaaactgccttcaggggttatctggcaaggagagcattgcgtgcactaagagggctagttagattgaagtcgcttgttgatggaaatgctgtcaaactccaaaccgctcacaccttgcaatgcacacaagcaatgacaagagttcaaactcaaatctactctataatggtgaagttggaagaggagaaacaggctcttcaaagacaattccaattgaaacatcaaatggaacttgagaaaatgaaaattgattaagattgggatcacatccatcaatccaaagagcaaatttaggccaaccctaatattaaac

SEQ ID NO: 13403 - DNA, 115 bp, Zea mays
  unsure at all n locations
  Clone ID: LIB3150-004-Q1-N1-H12
ggagnncaagaggaagaacaagaaggaggggacnggcaaccccagggcgcgccggaggcngaggaccgcnnggngagagggcgaagaggacncnggcnnccacggcccagaccac

SEQ ID NO: 13404 - DNA, 414 bp, Zea mays
  unsure at all n locations
  Clone ID: LIB3150-004-Q1-N1-H2
ttaaaatagaacgtgggggtaaagatgttggcattactgcattctccaagatggttggctatgctctccaggctgcagagatactgtccaaggaaggaatcagtgctgangtgatcaaccttcgatcgatcagaccacttgatagagctgctattaatgcatctgtcaggaaaaccaaccgattggtgactgttgaagaagggttccctcaacatgggattggtgccgagatatgcatgtctgttgtagaagaaagctttgagtaccttgatgccccagttgagaggatcgctggagctgatgtacctatgccctatgctgccaaccttgagagaatggctgttccacaggtcgatgacattgtgcgggcagcaaagcgggcctgctacaaggcagtaccaatggccgcaactg

SEQ ID NO: 13405 - DNA, 316 bp, Zea mays
  Clone ID: LIB3150-005-Q1-N1-B1
cggacgccctttttttttttttttttttagaggcaaaagagcgagctgatttgattaaaaggttcacggcgacacatacacctgacaaaatatgagccattaatgctcaaccaaccactaggatacacccaacatagtttcagacattccgatggaaaaaaatttattcttggaagcacttttctacgggggggaagaagacaactagctcgtataaccagaccttgagttctttatcttaggtggggctgttcatgtggcggatcaggtcaaccactcgggtgctgtattctcactcgatgacgaaccaggacac

SEQ ID NO: 13406 - DNA, 154 bp, Zea mays
  Clone ID: LIB3150-005-Q1-N1-B12
caccgttacataacctacagccgcctgtttactggctcggacatttaaactccatgagtcaaggtcaaccactcaaaccctttatttactgagaaggatgttgctgctttgactttataaccctgagatatcccagtcgttccctaccctaata

SEQ ID NO: 13407 - DNA, 333 bp, Zea mays
  Clone ID: LIB3150-005-Q1-N1-B4
tttcggtcggcggcacggtagcgttaaaccgggggacctacaagcgacggccatgacgttctgacagacccgcgattttctcttctgtggcatatgcggcaccctcctgaccttcgactccgtccgctccgtctcctgccctctatgccacttcaagcgcgatgccaaagaaattgaagggaaagaaatacagtacacgatgaccgtcgaggatattctaagagggttaaagacacaaacggaggacgttgttgagcaaaaaccattgacaaataaagcctgtccaaaatgcgaccatccaaaagctgaattttacaacatacagatgcgttc

SEQ ID NO: 13408 - DNA, 331 bp, Zea mays
  Clone ID: LIB3150-005-Q1-N1-C6
tttcgatatatcacccgacttatccttacggacgcttctattcaaaaccaacggtcaatacatgaccttccagcaggcctggcgcactctcaacgtttacgtccttaccccataccacctcatgcatcgcctctccgcttccgccttcctgctcgactttctctacgcagcatacttgttcacatttacagtcactccaaactacaccaagatcctctcgaccgtaatccgtatcgatctcggtaccacctactcatctgtaggtgtctacaacaacgctcatgtatatatcatcgctaatgaccaggctaaccgtatcacaccctcatag

SEQ ID NO: 13409 - DNA, 324 bp, Zea mays
  Clone ID: LIB3150-005-Q1-N1-D5
tcttctccctcgcgcgctcaatatttcgggagcgtacttaagcggcggcgcaggatgactctttatatctctgattacaccatctcgtatacaatctccttcttcatccccggatggattttctatatcattcctatgtaacccattaaggctcactcttttaatgagtataatgtgctttttcaatgtaagttatactaccaaaacgttatggtctttcagttctttacgtacggtaaggtgctcttccttgatttaattattcatgttacagagagggatgagttttcgtaccaagagattatcactcacctgcccctttgt

SEQ ID NO: 13410 - DNA, 377 bp, Zea mays
  Clone ID: LIB3150-005-Q1-N1-D7
tttcggaaagtgtatggcataatactggagagtaatttcgttgagtcgggcgctcaaacaaattctacacttgagtcataaaaagtttggaaagagctgtatcctgaggagcccttctaattgttgttcacaagaacctttgacactgccgtggatgtcaacccttcatgtgcataggaggacattacctatgatctggtcttggctgttaatagacaatcctctttctattatcatgtttgaacaccaacaatgcatgatccacggtttctccaagaagctctatctcgatacaaggtgtttttttacctgatcaagattaatcatttaaaatgatttcatcgctttctttgaccaacctattatgtggatctttt

SEQ ID NO: 13411 - DNA, 148 bp, Zea mays
  Clone ID: LIB3150-005-Q1-N1-D8
ttctcgcacatccagaaaacataaagcgggggctctaattcaacgcatagccgagccaaaaaaattactcactaccacccctaatcctcttacacttaccaaaacctcaaagctgacttctccagccactcctccttccctctcaaac

SEQ ID NO: 13412 - DNA, 366 bp, Zea mays
  Clone ID: LIB3150-005-Q1-N1-E3
tctttctttatctccctaatacaacacatcgggccgccgatatcaagatcacaggcggcaattactagtgtccttctctccaaggaggagatcgataacatgtttcaagacgctcataagtacaagtctgacgatgatgatcacaatataaatgtggaagccaataactctctggagaactacttctacaacatgcgcaacacgatcaacgactataatattgcttccaagcttcccaccgatgacaataataagatctatgactccatcgactcagccatcacctggctggactccaaccatctcttctaggctctactaattctagtgacattatgaatgagctttataacctttgcaacccca

SEQ ID NO: 13413 - DNA, 293 bp, Zea mays
  Clone ID: LIB3150-005-Q1-N1-E6
tttctctcaactctttcctcaaatacagcacgcttcttttattaacagagggggctcttatatatcttttcccttacttttctaatatctccttactttatatcctagtcacacacaatacatctattactcttattttgcaatattcttactccaacttaactttttatcttctttccatattctattccaaattttttatttttacattttatctcttaactttaaattcttttctatcaacacttatctaatttttctatttattttttttctaacattctttttttttt

SEQ ID NO: 13414 - DNA, 373 bp, Zea mays
  Clone ID: LIB3150-005-Q1-N1-G10
gaagaattactcatcatcaagagcagggaattacttctggatgcctggactgcacatgtcaaagccaatcattaatatgatgttcctgaagatattgctctgcccataactggtggtaacaccaagtatttggaatggatcaagaacagcacccttgacaagtgatctcttttttttttgtagctcgacataatgccattatcgaagttcccatggctccttacctctttcagtggcttgtacacaatggattatccttttttgacctggacatttcaattacttttctgtacctaatccatattctactatcttcaagtaacaattgattttgattttcctttgttggtttatccaaatacatttccttgct

SEQ ID NO: 13415 - DNA, 199 bp, Zea mays
  unsure at all n locations
  Clone ID: LIB3150-005-Q1-N1-H9
tcttccaatctaactactacctaaaatagcggcggttttttatacatctccgtcctaaatttcaccgttcatactcattactcaaatcttcattccattatttctgcttaacattacccaactacttcctctacaacactttgatacttaacttcacatttatcatgttcttttcctacacccanatcattttcaaact

SEQ ID NO: 13416 - DNA, 320 bp, Zea mays
  Clone ID: LIB3150-006-Q1-N1-A7
tttcggtgagccaccccgttactttttgacgcgcggtgagtctcagtcgagtaaagtttactccaaatcattcacactcacaccactctttcacacaccagtacaccacacactctcctttccgatcccatccctctccagccaccttcctccgctcgccgtgcttctgctttcttcgccaccaccgccggcatggctgctcgctgcccctacttcgccgtctaggagtcctcccgcggcatccgctctgtggagtccccggccgtggcgctccgccggatcctctcgacgcctggtgcgcaccaagcgccctgctgcta

SEQ ID NO: 13417 - DNA, 374 bp, Zea mays
  Clone ID: LIB3150-006-Q1-N1-A8
tcttcctctcctcccctacgcacacatttttggggaattcgagctatgtgggctcgtcttctcatggcatatttcaagacaacaatcatcctagccctaattttttttatcttctcttcaacatttccttcctacaaaaccttacaaatcttcattttcttcttgtatcaacaactatatgctacaccattcgttgaccctcttattaactactctgaccacttcactacctctacattcgctttttaatgcctatcccccattcacaaaaccaaatcatcctacttcatacattatgtcaacaaattctaatttcttcttccctccattaaaacaaccaatctataacatccgttgtgtgatacactcaatta

SEQ ID NO: 13418 - DNA, 338 bp, Zea mays
  Clone ID: LIB3150-006-Q1-N1-B12
tctttctgtcgcgccgttcgccaaggtcactttgcagcacccattcaggtacaagcaccatatggagctctttgtcgcatccgagggcatgtacacgggccatttcgtctactgcggtcgccgtgccaccctctccatcgtcaacgtgctgcccctccgcgggatccctgagggtgccgtcgtctgcaacgtcgagcaccacgtctgtgaccgcggtgtcttctccagtgcctctggggactactccattgtgatcagccacaaccctgacaacggcacatcgaagattaatctgccctctggcgccaagaagattgtccccagcagctgtcgtgcta

SEQ ID NO: 13419 - DNA, 322 bp, Zea mays
  Clone ID: LIB3150-006-Q1-N1-B6
tacataatcgatccatatcctccttaagtgagcatcttaaccaaccgacctcacactattaatcatcgacttcctactcttacctcttcaaatacattattatcagttacacaagcttatcaaaatcattccttctttttcaattcacacataatctcttccatcccatacactatatcaccatcatctttaaatttctctctccgcattatcaccatctataacattcccatcaaacttcatatttttgtacacctatatccaataatcattcatatctattactatgtcatacttcataatatcttctgtaaccattttt

SEQ ID NO: 13420 - DNA, 368 bp, Zea mays
  unsure at all n locations
  Clone ID: LIB3150-006-Q1-N1-D9
gcttatgaatatcatgattaaagcgaacatgttncaggctttaaatccacagattgtgagcaacagccctgtttcgatctcgtacagcatcacagcatatctcccatcaacaagccgcagcacagatgtaccctcaaatgcatgtgcagcattttcaaatttcatgccatatcgacaactctattctccagtttaccccatgcctatgccaaactattcccaaatgtcccttatccatcaaatggaaataattattttcagatgcccagtggaggttcacatttaactgcaggaagcgtgaagtatggagtttcacagattaaaccactcccatctggtaacccttctggctatggaaattacactca

SEQ ID NO: 13421 - DNA, 162 bp, Zea mays
  Clone ID: LIB3150-006-Q1-N1-E1
tttcgcaaccccgtcatcgatctcgtttcaaggggtccatcctcgtttcctgcgtcccgcatcatctcaaccccatggccaagatcaagatcggtatcaatgggttcggcaggatcggaaggctggtggccagggtggccctgcatagttactatgtcgagc

SEQ ID NO: 13422 - DNA, 96 bp, Zea mays
  Clone ID: LIB3150-006-Q1-N1-E8
tgtcggttcattttttcttaccaaaagtaattatacatcttaatcttgaccttgtcaagtctattttaaattcattttttacttgttcatcttatt

SEQ ID NO: 13423 - DNA, 385 bp, Zea mays
  Clone ID: LIB3150-006-Q1-N1-F12
tttcgtccgccgacgtacctcctcctcccaggcagcatccaccggcaccgtgggaaatgaataccatcctggccacggagacgatggtcatccccgagggggtcacggtcacggtggctgccaagctgttgactgtggaggggccgcgcggtaagctcaccctcatcttcaagcacctcaaccttgacttccatctgcatgactgcggtcgcaagctcaaggtcgacgcatggtttggcacccgccgaaccatggccgtcatccgcaccgccatctaccacgttcagaacctcatcgtatgcgtcaccaagggtttccgatttaagatgcggttggtttacgctcactttcccatcaacgcctacattaccaactccaacttctt

SEQ ID NO: 13424 - DNA, 377 bp, Zea mays
  Clone ID: LIB3150-006-Q1-N1-G10
tttcgtccttcctcgcgagaacgagaggctggaccgcatccagtggtggggcgcggtatgggcggaagcgaatgcgccctgggcgacgccgctataggcgaggaaaccctaaattacgacggcgatgacgttgagatggccgacgccgactcggatacggaggaagcccgagcagctgaggtctccgctgcaactggaggatccgccggaggtgttaggcaggcggagaaggacggaccggatggaaagaagaagaggaagaagaggaggaacaaagggaagaagaacaaagggaggcaagatggggcgcccaccaacatcgcggacattaatcgatttgttcttaacacttgcaagcgcttgaaggagaagaagtc

SEQ ID NO: 13425 - DNA, 237 bp, Zea mays
  Clone ID: LIB3150-006-Q1-N1-G11
tcttgaatcctctatattcaacccactctttctgtggaaattattatcactcatatggggatggttttaaagtgatgagggagttcatatcttattactacagtatttcattattgactctcttcattgtataaagaaattgcatatactgtgtggaaatatgcagctacaataacgtctgtctttccttcaccaaatgaagtcatggctattcttgtccacctattgctacaacaa

SEQ ID NO: 13426 - DNA, 384 bp, Zea mays
  Clone ID: LIB3150-006-Q1-N1-G5
ttgcgaccgcggtcgtggagtaggactgggggagaaagcgcgatggggaagaagcggcagcttatctgcctcgcagccgccgtcgccgccgcggccatcctcctgacagcgtcggccaagaagtccagcgacgtcaccgagcttcagatcggcgtcaagtacaaacctgagtcatgtatcctgcaagcacacaaaggagacaaaattaaggttcattatcgtggggcactcactgacggatcagtttttgattctagctatgacagaggtgacccgtttgaatttactcttggaaatggccaagtgataaaaggctgggaccaaggattgctaggtatgtgcgtcggtgaaaagcggaagctaaagatacctgctaagatgggc

SEQ ID NO: 13427 - DNA, 348 bp, Zea mays
  Clone ID: LIB3150-007-Q1-N1-A10
ttctttcggtccgattcttattcttttatcggacggaatccttaacctatgggctgtcgaactaatgattctttgtaccctattttgcttttgcctttcatccaaagatgtgctacccagagttactaccgtgtccgtatccttgcatcatgggcattaacttgtttggtatctaacgagagattgctttacgttattagtgatatactggataattcaccttgtggaagttcacaaagcaatggctcacagtgtacaacatacttatcctgccatatcagctaatatggtaaaagcaaatgttcttttgctgcctaaagtcattcattttcaattacatttttcttt

SEQ ID NO: 13428 - DNA, 207 bp, Zea mays
  Clone ID: LIB3150-007-Q1-N1-D7
tcatccatgtgagactgcatccaccaagtgcagggttactagacgcggctgttatgccctaaatgtccttttacctcatcctatacaggctgtagctctttatcttgtacttgttcttaataatgtcttaagcttttaatccgtacacttatagtaactaatctgagctaaggaaatataccttcacaatctttcaaacgatccatt

SEQ ID NO: 13429 - DNA, 349 bp, Zea mays
  Clone ID: LIB3150-007-Q1-N1-E10
tttcggcggatataagaagcgtgtgcacaggggccggtatgtatgccattcgtgcccgcacgaaaacggtgacagagaaggattttctcgatgctgtcaataaggtcatcaagggctaccagaaattcagtgcaacacccaagtatatggtgtacaactagagtgtcttcatggaatatgttgattttataactccgggatcttttcggtgattgtgtcatcgtgaggttctatgcaaggattgttgtttgtttagaaatctggatccccagggattgcatcctgtaccacatgtttttaagacaaggttattcccttggtggcttacttgaatctgtttcttacttta

SEQ ID NO: 13430 - DNA, 349 bp, Zea mays
  Clone ID: LIB3150-007-Q1-N1-F6
tgactccgccgccgctccgcctcagcggatggcccgtcgcgacctcatggatcaccttcagctttcaatcatggcggacgtcgatgtcgaaccggaggttgccgtcggagctcccaagaagaggacgttccgcaagtacagctaccgcggcgtcgacctagatgcgcttctcgacatgtccacggacgaccttgtccagcttttccccgcgcgcgccaggagaaggttccagaggggtctgaagaggaagcccatggcgctcatcaagaagctgcgcaaggcgaaaaatgatgctcctgctggtgagaagcccgtaccagtcaagacacattttccgtaacatgatcat

SEQ ID NO: 13431 - DNA, 99 bp, Zea mays
  Clone ID: LIB3150-007-Q1-N1-G3
ggaggattgtgaggccacccaagaagggttcagctgttctgcgccctcgcaccaggactctgactgctgttcacgatggcatcttggaggatgttgtct

SEQ ID NO: 13432 - DNA, 377 bp, Zea mays
  Clone ID: LIB3150-008-Q1-N1-A10
gccaagtgggaggaggaaatgaatgtggacaagtcagaaaaagagtctcacatctcataactggagcgacagattacattatctgagataaagtacatggaggagataaagaccatgcaagtggagacaactgaaaagaatgaagcactaacagccaagatgcaggaacacacagacctacagcatgagaaagatgagttggaacaacagttgctggaagtgaggaaggaactggatggtgcctaccacaccatagcaaatcatgaagaacaggcttctgtgagggagataaagtgggacgcttttaggaagtacacggagggatcgtctgaagctgagcagcagcgtgctgaggagctggtactacaagtagcagc

SEQ ID NO: 13433 - DNA, 393 bp, Zea mays
  Clone ID: LIB3150-008-Q1-N1-B10
acgcagacacagagctcgaccccccctcccctatcttcgctcgtccagccctgaccacccgcatccccgtcagtcatggcagcggcagcaggcggaggcgcggtgcgtgcgctgtcccagaaggagcaggacatacagatgatgctcgccgccgacgtccaccttggcaccaagaactgcgatttccagatggagcgctatgcctttaagcgccgcaccgacggcatctacatcatcaaccttggcaagacatgggagaaactgcagcttgcagcgagggttatcgttgccatcgagaacccgcaggacatcatcgtccagtccgcccgcccctatggccagcgtgctgtcctcaagttcgctcagtacactggcgctcatgccatcgctggg

SEQ ID NO: 13434 - DNA, 369 bp, Zea mays
  Clone ID: LIB3150-008-Q1-N1-C2
gtcagggaagggcggaaggcgtcggtcgggcggcagctctgctcggtcacggcgcttgaagggcggtgtataggccgccggagggagtgaagagggagatggctccggccagcgggtggggccgggcggtggggaacacgcggtcgttcgtgggcaacgcgctgggcggcctccgcgggtggagcaatctcgcctcctggaccgtcgccggaaccctcgcctactacctctgggtgaagcccgcgcgccagctccagaaggagcatgaggagcgagccactttggctgctgcaacggatccttatcgttacgtcgagaagcggaaaccgattcctgatccacaggacactggccttatctatgggaaga

SEQ ID NO: 13435 - DNA, 284 bp, Zea mays
  Clone ID: LIB3150-008-Q1-N1-C8
gtaaaaactgaaggctctcttggggcgtcgtattctaaaaggagatgcgcctaatcctcacccttctacaaactgcaatggatccttctaacttgcttgcccatgaggctgcatctgtacttgtacaaattcatgatgctgaagctattcctgcactggtggctattctcaaaaatctttcactacatccatatgtccttcatgatgcatcataaactctttgagctattattctttaaaataacattcctgtgttggatgaaattttaacaactgatccttct

SEQ ID NO: 13436 - DNA, 69 bp, Zea mays
  Clone ID: LIB3150-008-Q1-N1-C9
tcactttcaatcgcattttccttgcaaccgagggggtattctcctaccaaccaaagacctattgctccc

SEQ ID NO: 13437 - DNA, 373 bp, Zea mays
  Clone ID: LIB3150-008-Q1-N1-E3
ctcgcgccggggctcgtcgtccttgccgctccactgcccgcagcagatgcaccacctgcacccagccgtctgccggcgtccgcaccagagcgtgtcgcctgctgcaggatacgccgtccggcccgttccccgcccgatgccagccagtgggtaccgcatgcagggcggagaccaccgcagcgtgggcggcgtggctccctgcggctacggagaggcgctcgtccaggccggtggaacccaacacgttgttggattccacgacgacgaggcaagctcttcgagtgaaaatccgccgccggaggggcgtgctgctggctcgaactagcttagctagcttctcagttccccgtgtacaataagaggggcggtcgcg

SEQ ID NO: 13438 - DNA, 120 bp, Zea mays
  Clone ID: LIB3150-008-Q1-N1-E9
tttctgccaacacacacatattactctgcagtgcattccattccatctcaaacgactcaatcatgtgctgtctctacaccaatctatttcttgtccttctactcctctcttgttacacca

SEQ ID NO: 13439 - DNA, 334 bp, Zea mays
  unsure at all n locations
  Clone ID: LIB3150-008-Q1-N1-F1
cgggncgccctcntttttttttttttttttttttttttttttttggtttggtttttttttttgttgtttgggcaggcaacaatcactttttcagctaccattctattcagaaccagtgttacagggaaaacacattctccacgggctacattacattttgcgctggagagctcacaacagcttcacatttttgatgaccattaccattagaatcggtggcggggaaaagaaaagaaaaaaggaaaacttgaaagaacaaaccgcgcttgagacgatcgatgcctatagaagactcagtgccacacaagagcatttaattctgacctaagggtgg

SEQ ID NO: 13440 - DNA, 265 bp, Zea mays
  Clone ID: LIB3150-008-Q1-N1-H11
ggccatcagctatgaaaggaacaaggctgctgaaggacatgtcagtaaagtcttgggaaattgcgtgagggcaattgcttgtggaggtcgtcacagtgctgtagtaacagattcaggagcacttcttacatttggatgggggctgtatggacagtgtggacaagggaatacagatgatgttttaagtccaacgtgtgtatcgtctatcctgggaatcaagatgcaagatgttgccgcatgtttgtggcacactgtatgtacatct

SEQ ID NO: 13441 - DNA, 284 bp, Zea mays
  Clone ID: LIB3150-008-Q1-N1-H12
gcgtacgcgtacaccatatatgcctgaaagcaggttgctaacattaccgtgcgcatacattccaccagaaacatgatctgttcattgacgcgaaaagaacactcgcttctgaattttggctccaaagatctggtggtacatgtggatgatgttcaaccgtctgaaatcaggaaaccaacaaacgcagacagactggatttctgcccttgtatatactgagatattccggtgttgctagcaggaaccgagtaaagcctccttccattttgattctttctttcttt

SEQ ID NO: 13442 - DNA, 144 bp, Zea mays
  Clone ID: LIB3150-008-Q1-N1-H6
tttgcgttctaacctttttaactatattactgggtggggacataccagccagcgatggcgctcctttcgctgtacaacaagatccggatcatgaaggtccgcgacgtgccagctttcctgaagacggtcttgacctgtaacaac

SEQ ID NO: 13443 - DNA, 407 bp, Zea mays
  unsure at all n locations
  Clone ID: LIB3150-009-Q1-N1-A1
agatcccacagcagtccagggtagagacttgacaggtcatgttctagccctggtccaggtccatgcgaaaggagaagagagacacggagcctaactaaaccctaggtaacggaaaggaagcacgagcccggatagcctccgagctccgcagagcttgtcgacttgctccaggcgtgcaagaagaattcatcggtcgtcggcgacacctaacctccttgtgacgcgatacctccagaatttgaacgccaaaatttccgccgccgccccctctttcgaaagtcccaagagatcttccatggacgacattgatgacgacggtgatgacgacgacgattctgatatgaaggatcccactcctgagcgagacgagctcaatgaagagattgntgagtctgatcttgagctcg

SEQ ID NO: 13444 - DNA, 396 bp, Zea mays
  Clone ID: LIB3150-009-Q1-N1-A12
cacgcgtacgccgacaagagactcactgccttccatcctgaaatcgaggagctcatctacagcgacgtcgagggctccgagcacaagtgcgggctgaaggacaagaagaagccgatcatcttctcgatggcgcgtctcgaccgcgtgaagaacatgacaggcctggtggagatgtacggcaagaacgcgcgcctgagggagctggcgaacctcgtgatcgtcgccggtgaccacggcaaggagtccaaggacagggaggagcaggcggagttcaagaagatgtacagcctcatcgacgagtacaagttgaagggccatatccggtggatctcggcgcaaatgaaccgtgttcgcaacggggagctgtaccgctacatttgtgataccaaaggcgca

SEQ ID NO: 13445 - DNA, 517 bp, Zea mays
  Clone ID: LIB3150-009-Q1-N1-A8
tcgggtcgataccgaataatcatcgggcagcgagatgatgcggagcatcggcatagtcgagagagagcatgttccttcagccgtgtgcggtgagaatgccagccaattagcagccaggcagaagattatttcagcatagaggatttctatccatgatccaatgatacgtctgagcatcaatgggccatggtaggatttaggtgacgagagacgagacaatgagcctgcgatggatcctcattcttcaatccatcctccaggaaagcatcttcccaggatccacataagttcatcagggagaggagagatgtccgcgagcgcttcgggagccatccgcttgatcctcatccgacgatccccatcctggatcagtcgattcccctcgacgaggaaccactattatttcgtccatagagtttcccatttagtatgtagtctccagttgagcctcaccatttgggaaatattcccactagtcggagtcgtcttcaaccccatcatgaacgagcttttcacg

SEQ ID NO: 13446 - DNA, 208 bp, Zea mays
  Clone ID: LIB3150-009-Q1-N1-B12
cacacactcgcgaactccatttcgatcccatatgtgatgaatccatactcgcgttgtgcgttttgcaacctctcatcctcatagccaatatcaagatcggtatcaacgtgtatagcttgatctgttggctggtggccatggcggcccttcagagcgacatctgaaaactcaattctttgaacgtacacgatataacaagcgattacat

SEQ ID NO: 13447 - DNA, 88 bp, Zea mays
  Clone ID: LIB3150-009-Q1-N1-B6
tcgtcatccaccaacacctgcaaagggttttggtatctttgttacggtccttaacccctattcatgtaccaattcactcaccattctt

SEQ ID NO: 13448 - DNA, 324 bp, Zea mays
  unsure at all n locations
  Clone ID: LIB3150-009-Q1-N1-C11
acgatgcgtccacgcatccgncccatgcatcccagaagcttccagtgttattacattgcgctgaagctgctgatctgtcctgtgttcgcctgcaggacaaacacatagtgcctgtgcatgaagagctcgtgatttaaagggaacacgttctatcctacttcataaagacaatcaacaagctgcatggttacctctataacaacgaagggaaaaaaatgcaaacaaccttacctcgactgaaagagattgaaatgcccgctcttagcacaaacatcgatgacgaccttgcgaaagcactcaaggaagtagacgaacacagaatag

SEQ ID NO: 13449 - DNA, 206 bp, Zea mays
  Clone ID: LIB3150-009-Q1-N1-C12
gcggtttggttcctgcaacgtcagcagcttacggagccgggtcctgggccagtgcgtcgagttcctgaagcaccagtgcagccccggggcgacgccctacggctgggcgcagtgccaggcgcttcaggagcagtgctgccaccagatcaagcacgtgcaacagctgcaccggtaccacgcgacatacagcttgggcctgcagtcct

SEQ ID NO: 13450 - DNA, 197 bp, Zea mays
  Clone ID: LIB3150-009-Q1-N1-C6
aattcccggggcgacgcgacgcgtccgcatcaaacctttacataagccacctgcgctcatcctgcactttgaccagattagggagaagggtccttgctctcagctccgcattcctacctcaccacaactcccctacagccacacactaccactcgtcaagatcccaaaccctgcaactacagtgctgccaccatatc

SEQ ID NO: 13451 - DNA, 230 bp, Zea mays
  Clone ID: LIB3150-009-Q1-N1-D3
attctgacttttctaaccatatcccctatccctagctcaagatgctcttgttataaatcaagaccctctcttatgcataaaatcctcctaacaacgatcgtatcaaattaaaaaacatctactcggcctagattatcctcaaaaactcttatatcttttcaactctttaaaaacacaaactcgcgtttcacaactttgctttcctctcttctacaattgctagctcttca

SEQ ID NO: 13452 - DNA, 385 bp, Zea mays
  Clone ID: LIB3150-009-Q1-N1-E11
cacgcgtaccaagcaacatacaaagtacaatccagtagcaacaatagagcaacaatgccaaccaagatattgtgcctccttatgctccgcgctctttctgcatgtcttgctaaccctacaattttccttcaatgctcacaagctcctatagcttgcctacttgccccataccttccatcaatgatagcttcactatgtgaaaacccagctcttcaaccctatatgctccaacaagcaatcgcagcaagcaacatacctttatcacccttgtttcaacaatcgccagccctatctttggtgcactcattggtacaaaccatcacggcacagcagctgcagcaactcgtgctacctgtgatcaaccaattagctctggcaaaccttt

SEQ ID NO: 13453 - DNA, 434 bp, Zea mays
  Clone ID: LIB3150-009-Q1-N1-E6
acgcaaaacaactcaaaacaatactagttttgggtcacttagttcagggatatggcacaagaagataccaactctgcggcggataagacgggaacatctcaagcaccaaggctgcacttgtcacacaataaggcctcactgaccagcaaggtgacagcaaaaattaggaagattctgttgaaagctaaagcacccatgaagaagaaaactactatgtatccagtactagcagctgcactcaaatttcataaagatgatgacgtctatcctgcagctgctggagtgaagcatcagcagcagcacaacaaggagatgtagagatctattatgaatgcacctgatgccaacatcgatctaccttagttatgtattaatttcctagtacctagtttcatctcaagctatctatctttacattatatcgcgtcatcatg

SEQ ID NO: 13454 - DNA, 127 bp, Zea mays
  Clone ID: LIB3150-009-Q1-N1-E7
tctcgaaccaactcaaacctatcctggttcaagatcactatgttcagggttattgcccatcttgctacctaatccaccgcaaataaaaccttaacatctcaagcaccatcacttcactattcacaca

SEQ ID NO: 13455 - DNA, 165 bp, Zea mays
  Clone ID: LIB3150-009-Q1-N1-E9
tggtaaaagaaagccaagactaccgtatggacctacgggacctacatctagaaggcgttgcaacacgtgcaaacacgactttgaggcatcgaaccaagccatctccattatcaactccttcatcaacgtcatcttcgctaacgttgcagctgattcctccaagca

SEQ ID NO: 13456 - DNA, 158 bp, Zea mays
  Clone ID: LIB3150-009-Q1-N1-F11
aactggttctggaaagactatcactatttatggttgggaaatcaatactggtcttactccaagggccacatctgtactttttaccggtgatcaagcgcgatggcaacaaatattcattttctttgatggcatatatcgcggagcatcatcaagataat

SEQ ID NO: 13457 - DNA, 286 bp, Zea mays
  Clone ID: LIB3150-009-Q1-N1-G3
tgcattctcttgtacaagggatgttccctggggtatgaggcgaatgtaaacaggcctaccttcccaaaaactacaatgctgggaattactggaaaataccattgcctagaagcagattcgtgaggtacaagtccagtctgcacaacaccactgcactaattatatgatgtgccgcattgatcatgacaaggccattactagattggctacatacagatgctcctgctcctgatataagctcctgcgagatagaactttgcatatgtaggatcataatttatgtagt

SEQ ID NO: 13458 - DNA, 381 bp, Zea mays
  Clone ID: LIB3150-009-Q1-N1-G4
cttggtgaggcgagcaccccgatcccgggaggtgccgcgagcgaggcagggatgataggccgtgcgtcccatctccgcgcgctcctctcgcgagcgctctctccaagccttactcctcctggtcgcactctgcctcaagtcactaagcccggtgcgtctccgttcggagctggattcgtggggcgcgcgcgcttcttctccatcgacgcctccgctgcgacgcaaggcgggtcgaatccccctgcgccaccgccggcgggtactgcaggccgcgagggagggggtggtggtcagtctgggaaatctgaacaagcggacgccgggaaagccgtccacggagggccagtagcttggctcacttttctactcctgcttgtgact

SEQ ID NO: 13459 - DNA, 107 bp, Zea mays
  Clone ID: LIB3150-009-Q1-N1-G6
gagcaacattaaatgatcaaaggggtccgggatattttgacacggtcttcgcctttctctccctgcattgagtgctaacacaacaatccaaggtcaaactcacaagc

SEQ ID NO: 13460 - DNA, 87 bp, Zea mays
  Clone ID: LIB3150-009-Q1-N1-H7
tcattcgtgacctttggcccattctttatggctgcgggctttccagatgcggaccaggctatctcctcccttgccctacacggcgat

SEQ ID NO: 13461 - DNA, 377 bp, Zea mays
  unsure at all n locations
  Clone ID: LIB3150-010-Q1-N1-C10
tctccgctttgcctccctccctcgctggcgggttccaaaacgcctgcagacctccatacnncagcggctcccctgacagcggaggcgacgcctgcaccatgtcctcctgcgacgacgaccacgcctcgctcctcatatcccacgctggggcctcgtcaccgtcctgcccctcgccgcgcggttcggcggtacatcagcaccacgccgacgtctaggcggacgaagccaccgtcaccgcctccccgaggctcgccagctgcggctgtggcgtgcgcggtctcctgcgcaacctctagcgccgcatgtccgcacgcggatcttggcctgggcgttgccagcaccagcaccagcaccagcactatcaacagctcgatccc

SEQ ID NO: 13462 - DNA, 304 bp, Zea mays
  Clone ID: LIB3150-010-Q1-N1-C9
tttctgaagggtggtgccaagaaggttgtcggctctgtttctagcaaggatgcccccatgtttgtcgttggtgtcaacgagaaggagtacaagtctgacattaacattgtctccaatgctagctgcacaaccaactgccttgctcctcttgctaaggtcatcaatgacaagttcggtatcgttgagggtctgatgaccactgtccatgccatcactgctacccagaagactgttgatgggccctcgtctaaggactggaggggtggaagggctgctagtttcaacatcatttcccagcagcact

SEQ ID NO: 13463 - DNA, 178 bp, Zea mays
  Clone ID: LIB3150-010-Q1-N1-D5
cgcaaattgcaccaagaaatccatcgagaggccgtctacaggggaattaatggcgtcgtcgtctagcagcagccaccgccgcctcatcctcgcagccgccgtcctgctctccgtgctcgcggctgccagcgccagcgccgggacctcctgcgtgccggggtgggccatcccgcacaac

SEQ ID NO: 13464 - DNA, 277 bp, Zea mays
  Clone ID: LIB3150-010-Q1-N1-D7
aagccttccggggggttggcttctcctccccctccggttcgggttcgggttcgtgaggttctccggggttcggtttcgtgggtgagcggatcgagatggcggcgtcggatgttgagtaccgttgcttcgtcggcggcctcgcctgggccacggacaaccactccttacacaacgccttaaacacatacggagaggtcctcgagtccaagatcatcctcgatcgggagacgcagaggtcccgcggcttcggcttcgtcaccttctccacgggaggacg

SEQ ID NO: 13465 - DNA, 434 bp, Zea mays
  Clone ID: LIB3150-010-Q1-N1-D9
tttcgtacgactgccctgccccctcgtgggggcggctgttctgcacacgcgcgcttgtccccaaacagcggcgtcggcgtcggcggcgatgagtatctcaggcgagcttcccggcgaaggatctgacggtgaggaggaggtcttcatcgacgaggaggacatcatccacgagataaccatcgacgaagaagatctccccgaccgcgacgaagaagatgacgacgtcggcgacgggattgaagacatcattgatgattctacgtactcatttcttggccacaaagatgaagtcttcactgttgcatgcagtcctacagatgcatcacttgtggcttctggaggcaaagatgataggggatttctgtggaggatcggatcagatgagggtgccttggagctgactggacacaaggatactgtcggcacagtggctt

SEQ ID NO: 13466 - DNA, 199 bp, Zea mays
  Clone ID: LIB3150-010-Q1-N1-E1
accttccgcaattttcgcggtctggtgagaaaaagtcgaaagcgcgcacacgcagtttatcgggtgtacaaggggcatatacctgtaacacagcttgtgcgggagactgctgctgtgatgcaagagttcacacagtcaggtggtgtaagaccatttggagtatcgctgttgattgctgggtatgatgacaatggcccac

SEQ ID NO: 13467 - DNA, 427 bp, Zea mays
  unsure at all n locations
  Clone ID: LIB3150-010-Q1-N1-F10
tcttttacaccaacaagcaacatanaaaggagaatgctttatcaacaatagagcgccaacccacaccaacatattttccctccttatgctccttgctctttctacatgtgttgctaacgcgacaattttccctcaatgctcacaagctcctatagcttccctttttcccccataccttccatcaattatagctccagtatgtgaaaacccacctcttcaaccatatacgcttcaacaagcaatcgcagcaagcaacatacctttatcgcccttgttgtgtcaacaatcgccagccctatctttggtgcagtcattgttacaaaccatcacggcacaacaactgcatcaactcatgctacctgtgatcaaccaattatctctagcaaacctttctccctactctccgcaacaacaatttcttccattc

SEQ ID NO: 13468 - DNA, 79 bp, Zea mays
  Clone ID: LIB3150-010-Q1-N1-F11
tttctaaaaaaaaaaaaaaaaaaaaaaaagaagttggctccctaaaaaattccgggccccaaccaacaagcataccaaa

SEQ ID NO: 13469 - DNA, 414 bp, Zea mays
  Clone ID: LIB3150-010-Q1-N1-G10
tttcgcgcctcctgaatttattgacacagagccacattaaaagcattaagaaggaggcatgctggacgatttcaaatattactgctggaaacaaagatcagatacaggctgtcataagtgctggtattatcgctcctttgttgcaactgcttcaaggagcagagtttgatatcaagaaggaggctgcttgggccatctcaaacgctacctctggtggttcccatgagcaaatcaagtacttggtgtctgagggctgcatcgtgccgctgtgcgaccttcttgtttgccctgatccgagaattgtaacagtttgtctggagggtcttgagaatattcttaaagtaggggagcacgacaagaccatgggcgcaacaagtgacattaatgttttcgctcagatgattgacgacgcgg

SEQ ID NO: 13470 - DNA, 433 bp, Zea mays
  Clone ID: LIB3150-010-Q1-N1-H10
tttcgcgaccttccatcagttctcgaggacggattcccagggcgaggccggaggcggacgtcggcaggttggcctttccatgaggtacaaaatggatgagggctgcgctgacgatgatgacgacatggccaccatcgccgccctcagattgaaggatttacctgaagggagttatggatcggatggaacatgtggttgtggaatttcttgaggtagcagtcggctacatcgtcttcctcaaagccttatattctcctcataagagtgctcttaatttgagttggttcagttaagatttttttgtgccatcaaagaagtagctcatcatggcttgcatcagggaacctgcttccattttgcttttttatgaaggatttgagaattacgcaacaacagtttcagggaagccatttgtgtcatcatgtaaacatga

SEQ ID NO: 13471 - DNA, 399 bp, Zea mays
  Clone ID: LIB3150-010-Q1-N1-H11
tttctcgttcctgtcgcgcagccacgacctcgacttcttctatattccccggcggcggcgcgatcagttgaaccatggcggactccaaggccacctcggcggtcaccctccgcacccgcaagttcatgaccaaccgcctcctggcccgcaagcaattcgtgcttgaggtgatccaccccggccgcgccaacgtctccaaggcggagttgaaggagaggcttgccaaggcgtacgaagtgaaggaccccaacaccatctttgtcttcaagttccgcacccacttcggaggaagaaagtccactggtttctgcctcatctacgacaacctcgaagctgccaagaaattcgagccgaaataccgcctcatcaggaatggtcttgctactaaagttgagaagt

SEQ ID NO: 13472 - DNA, 119 bp, Zea mays
  Clone ID: LIB3150-010-Q1-N1-H12
tttttctcgaagactcaacccttccactttgtgaaggattaaaattacaagccggccctccctaatgccatctccacttcaataactctttctcttatttcatacacctaactattttc

SEQ ID NO: 13473 - DNA, 341 bp, Zea mays
  unsure at all n locations
  Clone ID: LIB3150-010-Q1-N1-H9
tttctctccagactgtgccgtgggantgggagtaggattatacaaaggtgctgggcactcaccagctgcnaccgccggtgtcggatatgaatgatagaagcggctccagggctgctgtgtacgagcgctactcgcattttttgtctctcatccccgtcctatacaactggtttgccaaccacaacctcgtctggccatccctcttatgccggtggggcccacatttttagaaatcttcctacaaaaatcatcaacctcctttacctatctcaaccaaacagattggatttttcccaaatactcctgcttatcccataattttttaattttcttaaaaccct

SEQ ID NO: 13474 - DNA, 291 bp, Zea mays
  Clone ID: LIB3150-012-Q1-N1-B11
attcgaaacaggttgtgcttgtgactgcatcacaggtcagtgcctccatgtgcgttcagttttggcttctgcccaaaatgtataggaggaagacgcagggaaccaaatgcggagaacgtctctcctggaccatactgaacgaactgataatttgtcttaaggggggctcacatctttgcatggtgaaatgacacgttcattcatatcactgatatgagagggagggaaactcttgttttgatcagcggatgaataaatatgaaggctgaccgctgatacacttcagcttac

SEQ ID NO: 13475 - DNA, 275 bp, Zea mays
  Clone ID: LIB3150-012-Q1-N1-B5
ccgtccggtcaagattcttggggcgcacaaggcaacaacatgacgccactgtacatactccggactagacttgcactgcaccgcgtggagaccccccagcgccgcactcaatgaaaagaaaggggctaatgggctcaatggtatcagtccccataaacagaagggataaaagatgcatcaagccggtctaagtctgcaaaagcacttgattcaacactacctgaagacagggctgtactcacaattggagggctacttggtgcgcttccataact

SEQ ID NO: 13476 - DNA, 267 bp, Zea mays
  unsure at all n locations
  Clone ID: LIB3150-012-Q1-N1-D7
gtcattccagctggatccgcagctgctggaaagaaggccttcacagcagcctgagtttatagactatgttccatgagtagtctatagaatgatgtctttttaattcaaaagaaatctctcttctaggctggtgcttttcgactataatttggagattgttccgtgtccgtgcaatcatctgaacatgttactacttattgtaccttgtcgtgcaaagttttgctaagatctctattgtttcgaaccttataaacagaagaagcanat

SEQ ID NO: 13477 - DNA, 212 bp, Zea mays
  Clone ID: LIB3150-012-Q1-N1-H10
attctgtcgggcttccccaccacctacgccaacgcgtgcggtggtggtgaccgacctgctgtgcccactctccatcttaaccggttgctgccgtagtacgaagtgttgactggggcgtacctgcctgtgggcatactgcgagcgctaccatttactccccacggttgatgaggtaacgactgcgatgggccgaacatcccatgcatgaagtg

SEQ ID NO: 13478 - DNA, 197 bp, Zea mays
  Clone ID: LIB3150-013-Q1-N1-A6
acccttccgccaggcaaaaacattgcgaccacaaaaagggcgcgctttaaaggcttttttttttgagataacaaagaagaaaaggagaaattgccgtcaccatcaagtgggtgaaaggcaagcaaatctttgacagaacccgcaaccccaacgtccaagtggacgtgggccttaaccacggcagcttacccaagggg

SEQ ID NO: 13479 - DNA, 99 bp, Zea mays
  Clone ID: LIB3150-013-Q1-N1-E6
agctcactcgtgacagtggtcgctccgggcataccagccacgcgacctgccggcggccctgctatgcctatagatcgagaccttctagctggccacgag

SEQ ID NO: 13480 - DNA, 102 bp, Zea mays
  Clone ID: LIB3150-013-Q1-N1-F1
cacaaacggcatgacgggacagatggacacaacacacgagcctgacagcatgctgagtataaccagcaagggctgaacgagatacctaacatcacatataat

SEQ ID NO: 13481 - DNA, 239 bp, Zea mays
  Clone ID: LIB3150-013-Q1-N1-G10
acggtctgcgctactcgttccccaggtcgagcgcacctgctcccgcaccgtcctaccgaccgaacgcccggcctcgtgacccgagaaggcggcagcgctgagcttaccggaggtcgcgacggagtctgtggctttggacgcgcccggcgccgacttcaagctcgggagggagcggggcgcggccaccccaagcacgaactcggcgccgtaatgctgaaggcaacagacgggcctggcgg

SEQ ID NO: 13482 - DNA, 362 bp, Zea mays
  unsure at all n locations
  Clone ID: LIB3150-013-Q1-N1-G11
cgnntccgggaaaagggcgagctcttctcactctgtcggactcgcggcgatagcagcaggcacccgtcgctctctcggctccggccgtacgggcaccggaccggctcacgacctttgtcttactcgcatcggttcgatcgaattcctcggtacccatgaggggtgcgcctgaggggcaagaatcctcgccgtcgcgccgctctcataccatcgtgcagagcgcctgcnnacctagtaggccggaaggctnntgcttctattggctagtcagttgtccaaaagggggcgcgccggctgaacataagttcgctcgtgcctgtccaatggcgcgcggcgattccctggctattagtggtgggggg

SEQ ID NO: 13483 - DNA, 237 bp, Zea mays
  Clone ID: LIB3150-013-Q1-N1-H12
cgcgatggcatctgcggctgacggggagtgggaggcggatgatcggaaggtgctagcaggctctcaagccctcgcttaggctacctacggcctgcccaacctggctacacgtgctcctctacctccacatggacgcatgactgctctgacatgcacataaacaccttctttgacgatgccgatcacataccatatgacatatgaggggatggtcaggctgtcaacaacgagcatgga

SEQ ID NO: 13484 - DNA, 190 bp, Zea mays
  Clone ID: LIB3150-014-Q1-N1-A12
gttcttgattgcgagcggccaggtcgggagtgatctatcagatcctgctaagataccactctttctgtatagcggggcgcttgagagctttgcgtaatcatggccaatgttgcacaacgactgaaactggaatccgctcacaccttcatacaacctacgagacgtggacatgatctgtagcgtcattcac

SEQ ID NO: 13485 - DNA, 250 bp, Zea mays
  Clone ID: LIB3150-014-Q1-N1-B9
tcattcgtgacagtgggggccgacttcatttttggccagtattttgatgcctaccaactttcactatgttaagcaccattagaacctgccattgttaaggctaataaaccttttaggtgagattgtggtagacagcaagaattttgatgaacatacaatcatgaagcatattgattatagcacgatgcgtagagtgatgaatctagacaagatcaatggcatcgagctatatgtcatgttttttttccaa

SEQ ID NO: 13486 - DNA, 207 bp, Zea mays
  Clone ID: LIB3150-014-Q1-N1-D6
tcattcgggtcggttggcttctcctgaattaccggctggtgtctacgtgctggctagcgggccatatggaagagatggttgcatctggcgttaattaccgtcattgctgtggcctgcttgaaagtgccatccactaacacttcctcaccacctacttgcccacctactgaaaggtactggcggcggagatcaatcaggatcctgaca

SEQ ID NO: 13487 - DNA, 206 bp, Zea mays
  Clone ID: LIB3150-014-Q1-N1-E10
ttcgtccggccaaaaccccaatcgcacaggagagaccgagagagaggttttccatccatggctcccggcgtcgcttccgtgctggtcccgcaggagcccgtcctcctcaaggacatcctcgcctcaccgtccccctgcgggaacaccgctgtctccgcccgacacctcttcggcaacggagtcgcgccgtcacgctcctcggacga

SEQ ID NO: 13488 - DNA, 156 bp, Zea mays
  Clone ID: LIB3150-014-Q1-N1-F8
gggaaaataggttcattttcatcctaatcctctttcgaagggccgttgagttttcaaactagccctaaactgtagaaagtgtttatgttgtttctacaagacactgatgcttcagcatcacaggatcaaatcgcatcagcaataagtgccatttgc

SEQ ID NO: 13489 - DNA, 133 bp, Zea mays
  Clone ID: LIB3150-015-Q1-N1-A10
tctgtctgaagtcattttaattagaactcttaaagctcgtggtcggtcggtcggtcggtcagtcagtcattgtcgttgatgtccagcgttgtgtttttttttttaatattctctaatggaatctttcagattg

SEQ ID NO: 13490 - DNA, 248 bp, Zea mays
  Clone ID: LIB3150-015-Q1-N1-A11
gttcaaggaagcaggcgtccaccatggtgaatgggcgcacggtacagcgcgtcatgctctacttacggatcaccatccttggatacaagaggttcaattcgaaccagtgctagaccacgtcactcgttcatatcgaggagttgaacaccaaagaagacttcgcgtgttacactgtctagcgcatggcttacatctacagggctaagaccaagagcagcgagacccgctacaggtgcatatggtgcaag

SEQ ID NO: 13491 - DNA, 229 bp, Zea mays
  Clone ID: LIB3150-015-Q1-N1-B11
tttaaaacaacataaatccatcattcgcatcaggcgaactttatgaagttgctaccatttaataaaactctatgcctaacacctttattactactagtttactacccgggatctaacttatactaacaatgacaattgctagcgattctcattgatcgaacgctgatgagcccttacactagtttctaaactaccttccctctcttgacatgttcaatattttacatcc

SEQ ID NO: 13492 - DNA, 100 bp, Zea mays
  Clone ID: LIB3150-015-Q1-N1-B3
actgaatacactcactatcatgcccaaaggcgattgtatggacgcatggcagtcatataaggcctacaatatctttgcttttactgaccagatctacctc

SEQ ID NO: 13493 - DNA, 91 bp, Zea mays
  Clone ID: LIB3150-015-Q1-N1-B7
tcattcgtgcctgcggactacactgtaatagccgaccgatacctgtatgcttaccatgctctcctacattgagtcctatcaaaccttggcg

SEQ ID NO: 13494 - DNA, 305 bp, Zea mays
  Clone ID: LIB3150-015-Q1-N1-B9
ttctgagccacagcactcagtcagtgggttcaggtgactttattccccacgcgctgttccattcaaccctagtcactgtcggttcctttgcggcatgctctcgtttggcttctgacctgctccttctcctccgatgcctggcgattctcattgcttgtatcgtgatgacgctctttcacttgtatccgaactaccttccttatttggacttgttcaatcgcttacatcctttatgctttcttgtctagcgcttgtttatgttctcgattatgtcttcggctagtcttatgttcaatgaatacata

SEQ ID NO: 13495 - DNA, 65 bp, Zea mays
  Clone ID: LIB3150-015-Q1-N1-C4
cactaatccactgacgctcccatacaagatgccagccgcgaggataaacgctcaaggctcgggtg

SEQ ID NO: 13496 - DNA, 350 bp, Zea mays
  Clone ID: LIB3150-015-Q1-N1-D11
cttttcactatcctcacttaacacaacacggccagtgtgatggataaatgccagacacgaaacattattgatttacaccctattaataaaaacctctgaacatatcttataaccatgctccacggactactgactcaaccgtgcatatgcaatcaatactcattcaccttatacaacctcatcttaggtacgaatgcatccataaatttaacctaaaaacactttcatatgccgaataccataataaacccgctactaccttaaattatggcataatgaaatctttactctacaatgtaaccaataatccaaatcaatatcaaacttatactcctctcaagatcattcct

SEQ ID NO: 13497 - DNA, 448 bp, Zea mays
  unsure at all n locations
  Clone ID: LIB3150-015-Q1-N1-D12
cggacgcgtgggttccancccctttttgggggatggttctaaagaaactttcccagattggttattttgcaaagcatgtcaaacttcgctgggaaaagctgctgcatctttacttggtcattcattttgtttcaaatattccttcatttgagttttattttcacattaccaagttctgatctccttacatttttgctttcagatccaagtcaccatggaattagagaagaacacccagtcttccttggagagaaccaatgttgtgctggtggcatggattttattaccatgatattcacactgtcagccatacccttcgacataatgccaactaccatagaacaatgtgtttctgttctgaaacccggcggtcttcttctgtttagggattacggtctttatgacatgacaatgcttcggtttttacctcatcaaagaataggatttc

SEQ ID NO: 13498 - DNA, 248 bp, Zea mays
  unsure at all n locations
  Clone ID: LIB3150-015-Q1-N1-D6
tgttagacaatacgcctatggcacaggagatgcgccctagtgaagcattagttacatagatcacgggcgcgcctagcactggaagtgtatgaaccgcgcacccgtatggacaagcgcacccaactactgatagcatcccacattgctatgtgcgatcgatagatcaataaaaagcgtgtacagatgaactgctcctttcacgacctntaacaggtcgaccattgcccgtgcatcgaactaatgcacac

SEQ ID NO: 13499 - DNA, 397 bp, Zea mays
  Clone ID: LIB3150-015-Q1-N1-D7
acgcgctcttcggccacgtcgagccggcgcccagggaccccatgctcggcgtcaccgaggctttcctcgccgacccctcgtccgacaaagtgaacgtcggcgtcggcgcctaccgggacgacaacggccagcccgtcgtgctcagctgcgtgcgcgaggccgagcgccggatcgcgggcaacctcaacatggagtaccttccgatgggaggcagcgtcaagatgattgaagagtcactgaagctggcgtacggagaagattctgacttcatcaaagataagaggatagcagcggtgcaggcgctttcaggcactggtgcctgccggctctttgctgatttccaaaagcgttttttgccggattcgcagatctacataccaacaccaacgtggtccaa

SEQ ID NO: 13500 - DNA, 347 bp, Zea mays
  Clone ID: LIB3150-015-Q1-N1-D8
gcgttctcttccagccgtcaccaccggcagaggctgtcgtcatctttggtgcggccaagaacctccatccgcccaccaaatcacttggtatactttgttgcggggagatggatgtctcttacacaatcctcaacaccgaggcatggctaaaaaagcttgatgagtacataatcactcgcagctgcatcactggctaccaagctttcaaagatgactgggctgtctacacttcgttatcgtctgctccctcctccaaatatatcaacgtcgcaaggcggtttaatcacattgatgcgctcccgcggctaagcgctattactgcacacggccatggtgtgaaggttgaa

SEQ ID NO: 13501 - DNA, 112 bp, Zea mays
  Clone ID: LIB3150-015-Q1-N1-F8
tcattcgtaactacttgtactcgcgcccgtgccttgcgcacgctgcgcacgcgcaaactctatctatccgatccgatccggaactgtgccggccagccatggcgactagggt

SEQ ID NO: 13502 - DNA, 69 bp, Zea mays
  Clone ID: LIB3150-015-Q1-N1-G8
ttcctaacacacaatatactagtgggcctcgggggaaatatatagacccccacttcccctcactcgctt

SEQ ID NO: 13503 - DNA, 335 bp, Zea mays
  Clone ID: LIB3150-015-Q1-N1-H10
ttctcacttttccgcatcgagcgagcgaccaaagccatgagtctccgggccctgttatcgaagagggtcctatccttcccgttcggcggcccgggccggccgttggcggcggctgcttctgccaggggggtgacgactgtcacactccccgacctctcctacgacttcggtgcgctggaaccggccatttcgggggagatcatgcgcttgcaccacctaaagcaccacgccacctacgtcgcctactacaacaaggcgctggagcatcttgacactgccgtctccaagggctactcctccgctgtctgccagctgcatggctctattaagttcaa

SEQ ID NO: 13504 - DNA, 165 bp, Zea mays
  Clone ID: LIB3150-016-Q1-N1-G9
tcgtttaaacttgctgaccttatacttggggcgaatgtaaaaagttacaccacccgtattcatgccttatacataaaatctacgtgtaggacattaacctaatgttctgtaagatcattatctattcttgtggtgcttactgaaagagatgtgtcgagaacaaaa

SEQ ID NO: 13505 - DNA, 376 bp, Zea mays
  Clone ID: LIB3150-016-Q1-N1-H2
gtcggacacaggcacgacacgagctcatccggcggcggcagaccgggaggagggagaacgcttctgtcccccccaacccaacctcctccccttcccaacaaggcgacgcgaagcgagatgccgctgtacgactgcatgctgctgctgaagacgacggtgaccagcgaggtcctagcggaactggtgacgcaggtggcgcgccgcgcatgccagcacaacggggtcgtcaccgacgtcaagtcattcggcacggtcagcctcgcctacggcatcaggaatctcgacggccgccacttccaaggccatcttatgcaaatgaccatgatggttccgcttcgttccccaagaactcactacttgacaaagagacaggctg

SEQ ID NO: 13506 - DNA, 62 bp, Zea mays
  Clone ID: LIB3150-017-Q1-N1-A6
actactcactggggtcagctccggaatcaacagatggggagatgtagccggcgaccatttag

SEQ ID NO: 13507 - DNA, 295 bp, Zea mays
  Clone ID: LIB3150-017-Q1-N1-B1
gcgaaacaaacaacatattcaaactcgtgcgaaaggaggcataaaactaacggattgcgtggatgtactcaaggacaaaacggggctactgcaattgctgtcagacatgaaaagggcctatagttggtgccaccagaagtcattcgtggaagcccgcacacttgttctgctgatatctggactgttcgctctacggcacttgaaataggtataaggaaagtctcatagacccatcaatatcaagaggggtctctactttatgatgtggcgacgacaaaatgacacccacctatac

SEQ ID NO: 13508 - DNA, 285 bp, Zea mays
  Clone ID: LIB3150-017-Q1-N1-C8
tgatagagcagatattgcaagatcatcctagaaaaaacatgaaaggtgcttctagtagctgcaagcgagtaaatagcaccgctcatgtcattgtcgattaagctggaaaattgcacagagattgatgactcatgtggcaacttctttacaatatgcagcaatgtggggttgatgaatgttattgtgaaagaccgggagaacatgtcagggacagatatcgtggaagtcgaaaccgagcttgtggagaatctgtctactgtagctgacgaatacattgagatcctt

SEQ ID NO: 13509 - DNA, 86 bp, Zea mays
  Clone ID: LIB3150-017-Q1-N1-D11
atactttaacttactggagcagggaccgaggattttgcccgtttttatcatcctaagtccctttactggaaggagtccggctaatg

SEQ ID NO: 13510 - DNA, 377 bp, Zea mays
  Clone ID: LIB3150-017-Q1-N1-F5
gcgcatcctcacgtcgctcggcgggatcggctcgaccctcaacctgtacatcttccggtgctttgttaagagtacgttcaccgtcactggccagaagcacgacgtggctttcaaggcatccttcttcaacctgatcccgtttgcatacacgctggcgaaagcacagaagctggcgacgttcaagaactttagttgacgtgcgggccacagaggacatggaggcgaacgtattagagaagcactcagatgtgatgcgctatcttgatgccatcgagcacatcggcgagaacctacgaaacactgacaaaattcatacgaccaatcactgcatctgcacaaaagctgacggggatcacattctggccaagtgcacatgg

SEQ ID NO: 13511 - DNA, 306 bp, Zea mays
  Clone ID: LIB3150-018-Q1-N1-A2
gcggtcgattgcttcctcccttcctcctcctcgggtgtttcatcggcgactccgatcttctctgccgtcgccgccgccgcaagagatcgacccgaccccgagcgcccgacccgaccccccaatccaaccaccaaccgccggcgcgcgcggaagattcagatttggcccctcgccggtaagggagaaagcgaggatgggtgcgtggatgtcgcgcgtgtggttcctcatgttcccagcgcgggagtacaagctcgtcgttgtggggctcgacaacgcggggaagaccaccacgctctacaagctcca

SEQ ID NO: 13512 - DNA, 295 bp, Zea mays
  Clone ID: LIB3150-018-Q1-N1-A4
ggcatgggcgtggcactgccacccgacgcaccggctgcttctgctgttcaatcgcgacgagtatcactccatgccgacgcaccctgcgcattggaggccggcgggggaggaagccaaggaaatccttggaggcagggacgagctcggctggggaacgtggatggggtgcacgatggatggtacgctcgccttcctgaccaacgtgcgggaacccagctctctgatcggggcctagaccagacgacagctcctggtcacgtttctacacggcagactatgtccattggagtatgcc

SEQ ID NO: 13513 - DNA, 127 bp, Zea mays
  Clone ID: LIB3150-018-Q1-N1-G10
cttgtaagggactaggcgtcactccagcaggataactcagtttccccgaaatttggatgacgcctagttatctactctggaacgtgtccttgtaaatgcgtcaatggtcaatctgagtttttttttc

SEQ ID NO: 13514 - DNA, 241 bp, Zea mays
  Clone ID: LIB3150-019-Q1-N1-A1
ccctttcgtatactaacgcgcattcatggtgggacagactgagaaagcttttctcaagcaggctaaagtgttcctcagctcaaaaaaatctggcaagggtaagaagccaggcaagggtggcaatcgattttggaagaacattggccttggtttcaagactcccagggaagcaattgaagggacctacattgacaagaaatgtccattcactggaaccgtttgtatcagaggcagaattatt

SEQ ID NO: 13515 - DNA, 288 bp, Zea mays
  unsure at all n locations
  Clone ID: LIB3150-019-Q1-N1-B11
tcggaacaaacgagtgttgatatgtccgaccggggtagaaacgagcgcaaagcaccgggttttcttttgcatttttcttggaatgcctgagcaaaggcagagctggcctggccagtggccaccattttattgttgaggcgtggtgctgtgtaacaccacggttagtttggttgacacgcaagttgggcataactttgattgaataatactagtctcatcataaacatattttctagcgnaaaaaaaaaaaaaaaaaaaaaataaataaaaaacgacatacgaacaaag

SEQ ID NO: 13516 - DNA, 412 bp, Zea mays
  Clone ID: LIB3150-019-Q1-N1-B12
gaattggttgatgtattctcttttgggattgttctctgggaactgctaacaggagaagagccatatgcagatttacattatggtgttataataggtggcattgtgagcaacactctacggccgccagtgcccgactcctgcgaccccgagtggaggtcactgatggagcaatgctggtcaacagaaccatctgagcggccaaacttcacagaggttgcgaataggctgcgctccatggcggcatcccagaaggtacaacaacactaagggaccatcggcacgcagaagttgtaccagggcagcagtcagtcaaacttgcaggttacatccatgggccgccaattcacgccatccgccatatatgcctaggatctgttcataacccttcatttgttcgtatattgtaatcaaa

SEQ ID NO: 13517 - DNA, 159 bp, Zea mays
  Clone ID: LIB3150-019-Q1-N1-D10
accccttccgaataaccatggttgctcccaatcgcggcgagcttctaaattttgtcggcgtgcgcaaaaaaaacctttcttttttcccaaccccaactcttcttttttcccgttacccctccagatttgggccgcaaatttcccccccgcccccccttt

SEQ ID NO: 13518 - DNA, 406 bp, Zea mays
  Clone ID: LIB3150-019-Q1-N1-F10
tttaatggttgtactgggacgaaggtgttggaaaaaatattgctgaatctcgtgctaattataactctgccgaataatatgatattgacttctctccatacagcaggataaggcaatccaatgtataaccaaacaaggaccttggcttctggttgaacaaacgaggtgaaacgtgggaaagggttacttaaattcgtgacaaattttaatattacagataaaggataatgagagaacgagcatttgctctcatgaacacagataacaattttgctctgcgtcaccgaaaatctataatccattatgattcaagttttgcttatactgaacttcaatgatgattttgacttgcatgatcaaacttttgtaaaccgttctgatcaaagttattaatattatttaaatt

SEQ ID NO: 13519 - DNA, 217 bp, Zea mays
  unsure at all n locations
  Clone ID: LIB3150-019-Q1-N1-G10
aaaaaaannaagaaaagcacgcgcgcgtacataagctttaatcctctacattccacattctcactatttacttttataccacccaataattactgaccgtttacatataaaaataccagcggtacttataaattaattatatcaccatcttttttaaatcttactcataacttatttcctatataatatatatatcctttcacaattccacacaaca

SEQ ID NO: 13520 - DNA, 371 bp, Zea mays
  Clone ID: LIB3150-019-Q1-N1-H11
tataattccgaccccctctccctcagtgcgggcctattttcttcccgcggtctgctcgttcgatctgtgcatcagatctgatgtctcgagcgaccgtgaagcatcttaaatacgcggcatcgctctcgtattgcatagtggggctggaaacaagaatgccttcaaagcacttattgctgcagaatacagtgggatcaaggttgagttgaccaaagattttgagatgggtgtttccaacaagacccctgagtttcttaagatgaacccccttgtgaaggttccttgtttggaaactcctgatggcccttgttttgagagaaatgctatcacatcctttgttgctcccttgaaggataacaaccctttttttg

SEQ ID NO: 13521 - DNA, 372 bp, Zea mays
  unsure at all n locations
  Clone ID: LIB3150-020-Q1-N1-F1
gaaaaagcacncgccgttgctgctgccgcgtccacagaatggggggtttcgtgaagactcataagaccaatgcgtatttcaaacgtttccaagtgaaattcaagagaaggcgggctggcaagacagactacagggccaggataaggctgattaaccaagacaaaaacaagtacaacacacccaaatacagatttgttgtgcgatttaccaacaaggacatcactgcccaaatcatatctgctagtatagcgggtgatatggttcttgcttctgcctactcgcatgagttgccacgatatggtcttgaagttggtctgaccaactatgcagctgcctactgcactggccttctgttggctcgccgtgtgctca

SEQ ID NO: 13522 - DNA, 157 bp, Zea mays
  Clone ID: LIB3150-020-Q1-N1-F6
actcgtgtcacgtgaattccatcatacacacggggggttcctgcgagcccaccaattttaactatagagagcataattatagaaggtggttatgatactcatatatgatgcctgcacaagaaaaatatacgatcacgcttcacaacaaaataccagc

SEQ ID NO: 13523 - DNA, 87 bp, Zea mays
  Clone ID: LIB3150-020-Q1-N1-G10
tctgtgaggcaaaagcacttcgaccacagacggggcgcgcttcaaggtctaatttttttgaaatatcattgtagacaagatgagatg

SEQ ID NO: 13524 - DNA, 199 bp, Zea mays
  Clone ID: LIB3150-021-Q1-N1-A7
gcgccgtgttgcttgacgcacccccacgcgcggccgtgttgctcgccgccaccgccccgccggcagccaaaatgccgttcaagaggttcgtggagatcgggcgagtggcccttgtgaactacggcaaggagtatggccgcctcgtcgtcatcgtcgacgtcgtcgaccagaacagggctcttgtggatgcccccgacat

SEQ ID NO: 13525 - DNA, 153 bp, Zea mays
  Clone ID: LIB3150-021-Q1-N1-B11
tctcccttgcgcgcctccatttgcgaagaagggccttgcaaggagaaagtgccctccacccatgaggccagagaaaccccacataaacattggggtcactggccatgtcgactctagctagactagcacgacaatacaccttatgtactaact

SEQ ID NO: 13526 - DNA, 236 bp, Zea mays
  Clone ID: LIB3150-021-Q1-N1-C10
tcggcgaagcaaagctatcctaattagaagggatttctgtagatgtgagactaccccccactagttctggctcctactttcgttcgagagagcgattctggcggcactggccaatagcgagggtccggcgatcgggatcgacctcggctccacctactcatgcgtcggcgcatgacatcacgtcctggtggagattatctgcaacaaccaggggaaccgcagcacgccgacctatg

SEQ ID NO: 13527 - DNA, 315 bp, Zea mays
  Clone ID: LIB3150-021-Q1-N1-C11
tcgtgaaaaccctgaccggctagactagcagcctctatgtggagtcgtctgacaccattgacaacgtttaggccaagatccaggacaaggagggcatccccccagaccagcagcggctcatcttcgctggcaaacagcttgaggacgggcgcacgcttgctgactacaacatccagaaggagagcaccctccaccttgtgctccgcctcaggggaggcatgcagatctttgtgaaaaccctgaccggcaagactatcacccttcatgtggagtcctctgacaccattgacaacgtctaggccaaaattcaagaca

SEQ ID NO: 13528 - DNA, 192 bp, Zea mays
  Clone ID: LIB3150-021-Q1-N1-C2
tttcttaaaacagaggcattaaaaagttaggggggagctttaaactgaaaaggagaagacacctacataaaatgaagcggccttccgaactcagactttctttattgaaccttgcttcaatctacatttaccttatatggagttctaatacatgtctgcgttagcatgaatttaatctgttcctgcgtaaaa

SEQ ID NO: 13529 - DNA, 321 bp, Zea mays
  Clone ID: LIB3150-021-Q1-N1-C9
tcgctcctgctaccctcctatgcctaagcggctcttcgcaagggtgagtgtccgatcgcttctctgccctagcgtggatggccaatagctattagggtaatcacctgaccatgacccttgttctccgccgactactttgatctacgataggctgtcaggattcaatatgtacaccagcacattcgctactttctgcacgctgtttagcaatatttgatcaactcttgctctccagacatcagtgaagaacccttcctctctaatcttatttatccaatctacgataagttcaaacctgaagaccttcaataaacttgatgt

SEQ ID NO: 13530 - DNA, 185 bp, Zea mays
  Clone ID: LIB3150-021-Q1-N1-D1
ttgtttcgccaaaggtggtggaaaggatggtccgtagtattgttgctcgtcagccccaccaccaccctccaagcagcctgctgagagccaagaaaccaccgtcaatggtcctttggatgctgagaaagagcagcctgcagtctctgagtgaccggatagggtgtctttattaagacatacacaat

SEQ ID NO: 13531 - DNA, 166 bp, Zea mays
  Clone ID: LIB3150-021-Q1-N1-D10
tctgtgatctctcctggccctcctcagagagcttcttgttgctagggcctgcgtgctttccatcccgccagcgtccaccttctcctggggcccacgcccctatgattgccaggctgcgcggcgcgtgacggttacatcacttttctcgaagtacccaatgctggag

SEQ ID NO: 13532 - DNA, 305 bp, Zea mays
  Clone ID: LIB3150-021-Q1-N1-D2
ccctcctgcagcgccaaaggtggcggaaaggatcgtgccaaaagaagcgtgccggtctccccatccaacagcgccaagcagcctgctgagagccaagaaaccaccgccaatggcccctcggaggcggagaaagaacaccctgccgcctttgagtgaccggaaagggtgtctttattaagacatacacaagagccttaactgtcagtagatggaagcgtgttttatttcagataatttccagactcgtctttcccgcgctgctgatctttttgtagaggagatctgcattcggatgtctttacatc

SEQ ID NO: 13533 - DNA, 152 bp, Zea mays
  Clone ID: LIB3150-021-Q1-N1-E1
tctcccacacagaaaaccctatccttcaccagccgcatctgttctaacaaataagcatccatccccatcccgccgtcgtcattaaacgcaatccccgcgtcacgagctccctcctgaagtgccgcaaggctcacatttacggccccttcctc

SEQ ID NO: 13534 - DNA, 154 bp, Zea mays
  Clone ID: LIB3150-021-Q1-N1-E12
tcggctcacctgagcctcccccacaaagacgagcttctatagatgcgcgaaccaactcaagccctgtcatgacagcggaagatactttgttctagaagcaaccctaatccccctagacaactgacattagttacaaaccggtaactacgcccct

SEQ ID NO: 13535 - DNA, 198 bp, Zea mays
  Clone ID: LIB3150-021-Q1-N1-F1
tctgtcaccgtaaccctagcagcatatcggccagcggattttggcgacctgggtggggacaaccgtcacctccgccttcttcgcctccctcgagcgctgctcctgcatcaacctctccaccgacgacgacgactacgactaggaccacgacgaggccaaggaccggaccctcattctcttcgcggcctacgccacgac

SEQ ID NO: 13536 - DNA, 235 bp, Zea mays
  Clone ID: LIB3150-021-Q1-N1-F12
cttcgcttgactatccctaagtgtacgaagtaggctttttatgtggacgaggtcttaaatcgcgctggctttctactgaaccgcgtgtgctttgtccacgcggagctactcgacagttgccgcggtagctacccgggactccccccgtccgcgcttccgtctacggcacgatcgctctcggtttctctcctacgtcatgtcctttatcccgtttctagtgtgctcagttcttgct

SEQ ID NO: 13537 - DNA, 129 bp, Zea mays
  Clone ID: LIB3150-021-Q1-N1-F9
tcgcgcacacatagcccggttgccgaggatggatttctatgaatgcaacgtgcctgatcatagtcctgtttcataccttacggcttggaagctccaactccagccgccatcgttggactcaacaccgat

SEQ ID NO: 13538 - DNA, 250 bp, Zea mays
  Clone ID: LIB3150-021-Q1-N1-G12
ttcgttcgcactcagcaactccgtttctatggggggcgtattctacgcatcctcggttcctccgtctagcatccttccaccctcatgggctcgatcactatcgggatccatgggttcggcaagagcagacagctggtggccagggtcgccctgcttagcgacgacatctagctcgccggcttgaacaaccccttcatcagcaccgattacatgacctacatgttcaagtatagacactgtgcacgcgaca

SEQ ID NO: 13539 - DNA, 310 bp, Zea mays
  Clone ID: LIB3150-021-Q1-N1-G8
acgcttccttccgcggactagatatttctgaggattcagagatggcaggaactatccaatccgttatggcgcgccagatctttgacagccgcggcaaccctacagtagacgtcgacgagtattgctcagatggaacctttgcaagggcagctgctcccactggagcattaactggtgtatatgaagctctggagttgagggatggaggatctgactatcaggggaagggtctttacaacgctgtgaacaatgtgaatggtgatattggacctgttctgatcgacaaggaccctacagcacacactgagat

SEQ ID NO: 13540 - DNA, 193 bp, Zea mays
  Clone ID: LIB3150-022-Q1-N1-E10
gcgccgcccccctcttgctcaataaaccgggctcttgtttccgcggtctggtcgttcgatctgtgcaccaaatctgaggtgtcgagcgaccgcgaagcaacttcaatagacggcatggcgctcgtattgtataatggggctggaaacaaaaatgacttctaagcactcattgctgcggaatacaaaaggatca

SEQ ID NO: 13541 - DNA, 389 bp, Zea mays
  Clone ID: LIB3150-022-Q1-N1-E9
agactgcacaaccagattagctgcatggctggcggacaatgtgcaagccgcggaagagttgtgccaagcctcaatggtgttatagcgagacgtcgttgcacaagctcctgagccaacagttggaaatgcataaagcccggatgttgaagcagaaagtgttaacttggccgtgaggcagacaactcctatttgtaatgcaatttgacagtgacgaggatgcgtgttcaaagaagaaatgtgaaataggatggttcttctccttgatactggatactacttatgtcgaagtgaagctgttttccattagacccgaatcgtcgacgagatctacaatgcatcaaacaattaacttgtgaggacacaaacccttgtgatgagtgccattgggc

SEQ ID NO: 13542 - DNA, 242 bp, Zea mays
  unsure at all n locations
  Clone ID: LIB3150-022-Q1-N1-H5
acgaagagacccaccgagtgcttgcgcgcgtgcagattcataattaggtcataaacctgcaaagatgaatcgngtgcgtacacttagatggaatctgttctctcgtccaagtatatcaacgctgcaaggtggtttaatcacattgatacgctcgcgaggctgaacagaattactgcagagggccaaggtgtgaaggttgaatcctaagcagttccttaagccccaactccagatgttgctga

SEQ ID NO: 13543 - DNA, 55 bp, Zea mays
  Clone ID: LIB3150-022-Q1-N1-H6
aaaaaaaaaaaaaaaaaaaaaaaggggggaaaaaaaagggcggacggccgggcgt

SEQ ID NO: 13544 - DNA, 167 bp, Zea mays
  Clone ID: LIB3150-023-Q1-N1-A12
tctctgacctacatctagtacctgacctccagcgggatttttatagtcactcgggcacacaagtattaatatccgaccgccctattttgcatattacggaatatttgtttccatctagggacgcaccatcaataaggcaatatattgctaaaccctagaagaataat

SEQ ID NO: 13545 - DNA, 403 bp, Zea mays
  Clone ID: LIB3150-023-Q1-N1-A5
aagatatctggcgatagcttaaagaatgtatacaaatcttttgtgagcgaataccccattgtttcgattgaagatccttttgaccaggatgactgggttcactatgctaagatgactgaagaaattggagagcaagtgcagattgttggtgatgaccttctcgtcaccaaccccactagggttgctaaggctatcaaggagaaatcatgcaatgcccttctgctcaaggttaaccaaatcggatctgtgactgagagtattgaggctgtgaagatgtcaaagcgtgcgggctggggtgtgatgactagtcataggagtggtgagactgaggacactttcattgctgatctggcagttggttttgtccacgggtcaaaattaagactggagcaccctgcagatc

SEQ ID NO: 13546 - DNA, 383 bp, Zea mays
  unsure at all n locations
  Clone ID: LIB3150-023-Q1-N1-B10
gactccttgagccttctcgtctccccccttcgtccgcaccctataacctttgcatcatcttccttgcccgcgccctaacccttgcaccctcctccttgctgccgccggagccgatctccgctgccgccagccatggaggacttctgcgtggtgtgcgcagatcccgctgagtgggtggcctacggtccgtgcggtcaccgcgacgtgtgctccacctgcgtcgctcgcctccgtttcgtgatggacgataagaagtgctgcatctgcaagaccgtctgccccttcgtcttcgttactaaggccatgggtgaatacactagagtggttgctgatttctcagtgttccccattggngtaaatgacggcaaagctggtgatttctg

SEQ ID NO: 13547 - DNA, 400 bp, Zea mays
  Clone ID: LIB3150-023-Q1-N1-B5
gtcggatctgagacgagacgagttaccatctcatcccaactccggaacgaacaagttaccatctcatcccaactccgcctcgaccggatctcgtcggactcggatccgcccgaccaccccgcgccgccgcagatcaaagaagatggcagctgtcgacacattcctcttcacctcggagtctgtgaacgagggacaccctgacaagctctgtgaccaggtctcagatgccgttcttgacgcttgccttgctgaggaccctgacagcaaggttgcttgtgagacctgcaccaagaccaacatggtcatggtctttggtgagatcaccaccaaggccaatgttgactacgagaagattgtcagggagacctgccgcaacattggttttgtgtcaaacgatgtt

SEQ ID NO: 13548 - DNA, 401 bp, Zea mays
  Clone ID: LIB3150-023-Q1-N1-C1
gggaggacaatggatgcaagaccagatgtctaaactttttgaattgaataagcagacaacaacatcttgtgagtctatggtcctggcaagaacacaagagacacctggatcttctataaaagatgttatgcaattagataaaggtaaaaaaccgaagactacgggaggacaatggatgcaagaccaaatgtctaaacttgttgaattgaataagcagacaacatcttgtgagtctatgttcctggcaagaacacaagagacacctggatcttccataaaagatgttatgcaattggtgaaggcatgtggtgctatagctggcagcaaagagcacttcattgcaactcaagtctttaccaaaaaaaatgaaagagaaatgttcttgactttggatacacccg

SEQ ID NO: 13549 - DNA, 397 bp, Zea mays
  Clone ID: LIB3150-023-Q1-N1-D5
catgaatatttggagatgatgatatcagtgcatcatgcatttacagatcgctctaatgctttacattacgtgcaaattctgtcagcagatttgttttccttgcatatcagggcaaggagacttgaatcgtcgtcagcaagagatatggggcacgagtggtcaacatatcagaaagtagaggggttgaaagaaacaataagatcagcggaagcagccaaaagtgatgcagttagagaatatgaaagtattaaggaaaacaacaagattgaaataaaaagatttgacaaggaaagacgccacgatttcatcgagatgctaaaaggttttgtgataactcaggtgtcttattcagaccattttgctaagatgtggacaaaggtaacggaggaaacagaag

SEQ ID NO: 13550 - DNA, 193 bp, Zea mays
  Clone ID: LIB3150-023-Q1-N1-D9
tccttccccaatattcattcccctctcctccccggcgatttttaaaatcttgcagaattcctcatccggcttcctctattcaaccaaccaacaaaaaaccaatttccttaccccccaaccacttagataacggtccttccacaacctaatgatccacgattaatgccggtcgccgccccctcacccttccact

SEQ ID NO: 13551 - DNA, 400 bp, Zea mays
  Clone ID: LIB3150-023-Q1-N1-E1
caagattcaagttccggaacggccacacggacaaggcgaacggcccaaagtcggcaatcggcgtgcctccactctacaggcgacgacgaaaccagcagcctcagcgccgaccactccgggagcggggcttcacaacctcaggatccacgggagatgccggtcgccgccgcctcaccctcgcactcgtgaactggcttcctctgcgacgagccggggcgggctcggattcggcggatcttgtggggccctggcgtcgggctggtccggtgctagattgatcccgcattcgagctgcggcaagcgtctgggtagtcgcttctcccgagggaaaggaaaacaaagttgcttggccgactttgggatcaaggatcggcgaaaagaaagagaaaggagggatctt

SEQ ID NO: 13552 - DNA, 399 bp, Zea mays
  Clone ID: LIB3150-023-Q1-N1-E4
ggcacctttctccatctccctgctcctgggcctccttcttgatccagccaagccagggatcgccatgtcggactcggaggagcaccacttcgaatcgaaggccgacgccggagcgtccaagacctacccgcagcaggctggcaccgtccgtaagaacggcttcatcgtcatcaagaaccgcccctgcaaggttgtggaggtttctacctcaaagactggtaagcatggccatgccaaatgccactttgttgccatagacatattcaacgggaaaaagctcgaagatattgttccttcgtcacacaactgtgatattccgcatgtgaaccgtactgagtaccagctgattgatatatcagaggatggatttgtgagccttcttacttcagatggcaacac

SEQ ID NO: 13553 - DNA, 402 bp, Zea mays
  Clone ID: LIB3150-023-Q1-N1-F3
cccgaccccgccgtcgtgatgaggccggggctgctcaagtccacggccgagctcctccgccgcagccgcggctacgcctcctcggccaacccggagcggaaggtggccatcctgggcgctgcgggcggcatcgggcagccgctctccctcctcatgaagctcaacccgctcgtctcctccctctccctctatgatatcgccgggacccccggcgtcgcggccgacgtctcccacatcaactcccccgccctggtgaaggggttcatgggggacgaccagctcggggaggcgctcgagggctccgacgtcgtcatcatccccgccggggtgcccaggaagcccggcatgactagggacgacctcttcaacatcaacgccggcatcgttaaggggctctgcact

SEQ ID NO: 13554 - DNA, 257 bp, Zea mays
  Clone ID: LIB3150-023-Q1-N1-F6
tcgcatgcgcgcgtacctaagcctggattcctctaaagacgccccacccgcccgctgggtctcaagaccattagctttatctggtcgagagcgcagaagaacccgagcgacaccatgagggtggtgctcgttgccctcgctctactggctctcgctgcgagcgccacctgcacgcatacaagcggcggctgcggctgccagccaccgccgccggttcatctaccgacgacggtgcatctgccacctccggttcacct

SEQ ID NO: 13555 - DNA, 340 bp, Zea mays
  Clone ID: LIB3150-023-Q1-N1-H12
tacacctcttcatactgatcttatggggccagtttctgagttccgggacaatctggagcagttgctagaaagtatcccaagcatgtttgagaataatagggttgctgattctgcttttggagcagctatgaaggctggcttcctggctatgaattctacctgcggtaaacttcttggttttcaatcagtgctgccatcacttgggattggttcttttattatctagggaagctgaaagtaaagcaaacattacatctggttacaaggaaacccataaacttttgcagcctgttacaacaccctcaaaaaatgggcacttaaatttgctgagaataagtct

SEQ ID NO: 13556 - DNA, 280 bp, Zea mays
  Clone ID: LIB3150-025-Q1-N1-D9
tttcgtcagtaccgagcactcaccgtcctctgtctgtattcatcagatatgagactccattaactttatctgctcctctaacgattttcaagtgctttcttttcttgttaaccttcatgttatttgttatgattcttaatactattgccttttattctgtttttggtctttcttactatttatcttgcccattaagttttttcttattttctttttaaattcatttcatttctctttttttatgttgtctttaattcttttcaattttttttcttttgtt

SEQ ID NO: 13557 - DNA, 240 bp, Zea mays
  Clone ID: LIB3150-025-Q1-N1-F9
ttcgttcgtcgcattatttagcataccctggggagggttcacctgcttaccgatgccaaccccaatcaggtcgttgtttattcgatcattaacagtggaccccttgaggatgccacccgtattggtttctcttgttttgtgaggaggcaagccgtggatttcttacccctgaggagggtgaaccatgccatttaccttcttaccacttgtgccatggatagtgctttccggaacattaaa

SEQ ID NO: 13558 - DNA, 360 bp, Zea mays
  unsure at all n locations
  Clone ID: LIB3150-026-Q1-N1-A12
agcgccgctcagcgccatcctattagtccctcgtcgccatccgtcagccagccagtccgccagcttgcatgcagatgccatccgtccccagcccagtcgctttgagagtatgacacccatatccatccgtccatgagggcagtatagccacatgccgcgaggaagaggttnatctcttcaatcggcgcctgccagtacatagagggtactcctccgatctaggctcatagaatcagctaccatccgagggtggagagagatgtattaccaagagctgcgaaggaaaggccatgatgcccgtcgcagaattggtgttctgctccgtgaccagcacggcatcccgcttgtcaagagcgtgac

SEQ ID NO: 13559 - DNA, 364 bp, Zea mays
  Clone ID: LIB3150-026-Q1-N1-B6
ttcgttttgaccaaccctcccaaaccttcggccgggttttttcattcttgaaacacggaaagcttccttaaagagcttttaacttgcagccattttttgcacgtacggtcttctttttcctatggccctccccttcttcacatctatatgattgtcgctggagtgtatatataccccccctctgaatatcctccgatggtaatattttataaagattgtggtgttaactcaaacacccattctctacactcatgacgaccctcccgggagataactattgatttttttgctacgcgggacctcctgctctttttacagcatccagccgttctttctctcaaccatttcatccgtcatcattttt

SEQ ID NO: 13560 - DNA, 394 bp, Zea mays
  Clone ID: LIB3150-026-Q1-N1-B9
ttcgtaataatccgttggggccttgactgggacgagacctgcttgcaaatggttgaagtgctaccaccattacctgaaaccataaaaaactttgcggtcatctaccttgttgacatcacagaggtccctgatttcaacaccatgtatgagctgtacgacccttcgacagtgatgttcttcttccggaacaagcacatcatgattgatctcgggactggaaacaacaacaagatcaactgggccctgaaggacaagcaagagttcatcgacattgtggagaccgtatacaggggcgcccggaaaggccgtggtctggtgattgctccaaaggactactccaccaagtaccgttactaagaaagcaagcattccccttatgcaatctattggggat

SEQ ID NO: 13561 - DNA, 307 bp, Zea mays
  Clone ID: LIB3150-026-Q1-N1-C10
tccttggtgacctccaaccattcagagggaccgggacagcgcggggctgtggtgatgtccatgaatccgccgattagacctgctcaactccccatcatgtatgcatagaagtctcgacttcacgactcttacaagctcgtgaggctcttttgtgagaacttctttgaccctcccacaaagaacttgaccaccatgaacacaggtgctcccaccctcttgagaggatttgacgacttctagtaccagcccatcaaacaaatcatctagagctgcatcaatgaccaataggagaaattgtcccccatat

SEQ ID NO: 13562 - DNA, 258 bp, Zea mays
  Clone ID: LIB3150-026-Q1-N1-E9
acgcttcggtcctcacttttttatggcaacctaggtgccatcccgatcctttccatacaacttttagcactcaaagccttttagaagccctctattattaaaccggtgttggtagtgcccaaatccgaccttttgaacaacctttttacactcctcagggtccaagaccaagaattcattgaaaccccttgttcttgcgcctatttgtttattaatgggcagttcattgtctagattttctttttctcacactttatc

SEQ ID NO: 13563 - DNA, 374 bp, Zea mays
  unsure at all n locations
  Clone ID: LIB3150-026-Q1-N1-F2
cggcagnaagcctcttgtctgaatttctcaaggactgaaggaggcacanaatgtaaagnctggcnaaccattccttcaagntgttgtggttctcaaccccagagaccctttgactcaattgtccttgatgaaacccaaagatgtctcttgtgtgagttctatgnnccccatggtgtggtcaccctgcaagagtctntgcaccgacgtattgagaaggtggcattctgttttcaaggttggatgaagggagttgtttattgctaactcttgacgctgacaaacacagggatttggctgagaagtatggagttagtggatttcctaccttgaaggtttttccaaagggaaacaaagctggtgaagaatattgatgt

SEQ ID NO: 13564 - DNA, 86 bp, Zea mays
  Clone ID: LIB3150-026-Q1-N1-F6
gtcactctcctccctatttcactgcggggcccaaccgaaatttttgtccatcaacttcactcactaatacctttccatgattctca

SEQ ID NO: 13565 - DNA, 308 bp, Zea mays
  Clone ID: LIB3150-026-Q1-N1-G10
atccgctaacagcttgggcgggtactccatggacgggcgcgggggagccatattgagccatggcctcctgctgggttcttgccctggttcttgcgctgtctgcaggcgcaagcctggctcgtggctacgagccgtggtggaacaagacgcacgtgtacgccaccaccgccaactccactggcggcaacggcgtattctttggcctcacgctcatccagtctgcggcggccaatggagcggtgtgcttggatggaatcttaccaagttaccaccttcacagagggtctggatcatgagcatacacttgt

SEQ ID NO: 13566 - DNA, 292 bp, Zea mays
  Clone ID: LIB3150-026-Q1-N1-H8
tcgtgtcaaacgaagcaccttgaaggcacgtgtgtaaggctttaagaccctattatcttttagatctgaggttgcaggttaagctgcttgaacccagagatgagttcatgtcactcgacaacttccggacatgtctgacaagatactggtgtgacgacttaagaaaataaaggtttcttgaatttcaacgtgcgttgcaaccacttgcgtacataaagatggactatggatacttctatgctgcatgaatcagtccgcaccagctggaatctttgtaaaggcaacaagaaat

SEQ ID NO: 13567 - DNA, 334 bp, Zea mays
  Clone ID: LIB3150-027-Q1-N1-B1
cggccgccctttttttttttttttttttttttttttattttttgttggttttttttttttgattatttttggcaggcaacaatcatttgttcagctaccattctattgaaaaccagggtaacagggaaaacacattctccacggactacattacatataacgctggaaagctcacaacagctacacattattgatgaccataaccataaaaatcgggggcggggaaaagaaaagaaaaagggaaaacttgaaagaacaaaccgggcttgagtcgttcgatgcctaaagaaaactgagggccacccaagatcatttaattttgacctaaaggtgg

SEQ ID NO: 13568 - DNA, 270 bp, Zea mays
  Clone ID: LIB3150-027-Q1-N1-B12
gcctactcgtgagcctacaggagaagggcaacagcctcaagacggcaactgtgtaaaactgagaagattgggtaccggcgggtgaacgattttactaaataaaatgctagcttgctggctctcttagtttttacgatgtacctttgctctccattttctgaatcgggattgtattctaggcttgcctggccgtcattgtgtgaccaacgttcatggcttgtaacaagggatcggacgtaaacggttggaaaacatctctgttactttctg

SEQ ID NO: 13569 - DNA, 400 bp, Zea mays
  unsure at all n locations
  Clone ID: LIB3150-027-Q1-N1-C1
tcgtgagggtggatggaacgactggccagcgttcaggtgcacgaaatgnnctctctcctctccctcctgccaatcgcctcgggccctacccttcgggcctccggacacctgccggcgactgtgcctcgctacgacgctacatcaacatgaggctcaataaggtggaagtgaaccttataaggctgctggaggctgctccaccgcagcaaaatcaggctaaacttgtctattactgaaccacagcgcgggagctgttggagcagctaggagctgagacaacaccagaagggatatcaagcatttcaaaagctaagctttctgagtattcagaaaagattgaagcactagcttccaggcttgctgcttcagtgcctgaaaatgaaaatccgattattgaaag

SEQ ID NO: 13570 - DNA, 128 bp, Zea mays
  Clone ID: LIB3150-027-Q1-N1-D12
aaattgtaggcggccagcgggcgaatgggggatcggggactggaggctgaccacctaccactataccgtgtcgtgtgacagattggagcaagcatggataaaggtgatagctgtgtgaagtgggaaat

SEQ ID NO: 13571 - DNA, 416 bp, Zea mays
  Clone ID: LIB3150-027-Q1-N1-E2
ctcgtacctcaaaaaaaaatcgtgcttcggcacacgcaggtcggcgctccgtctcgggcttctcagcgacgggaggggctagacgccagacgggctagtcccaggttctggcgtcgtcgtcaggcggctccccctcctgccagtcgcctcgcgccctcgcctccggtcctccgcacacctgccggcgactctgcctcgctacgacgctacatcaacatgaggctcaataaggtggaagtgaaccttataaggctgctggaggctgctccacggcagcaaaatcaggctaaacttgtctattatgtaaccacagcgcgggagctgttggagcagctaggagctgagacaacaccagaagggatatcaagcatttcaaaagctaagctttctgagtattcagaaaagattgaagcact

SEQ ID NO: 13572 - DNA, 124 bp, Zea mays
  Clone ID: LIB3150-027-Q1-N1-G10
aaaaaaaaaaaaaaaaaaaaaaataggggaaaataaaaaaaaaaaaaaaaaataatgggcggtcgacacaataattaaaaaaccgaaacctgatagcgtacacattattccttatacatagtat

SEQ ID NO: 13573 - DNA, 287 bp, Zea mays
  Clone ID: LIB3150-027-Q1-N1-G3
cttcgtcgagagccaggccagccagccacctgggcttggtctccatggccgacgcgctcacgtccccggcctcggccaaggtcttgagccccgtcgccgactccaaggtgcgccaggcgtccagagtcgcggtggtcgggttccggcagcatccgcggagccgtggcgcccccgtggccgagcgggcgtcgctgttctcgcccaagcccgcggcggccaaggacgcgcggccgaccaaggtgcacgaactgtacgtgtacgagatgaacgagcgggaccgcgagagc

SEQ ID NO: 13574 - DNA, 323 bp, Zea mays
  Clone ID: LIB3150-027-Q1-N1-G5
gtggggcttcaccaagttcagccgcgctgactacctgaagtacaagagcgagggtagaattgttcctgatggtgtcaacgcaaagctgctcggcaaccacggcagacttgagaagcgtgctcctgggaaggctttcctcgatgccgttgcttaagtgctgatgcgaatcctgacgttttgctttagcgtatcttactttgtttcgtggaacatgaatttcaagtgttttgagggtattacagtgccttatgtgaacttgcctatcttgtgctgaacatcggaatctatcctccgagtatgtttaatcgcattaattttatttg

SEQ ID NO: 13575 - DNA, 344 bp, Zea mays
  Clone ID: LIB3150-027-Q1-N1-H2
acgtctgctgcacgcctacataagctgggctccttaaaagacacccacccctccgaaattatgccgacaccatatctccggatgtcgatggcgaaccctcgcgtcttcttcgacatgaccgtcggcggcgccccggcgggccggatcgtgatggagctgtacgccaacgaggtgcccaagaccgcggagaacttccgcgcgctgtgcacgggcgagaagggcgtgggcaagtccgggaagccgctccactacaagggctccaccttccaccgcgtcatccccgagttcatgtgccagggcggcgacttcacccgcggcaacggcaccggcggcgagtccatcta

SEQ ID NO: 13576 - DNA, 269 bp, Zea mays
  Clone ID: LIB3150-028-Q1-N1-A1
ccaccgtcggtccagctgcagtccgcgagatggtgggggcacaagccgtgggggaaagcgtatccggccacgcgtcccagagcggcggtatagctctccgcgcgcggtcccctcatcggcaagacctactcactgggagcgacgcgcaaacatagatgggcatccgatgtggggaccgctcatggccgttcggcctgagttatacaatggcattgatggccatattggtaacttctggatgagacacgtttgggacctataactttaac

SEQ ID NO: 13577 - DNA, 108 bp, Zea mays
  Clone ID: LIB3150-028-Q1-N1-A12
tctgctgttgatgaaccagatccggcgggtcgtttgtcctagaaggctacatattccggaccgccattacctagaagtgtccacctgctaagagcaaaaacactttct

SEQ ID NO: 13578 - DNA, 167 bp, Zea mays
  Clone ID: LIB3150-028-Q1-N1-A5
ttcttcacacgtacggttccagcctcaccggcggacttaatagtgggaggcatctagcctatcagtgaaagcctattcaccgtccacacgataatcagtgtgactaccatcacctactacctcgtacgctagtcccgcactataccttcaacacactcatacatatt

SEQ ID NO: 13579 - DNA, 344 bp, Zea mays
  Clone ID: LIB3150-028-Q1-N1-A8
gcgtccattctaggcggccgcctccagagcggccgacgggcttttattatactggcgtgttacaacagacccgtcatcatcatgatcatgagctaccatgcggggtgaagttgtcctgccgaaaactaaacagcacatcatagccgccggcatcatgaagcacccctccggcgccgcataagcagtgtacaaactaacaatagcagtgctctcacaacacgctgaggaccatgaacacaagatgtaccagctgctttattaattaagtagaccatccgcgagaagaggcacaatcgcttatcccacaccaaggtcaatcttttctacactcagaagacctacaa

SEQ ID NO: 13580 - DNA, 202 bp, Zea mays
  Clone ID: LIB3150-028-Q1-N1-B8
tctttccaataccaccttaacaaaatacggggagggctattaaaaaaaaggcgtcccccaaacatctaacatccacccttactattaacacgctcctatccaagagatcgcagtgcctcttcttacaaagaaaatcgtctataaactgtttcagcatttcaaaaagccccatctctaccgctttatattccttaaactaatc

SEQ ID NO: 13581 - DNA, 311 bp, Zea mays
  Clone ID: LIB3150-028-Q1-N1-C12
tgtttccgcttccatctccgtcctctgggcgcatgccttctgcatccacactctcccaccatccgtaaaaaggagaacgccctacccacttcggttattccgcatatgtccttttgcgagaagcacaacacaaagaaccttatctacgatcttcaaaacgttaacgtcaccatcgctctacagttctaccaagccagctactataatctactatccgaggttccaaaacacatgcatatcacaccatctatactatttgaccgccacaaggttaatgcattcttttcacttatggccatttaggatctcct

SEQ ID NO: 13582 - DNA, 119 bp, Zea mays
  Clone ID: LIB3150-028-Q1-N1-D8
attcgtttttctacaccattatcttatactgcgggggattctttaaaaaccctaaccacacacatcagaatgtactacttttcacctacacttcaagctttagttttcagcaccttatt

SEQ ID NO: 13583 - DNA, 383 bp, Zea mays
  Clone ID: LIB3150-028-Q1-N1-E11
tcgcccacgcgttcgcccacgcgtccgcccacgcgttcgctgcttcgcctccacctatccgccgcctcccaatcatcctgcccccaaactcccaccccgcagcatccccacgccgccgcacctcgtcgcgtcgcgtcgtcaccggcgtgaagatggtcgggccaggcctctacaccgagatcggcaagaagaccagggatctgctgtacaaggactaccagactgaccacaagttcaccctcactacctacacctccaatggcgtcgctgtaactgcttctagcacaaagaaagctgacctgatccttggcgagatccaatcacagataaagaacaagaacatgaccatagatgtgaaagcaaactcggagtcaaatatcatt

SEQ ID NO: 13584 - DNA, 384 bp, Zea mays
  Clone ID: LIB3150-028-Q1-N1-E4
gttagtttctgtggaggctgcagatcggcgcaagacagtggcttccctggaagagaagattgatgcagagataactctctctatgcagcacaaaacaaatgcagacctggcagaggcgtccaaagaatcattagaggcgcagctgcagtctgcaaacacagagatagggaaactgaacgggattgtgcaaactttagagagtgaggtgaggaaagagacagattctcgtgaagaactactgaaacagatagaggctatgaaaattgagtcagagagatcactatctgtggtgtctaccaaagagtcattagaggtgcagctccaggtggcgaattcagaagttgcaaagttgcgtgggatggtgaatgctctggagtgtgatgc

SEQ ID NO: 13585 - DNA, 138 bp, Zea mays
  Clone ID: LIB3150-028-Q1-N1-E9
gcgctttacaaactccagcgcatactgggggccgagcccgacagatcgtcaattccctatttttctcaccgatcgacctttacgccggtctcgatctcttcctaatgctgttcgcactggtgtgtgagaggattagga

SEQ ID NO: 13586 - DNA, 232 bp, Zea mays
  Clone ID: LIB3150-028-Q1-N1-F5
cacccatgcgtaccgctcggttcccgcggcccaccaggcgcggctgtctcttgaggcatgcaccgccgccggcacctaccggcgtgcgttatcccggctctgattcaggcgccatcccgctccatctttttcaccgcgtctcttctccaaaccctcgacccctcagtgccgtcggctcccgccgcgggagcagcgcggctcttggagctgctgctgctgctgcatgcggacg

SEQ ID NO: 13587 - DNA, 113 bp, Zea mays
  Clone ID: LIB3150-028-Q1-N1-H10
cgcacgcgcgcgtacgcaagcatgcattctatacaatcgacccactctttcttactgacccccacagaaatcccagacgcggcacttttagatgtgccatgacctcccataaa

SEQ ID NO: 13588 - DNA, 220 bp, Zea mays
  Clone ID: LIB3150-028-Q1-N1-H4
ctctcgcatcacatcctctcatttcgataccaaggtgagggcgctcgcgaggaggtacctgtaatacgggcatatgctggggtttcatcgtaaagcaggcacgccgatttttttgtgccatcatcatctgataacacatacgtctaatttttcttggcgttggctttgttatgaccgacctatggatcattttttttttcgagaacaaaatgacttgtct

SEQ ID NO: 13589 - DNA, 94 bp, Zea mays
  Clone ID: LIB3150-028-Q1-N1-H6
attcgttcgctttatcactacacaatactacggcggttttttcaacgcgcaccccaccaacaccaaaatatacattccccaattctactgcact

SEQ ID NO: 13590 - DNA, 158 bp, Zea mays
  Clone ID: LIB3150-029-Q1-N1-B12
tattactctccctcctatctttcgacagaactattcaccaaatttttactcatccaaaaacaaaacacttttttttttccttcccttcctgtcttctactacttatttatctaccaacaccctctctttctcttactaattaccaaaccatatttctt

SEQ ID NO: 13591 - DNA, 267 bp, Zea mays
  Clone ID: LIB3150-029-Q1-N1-C6
tcggcctgtgtagaacctataacattggcgccactcaccagtgcaatcgacatctgtaggcatggactgcagacgaggcgagccgcaaggggaataagggagcggacgatcgcaaggcatgatgttgcaagaagaagattattactcatgtccttagggccgggctgtagttcattgtttgtctactaggtcgatacctgcactaatgccaggactcgcaacgcgtgggcactgacgctcaagtttacctagctgacggactggagt

SEQ ID NO: 13592 - DNA, 204 bp, Zea mays
  Clone ID: LIB3150-029-Q1-N1-C7
tcgttgtatacgcattccttcccaaaacacatactgcgatcctcgaagcctccgccgagcatcgatcatgtactccctactgatgcaatgtacgtgtatgagctcatcaagaatgctgtctacatcggcaccgatggcacgtatattactagctgctgatgagtcaactggcactcataggcaagcgcgctatcagcataaatg

SEQ ID NO: 13593 - DNA, 408 bp, Zea mays
  Clone ID: LIB3150-029-Q1-N1-E7
attcgtgcggagggtacgcttttactgatcggcactgcaaagggactgcatcctcaattgtatctccacttcttgaccaacttccaatagattgaatcattctctgctttcaatagcgtatataacaactagacccttttagagaatatatgcagctcctagctcacacttttcatcaaaggctgtggatttttcaggatgggaacatcttgagaaagccacacctggaaccgtttcacaacaacaactagatcgtgcatgagaggcaaccaaatctgcagttctgatgaacttgcaatcaaggtctatcccatctgacgatattggaagacaagatcttacttatgaggagaggacgcccatcgagtattttctgaaacagtataggagatcactatgaatgacatt

SEQ ID NO: 13594 - DNA, 219 bp, Zea mays
  Clone ID: LIB3150-029-Q1-N1-G5
tagggacggccgcctcctggtggagtaccggttcgtattataaggcgtaccataatagcgtgaagtaatcatcataacagctgcctgcaatcagacgtagtcctctgataagaacgcaaaacataagagcctgcggaatcatatagagtaccacccgagggtactgattgatctgcctgacatcattagttgcgtgctgattgctgacttattacgagg

SEQ ID NO: 13595 - DNA, 137 bp, Zea mays
  Clone ID: LIB3150-029-Q1-N1-G7
gcgcttgaccacatccggctcgcactcaccggtgatcacgagcgcgacctaatggcgctggacgtgggactgaagcagactggcacgggagcaggggccgcagcctgccagatcgggacattgtcagggcctaccga

SEQ ID NO: 13596 - DNA, 203 bp, Zea mays
  Clone ID: LIB3150-029-Q1-N1-H12
gtcgtaccaggacacaagcttcacaaagtaaatgaacaaactgatgaaagcatgcaaagagtgatgaaagcatgcaaagagagttgtgtttcttccccggaagtgcttccgagaataaatttttcttatctgattgtctaaaacctataacgggtgtatcgtagtggttgttatcgttaaacttttaacggtcattctatttc

SEQ ID NO: 13597 - DNA, 226 bp, Zea mays
  Clone ID: LIB3150-029-Q1-N1-H3
tactttttactagatttgtatctaaccgacgcaccttttctttcttaatcttaggcaggcaacaatcagcttgatcaggtcccattctattgcaaaccagggaaccggggaaaccgctattctgaccggctctgttgtatataacgcgagcgcgtctgcatcaggtacgctttatgcgatgaccatagccataagaattggcggcggggaaaagaaaagagaaaag

SEQ ID NO: 13598 - DNA, 264 bp, Zea mays
  Clone ID: LIB3150-029-Q1-N1-H7
acgcgtacgcaagcatgcattatagagagtccacgcgctcgttcgagaaacaagtggttttcctaactggggaacgatatgtttaagcatgccatgtcccgtgaaaaccagcttcataacgaggtggcgctagcttttgcagttctccagacctgctgttaatgctatagagaaagctgtggtaaactacaccgaggtggacctattaggcctgaaccccgtcctccctgatcgcttaagactcttctacaagttcgagattca

SEQ ID NO: 13599 - DNA, 192 bp, Zea mays
  Clone ID: LIB3150-030-Q1-N1-C10
cccgataccggaccgccgcctcctggcggcccaccggctcctattataaggagtcttataacagctcgtcatcatcatcataatagcttcctgctgggaaaaattatcatctcatcacaccacaccacatcataccctccacatcaaatataaagcctccggtgcctccttattaggcatccaacctacaat

SEQ ID NO: 13600 - DNA, 348 bp, Zea mays
  Clone ID: LIB3150-030-Q1-N1-D7
gtcgcagtcgagcatcagatcatgtcgagcctactatcggaaagtacaagagatgatgctcatcaagaattgctgcctacattggcacccctggcaagggtatccttgctgctgattagtccactggcaccattggcatgcgcctttccagcatcaatgtcgagaacgttgaggagaaccgccgtgccctccgtgagctcctattctgctgccctggtgctctccagtacatcagcggtgtgatcctcttcgaggagaccctgtaccagaagaccaaggatggcaagccttttgttgatgtcctcaatgagggaggcgtcctccctggcatcatggttgacaagggca

SEQ ID NO: 13601 - DNA, 54 bp, Zea mays
  Clone ID: LIB3150-030-Q1-N1-E7
attcgctatccattaactctatcgacttccgggcggattccaacatgatcgaca

SEQ ID NO: 13602 - DNA, 212 bp, Zea mays
  unsure at all n locations
  Clone ID: LIB3150-031-Q1-N1-A10
tggcgttgctgagcccgcgcgtgccgcaatgaccggtnttacaacttcagctgggctnccaaancccnnnnctttggccctgcctcgaggtgccaggcgacggcggcgggcggcgtggccgccgcggggccccctgtgtcggagctggaggccattcagtggggcagcgccaagctgcatggcgctcgcgacgagatggatgatgaggtctt

SEQ ID NO: 13603 - DNA, 379 bp, Zea mays
  unsure at all n locations
  Clone ID: LIB3150-031-Q1-N1-B12
ttgtccattacgttccctctcctcacaccaatgacattttttacatctcacctaccatcaaatcncgnaattcaatcaacccttcaacctataccataaatataacaacttcttcatcactaccaattatcttataacacttattctcctcctcttccttaaccataccaagccatatctgcacaccataatcaactacttcaaattctcattcaaaatttactatctactccctcaaccctcataaaaccactccattccaacaataatatactcctatacagacaactagcatatacattcctctcgaataaattacaaatacaactaactattaacttctaaccacaaaaattttcattccatttcaaattataac

SEQ ID NO: 13604 - DNA, 349 bp, Zea mays
  unsure at all n locations
  Clone ID: LIB3150-031-Q1-N1-B4
actgtctccacctagtcatcttccaacaccnccgcacgttatccctagccctatctatccaacaacaaacaccacatcccgccgaccgagaactaccggaacacgccccaccgaatccaccactcctcgcactgaaacacgcacggaccacggtgcatttgatccgacccagccgcctacactatgtccaagtcagtagcgctacatacagcttctggcctatgatggaagatcaacaacgtgtaactcaagtctacactcgacgaatatgacaaatatcatggatactatccagacaaggatgaatcaagcaagtccaactatactcatattcttaataaatactata

SEQ ID NO: 13605 - DNA, 206 bp, Zea mays
  Clone ID: LIB3150-031-Q1-N1-B7
tttcggcttctcctccccctccagatccggcgcaggttcttaaggatctccgctcattccatacgtggatcaccaaatccaaatcacagccacggatctagacaaccgctgcttcgcctactgactcacacagaccacatacgaccactccatccacaacaataacatcacatacctccaggtcctatagtacaagatcaaactca

SEQ ID NO: 13606 - DNA, 214 bp, Zea mays
  Clone ID: LIB3150-031-Q1-N1-B8
ctcgaggtctaccacatgaacagacacatcgcaggttttaataatggctaggcatgtcaagacagcatttccaacggcttatgaactccgatgcacatattcaaacttctggacgcctacttaccgacactgcttagattgcaatacttggcttccatcagtcgcttgtaatgtttacagtacaataaggacgagtgcgactacaatcaaatct

SEQ ID NO: 13607 - DNA, 172 bp, Zea mays
  unsure at all n locations
  Clone ID: LIB3150-031-Q1-N1-C10
tcgttatactagccctctgctcctctgaaaatgcaacttttactacctcttccacctacctcaccatcnncctcaaaaccctaaacccctccccctccttagccacagccatcaccttcgtctccttccccgccacacatcattcattcctcgttgcctcctccgactaccg

SEQ ID NO: 13608 - DNA, 240 bp, Zea mays
  unsure at all n locations
  Clone ID: LIB3150-031-Q1-N1-D11
ttgtgctcctatgcgcccgcagcaaccaactagtcaacttatcaaattcctctccgaactccaactctnccccgcaatccactcaagaaggttagccctcgtggtctcggatttggataatcctccgccgaggtatgaaacatgaggcggccaccatcatagtggtgaccctataggacttcctgcaccactacaaggagcctccaccccgccgcgaggacaatccgtcagcactggctt

SEQ ID NO: 13609 - DNA, 223 bp, Zea mays
  Clone ID: LIB3150-031-Q1-N1-D6
taaaccacaccatacacagacgccgccgtcttcttttaaagggcagcgcgactacaaaacactcctcattctccccacccaggttcatcttccaaacaaaaccgatcagatcaacattctgcaacaaacgatgttgattcagattatctctactatgatgatacccgacgtgccgccaccacgatctactactaaagtagtagcctcacatctccttttcaag

SEQ ID NO: 13610 - DNA, 411 bp, Zea mays
  Clone ID: LIB3150-031-Q1-N1-D7
gtcggccttctatcccttcgtaaacccgtcgctcttcttcccgcggcctgctcgttcgatctgtccagcagacttgaggttccgagcggccggaaaccagcggcaaacgtcggcatggcgctcgtattgcattctggggctggaaacaaaaatgccttcaaggcacttattgctgcagaatacagtggggtcaaggttgagttgaccaaggattttgagatgggtgtctccaacaagacccctgagtttctaaagatgaacccccttgggaaggttgctgttctggagactcctgatggccctgtttttgagagtaatgctattgcgcgctatgttgctcgcttgaaggatgacaaccctcttttcgggtcattccgtattgaacaagcccacgttgagcaatggatggac

SEQ ID NO: 13611 - DNA, 382 bp, Zea mays
  unsure at all n locations
  Clone ID: LIB3150-031-Q1-N1-G12
tgatgagagaaccccgtgttttgcgtgaaagaagcttttctatcgacgctcggccatatcntancnattcacaaatcggaatcaccgtcgttcttgcaaacgcccattgggtttggttaatgatccaaaaaatattattcaaccctttgatgtggtcccaaccacaagatgcatttggtgaacaacctgaaaaaggttggacttaaccattgattccctgcaagccagtgccacccaacaaacactggctaagattttaattaaaggagagagagggatagacggaaagtgcaatgtgtcatgacagcaaccccagaccaaatattcatcctgattgtgagagcaagataaccaacctgtatctttgctcaattgctcccca

SEQ ID NO: 13612 - DNA, 313 bp, Zea mays
  Clone ID: LIB3150-031-Q1-N1-H4
agactcattagttacagcggcgcgtcccggctaattacggagccggtgctctgcaggacgtaccagtctctacctataagtgagtatgcattaaacgcttgtcttaatacatggtcatcagctgcttttcagagatgatacgaggagtctcctgtcacgcaaaacaattcgatttctgccacaagattgaaacatgtagaaaagtttagaatgcgcttaggcggattgacaggaatgcctcgcagatcaaagttctccccttacatgctgagctggatcaggcccagcgcatcgcatacatcaaggagtttct

SEQ ID NO: 13613 - DNA, 468 bp, Zea mays
  Clone ID: LIB3150-031-Q1-N1-H5
tcgtcttcgctctagatcgctgcctgcgactcagattcacgggcggagagcctctccttgttccaggcgagaaatcgcacgaactcatcgagtggcctggatgtcatgacgctagcggtatcaccggaggctggacgctcgcaggtgatgtatccagagtgaatgcacattcgcatgacaatgggcggcgtacgctctcgttagctcgagctacaacgaacatgcgagggcatgatctctctgtctccgagcctctcccgcgcgtcgtatcacgatacatctcctccctcatcaaggttggccgccaggagcccgccatcgtgctccgtgtcgaccgcgacaagggctacatcgacctttcgaagcgtcgcgtctacgaagaggaggcgcacgcatgctaggacaggtacaacaagtccaagctcgtgcactccaatatgcgccacgtccgcgagacgctcgagatcg

SEQ ID NO: 13614 - DNA, 95 bp, Zea mays
  Clone ID: LIB3150-031-Q1-N1-H8
atcggaaagacgagaaggcccctaggcgaggtcgggatcaaagaacaggatgaacgtccactccgcggtgaatctcctgtgcccgtattgcaagg

SEQ ID NO: 13615 - DNA, 317 bp, Zea mays
  Clone ID: LIB3150-032-Q1-N1-A1
ttgatttaacaatgaaaagggagacaatgccttcatggctagaactgttgcttgcaacacaaatctttacgacttgtgctaaccatcttcttgctagtcgcaatgaatgtaacctattttgcacccagtgtgagaccaaaccagctgctttctgtaactattgtcgttcaagtgatcattccacccaccgtgtaatccagataaggcgttcatcgtaccatgacgttgtgagggtgtccgagattgaagatatccttgatgtcagcgatgtgcaaacttatgtaatcaataatgcaaggattgtattcctgaatgag

SEQ ID NO: 13616 - DNA, 397 bp, Zea mays
  Clone ID: LIB3150-032-Q1-N1-A5
ttgctgggggggggcctacccaacaggggaaacttgcatcagcaaatgcttctaaaatatttcagtcactccatgcaggttttgtcccagttttgcacggtgatgcagttcttgatgaattatcggactgtaccatattgagtggggatgtcattatacgacatcttgcacagcttctgagtgcgaaatatgtattatttctgacagatgtccatggagtgtatgatcgccctccaactgactcaaatgcagtacttatgagagaaatagacgtggatgacattggatgctggtccattgtaaaacctgcattgctgcaaggcatcactcaaagaattgagatatcacctgcaacacatgacaccacccgtgggatggagaccaaaatactggaagc

SEQ ID NO: 13617 - DNA, 171 bp, Zea mays
  Clone ID: LIB3150-032-Q1-N1-B1
gctcactcgtagaaaaggcccacatgggtattggggttcgccggccttcagggacataagtgttgttcacagggaacccatacgtactggtcacaaggcctatgtcctgtgctttgtggagtttgagaacgcgaaattcgcacgcactcccatgcaagctttacaagggta

SEQ ID NO: 13618 - DNA, 394 bp, Zea mays
  Clone ID: LIB3150-032-Q1-N1-B4
caaagcctccgacccccttcctctctccgtgcgccgccgctgcgcacgcagggaacaagcgacatgggcgtctacacctttgtgtgccgcaacaacggcggcgagtggaccgccaagcagcactccggcgagatcgaggcttccgccgctaccccatacgagctgcagcgccgcctcgtcgctgccgcctccgcggccgactctgcctacggcgtccagtcgtccttctccatggtcacccccagctccgccgtgttccaggtgatcgtcggtgctgtcggtggtggtgcaatgatggtgagcggaggtggcggcggcggtgctgctgcatctggtggtgctgctgccgaggctcccaaggaggagaagaaggagaggagaaggaagagagcga

SEQ ID NO: 13619 - DNA, 370 bp, Zea mays
  unsure at all n locations
  Clone ID: LIB3150-032-Q1-N1-C11
tttcggcgggtgtcgccccgcgcggagggccgcncggtctaggtggagcgcatccgcacggccatgggctcggacatcgacgtcagcctggactgcgccgggttcagcaagaccatgtcgacggtgctggaggcgacgcggcccggcgggaaggtgtgcctggtcgggatgggccacaacgagatgacgctgccgctgacggcggcggcggcgcgggaggtggacgtggtgggcgtgttccggtacaaggacacctggccgctgtgcatcgacttcctgcgcagcggcaaggtggacgtcaagccgctcatcacccaccgcttcggcttctcgcagcgggacgtggaggaagccttcgaggtcagcgccc

SEQ ID NO: 13620 - DNA, 398 bp, Zea mays
  Clone ID: LIB3150-032-Q1-N1-C6
gcgccccgccgcccgccccgccgccggctgctacttcgcctcggccgcctcggatccggaccgagcgccggccatggcgctcgccttcgacgagttcgggcgccccttcatcatcctgcgggagcaggagaagaagacgcgcctgcgggggctcgacgcgcagaaggccaacatcggcgcgggcaaggccgtcgcgcggatcctccgcacctcgctcggccccaagggcgcggacaagatgctccagtcccccgacggcgacgtcatcatcacaaatgatggggcgaccatcctggagcagatggatgttgacaaccagatcgcaaagctgatggtggagctgtcccgtagtcaagactacgaaatcggggatggtaccaccggtgtggtagtcatgg

SEQ ID NO: 13621 - DNA, 396 bp, Zea mays
  Clone ID: LIB3150-032-Q1-N1-D1
cctacatctgtgtcaacgcctgcttcggtgagtacatcacaaactgaatcatcaagaagccaactgccaaataagttttcatctgattcagcttctgtattttctgtgggttttactcctccatctgtgactccttcagtttcgacagttgaaccttccattcctgtgtcagcagtcttgccttctctggtgaacagtaagccagtagctctacctgactccaccatgccatctctctccactgccaagcctgtgattgtacctgatgcttcagtgcttacctatctatcatctcagccaccatctgctaatgatgtatctccagtcaatgctgcggagcacgttccattggtaacccctgggcaacttctgtcaactacttcctctacaattata

SEQ ID NO: 13622 - DNA, 400 bp, Zea mays
  Clone ID: LIB3150-032-Q1-N1-D2
tcttttaaagccacccaacccttccggtttggttgttttccgaccccgacctgggaaggccgaagcatcaggcgaggcccccctcgcgtgtgaccgagatggcgctgccgaatcaggggaccgttgattaccccagcttcaagctcgtcatcgtcggcgatggtggaactggtaaaactacatttgtgaagaggcatctcactggagagtttgagaagaaatatgaaccaaccattggtgtggaagttcatccgttggatttcaccactaactgtggtaagatcaggttctactgctgggataccgcagggcaagagaagtttggtggcctcagggatggatactatatccatggccagtgtgcgatcatcatgtttgatgtaacctcaaggcttactta

SEQ ID NO: 13623 - DNA, 410 bp, Zea mays
  Clone ID: LIB3150-032-Q1-N1-D3
gtaccagtcttcgcacaaatattccctccgccaaggcccgaagccccgaaactttccggatctttcttccgccgcttcatcttctttgcgcaaaactagttttgtttctcgttcttctcttcgatttcggccgaataaagatggcgtcggctgcgcgcctcctcgcgccgttctccaggcgcggcgtcgtctctgtggctctggcgggggtggagaggcggcggccggaggcggcgtcgctcctgggggcgcctgtgctggctacggtggaagcctgcgcttcgatcaaggtcattcctttgtcgaatcagctggctcgatactcgacaactgcatttcagaggtttgggttttcaacttcagccccccaacaagatgataaggagacaaacaagcacacagatgatggg

SEQ ID NO: 13624 - DNA, 381 bp, Zea mays
  Clone ID: LIB3150-032-Q1-N1-D6
gccgaaccctggcgtttttttcgacagggccgtcggcggcgccccggcgggccggatcgtgatggagctgtacgccaacgaggtgcccaagaccgcggagaacttccgcgcgctgtgcacgggcgagaagggcgtgggcaagtccgggaagccgctccactacaagggctccaccttccaccgcgtcatccccgagttcatgtgccagggcggcgacttcacccgcggcaacggcaccggcggcgagtccatctacggcgagaagttccccgacgagaagttcgtgcgcaagcacaccgcccccggtgtgctctccatggccaacgccgggcccaacaccaacggctcccagttcttcatctgcaccgtcgcgaccccttg

SEQ ID NO: 13625 - DNA, 404 bp, Zea mays
  unsure at all n locations
  Clone ID: LIB3150-032-Q1-N1-E1
aagaattggacaatgcacacaggtcctggtcagagctgcatgcgcaggtttctgagctggaagacgaggtagagaagcagaagcttgtgatatccgagagtgcagagggaaagcgggaggccatcaggcagctgtgcttctccattgaacactaccgcagcgggtatcagcagctgaggcagctgctgcaaggccacaggaggccgttggtgatggcaacctgataaatgaacaaagtccgtttgccaacaaattgcgcagttgcttgtctctgggcgtgttctatttgtagctctgttctttcacaacttgtgccgtgtagtttatgttataaagaattctgtgtggtatgtgtgtagaatgtaatgggatgggatatttatgttgntccttcatactcctat

SEQ ID NO: 13626 - DNA, 304 bp, Zea mays
  unsure at all n locations
  Clone ID: LIB3150-032-Q1-N1-E2
accacccccagatttcctttccatcagcgccccccgttcccctcctcccctttccattttaccttctcgcccgtccccgaattcttcctcctcccatcccgtgcagccggcctcaccgccggcgacgggacgcggagacccgggctgccggtaccgtcagccgtgctccttcctctcttcgtcgcccccgccaaaaccttcatctgccggggctgcaccggcggcgcggngacaacaaaagctcgagatccggtgactgatctcttcgttcctcggttcactttgatattccaacaaaggtcac

SEQ ID NO: 13627 - DNA, 391 bp, Zea mays
  Clone ID: LIB3150-032-Q1-N1-E3
gtcctgagttgcttaccatgtggtttggtgagagcgaagccaacgtccgtgaaatttttgacaaggctcgtcaatctgctccttgtgtcctcttctttgatgagcttgactcaattgctactcagagaggaagcagtgtgggtgatgctggaggtgcggctgatagagtgcttaatcagctactgacagaaatggatggcatgaatgccaagaaaactgtgtttattattggagctacaaacaggcctgacatcattgaccctgctctgctgaggccagggcgtcttgaccagctgatctacattccactgcctgatgagcagtctaggctccagatcttcaaagcctgccttaggaagtcccctgtggcgaaggatgtggacttgaatgc

SEQ ID NO: 13628 - DNA, 394 bp, Zea mays
  Clone ID: LIB3150-032-Q1-N1-E7
tttcggtgaagctggccgtgctccagttcccgcaggtttacaacgccaccggcatggtcacccgcctccgcaaggagtgccccaacgcctagtgcggcgcgggggtcttcatggccaaccacttctaccgccactactgctgtaagtgtggccttacctacatctacaaccagcacgcgtacgatgcccctactttctgtcgggaaggaaaatgggaagtcttgctaggtgataatcctttttgctttgtttagatttgttacaatggtagtatgttcttggaacataacacctgtatctctttttacgactcgttacttgggtttaattatatcaatgatgttatgggtccctgtcaaagcacttgttgaatttccaatggtttttaaaatta

SEQ ID NO: 13629 - DNA, 396 bp, Zea mays
  Clone ID: LIB3150-032-Q1-N1-F1
ccagcatctacaacagccgccaccttccgccttatactcgccggaggccaaccagtactcgtgccacccctcctcttccttgtgatctccgaatacccatctcagattccaagggccgcgccgtgtaatccccggctctccccacccaccatatatcctagtatccgcgcctcaaatccctcgcgaaacgccccgccgttagcagttgttgtctgccgtgatttgagccgggcggacggattgatcccgggacgaggtgtctcagcttttgatcttgatcctgatcctgggaggcgttcctggtttattggtgggagcgaagaagccatgataccttccgtgaggctctctcctggtcctgcagccttctcaggctccagcctacgctcaaaatta

SEQ ID NO: 13630 - DNA, 451 bp, Zea mays
  unsure at all n locations
  Clone ID: LIB3150-032-Q1-N1-F3
gacaggtggaagcactcattgaagtcaagggtgagaggactccaaaacctcttctctttgggtgagaagggaggttgctgtgtttggctgcagggaactctctgaggagatctctcgtggggtnntcggttggtgcctgannatatgttgttgagtctaaactggtgttttcaacttgaccaggagaaggggctgcagctttcacttgaagggtnnggtgccaagaaggggttgtcatctctgctcctagcaannggatgcccccatgttnntgtcgttggtgtcaacgagaaggagtacanagtctgacattaacattgtctccaatgctagctgcacaaccaactgccttgctcctcttgctaaggtcatcaatgacaagttcggtatcgttgagggtctgatgaccactgtccatgccatcactgctacccagaagaactgtgatggg

SEQ ID NO: 13631 - DNA, 295 bp, Zea mays
  Clone ID: LIB3150-032-Q1-N1-F5
gggaacctcgggtccgggtacgacaacggggggggatacagcacccgcgtggtcgacctgatccgccacatgaacagcaccaactaagatgaagaactcaaggtctggtgatacgagcgagttgtcttcttcccccccggagaaaagtgcttccgagaataaatttttttccatcggaatgtctgaaactatgttgggtgtatcctagtggttggttgagcattaatggctcatattttgtcaggtctatgtgtcgccgtgaaacttttaatcaaatcagttcactcttttgcct

SEQ ID NO: 13632 - DNA, 388 bp, Zea mays
  Clone ID: LIB3150-032-Q1-N1-G1
ttaaaagtcaaccaagccttccggcggtggtcgccccgcccggaggaccgggcggacaaggtgaagcgcatccgcccggccatgggctcggacatcgacgtcagcctggactgcgccgggttcagcaagaccatgtcgacggtgctggaggcgacgcggcccggcgggaaggtgtgcctggtcgggatgggccacaacgagatgacgctgccgctgacggcggcggcggcgcgggaggtggacgtggtgggcgtgttccggtacaaggacacctggccgctgtgcatcgacttcctgcgcagcggcaaggtggacgtcaagccgctcatcacccaccgcttcggcttctcgcagcgggacgtggaagaggccttcgaggtcagcgccc

SEQ ID NO: 13633 - DNA, 409 bp, Zea mays
  Clone ID: LIB3150-032-Q1-N1-G3
atttccctgtgggacgcatccaccgccgcgtgaaggatagcgcacaggccggcgagcgggtgggggcgacggcggccgtgtacgcggcggccgtcctggagtacctgacggcggagatcatggagctggccgggaacgcgtgcagggacctcaaggtgaagcgcatcaccccgcggcacctccagctggcggtacgcggggacgaggagctggacaccctgatcaaggccaccatcgccggcggcggcgtcatcccccacatccacagggagctcatcgacaaggctgcctaggaatgacgaaggagcaagcagtctgagaaaaaaacctgagaaccaagtagtaccatgaacctcttgtgggtggcttcgctcttgttgcgttgtcaatctgctgatacatacacatt

SEQ ID NO: 13634 - DNA, 432 bp, Zea mays
  unsure at all n locations
  Clone ID: LIB3150-032-Q1-N1-G4
tcgggaaggacttggaagcttggacactactgtgtgagcgctgtatgnagactcctggctcattactccagagtggtcanttctttgtcaacactccgctcgcaagggtggtatctggctctatctgactaagatgaggagctagggaccacanctcgtttctgccacttctatggtgacccatggacctagaacactagagacatcatcatgagnggagttctcggtctggctcctcccgtgtgctcatcaccactgacctgcttgctcgtggtattgatgttcagcaggtgtccctggtcatcaactatgatcttcccacccagccagagaactacctgcatcgtattggtcgtagtggtcgttttggtaggaagggtgttgccatcaactttgtgacccgcgacgacgaacgtattgctgttgacattc

SEQ ID NO: 13635 - DNA, 350 bp, Zea mays
  Clone ID: LIB3150-032-Q1-N1-H5
tacaggcgtcttcgtactcgcctatcggcgcgacccaaagcgttcccccttctcccattcttctctcatttctcaccaccgccgccgctaccccctttcgacaacaccatgagggagtgcatctcgatccacatcggccaggccggtatccaggtcggaaacgcgtgctgggagctgtactgcctcgagcatggcattcaggctgatggtcagatgcccggtgacaagaccattgggggaggtgatgatgctttcaacaccttcttcagtgagactggcgctgggaagcacgtcccccgtgctgtttttgttgaccttgagcccactgtcatcgatgaggtgaggactgg

SEQ ID NO: 13636 - DNA, 128 bp, Zea mays
  Clone ID: LIB3150-033-Q1-N1-A1
caacccgccgcgctttcactccgctcgtctgacatctcgtgccgttctttcgattcgaagccttgtgagccccgacgattgccaccgccgcggtgtaagtctacgagaagctcaacaagctttgcgcc

SEQ ID NO: 13637 - DNA, 301 bp, Zea mays
  Clone ID: LIB3150-033-Q1-N1-A5
tgatcttctccccttctctgccccgaggtcggttctaggacacgggcacccggataccgaagcgcgccccctcggtcccagccaaaagcatcgcagtttctaatcagtgtggagagcacacaacaatgtccttcgtgcagctatctggtgctagagtccctgcagtggccttcacgaacaacagcctagtctctgggcacgcaacgctacggagctgatcgtcgaggcgctccataccgagcctgggcggtaggctgcaactgtcgttaccccaaagtacactataatgaagcctctggga

SEQ ID NO: 13638 - DNA, 313 bp, Zea mays
  Clone ID: LIB3150-033-Q1-N1-A7
ctcaaagcgactcaatgagaaacaaatcactgctctactgaaagtgacctgccagcgccctcaagagcgcgagctggacatcttacagactgtgcatcacaatgcatactatgaagacccctatgcactggaatttggtataagaattgatgaacgtcttgctgcagttgaagctcgtgttctgccaccaccaagacttaaataccatgatagtggccgagagaaggatgttttgcccacagttggccaatggaacatgatgaataagaaaatggttaatggtggcagagtgagcaactgggcatgtattaac

SEQ ID NO: 13639 - DNA, 365 bp, Zea mays
  Clone ID: LIB3150-033-Q1-N1-B1
ggttagagtgagtcaaagagaaacaaatgactggtctactgaaagtgacctgcccacgccctcaagagcgcgagctgcacatcttacagactgtgcatcacaatgcatactatgaagacccctatgcactggaattaggtataagaattgatgaacgtcttgctgcagttgaagctcgtgttctgccaccaccaagacttaaatactcatgacacaggcctacagaaggatgctttgaggagacttggccaatggaacatgatgaatgataaaatggttaatggtggcagagtgagcaactgggcatgtattaactactctcggaatgtgcaagatagtgccgctaggggtaacactcatgagtt

SEQ ID NO: 13640 - DNA, 215 bp, Zea mays
  Clone ID: LIB3150-033-Q1-N1-B11
tttcggtatcaggactagtagctgccgaaggccgctttctaccgctcccagaccccatcttatctaccctgcaaccctagcatcctaaccctcgaccacgtcgcagctaacgacctcctatactactccgtcttttcgccctttcaacttccttctccacttttctatcctacttctttattccgactcacctttacgtacatgccccaaccggg

SEQ ID NO: 13641 - DNA, 247 bp, Zea mays
  unsure at all n locations
  Clone ID: LIB3150-033-Q1-N1-B12
tctcctccacctccnactcctgctccttgctatcctactcaccacagtgcaaggtcttcatccatcctctttcgtgccttacctcccttttatactattatccgcatcctctgtatcctttttaatcttctacatcatgcttctttccacttcatcactgtcgagctcattaccttcgatatctaccttttttttatggtctattgccatgacaatttgtacttccttctctaaaacattttcttta

SEQ ID NO: 13642 - DNA, 360 bp, Zea mays
  Clone ID: LIB3150-033-Q1-N1-D4
gcagctcggccgccgtactcccgctaccgagctaggaggcatcaccttcgccggtccaacatgggtaagacacgtggtatgggagctgggcgcaagctcaagacccacagaaggaaccagaggtgggctgacaaagcctacaagaagagccatctcggcaacgagtggaagaaaccctttgctgggtcatctcacgcaaagggaatcgtccttgagaagatcggcattgaggctaagcagcctaactctgctatccgtaagtgcgctcgtgtccagctggtgaagaacgggaagaagattgctgcctttgtgccaaacgatggttgcttgaactacatcgaggagaacgatgaagtgctg

SEQ ID NO: 13643 - DNA, 297 bp, Zea mays
  Clone ID: LIB3150-033-Q1-N1-D9
tttcggccgaagaaaattcgaagactagtatcagctacactgcggacggacttctggcattgatggccagttccaggttggcaaggaggaggtcatccaagcatggtacatggatgacagtgaagaggaccagaggcttcctcatcatcgcgagcccaaagaattcattcctctcgacaaactttccgaactaggaatattaagctggcgcctaaatgctgatgattgggagaatgatgagaacctcaagaaaattcgtgaagccaggggttactcttacatggacatttgtgatgt

SEQ ID NO: 13644 - DNA, 307 bp, Zea mays
  Clone ID: LIB3150-033-Q1-N1-F6
tttcggtcgcgggagcaaacatttcgcacgcgcatgtttgtgccaatatgggccaaaacgcagaacctccttttcgaaaacacaagctccaggaattcacattatatgaggacccgatggacattcctggaccacaggcgtaccttatgcactgtttacctgcacagcgagcacttgctatgactgacagccccattgaggctccaaactcaatcgtgttcccccaatctgataacacaatgcactctcacaactccatcatgcttcatgtgctctgcgcttaactctcctattgcacactcaagac

SEQ ID NO: 13645 - DNA, 272 bp, Zea mays
  Clone ID: LIB3150-033-Q1-N1-F9
actttctacctaacaaaccaacctagccttctgtatcctttatctcgcatctaataaccccctatactacacccttctcttctcttcccaaccatcatctacttcctctatctattttaccacagtctctctacactacctctcctactacttattctcactgcacccattcatcttttgcttaaatcattctcctatatcaccataatcaccattccttccaatatcccaactacatcaatatgcttttttcaactattattttttttttt

SEQ ID NO: 13646 - DNA, 172 bp, Zea mays
  unsure at all n locations
  Clone ID: LIB3150-033-Q1-N1-G10
acgcgtacttaaacattngatcctctatataccacccacttcttttctctctcataaaccctatataccatgcgactctttttctaaaaaaccccccccatctctacaccagctttatataatcactcccaccctacccttttttacccttacattcatcacaaacacattt

SEQ ID NO: 13647 - DNA, 339 bp, Zea mays
  Clone ID: LIB3150-033-Q1-N1-G11
tctttctaaaaaaaaaaaaaaaaaaaaaaaaagtaaaaatttaaaaaaaaaaaaaaaaaaaaaaaaaaaataaaaaaaaaaaaaaaaaaaaaaaaaaaaaaaaaaaaaaaaaaatggcctcccccccctttatttcctaaccgttacctccattctaacaaattttccctatatttattcttattaaaccttgcctaaataattacaatacccgtttcctttttaaaatttttttcctctcacaattccacacaactttcaacccggaaccataaattttaaacccttttttccctaattatttatctaactcacataaattaccttcctctcaatttc

SEQ ID NO: 13648 - DNA, 280 bp, Zea mays
  unsure at all n locations
  Clone ID: LIB3150-033-Q1-N1-H11
actttcggtccacgcttacgcgtcgcggctccgctggtctttcacttcaccggctgaaggcnatatcaggcgcttgtcgctatttcgttctccgacgctcgcttggctggtatagtctactcgatgcttgtcattcccgactatcccaagccagttatcatactccaggacatcatttcactgctgctgtacaccaacgccttccgttacattttcgaccaccttttaaattgtttcaagggccaaaggatcaccgtattttcttttttttcatcccagt

SEQ ID NO: 13649 - DNA, 229 bp, Zea mays
  Clone ID: LIB3150-034-Q1-N1-D5
ctggatgtcaaacttttaccacgaggggtggttctgaaaaggttggttgaatgttgcacctcaaacaaaaaaacaaaaaatataaaaaaaaaaaaaaaacaaaaaaaaaaaaaaacaaaataaatcataaacaaacaactatatcaaacaaaaaataacaagaacaaaaaccggggggaacaccatcaaaattacgaaccggaacctcaaggcgccccactatttccta

SEQ ID NO: 13650 - DNA, 345 bp, Zea mays
  Clone ID: LIB3150-034-Q1-N1-D8
tcgggcgggaatgacaacagctttggcggggtaccaactggccaacctttgcaggggactgatgctgcattccccagttttcctgcaggcgaaaattttccaggcgcagcagttcaacaggctgctcctgatgtataatgagttgaacaatatgtagtgcactgccccccttttcttcccattaaatccggtgtacaatacgagaaatgagattccgggtattagtttatatgactataaattggcttttccacaatttctgatgatcttgtggtgaattgacgcatggatcttgtgtgttcttgtgctgaatttcatgaaaaggagatgttgtcaattgcatct

SEQ ID NO: 13651 - DNA, 324 bp, Zea mays
  Clone ID: LIB3150-034-Q1-N1-E8
gctgcctccaaagccactcccaggcccgcgcttccataaccttatggaagctacccgtcgtctcctccactcgcaccgatggcgaaggaaccaatgctcgtgctcgtcactggcgccgcaagacaaattgcatatcccctggttcccatgattgctaggggtgttatgcttggtgcagaccagcctgatattctgcacatgcttgacattacgacggcagcataaacccttaatggtgttaagatggacttgattgatgctgcgcttcctcttctgaaaggacttgctgctacaaccgatagtgtggaagcctgcactggggtc

SEQ ID NO: 13652 - DNA, 321 bp, Zea mays
  Clone ID: LIB3150-035-Q1-N1-A4
cttccggaaccgtgaaccaagatccaaggccagggggccaagcaccccccaaggggaaaagccacttttctttcaattccaagaaaaaatgggctataaaaaagcgctcgaaatccaaatctgggccgatgcgaccgccctcgctgctcttccttaccctcgacgccgcgcttcttcgcattgccaatatcgccgacctcttccaccttccaaaccaccttcttatcgatctcttccgtgtagagaaccctcaatgctggtaagctgacaaagaaagttctcaagttgtttctagcaaccggctgtgaagatatcatattg

SEQ ID NO: 13653 - DNA, 350 bp, Zea mays
  Clone ID: LIB3150-035-Q1-N1-B12
caaacacccaacattgtggaggcgccgtttgttttaaaagacatttgggaccatacaaaaataatgagtgttaaacttgaggaccaaaatgcgtttgaacgcgatttctgccagctgaagccttattacatggatacatgtggcataattcccgcctcgccagaggagtacccaattttggcactcaatattctaaggctgttggttcataatagaattgccgaattccacactaagctggaacttttacatgtcaaggcactcaaacatacttgcatcaagcatgctagaaagcttgaacaatacttcatggagggtgcctacaatcgaaagttaagcgctcgacaagc

SEQ ID NO: 13654 - DNA, 164 bp, Zea mays
  Clone ID: LIB3150-035-Q1-N1-B3
acccttccggccaacggccaatttaaacttggccagggggaccaccacaaacaatttcccaactcggcgatcaagttcccgctcgtgtaccgcaaggtgaggccgcccaccaggaagctcaggaccaccttcaaggcgtccaggcccaacctgttcatgtaatg

SEQ ID NO: 13655 - DNA, 449 bp, Zea mays
  unsure at all n locations
  Clone ID: LIB3150-035-Q1-N1-B8
cgtctctngtgccacagtactttatgattgtagagaaggtggagagagaactataagaatgtggttgcctacatttgggagattgcattgcagcattctggctaaacacctcctcacattcataccattgtgtgcctacgaaacccacatgattgggaaccgtcannagagaaagctggcttattgttgggaaagggtttaacattttgacacgtggtggctacaacattaagaccgggccaggctgcagcatcgagctgatgaaatttgacatgggaggctctgcagctgtatttggtgcagctaaagctttgggacaaatcaagcctcctggagtagaagttcactttatagtcgctgcctgtgaaaatatgatcagtggcacangcatgaggcctggtgacattgtaactgcttccaatgggaagacaattgangtaataacactg

SEQ ID NO: 13656 - DNA, 410 bp, Zea mays
  unsure at all n locations
  Clone ID: LIB3150-035-Q1-N1-C8
tttcgggggttcgatctgggttagcctctctgtatgcctccagcccccaagtccggcgacgccctcttcgccagcgtggatcgcgtcaatgcggagctgttcacgctcacgtacggcgccatagtgcggcagctgctcacggatctggaggaggtcgaggaggtcaacaagcagctcgatcaaatgggttacaacattggaacacgattggtcgatgagttcttagcaaagtcaaatgtatcaaggtgtgttgacttcaaggagactgccgatgttattgcgaagcttggcttcaaaatgttcttgggtgtgactgcaactgtgaccaattgggatgttgagggtacaagttgcagcattgtcctcgaagacaaccctcttgttgattntgttgagctccctgacacttg

SEQ ID NO: 13657 - DNA, 139 bp, Zea mays
  Clone ID: LIB3150-035-Q1-N1-D7
aactcattcgtgacagcgttcgtcctgataatgccgtcccagtccaagcaggccctccacctttccatatacaaagtccatttagacatcaacctcaagatgcctatacctccgtcctacctgaaagtgaaatcaccta

SEQ ID NO: 13658 - DNA, 418 bp, Zea mays
  Clone ID: LIB3150-035-Q1-N1-D9
tttcggggaagcatgcagcgttcttatatccgctgtgcaagttctacagagattggcatgccaagtctgatggttttcatggaattttccttcatgatcctgtgagcttcactgccgtacttcatccagagtacttcacattcaagaagggtgtggtgagagtagagacccagggcatttgcactggccacactttgatggatcagggattgaaaaagtatatttttttctctgagtaactcataaaagattgacccgtctgatgttttttagtttcagcattcttacatacaccacattgatatgacataaatctcaccaaattactttataactcttggagtaagcaaactaaggcaaaagttaccccacatgatctatatgtttcagcagatttcacacttgtttctcctatgct

SEQ ID NO: 13659 - DNA, 318 bp, Zea mays
  unsure at all n locations
  Clone ID: LIB3150-035-Q1-N1-E3
cttcggaacaaaacacaagccagttcagaaaagggggaaaaaaaaaaaaagataaagatgtcggggttcggccacaacaacaaaacaagcggttcccgggtcggcccaccagtgtcaagactttgcggcaacgaactactgctggcgtcggacgcccgcggctgcccgtcaaccaaggcacaacacactggtcaagacatgcgcttancacccggtcaggacgagaaagcatgccggcgttcgcgctcgtcaacaaagccacggngctcgccatcaaacactccctcggccagtcccacccggtcaagctcgcgcctt

SEQ ID NO: 13660 - DNA, 334 bp, Zea mays
  unsure at all n locations
  Clone ID: LIB3150-035-Q1-N1-E4
tgttttcaacacagcacaggcagattnagagagctgttagtatatagagagagataggacgatgtcatggttccgggcacccaccacacacaacttcagccggcttcccacacggcgtctgggcccccaaaccaggttgttcaaagatcttcgtgccgcgccaacccgagaactactgcctggccgtccgcgacgggcgccgtcgtgctggccccggtcaaccccaaggacgaccaccagcactggtacaaggacatgcgcttcagcacccgggtcaaggacgaggaangcatgcctgcgttcgcgctcgtcaacaaggccacggagctcgcca

SEQ ID NO: 13661 - DNA, 390 bp, Zea mays
  Clone ID: LIB3150-035-Q1-N1-E5
cctttttccgaaaggccgaaacccacctgctgcggccctgtaaacctcgagtggggctcttccacggccgcggtggagatggcggcaaatctggaggacgtgccgtcactggatctgatgcacgagctgctccgccgcatgaagtgcagctccaagcccgacaagcgcctcatcctcatcggtccacctggctctggaaagggaactcagtctcctattatcaaggatgaatattgcttgtgccatttaaccactggtgacatgctgagggctgctgtggcggccaaaacacctctaagtatcaaagctaaagaagctatcaataacggagagcttgtttcatatgatttggttgtgggcattattgatgaaactatgaagaaaccctca

SEQ ID NO: 13662 - DNA, 401 bp, Zea mays
  Clone ID: LIB3150-035-Q1-N1-E7
tttcgggacaagtccctgaccgagaggaagtgcgccatcgagagccggaagctcatattcacccgcgccaagcagtacgccgaggagtacgatgcccaagacaaggaactggtacagattaagcgtgaggcccgtttgaagggtggtttatatgtcagacatgaggcaaaactgctatttgaggtccgcattcgaggtatcaatgccatgcaccctaaaaccagaaaaatattgcatcttctgcatgagaggcaaatcttcaatggagtgctcctgaaagtcaacaaagcaaccattaacatgcttcgcagggatgaaccttatgttgcatatgggtacccgaacttgaagagtgtgagggagttgatctacaagaggagctacggaaaactgaacaagca

SEQ ID NO: 13663 - DNA, 265 bp, Zea mays
  unsure at all n locations
  Clone ID: LIB3150-035-Q1-N1-F10
tctttctcggacgcgtggcgagatgtttgcttgttttgttaaatgctcttgctgctcnnaaacaccgngtgatggttgtaatgcccagatatttaaatggtacctccgataagaattatgcaaatgcattttaaacaaaaaaacacattcgaattcaatcctttgccggtaaacataaagttacctttttccataattataaaaattaagttaactggttgttttttaaaaatccttaatataacaaacttggaaatatatttaa

SEQ ID NO: 13664 - DNA, 394 bp, Zea mays
  Clone ID: LIB3150-035-Q1-N1-F4
acccttccggaaaatcttattaatattccggccatggccaggaaaaaaaggcatggcaaagattcctaaaagggaactgattctatttctggtgccctcaaggctcatccagttagttctgaatcacgccgagtccaagctgacatagagcaaactctagctcttgtgcgtaagcttgattctgagaagggcattgaagaaaatgtactgtcaagtggtgatcatgacaagtcagatgtagacaaatcacacataggatctatggggcctataattataatcagaggtttaacgactgtcaaaggcctagagggtgttgagctcctagacactattcttacctatttatggcgtattcatggtgttgattactatggcacgtcagagtcgcatg

SEQ ID NO: 13665 - DNA, 314 bp, Zea mays
  Clone ID: LIB3150-035-Q1-N1-G11
tttctaaacaatcctcttgacttcctcccgcgtcgctttataatccttgatgactgcaaaaagctatactcaaacacaaagaccaactttccataggttgccatcaaaggtttctgggacatgtaccacccacatggctactatttcttcttctgtgactacaactacaatgatgataacaccgtctcctttgtcaccctgaacaaggtttgtagattcctgcagcgaatcgacctataccgcaagtacgccttttggaacattctcatgataggctcttaaacacccttcaaacttaaaggcctttatctctt

SEQ ID NO: 13666 - DNA, 356 bp, Zea mays
  unsure at all n locations
  Clone ID: LIB3150-035-Q1-N1-G6
tctgactcgaatgctattcgcagagtcagagcacaggatatggcatatgctgctgttcaagcttacccagatgaatataagcccgattgggggcgtatgagcttccttgtagacattttgagaccaactcctggagaagggccttcgtggtaccatcttctgaagaaagctagtggcggctgcaatgaccttatgtacagtggacatatgcttgttgctgtcctgactgcaatggcgtggacggaagcatacgggggctggatctctgtcgcgatatggctcctcgtcctgcacagcgcgcagaaggaggtacgcgagcggcaccactacagcgtggactgcgtcgncgcgatcta

SEQ ID NO: 13667 - DNA, 418 bp, Zea mays
  Clone ID: LIB3150-035-Q1-N1-G8
tttcgattgacaacattttccgtttactctgcaaactctgaggtgtctgctcttcttgaacgtatcccatctgctgtgggataccagccaacccttgccactgatcttggaggactgcaagagcgtattacgacaacaaagaagggttctattacatctgtgcaggccatctacgtgcctgccgatgacttgacggatcctgctcctgctactacctttgcccatcttgatgctacaactgtgttgtcacgacagatctctgagcttggtatttatcctgctgttgatccactggattccacatcaagaatgctttctccccacgtgctgggtgaggatcactacaacactgctcgtggtgtgcagaaggttcttcagaactacaaaaatcttcaggatattattgctatcttgggta

SEQ ID NO: 13668 - DNA, 382 bp, Zea mays
  unsure at all n locations
  Clone ID: LIB3150-035-Q1-N1-G9
attgcttgaaaatggtgatcgctgggggactgagattgctgagaacttgagatctgagagcctctatcgctgaatctgtcttccattatggttgataaactgggttcttccattttccatattttgctcaactagctgatgaataagcaaacgatgtatcataacttaggtacgatgtttttgtaccttggcaccatctgtgtgttttgttcattgccttgctaaaggtggcaccagatgttctttgatgggaaaattccttctgtagcactgagctgttttcagtcacaccttattttgtatacaatgaaacagaacgctgtgctcatggcacagtgatttggtggaaaaaacaagnaactatacaaatggaccaaannng

SEQ ID NO: 13669 - DNA, 272 bp, Zea mays
  Clone ID: LIB3150-035-Q1-N1-H5
gtggagaagaaggacccaaccggcgcgggggtgaccaaggctgctgccaagaagaaatgatgcgatcctgcgcctgctttagcaatacctagttttcatcattacaagttttgtttgtggtcgttgctgttattgtgtgaactgttgagctctgttagcctgtgcacttttatctatttatttggtaccttcttgctatttcaccttctgcaatacaagaatgctgtaagagctatatgttaaccttttggcattgttaatttgattttagg

SEQ ID NO: 13670 - DNA, 196 bp, Zea mays
  Clone ID: LIB3150-035-Q1-N1-H8
tttcgttcacttttaaccttacccatttgttgtttacttactaaagaatgcgtctatcatacttggaataatcattatttgtaatcaaacacaaaaaccttatacttaatccaaaacgttaattcctcccacacaaccaacactgccactcctccaccaccatcccaaacccccttccaagcaccatcgacttcat

SEQ ID NO: 13671 - DNA, 146 bp, Zea mays
  Clone ID: LIB3150-036-Q1-N1-C12
ttaccaactcactttaaccgacggctgaccaacaaaagggatggggacagtttaacgcacgaaagcaaccgttatatatggtcggattaataattgcatgtagcatagccatagccgattcacgtttgaaattcgtagtcacatac

SEQ ID NO: 13672 - DNA, 131 bp, Zea mays
  Clone ID: LIB3150-036-Q1-N1-D8
gcaaatcacccagcccacctgtgattttttttcttttggttttggtttcaagttgatcggtgctgtaagctacacctatgaatgctgctccttcctttttttgtaataaaaaaaactgcaccgaggtacac

SEQ ID NO: 13673 - DNA, 496 bp, Zea mays
  unsure at all n locations
  Clone ID: LIB3150-037-Q1-N1-A3
agcagtccggcgtcaagttatacagacagagcttcgagccacacgtgctggcgtctgtacagaactaggatgcactagtcgagcaggtaggagcagtcggtagaccaggttctaggtgagtagggatgagaggcngatacatcgagactgatcgaccaagaggtccgggagaaagaaagatagatgaggtaggctagtcccgagggatgagggatgcatagatgcaaagtcgttcgtttctgcgagggcccttcatatcttcttcttccaagatatgccaggcagccagcccgctttagtttttatgttcctatctagccgtagaccaaaaccttcttagtgaaatttctttaatttagcctttttagctaagaaagttcttaattttcatagtagtaaattttagtaccaattggccgtgggttaagaaaaatcacaatntttccaaactcagtcctatagcttactgagaagttcgtgatcttgatagctgatc

SEQ ID NO: 13674 - DNA, 274 bp, Zea mays
  Clone ID: LIB3150-037-Q1-N1-A8
ggcaagctgactcgctcacagtcttcgcgaacgcctgggccaccttctctccatcccaatgaactgatgcactcttttcagatgttcaccagggcaagggaatgcttagcgccatcagctgctgggagttgatgccctgttgatagtgacaaggaaagatgcacccttgaagacattttggctgtcagaagcattggctcccccatggtgcactgctatcagccaaagctgtgtcgggattacatcggtgaatgtaatgagctgctgggaggac

SEQ ID NO: 13675 - DNA, 452 bp, Zea mays
  Clone ID: LIB3150-037-Q1-N1-E11
cttgctttacacacacataatactctccattgcatttcattccatctcagaggagacaataatgggcggtctctccaccaagcttttcgtggtcctcctcctgctcgtttgttacaccgggacgcaaggcgggccggtgactatggtgtcggccaggaagtgcgagtcgcatagcttccgcttcaagggaccttgctcgagggacgccaactgcgcaaacgtctgcctgaccgaaggtttcaccggcggcgtgtgcaaaggcctacgccaccgctgcttctgcaccagggactgctagtactgcctcccctcgtgtcctgcgtgtgcatatatagccgcagcggatcagtaaaacatgcatgcatgcgttaccaaatatttggcagtaccagcaagttaatgaattaaaatattaaaatatttgtcatggaacaaaacctgttttgaccttg

SEQ ID NO: 13676 - DNA, 375 bp, Zea mays
  Clone ID: LIB3150-037-Q1-N1-G4
catcgatctcgtttcaaatccatccatcgtcggttcctccgtcccgcaggatctcaaccccatggccaagatcaagatcgggatcaatgggttcggcaggatcggaaggctggtggccagggtggccctgcagagtgacgatgtcgagctcgtcgccgtgaacgaccccttcatcagcaccgactacatgacctacatgttcaagtacgacactgtgcacggacagtggaagcaccatgaagtcaaggtgaaggactccaaaacccttctctttggtgagaaggaggttgctgtgtttggctgcaggaaccctgaggagatcccgtggggttcggttggagctgaatatgtagttgagtctactggtggtttcac

SEQ ID NO: 13677 - DNA, 254 bp, Zea mays
  Clone ID: LIB3150-038-Q1-N1-A11
tcggggtttttgattttagccgccgccgctggtcatctcacattcctcgagaagacgcctgctcctcgccgatcgatacgatggccgtgttcttcgacctccacaccgccgacaggctcaagtgcctctaggctcacctcgccggcaaaacctatgtgtctggtgactccattactaacgatgacattaaagtcttcgccgcggtgccgtcgaaacctggcgctgagtttcctaatgccgcccgctggtacgag

SEQ ID NO: 13678 - DNA, 385 bp, Zea mays
  unsure at all n locations
  Clone ID: LIB3150-038-Q1-N1-C11
tttgtacaatcgagttaaacagaggtcgtagatctgtttcaatcaagaaccggcaattgtacngccatactgtcactattgctgtgaaagggcagagccttccttctggtgaaagcaaggatgatagtgccgtgcctgatagaacacaagttaaatagagacgatttccctgttcagtatgatgctgcaaagttctttgtcattaaatcgtacagtgaggatgacatccacaagagtgtaaaatacaatgtgtgggcaagcacaaccaatggaaacaagaagctcgatgctgcttatcaagaagctcagtcgaaaggttctgcgtgccctatattcttgtttttttcagagaatacaagtgggcagttttgttgtgttgctgaaa

SEQ ID NO: 13679 - DNA, 427 bp, Zea mays
  Clone ID: LIB3150-038-Q1-N1-C5
cttctcccaatctcccctacaccagaacaagtggcagttctttggtccgcgtcagagaggccgcccccatgtctgggcgcggcaagggcgccaagggtctgggcaagggcggcgcgaaccgccacctgaaggtgctccgcgacaacatccaacgcatcaccaatcccccgatccggacgctggctaggaggggtggcgtaaagcgcatctcgggcctcatctcccaagagacccacggcgtgctcactatctttctcgagaacaccatcctcaactccatcacctacaccgagcacgctcgccgcaagaccgccaccgccatgtacgtcgtatacgcgcttaaccgccagggacccaccctctacagattcagaggctaggctaggcgcctcttatactctgagactgcctaggggacatgtctctg

SEQ ID NO: 13680 - DNA, 274 bp, Zea mays
  Clone ID: LIB3150-038-Q1-N1-C8
tttttccgagctcttgctatccacgggatgaatctttaatagaccacccttctaccaaacttgggcaccatggcccttgattatggcttgacatcccactctgttgttaactccacaaggacagtcgatgttagtttgattcacagctaaccctggctcacttgtctttttaaatttttatgaattagcgttgagaactatgtactgccaaaaaagttcatttttctttatacaaaaacaaactcttcctactccactatttccaattactaat

SEQ ID NO: 13681 - DNA, 379 bp, Zea mays
  unsure at all n locations
  Clone ID: LIB3150-038-Q1-N1-D12
cactggccctcatctcttcaccctgtggcggtggattgtgttgagggttttggaaacaatttaagctcacagcggctatcacttcccatggagcccatcaaatttcctgccgctgtatggcggctcggacttccatgactaccatcaccgtgtgctgtacacaaagtcagggaactatgcctcaacatttgtttacatggactggttgttcggcacggacaaggattatcgcaaggcaaagaccattgaggagaaagaagggaaaaatctgtagattgtggaagctgctcagcaagactggcgatagagttttactcatggaaggagatatggatgcaccctataaacagncagtttatcttctgaccatcgatactat

SEQ ID NO: 13682 - DNA, 205 bp, Zea mays
  unsure at all n locations
  Clone ID: LIB3150-038-Q1-N1-F12
tctgttacagtcttcgcacaaatattcgctcccccaatgccaaaagccgcgagactttccaaatctttcttcccccccttcatcttctttgcgcaaaactagttttgattctcgttcttctcttccatttcngccgaataaagatggcgttngatgcccccctcctcgcgccgttctccacgcgcggcgtcgtctctgtggctct

SEQ ID NO: 13683 - DNA, 308 bp, Zea mays
  Clone ID: LIB3150-038-Q1-N1-H9
aaaaccgacaagaccatagcggagggcaggaggacacgggtggtggtggccccattctgtccggggaggagcacgacgagacatggcctgtctgtacgaccacagatgagaggatcacaactgggccgcctactggtccctctacaaccacatacacgttcctacagtggcgggtatcaacgaatcggtgcccgggagcgtcaagttcgccttgaagtcctgggagcacattcttgacacatgggtgggttttttggagaagcatgaaggtgagccctgacctacttattttgatgccgactatacat

SEQ ID NO: 13684 - DNA, 142 bp, Zea mays
  Clone ID: LIB3150-039-Q1-N1-C10
acccggtcttttctcccgctcccagctcctggggcgggtgttgacaaagtcggcgcggaccaatccataaaactaccataaacaagttgcaagacacccagtatgccagccgagcgcaagctcctgacccaccccatgaacc

SEQ ID NO: 13685 - DNA, 356 bp, Zea mays
  unsure at all n locations
  Clone ID: LIB3150-039-Q1-N1-E10
aatccttcgtggttcgagtgaatccgtggggtcaactaccggccgctaccggcaaccctatcnaggcgatggggaaggcggaggcgaggtcaagggggcgcggcggcggcggcggcggcggcggcggatgatgaggctgacgccccaacggcaatccggggaagatcttcgtcggagggctcccgcgggacaccacggatgctacatttgtgaggcattttggacagtatggagaaatagttgattcggtgataatgaaggataggcacacatctcatccacggggttttggcttcattacatactccgaccctgctcgtgntgataaagtgatagacgacaatcatgttatcaat

SEQ ID NO: 13686 - DNA, 188 bp, Zea mays
  Clone ID: LIB3150-039-Q1-N1-F7
tctttcaccgccgccgtggcggcggctaccgtggcattcgcgaagagccacaggatctccacgggaaagatgggtggtaagaaaaagaccgtgaactccttctctaacatcgacttggctgacatcaaggccccaaacgactctattgtgcgcaacaatgcgaaaactcttgagttcagcacacattc

SEQ ID NO: 13687 - DNA, 195 bp, Zea mays
  Clone ID: LIB3150-039-Q1-N1-H3
gttattgtttacattggcggtgggacatgggagacgggatacagaggttcgtgctctaccggctgcatacaataacccttagagagctatacactacctgtattctgcaattcctgagaatgtggaggctcatgctgttgcccaaacacactgcttctagacaacaaacaaatcagcaggccatatcacccgctc

SEQ ID NO: 13688 - DNA, 452 bp, Zea mays
  Clone ID: LIB3150-040-Q1-N1-A12
ttcttatgtctcgacattcttaaagaggagaggatccctgctttgacaatctctaaagttttgctttctatctgctccctgcttactgatcccaacccagacgatcctcttgtccctgagattgctcacatgtacaagacggatcggcctaagtacgaggcaacagcccgcatctgtacccataaatatgccatgggatgaaaatgaaaagaagtcgaaactccatattcggcattactgcttaaatgcagacgattgttgtgttgccccatgaaactttttgtggggacgtatgttcttccattccttgtcgcccgtatgcattctgatccatctaaggatcgagtgctagtccaacatcaacctaccattgccgtcgataatgagatgacttgtgctttctgttataactatgctagagccgatgttatttggtaaatgattctcattga

SEQ ID NO: 13689 - DNA, 424 bp, Zea mays
  unsure at all n locations
  Clone ID: LIB3150-040-Q1-N1-C10
tcttcttctcggcttgtgcccaccaaccggagantggcttccaccaaagcgacgcccgaacaatggcgtcngcgtccaaagaggaggtgatcgggaagctcaacatccgcgtggtgcggggcaacaacctggtcatcgtcgacccgctcacccacaccagcgacccctacgtcgtcctccaatacggtgctcagaaggtgaagactagtgtccagaagaagaactccaatccagcgtggaacgaagtactgcagctctcagtaacacatcctacgaagccagcgcaccttgaagtttttgatgaagacaagttcacagcagacgacagcatgggtgttgctgagatcaacattactgacatctacgatgctttcaaactggacctgaaacacctctcttatgggacaaggatcaataccatcta

SEQ ID NO: 13690 - DNA, 423 bp, Zea mays
  Clone ID: LIB3150-040-Q1-N1-D12
tcgttaagagagtcaaaaggcagcaggcagttacagaatctgattagcaggagctccagtcccggattgttgtagcagaaaatcttcctggtgatccctcctaccagaatcttaagaagatattttcagctgttggaagtttgatttcaatccgaacttgctatcctcagactccaaatggcactggtcctgcaactaatagatcttccaagttagatatgctttttgctaacaagctgcatgctttcgtggagtacgaaactcctgaagatgctgcgaaggctattttggagctcaatgatgagaaaaactggagaaatgggcttagagttcggttgctgaatacttgcacggtgaatggagcaggcaaaggaaaaaacggaatgaatgaaactgatggaaatagtgaggaggatgtctcca

SEQ ID NO: 13691 - DNA, 333 bp, Zea mays
  Clone ID: LIB3150-040-Q1-N1-D4
gttggcttctcctccccctcttaccaaagacgggttcgggttaggggtacgtagggttttgtggaggggcgatggcggcggctgatgtggagtaccgttgcttcgtcggcgggcttgcctgggccaccagcaacgagtcgctggagaatgccttcgcctcctacggcgagatcctcgactccaaggtcatcaccgaccgggagacggggaggtctcgcggcttcggcttcgttaccttctcctccgagaactccatgctcgacgctatcgagaacatgaacggcaaggagctcgacggccgttacatcaccgttaaccaggcccagtcccgtg

SEQ ID NO: 13692 - DNA, 242 bp, Zea mays
  unsure at all n locations
  Clone ID: LIB3150-040-Q1-N1-D6
gcctgctaatagaaagnagcggtggttggttgcnatctgacctagaaggaggatcgcctacactctaatattcaaaagtatcacattctttcataattggactctatggagatgctttacttgcttgcattatactgatgctcaatcatatattgatgacgattatgatttgagcctgactcatgagattaattcacacccctgaaggcaaatgaagtactatctgaagttggtattgtatc

SEQ ID NO: 13693 - DNA, 314 bp, Zea mays
  unsure at all n locations
  Clone ID: LIB3150-040-Q1-N1-E10
tttctttacccagaatacaaaggaccaaggaagctttttaaaatcaagagccctaactaccanggttaatggaaggcacctatgattgacaacccaaatttcaaggatgatccgtacatttatgcatttgacagcctgaaatacattggcattgagctgtggcaggttaaatcaagcactttgtttgacaacatcatcatcactgatgatcctgcgttggccaagacttttgcagaggagacatggggcaagcacaaagaggcagagaagactgctttcgatgaggctgagaaaaagaatgaagaagaggaagc

SEQ ID NO: 13694 - DNA, 266 bp, Zea mays
  Clone ID: LIB3150-040-Q1-N1-F7
gcctgttttccaaaacacagccaccgcaggcagtgcagcctacagccgcggtctggtctccatgaaagccctggagggcgacatggtcacggacgcccccgggatcgacttgccgcccatcttcggtgcgccgatccgcccggacgtggtccgcttcacccacaagctcctgtcctgcaacaagcgccagccttacacagtctcccaccacgctggccaccagacctcagtcgagtcctgtggtacagccctcgctgtgtaccgta

SEQ ID NO: 13695 - DNA, 108 bp, Zea mays
  unsure at all n locations
  Clone ID: LIB3150-040-Q1-N1-F9
tcttttagaatccccaagcantcaaacagaaattttttctatataataggacagcccccctctcccccctccctctttttactctctttcccttccttccattcctct

SEQ ID NO: 13696 - DNA, 58 bp, Zea mays
  Clone ID: LIB3150-040-Q1-N1-G5
tttttgagtgtaccatggtttgtgaacaagataaaagaaataagtatgcgggtcacgg

SEQ ID NO: 13697 - DNA, 471 bp, Zea mays
  Clone ID: LIB3150-040-Q1-N1-H10
tcgcttcctggctggcttttcttctctcgtacgccctaagtctcagtctgtggtggcgctcttgtggagctactaggtgaccgtcgcgaccgccctacgccacgtgctcgatccagcctcgtcggcttcttcgcacccgtcaccggcggtcagcacccaccaggttcataaatggcagagacggtgttcaccccctctttggaaggtatgaagcatgtgaaggcagagaacggagtcattctcaccaagcccttccttgatgtctgcaagcaaatcttgcctgtcctggataaatttggagctgctatggcaattgtaaagaatgatatcagcggcaatatcacaaggctggaaaacaagtattcttcagatccatcaaagtatggacactcgtacagcatggttcaagaagaagtcataacaagaccgcgaaaggttcctcaagctgcacatatggtcttctgtggctca

SEQ ID NO: 13698 - DNA, 315 bp, Zea mays
  Clone ID: LIB3150-041-Q1-N1-A11
tcgcttctctccatccagatctcctcttgcggataccgcgacgctctctctctttcgccgagctcctcgaaaccctatgagcgtgctcgaccggcggcggcgaggtgatggcgatggaccctgacgcggtagcgaaggccttcgtggagcattactaccgaacgttcgacaccaaccgcgcggcgctggttgggctgtaccaggagacctccatgctcaccttcgagggccagaagtttcagggccccgtccgccattgccggcaagctcggatctttccctttcaggcctgcgagcatcagatcgtcaccgtcg

SEQ ID NO: 13699 - DNA, 396 bp, Zea mays
  Clone ID: LIB3150-041-Q1-N1-A4
tcactcgttaaatgtgtacatggcgaaactccccgagcgggcctacaggcacgaggaaatggtttattttatggagaacgtaacgaagactgacgactcgcacgagctcactgtggaggaacactaccttctgagtgctgcatacaagaacgtcattgccgtccgcagtgcgttatagcacatgatctccttcatcgagcagcacgatcagggtcaaggcgctgaggacactcgtcacactcttaagggccaatacctggatcgactgaaactgagctcaccaagatctgtgatggcgagatgaagcttgtctaatgtgagcttgtgccgtcttacatcgttcccgagatcaaggccttatatctcaagatgaaaggtgactactacagatacact

SEQ ID NO: 13700 - DNA, 421 bp, Zea mays
  unsure at all n locations
  Clone ID: LIB3150-041-Q1-N1-B10
ccgttangcgactgctacgatgatctgtgggggagataagcaggatgaccgcgttggaggaggattaggacaagaagaccgtgctttcgcagnncgaggggaagcacaccaggttcatctacaacagngacgacgagaacgagcgggnagaggaggcggatgcagctgaggcgacggcggagcttcgcgcattgatgttcatgggcctgctggtgccggaagggaagcacccgcgctttcactataaggatccttacgaataaaaatctcagccgcgnggccaagaggcnggttgcctttcgctgacaccagccaaaattcttttgcggggctctgaatccagttctgtacgttgattcattctccgttcttaaagaaataanccaacttttctgaaaataaaaattttggggcattcgat

SEQ ID NO: 13701 - DNA, 230 bp, Zea mays
  Clone ID: LIB3150-041-Q1-N1-B9
gccgacgacgtgcacgaccaggactggcactccgtcaccagcgaggagaaggcccctaccaaagccatcgactgtatggctgattgaatcaaaggcatcggacgatgagaccacggaggataaggagctcgacctctcctccaacgacgttgtcaccaagtacaaggctgccgccgaaatcctcaacaacgctctgaagattgttgtgtctcagtgcaagccaaaagtca

SEQ ID NO: 13702 - DNA, 419 bp, Zea mays
  Clone ID: LIB3150-041-Q1-N1-C2
atcagcttggctacacatactcagtggtgggagaggcctatcgctatgatctaaacgcctcaccatgacaaacatctctgtatccgttatgacattgtacctaaaaaatcgtgccagctttcaaacaacagattcgctaccattcctcggcggagaaatcacgttctcaaaacgcgcgactctgcactgagttttacataatgcttagcacaaacagcccaaaagacattcacttatttttaagaagccttgttgaaaaggatgcaaaaaataatattcatactgatcgaacaggccatgctctaacaagccatgtgatcaactatattgagtgtttgtttgactaccattacattttcactcacttcttctggtgactcacaggagcaagcacaggctctaagcttacatatttgaca

SEQ ID NO: 13703 - DNA, 339 bp, Zea mays
  Clone ID: LIB3150-041-Q1-N1-E12
atcgaggaagagctcggtgatgccgcggtctacgccggagcaaagttcagggcaccagtggagccctactaagaaaggaagaggatggggatgttttcttgtggagctatactagctcgctgctgccttttgttacaatgtttgtacggtcgcaataaatgtatggtcgtgtttgctcgagagctactcaggtgattttgtcgtgggagcaccaaaagcagaaaagaactggtttttttttcaatctctctagattctgacgagtggtggtctgcactcgttgtaatgtcgtttgcctaaactgattttgatggaacaggtaatcttgctggtcttgcc

SEQ ID NO: 13704 - DNA, 196 bp, Zea mays
  Clone ID: LIB3150-041-Q1-N1-E6
tcgttccaacacggacaaaaaaaaagggcagcccgaaattcgcgcaggagggggcctcaatcaaattatatattctcttcggacaccggatcgaagcacactggacaggaaccgcccaaactatctgcaaaacaggttaagggttgccgtacggacccccaagctgtgagaacccaccccgacgtaagctcttaga

SEQ ID NO: 13705 - DNA, 111 bp, Zea mays
  Clone ID: LIB3150-041-Q1-N1-F10
atttggactgcctctagattttcttcagagcagcagaacctgatcagtacatttccgtgctgtgtatgagaagcagagcatactcaataagcttgttgccccgactgaatc

SEQ ID NO: 13706 - DNA, 353 bp, Zea mays
  Clone ID: LIB3150-041-Q1-N1-G10
tgttggaaatgggcatgtttctggaatagggaaaaaggggcaacagccaattcaggtaaactgcttattagaattacctgatgctaaccaaggtccttcaaagctgaagattttggcatccattggagcattaaccggagtaataatagcatccggaatatatgtatggggtagaaagtaacagacgtgagtgcaatgtgttcaatgagcctttaaatctcgaaaaaaagtatttaagttatttaccctatatctgtttcattgttctaaatataaatagatgtggtttctgaaattgaaattaaacaaatgaaaggacaggtgcaacaaataaatgatacatgttttttcct

SEQ ID NO: 13707 - DNA, 169 bp, Zea mays
  unsure at all n locations
  Clone ID: LIB3150-041-Q1-N1-G11
ataagancngngcnnggncnngcangggacaaggaagggaggaaagggcgagcnagngcaagngcaaacacaacngnnaaaancngggananagcngnnggnaaaagggcagncacaccagaacaccangangacaaggggcaagcagnngcnnggagcccacagncac

SEQ ID NO: 13708 - DNA, 161 bp, Zea mays
  unsure at all n locations
  Clone ID: LIB3150-041-Q1-N1-H11
ttccccccctcagccagaaaaccccccgcggcncccggcggnccgcccgggcgaccngagcaccagaacngaggacgcgagcgaccgcgaagcagcnncaaacgacacgcacggcgcccgcagggcagaggggggcaggaaacaagaacgcccncaaagca

SEQ ID NO: 13709 - DNA, 256 bp, Zea mays
  Clone ID: LIB3150-042-Q1-N1-A4
acgacgatgcacgcgtacgtacagcagcatccatctcatagacagacccacgcgtccgttccttcaacaaccctacagctccccatgagggaatgcttgctcgaaaggggctgccccacggggctttcaaaatctgccggtagaacctgcaagcgaaggcgagacccatttctgaccgaatcctgaaccctaacgccgaactgctcaacaagacggcagagctgtacatgaacatcaacgccgacaagggcctcca

SEQ ID NO: 13710 - DNA, 297 bp, Zea mays
  Clone ID: LIB3150-042-Q1-N1-C10
tttatccggcacgagtgcgcggccgcgggggattattgtagcgcgggggtgacacaccagtccgtgggcgaccgagtgaagctggagccggtcatcagctgctggcgctgccgccactgcaagggcgggcggtacaacctgtgcgaggacatgaaattcttcgtcaccccgccggtgcacagatcgctagccaaccaggaggtgcaccctgccgacctttgcttcaagctcccctacagagtgagcctgcaagagggcgccatgtgctagccgctgagcgtgggctttcacgcgtgc

SEQ ID NO: 13711 - DNA, 216 bp, Zea mays
  Clone ID: LIB3150-042-Q1-N1-C8
ttgtttacgcgaccgccgccgtaatggggaggggaggtaagggaggctgggatgggaacaagttccacatgtcactggagctaccggtggtggacacggtgaactgcgcggacaacaaggacgccaagaacctctacataatctacgttaagggcatcaaggagtcgctaaaccgcctcccgtccgactgtgtcagagacatggtcatggccaccg

SEQ ID NO: 13712 - DNA, 451 bp, Zea mays
  unsure at all n locations
  Clone ID: LIB3150-042-Q1-N1-D2
ccgtccggctttttaatgggataggggataaatgtgctcggtatcagcttttcagtcttcttagacatgcaagatgcnggagaacatagggttactgtgatanccgactccagttattacacactttcattgagtggactacaaaaaatnctggagaatacacagcgctttcctatacttggagttgaatggcagaaaatggagaatccagatctccgcaaagcaatgggaatgaaaccagatcaaaagggtgttcgtgttaaaaggggtggagcccactgctccagaatctggatgcctacgaccatctgatattattcttagtttcgacggtgttgacattgctaatgatggaacagttcctttcaggcatggtgagcgcattggcttcagttatctggtttctcagaaatatactggagagaaagctcttgttaaagttctgcgtgat

SEQ ID NO: 13713 - DNA, 416 bp, Zea mays
  Clone ID: LIB3150-042-Q1-N1-E10
ttctttaagacgagtcggcaccctgaggggagagtgggctcagaggatcgacagggtttacatcactgtacagttacctgacgcaaaggatgctaaggtcaatttggatccagatggtgtcttcacattctctggcagtgctggtacaaacttgtatgaattgaaactagatctgaatgacaaagtaaacgttgaggctagcaaaataagtgtgggggtcaggtccatattctgtatcgtaaaaaaagctgaagccaaatggtggaagaaactcgttcgagatgatcaaagggcacctcactttgtgaaagttgattgggacaaatgggttgatgaagatgatgatggtgctgatatcaacatggatgggatggacttctcgaatttcgatggcattggtggattggccggatggt

SEQ ID NO: 13714 - DNA, 177 bp, Zea mays
  Clone ID: LIB3150-042-Q1-N1-E6
tcgttgtgtcccaggtcatctcatccctgactgcctccctgaggttggtgtaggttgggcgctcaatgtcaagggaacggcggcagatgtcatagatggcctcgttgtccagcaggatagccacatcagtgtgctcgaggagggagtgggtggacaggacactgttgtatggctcaa

SEQ ID NO: 13715 - DNA, 185 bp, Zea mays
  Clone ID: LIB3150-042-Q1-N1-E7
atcattgaagatgatgggcggttaaggatcgcaaatctaacttcatggaattcatcatatggttacaacggtgtcttggtgtgtacgctgccatcgactgtgggatccacatacactgcctgtgcccaacacgtgtatgcttgtacggggctacctccttgctgactacaatgatagaccccatg

SEQ ID NO: 13716 - DNA, 290 bp, Zea mays
  unsure at all n locations
  Clone ID: LIB3150-042-Q1-N1-E9
ttgatctctaccgnctccccaaacaccgtcgaacctattattaaggtgggatgccgggaccacaccctcnatgttttgaaccttacccacttcaaacttagcttcacttttgattgacaccggggctatattaactccttcgctgtgaaccccaaaaaatcacttttcgcctcctgcaggaaggacagcgttactcttctgttggatttggcttaagggaagaagctgtactctcttgacacgggctccatcatccactctttcttttttttacccaaccgctactggct

SEQ ID NO: 13717 - DNA, 293 bp, Zea mays
  Clone ID: LIB3150-042-Q1-N1-F10
ttacttcacgcgttttttaacgcctgggcgcaagccagtcacgttgcttttaaaaaagggtgggtcctcctccttacatctccactccccatttcacagatccgctcctccatctcatgttagccctcctctacaccaacggcaatcaatttgaccaccgcgtcaaataatacctcactcgataagtatctttgcatgctgctctataagtacaccaaagtgctcatcatactaacctacaaccctacccccaaacacttttaatacattcctcgtatccttaagacctactt

SEQ ID NO: 13718 - DNA, 187 bp, Zea mays
  Clone ID: LIB3150-042-Q1-N1-F6
tcgttcttttgcagctctctctgaacggatgggttgctgacaaggacgacagactccactgtcgttaggggaacaaagtacatcaaatggttgaatcggcacattgaaagcttgtataccacaaccaggacacgctgtgctaagaaaacctacctactcacgaatatgttcacttctgaataacgta

SEQ ID NO: 13719 - DNA, 229 bp, Zea mays
  Clone ID: LIB3150-042-Q1-N1-G12
tactctcacgcgttcatccgcccgcagcccccatccccgtgggtggctccagatggccaggcggtcgcaccgccccattcctcgattaaacttagatagatcctgtacactcatctagggcaatccgctaacctaatcgattccaacctctgtgaggaattgtgttaacaccactgcattttcactagctgagagtgcactgacagttgtcatctctactgacagcgcg

SEQ ID NO: 13720 - DNA, 231 bp, Zea mays
  Clone ID: LIB3150-042-Q1-N1-G2
ctatggagtgattagactgcgtatatggcatagctgttctggtaaatgtatcgtacatccacaacatacaccgagataaggaaagcctggggctaatgagtgactctacattatggtgctatgccgttcagcgaacctgctgcactgatataatggcacgccgggagaggcggtgcgatggcgccaggggtttttttacatgaacgcacagtgattgccttacgctggctg

SEQ ID NO: 13721 - DNA, 141 bp, Zea mays
  Clone ID: LIB3150-042-Q1-N1-G6
tcgttcagacgcggcggcggttgagcaaacgcacctgaatgcgaaggggcgaggaatggagcaccagccattgtgcacgtgcacttgtaccgcaactgtgggctgacgtgcaagataccaatgcgctcttattagaacgac

SEQ ID NO: 13722 - DNA, 269 bp, Zea mays
  Clone ID: LIB3150-042-Q1-N1-H10
gcaagaagagacgttgatctacttatagtcggcgcattgaagttgagctggtggtttttgcctggaggaactcttggtagtttgagctgagcgaaagctttaaattttacatttactcaccacaccatgaactgcaacgaagtgagcatctgttagaaaagtggaccagtaattttggttggttatttatttcctgtttctctgtcagactcttaactcggaggacctgtaactaggaaagttacttttgcttgaaagaacattttggt

SEQ ID NO: 13723 - DNA, 285 bp, Zea mays
  Clone ID: LIB3150-043-Q1-N1-C1
tcaggctccgcagccaggcgagcttgttggtgaccacaatgtcgagctgcgcggcacgttcaacaagctcgccaggctccgcagccaggaggatgagtagtctggtttcttgtcataacggccaactagatcctgccattcccggctgtaggaaactactctgctttgtgccttgttggtacttagaataccagtcattttctacatttttggtaccagtagcgacttctatgtggcatattctactgttatcttgcgtcttaaatacctgcacctcatgttttc

SEQ ID NO: 13724 - DNA, 196 bp, Zea mays
  Clone ID: LIB3150-043-Q1-N1-D7
ttgtttaccagactaccgaaattataggcggagcgtcatcagagggaggggcgttcaatcgctccactaaaccaaggcagccttcgaccgcgaatgcatactcccacgagaacctgtctgcctaggacttacacattgactatgcagactctctcgacgaccactactgcgtaaactgcgtcatgctccagttaca

SEQ ID NO: 13725 - DNA, 199 bp, Zea mays
  Clone ID: LIB3150-043-Q1-N1-E10
ttttgtatgccccaagggaaggggtccgtgcgtcctcagactttatgttcagggcaaggaagtcaatggcgctggcatcaactctagcttagctgtgcaccaggatactgatggaagggcaactgatgttactttagcatggacagtggcacttggtgcccccttcacgtttgctactacttctgaacacgtgtacaag

SEQ ID NO: 13726 - DNA, 137 bp, Zea mays
  Clone ID: LIB3150-044-Q1-N1-A12
tcttagccaccgatccagcactgttcgcgaggcagctttcaaaagtagcggggcccccctaaattccaaagccgccccgtcaatgtgctcgtttacataggggtttccacttctacaagggcaatatctaactcaac

SEQ ID NO: 13727 - DNA, 198 bp, Zea mays
  Clone ID: LIB3150-044-Q1-N1-A7
tttctgccccagcaaaaccagactaccgggggagatgttgatatgaagagaacaccttctgttactgctgcacttgaagatgctatgactattcttggctaggataccgaggatatgactgattatcatggacatacattcatagcggacgcttcacgaagacaactgtttgctggatctacaatctttgaacaagat

SEQ ID NO: 13728 - DNA, 206 bp, Zea mays
  Clone ID: LIB3150-044-Q1-N1-A9
ttactgacatggaacaaactgtggaagcggggagccataccacagggtgtgtctaccttgactatacgcacacgcgcctaccctccgactgaaagcatactgcctgaaggaagaagcgaaatattagcttggtcagcagccagacgacaccaagctgtaacgcactaatacatttaggaggatgcgtgttcaggcacgcaatgtga

SEQ ID NO: 13729 - DNA, 277 bp, Zea mays
  Clone ID: LIB3150-044-Q1-N1-B11
tctctacggcagcgtgaacatcaccgtctggcgctactttttaaagggggcgggggcgccctcaaaccctttcaacaggttgccgaccgacttctatcaacgatccatcaaggaacaaccgtactacatcgccgtgctgcatgtgagggacctgatctggtctccagcgccgacggacggggtgcaggctccaccgcccgcgccgtatcccgactcggtgccgtagttgacggatctgcggtccaataacagtctgcgggggcttcatccagccttc

SEQ ID NO: 13730 - DNA, 311 bp, Zea mays
  Clone ID: LIB3150-044-Q1-N1-B4
cttctcacccgcccgtgatggtgccaacccaaagctgttcggtagcgagggattacttgagaagcgtgctcctgggaaggctttcctcgaggccgttgcttaagtccaatctacagttggaatgcgaatccagacgttttggtttagcctatcttattttgctttgtgcaacatgtattttaagtgtatggggtattacagtgccttgtgtgaacctgcttatctcgtgctgaacatcgttatgcatggaagtacttatctattgttctgcttattatacttaacctttgttcatattgatccaattctat

SEQ ID NO: 13731 - DNA, 378 bp, Zea mays
  Clone ID: LIB3150-044-Q1-N1-B6
ttcttttggccggccacaaccaaccccctgggggctttccctagcgcaagggggctctcttctccatgggcgctggccaagatcaccccatggcgcttggctccctggaacacagcagcacgccagcgcatggccttcccatggctgcgagctccttctcccggcgagcggctgcagcagggggtcgtctcctccatggcgcggacgaactacctccctgcaggcaagcagcagccccctcagctccttctatggcgcccagtctgcatgcacgaccgagatccatcagttcctatgttccccatggccgagctcgccccatggacctggctccttggttcttctttcacgtacgcgccctctccaacctgcagcacg

SEQ ID NO: 13732 - DNA, 403 bp, Zea mays
  Clone ID: LIB3150-044-Q1-N1-B8
tctttttgcctgcgtggcatctggaatggggggggcttttttaagcaaacagggctcaaaataacagtttagatacccaaacaacagacacagggcacacaaccaatagattttaacagatcgaagtatacgggcacaagtacaaaataaacgagggcacatgagaggacgcatcatttcttctttactgcaaccttggtcaccttggcaccaagtgggcccttctttcacactcttttgattactacaacaacaaccttctgccttatgttacggaccagaaatacccccaggaggaggattcttgtttttttgaaacatgttgaccttgcatgagacattttggaatggggtccccatatttttaataaaaaaaaaaaaaaaaaaaaaaggggcggccccc

SEQ ID NO: 13733 - DNA, 218 bp, Zea mays
  Clone ID: LIB3150-044-Q1-N1-B9
tttttaggaagggggaaagaggagggcagagcggcatctgtacatcgagcgagggagtacagcaaattgaatcacgtttcgtgtcgattcggaggctctcgcttctgcttgcggagttgcggtggagatttgaggcctgcggcgactatggcacctgccgaatccggagagaaagcgaccagcttcgtcatggcctgcagcctgctcatccgctacgt

SEQ ID NO: 13734 - DNA, 220 bp, Zea mays
  Clone ID: LIB3150-044-Q1-N1-C12
tgacctacatgatcaagtccgacactgagcgcggactttttatggacaatgacgacatggcatacgacttcaaaaacctattgtttgatgagaaggaagttgctatgtttgtcttctataacattgagatacatccaatgaagggctcttgactctgaatatcgataggacaatactgatgtgggatctgaccatgaagaacgctgaagcttactctgac

SEQ ID NO: 13735 - DNA, 232 bp, Zea mays
  unsure at all n locations
  Clone ID: LIB3150-044-Q1-N1-D10
tctcncaacgcgggacatnattgctgaaagaagaagtttttacaaggggtgggggcgcccccaaattcatccctttcaccttcactattcacgggtggagtccttagaataacaaagtgaagcaaggccccttgtctggtctaactaacttatgcatcgttttcattgggcactctaggattatctccaaaatatcaattctatagccctttgatatacaccctgcgtcttg

SEQ ID NO: 13736 - DNA, 345 bp, Zea mays
  Clone ID: LIB3150-044-Q1-N1-D11
gtttatagaaggcgtcttcgtactcgccgacgtccgttttcaaaggtttcgggcctctcccaattcccgccgccgctccatcccgtaacgcgacaccatgagggagtgcatttcgatccacatcggccaggccggtatccaggtcggaaacgcgtgctgggagctgtactgccttgagcatggcattcaggctgacggtcagatgcccggtgacaagaccattgggggaggtgatgatgctttcaacaccttcttcagtgagactggtgctgggaagcacgtgccccgtgctgtttttgttgccttgaacccactgtcatcgatgaggtgagaactggcacctta

SEQ ID NO: 13737 - DNA, 286 bp, Zea mays
  Clone ID: LIB3150-044-Q1-N1-D7
ttttccacgcgtccgcacagcacaggcagttcggcggattgagagagagagagggcgctcaagatgtcgtggttcgggcaccaccaccacaaccagccggctcccccggcgtcgggccccaaccaggtgttcaagatcttctgccgcgccatcgagaactactgcctggccgtccgcgacggcgccgtcgtgctggccccggtcaaccccaatgacgaccaccagcactggtacatggacatgcgcttcatcacccgggtcaaggacgaggaaggcatgccggcgt

SEQ ID NO: 13738 - DNA, 329 bp, Zea mays
  Clone ID: LIB3150-044-Q1-N1-D8
tctctccatgtcatgacaaatcttggggagaagctaacttttgaagaggtagacgagatgatccgtgaggctgatgtcgatggtgatggccagattaactacgaggagtttgtcaaggtcatgatggccaagtgagccacagaaccataagctcaaggcggtgcattgcatattagtcaagatgcaatgcaactcttatttcatcgacttccagtgaaacattctgctagttgtagtttttgaaaggcaatgcagttgctgctttgttcttccctccagtgtggtttcagaactggtgattcatgtgaaactgtaatgattgcccttcc

SEQ ID NO: 13739 - DNA, 370 bp, Zea mays
  Clone ID: LIB3150-044-Q1-N1-E1
gtcgccgttgccgtctcctcctccgacccaggactctctgctcgcgcactctcacctgcccgcgccgtcttcgaccgccaccaagatgaacaaggagaggctcatgaagatggccggcgccgtccgcaccggcggcaagggcaccatgcgcaggaagaagaaggctgtacacaagacggtcaccacggacgacaagaggctgcagggcactctcaagagagtaggggtcaacaccatccctgcaatcgaggaggtgaacatattcaaagacgatctcgtcatccagttcttgaaccccaaagtgcaagcttccatcgcggcaaacacatgggtggtcagtggatctccacagacgaaaaagctacaggat

SEQ ID NO: 13740 - DNA, 240 bp, Zea mays
  Clone ID: LIB3150-044-Q1-N1-E11
tctcaactgcacgacccctcgccggccatagaagctctttaaacgggcgccgcccatccgcacttcccgatttacatctcctcggacgaggaagactggcacgcctatttcatcgagtcctatagccccgaggaggtccatattcagcagaccattcttctctccctgtatacctttcgcgccaagacggccgcggctggttcggtttcttctttttaccctactgtggcctcctccacc

SEQ ID NO: 13741 - DNA, 421 bp, Zea mays
  Clone ID: LIB3150-044-Q1-N1-E12
tgatctcccgtctccgtcgtctcgtctccaagcgtctttctaaacaggcatgggcccgatcaagatcggaatcaacggtttcggaaggatcggcaggctcgtggccagggtcgccctgcagagcgaggatgtcgagctcgtcgccgtcaacgaccccttcatcaccacggattacatgacctacatgttcaagtacgacaccgtgcacggccaatggaagcacagcgacatcaccctcaaggactccaagacgcttctcttcggcgagaagccggtcaccgtctttggcatcatgaaccccgaggagatcccgtggagtgaggctggtgctgagtatgttcgtggagtccaccggtgtctttactgaccaggacaaggcttgtgcacattttgaaggtggtgccaaaaaggttgttatctc

SEQ ID NO: 13742 - DNA, 307 bp, Zea mays
  Clone ID: LIB3150-044-Q1-N1-E7
ttttcattagctttatctactccagagcgcagaagatctttatcgacaccatgacggtgttgctcgttgccctcgctctcctggctctcgctgcgagcgccacctacacgcatacaagcggcggctgcggctgccaaccaccgccgccggttcatctaccgccgccggtgcatttgccacctccggttcacctgccacctccggtgcattttccaccgacggtccacctgacgacgccgtgccacctgccaccgacagtacatgtgccgccgccggttcatctgacgtcggcaccatgacactaacc

SEQ ID NO: 13743 - DNA, 335 bp, Zea mays
  unsure at all n locations
  Clone ID: LIB3150-044-Q1-N1-E8
ttctcgccgcctgccttctgcgcctccataagangctttttaaaatgcaagggccccctcacctccaaccatgggtaaagagaagtcccacatcaacattgtggttattggccacgttgactctggcaagtcgaccaccacaggacacctgatctacaagcttggaggcattgacaagcgtgtgatcgagaggtttgagaaggaggctgctgaaatgaacaagcggtccttcaagtacgcatgggtgctcgacaagctcaaagctgaacgtgagagagcgatcaccattgatatccctctgtggaagtttgagaccaccaaattctactgcactg

SEQ ID NO: 13744 - DNA, 120 bp, Zea mays
  Clone ID: LIB3150-044-Q1-N1-F11
tgtataaaaaaaaaaaaaaaaaaaaaaaaaaagaaaatttttaaaaaaaaaaagagccacaaaaaaaaaaaaaaaaaaaaaaaaaaaaaaaaaaaaaaataaaatataaaaaaaaaatta

SEQ ID NO: 13745 - DNA, 373 bp, Zea mays
  unsure at all n locations
  Clone ID: LIB3150-044-Q1-N1-F3
agccttcgtttcattgaccaacaagaaccccaaggtttagggccagtaaatccttgaggacggcaatttggacggccctgacgttgttatggccgccgccggggacgacgcggcgaagcttcaggagcttgacgagatgaagcgcaagctgaaggagatggaggaggaggccgccgccctccgcgatatgcaggccaaggtcgccaaggagatgcaaggaggtgaccctagtatatctacagctgaggcgaaggagcaggtggatgcccggtctgtgtatgtnggaaatgttgattatgcttgcaccccagaagaagtgcagcagcatttccaagcttgtggaactgtcaacagggtgacaatcttgactgac

SEQ ID NO: 13746 - DNA, 272 bp, Zea mays
  Clone ID: LIB3150-044-Q1-N1-F7
ttttcgtccatcccatcccactaccacccagggggtctttcgtcgagtcgatccggttcttccaacccaggggctgtgatggcgacaaaaaggagcgtgggcaccctcggcgaggcggatctgaaggggaagaatgtgttacgtgctcgccaacctcaacgtaccgctcaacgatgcccagattatcaccgacgacacccgcatacgctcctccgtacctaccatctaattcctcctaaagaagggcgccaagagtattctcgacagccacc

SEQ ID NO: 13747 - DNA, 282 bp, Zea mays
  Clone ID: LIB3150-044-Q1-N1-F8
tcttccacccctccactttttccatccgccacagcctttttaataatgtcccccgcccccacatctctctttttccctgtgcatggcgcataaaaatctcccagccgtgcatcatctcttcgcgctcccctcagacaccatttctccctcctccctactccctgctgtcgagcagcagctccatggctcccacattttttttcatcatagatcttcttccccatgtagcttctttcctgcaagtcgccaatattctttttcctttcctcctatcttcctttt

SEQ ID NO: 13748 - DNA, 355 bp, Zea mays
  Clone ID: LIB3150-044-Q1-N1-G11
tcatgaacaagctcagcaccaagaagccgtgtgccctgtcattctgcttcggccgtgccctccaggcgagcaccctcaaggcctgggctggcaaggtggagaacgtggagaaggctagagcggccttcctcgccaggtgcaaggccaactccgaggctaccctcggcacctacaagggtgatgctgccgccgacaccgagagccttcacgtcaaggactacaagtactgagttgcttctctttgcgatcccgttgttttggaactcctgcctgcgagtaagttgctgagtgttgtttgcttgttagagcttttatattcggacatgaaaaaaacatggcttctatgtggatgatg

SEQ ID NO: 13749 - DNA, 407 bp, Zea mays
  unsure at all n locations
  Clone ID: LIB3150-044-Q1-N1-G12
tttttactcacctnatcgagcagatcaagaggcggctttttaacatagctcaggccgtccatccgatcgagctggtcgtgtggctcccggccctttgcaggaaaatggaggatccatactgcattgtcaagggaaaagcacgccttggatcgatcgttcacaagaagactgcatctgttctttgcttgaccaccgtcaagaacgaggacaagcttgacttcagcaaaatcttggaggctatcaaggctaacttcaacgacaagtttgatgaggtcaggaaagaagtggggtggtggtatcatgggctacaaatcacaagcgaaaacccaagccagggaaaaagctgcttgccaaagagccttcccatcggatgaccaaagtcttgccctgtaaaataaaaatttcct

SEQ ID NO: 13750 - DNA, 359 bp, Zea mays
  Clone ID: LIB3150-044-Q1-N1-G8
tttttcgacagtggctgttttcggtttaggaggcgttgttcttgccgctgcagaaggtgcaaggattgctggagcgtcaaggatcatttggtgtcgacctgaaccccagcagattcgaagaagctaggaagttcggttgcactgaatttgtgaacccaaaagaccacaacaagccagtgcaggaggtacttgctgagatgaccaacggaggggtcgaccgcagtgtggaatgcactggcaacattaatgctatgatccaagctttcgaatgtgttcatgatggctggggtgttgctgtgctggtgggtgtgccacataatgacgctgagttcaagacccacccgatgaactttctgaac

SEQ ID NO: 13751 - DNA, 276 bp, Zea mays
  Clone ID: LIB3150-044-Q1-N1-H11
tcttatcgatctcgtttcaaatccatccagcgtcgttttctagagccgcagggtctcaaccccatggccaagatcaagatcgggatcaatgggttcggcaggatcggaaggctggtggccagggtggccctgcagagtgacgatgtcgagctcgtcgccgtgaacgaccccttcatcagcaccgactacatgacctacatgttcaagtacgacactgtgcacggacagtggaagcaccatgaagtcaaggtgaaggactccaaaacccttctcttt

SEQ ID NO: 13752 - DNA, 432 bp, Zea mays
  Clone ID: LIB3150-045-Q1-N1-A3
atcacacacgacacaaccccactcaaccggcggggaggccctattcgtcggcggaggccatggtttccctcaagccgcataagaggctcgccgcgggagtcctaaaatgtggcaaggggaaggtgtggctcgaccccaacgaggtctacgagatctcgatggccaactcgcgtcagaacattcgtaagctggtgaaggatggattcataattaagaagccacagaaaatccactcaaggtcccgggcaaggagggcccatgaggccaagcagaatgggaggcactcgggttacggtaagcgcaggggtaccagggaggctaggctccccaccaaaatcctttggatgcgcatgattcgtgtccttaggcgtctgctgcgcaagtaccgtgaagcaaagaaaatcgacaagcacatgtaccatgatatgtaca

SEQ ID NO: 13753 - DNA, 209 bp, Zea mays
  Clone ID: LIB3150-045-Q1-N1-B5
tcgttaccatcatcacagatcatccacagaggccatctttcgtgtaagagacaggagagtgggagagaggggggatatatggcagacatcgcgttgctggtgacggagcagttcgacaagaagctgaagcgaggctcccccggcgaggacatcggctgcggcgccagccaatatatgaggaacatcggtgcctgttccaatgcgtggag

SEQ ID NO: 13754 - DNA, 71 bp, Zea mays
  Clone ID: LIB3150-045-Q1-N1-B7
tcgttaagcaggtgttgctggtgattccggagcatttcctgcaagcgggcggggtctctctatatcgagct

SEQ ID NO: 13755 - DNA, 61 bp, Zea mays
  Clone ID: LIB3150-045-Q1-N1-B8
ttgctcactagttacagacgccgggcgatgcattccggagcgtgtcctgcgagcatgcggc

SEQ ID NO: 13756 - DNA, 285 bp, Zea mays
  Clone ID: LIB3150-045-Q1-N1-C5
gtctccatccaacaataagatgcatgcagatatgatctgtgtggccggcgacctgctagatcatctcacttcctgagtgtgctgatgctcagccaataatgaaccattccatcttgatcggaaattcaacatacaaaaaaaaaaaaaatataaaaaaaggatgcacaacccaaaaaaaaattctaacacacataaacacatttaaactaaacctgtaaaccgctcctttgcaatgttgaaccactgttaataattcttttgcgcagtgggctattagaaaagttt

SEQ ID NO: 13757 - DNA, 218 bp, Zea mays
  Clone ID: LIB3150-045-Q1-N1-C7
cctcttcccagagcacaacatcatattccctaacaatttatcccaacatactacccccaagcactccgtatcatctcattattcctcaatacctgatctacctgatatatcatatgttcttataaacgatcttaatttctcaaccaaaaactcatgtttattatgttccaacaagagtgaccaatcctgctttggcttgcctgactggactacctgct

SEQ ID NO: 13758 - DNA, 416 bp, Zea mays
  Clone ID: LIB3150-045-Q1-N1-C9
tctgttgacgcgtgggcgccgaatccgagacgcggatctcgggttgaccggagcgcacagagcacccctgactcccggcccgatccgcgctctcctctccgacgcttcagtcatggcaggaatggcacccgagggttctcagtttgatgctaagcactatgattctaaaatgcaagagctgctgagcactggtgagactgaggagttcttcacttcatatgatgaaaggttttggaagagtttgaggacatgggccttcaagagaatcttctgagaggcatttatgcatatggttttgagaaaccatctgcaattcagcagagaggaattgttcccttctgcaaggggcttgatgtcattcaacaagcacaatctggtacaggtaagacagcaaccttctgttctgggatcttgca

SEQ ID NO: 13759 - DNA, 195 bp, Zea mays
  Clone ID: LIB3150-045-Q1-N1-D12
ttgttcataccagccacagccaactcaggacgacgccgttatataggccgtgccagccagcaacctacagactcccctctagcatacctgtcaagcatcgagaagacatggacatagccctggctgccaagagttacattcccgcacgctagacaaaaatcgtgtagctcaccctacatacatagcaacagctct

SEQ ID NO: 13760 - DNA, 406 bp, Zea mays
  Clone ID: LIB3150-045-Q1-N1-D7
ttatcctccaaacaaccacaccgaagccggcgattaaaccagttcacgcagttcacccaattcccctttgccgtcgcctgtccactttccccgagcttctccgccgtctaggccgcgtcccagtgcgaagagactccgactcacattgccagccgctcggtccggcccgaggtgtacccgctgttcgcggcgacgggcgtggccatccgcatctgcggttttcaactcttcccgaacatcactggcaacccggaagtcatgttaaacaaagcatgtagggcaactcgtgtgctttataaccatgaggaggtgagactttaccccctgcatttcctaagaatctttcttcacgacaagactacttatatcattccttgcaataacatgttcttcacttacccttaat

SEQ ID NO: 13761 - DNA, 423 bp, Zea mays
  Clone ID: LIB3150-045-Q1-N1-E10
ttagaagagaccctctctgtcctcgcggggggcggctcgaggagcggatgttcccgcctggcctgatccaccaccgccctgacgccaccgctcccggcgatgggccaccgcgctccggccccggtgggccgagcctagtactgacagcggaccccatgcccaggcttccgtggacagccgacctccacgagcgtttcgtcaacgccgtggcccacctcggcggaactctacaaaggcacaccaaaaactatcttaaggacgataggtgtcatgggtcttactcttttccacttgaagagacatcttcagaaatatacgataggttaacaatctaggaaagaggggtcagagcactctaaagacagcttcctatcttctagatgctcaaagtggaatgcgtgtcgcccctagagttgctgccca

SEQ ID NO: 13762 - DNA, 447 bp, Zea mays
  Clone ID: LIB3150-045-Q1-N1-E9
tgttctgcagctcacttgaagggtggtgccgagaaggttgtcatctgtgctgctagcaaggatgcccccatgtttgtcgttggtgtcaacgagaaggagtacaagtctgacattaacattgtctccaatgctagctgcacaaccaactgccttgctcctcttgctaaggtcatcaatgacaagttcggtatcgttgagggtctgatgaccactgtccatgccatcacttgttcccaagaagactgttgatgggccctcgtctaaggactggaggggtggaagggctgctagtttcaacatcattcccagcagcactggagctgctaaggctgttggcaaagtgcttcctgtccttaacggaaagttgactggaatgtctttccgtgtcccaaccgtcgatgtttctgttgttgattagactgttaggcttgagaagtcagcaaccta

SEQ ID NO: 13763 - DNA, 184 bp, Zea mays
  Clone ID: LIB3150-045-Q1-N1-F10
gccattgacaccaggtcaggtgtcgaagagtaggatttttaaaatgggccggcctcacggaaagacttctatcaaacctgtggtcacaactgacagatattattcttgacagtacccatctttgccaaacacaaaccataatcttaaacaatctagaaacatggttccccccacaaaactttac

SEQ ID NO: 13764 - DNA, 203 bp, Zea mays
  Clone ID: LIB3150-045-Q1-N1-F2
atcgctagcggctgcccttttttttttgggtggggtatcaaaacaggagggttgaacccggaaggatatgccatgccaatgaagcataaacgactataatatgtgggcaactcaaagaattcacattattgccaacaaaacaaaaggacaactggaggccttctgatccaacaggcccaaaattaccaaaaactttggaactt

SEQ ID NO: 13765 - DNA, 322 bp, Zea mays
  Clone ID: LIB3150-045-Q1-N1-F9
tctcaaatcaactcaagtcatcgaggcagagctcgcgcgcgcagccgccagccaatcgctctccctccggcctccgcagcccaaaaccacctcggccccacttcttctctccgtcgccccctgtttgcccaacccatggcgacccacgccagcgacaatggcagcgggcacgcggagtggcggttcgctcgggcggcgaaagagggtgcgctggccgtggccgggtgccatgatgagcatccgggcggcgcggttcaagatcagcgcgagcgtggacgggcgcgacccgtggcccgtgctgccgtttgcgcacggggacccc

SEQ ID NO: 13766 - DNA, 378 bp, Zea mays
  Clone ID: LIB3150-045-Q1-N1-G6
accgcagcgtaaaccctagtccccggcggcgaccttgcagcctccgctgcgctctgactggtgcgcgcttagacgaggagctgcggcggccaagaccaatcgaccatggctacccgtatccagtttgagaacaactgtgaaattggtgttttctccaagctgacaaatgcttactgtctggtagcgattggagggtcagagaacttctacagtgcctttgaggctgagcttgcagatgccaaccctgtggtcaagacctctattggtggcactagaataataggccgactttgtgttggacacaagaatggacttctatagccacatactacaaccgaccaagagcttcagcatctgaggaattgcttgcctgatcaa

SEQ ID NO: 13767 - DNA, 443 bp, Zea mays
  Clone ID: LIB3150-045-Q1-N1-G8
ccatctcccaagacctcctcagacccgagaagcgcagctgcggccatggacgccaccggcactggagctggagggaaggcgaagaagggagcggccggtcgcaaggccggcgggccgaggaagaagtcggtgacgaggtccgtgaaggccgggctccagttccccgtcggccgcatcgggcgctacctcaagaagggccgctacgcgcagcgcgtcggcagcggtgcccccgtctacctcgcggccgtcctggagtacctcgccgctgaggtcctggagctcgccggcaacgctgccaaggacaacaagaagacgcgcatcgtcccgcgccacgtgctgctggcgatccgcaacgacgaggagctcgggaagctgctgaccggcgtgaccatcgcccacggcggcgtgttgcccaacatcaacccggtcctgctgcccaagaa

SEQ ID NO: 13768 - DNA, 151 bp, Zea mays
  Clone ID: LIB3150-045-Q1-N1-H1
aacttcacttcgtccgctcaattcatcaactccacaactctcgcgcgcgagtctccaaacaatctctgctgctccagccttctcaacccaaaaccacctcggccccacttcttctctctcccacccactgtttgcccaacccataacgacc

SEQ ID NO: 13769 - DNA, 126 bp, Zea mays
  unsure at all n locations
  Clone ID: LIB3150-045-Q1-N1-H2
gtcatctccagctcggccacgttcccgcgaaagatgtctcgcaagcagatgcaggtgggcgcttttttcttttattatttttaccagaacgaactncacgctatctacagcatcctcaagaaggag

SEQ ID NO: 13770 - DNA, 386 bp, Zea mays
  Clone ID: LIB3150-045-Q1-N1-H7
ttctcaattacagagatctagatagagaggtggatgttatatctacgcgcgagcgacagatccacaaccaaccaataggaacagccccatatggtattgacgctcgaccccggaccgttctacacctactgcctgcctagtcccaccttcttcaagaacgacttcattgacatcaacaacctcctcagcaaccctctgattattctaccctctaaccgcacagcaccaccaaccgcaatttcactatttttctacaaatttatttccccaaaaagagctccaatatattgtttttttgtcacacaaccgttatattttattatgcaaccctactttataccagctgattgatattataaaatgatgtattttttagtcctcttact

SEQ ID NO: 13771 - DNA, 421 bp, Zea mays
  Clone ID: LIB3150-045-Q1-N1-H9
ttgtgtaagagagcaccatccccatcaggacgagtgtctagaaacaagggggatgaggaaactgacgagaactgggtatggttcttgtctgagctgcatgagttgctggagaagaacacagagaacatgccaaggctgaccatcttgtccgatagacggaagggcattactgatggagttgaattcaacttcccaactgcattccacgggttctgcatgcgccatgtttatgaaacccctcaaaaaggagttcaacaatcctgtgcttgccaaccttctctgggaagctgctcatgcgctgactgtgattgagtttgaaactaagctgctggagatagaggacgcttcaccagaagctgttgtttggataaagcacctaccttcacgtctttgtgccacggcttactttgaggggacaagg

SEQ ID NO: 13772 - DNA, 345 bp, Zea mays
  Clone ID: LIB3150-046-Q1-N1-A10
ttttctcccccaaagttccgttccgggccggtccgttcagttcctctgccgcacgtcaaaaccctcaacctcccacgcggctcgctcgctcgctcgctgggtgggtcggccatggctccccccgcgctcggatctcatgtggccgccgcagcctcggtgcccgtcggctcggactctctcgccaagggcgcggcgctcaagggtaacagcactctaaactttcggaccaaaccatgcatcgggatggcattagcgtggaaaaacaggacccagcaaccacggcctctgaacaaggtactctgcatgtctgttcaacaagcaagcagaagcaaggttgctgtcatg

SEQ ID NO: 13773 - DNA, 400 bp, Zea mays
  unsure at all n locations
  Clone ID: LIB3150-046-Q1-N1-A12
tctctctcccccaaagnttccgtctccgtggccgggtctcgttcaagttccgtgtggccgcgacgtcaataacccctcaacacttcccacgccggcgtcgactcgactcgcatcgcatggtgtgggtcgggccactggctaccccccgcgcctcgagatctcattgtggctcgccagcagcactcggtgccccgtcgggctgcggaaccctcatcgccaagtggcgcggcgcgtcaagcggtaatcagcacctctataactttctgaccaagaccatgcactcgggatggccattagcgtggaaaaacaggacccagcaaccacggcctctgaacaaggtactctgcatgtctgttcaacaagcaagcataagcaaggttgctgtcatgcccgtcgagtt

SEQ ID NO: 13774 - DNA, 55 bp, Zea mays
  Clone ID: LIB3150-046-Q1-N1-A2
atttttaaaaaaaaaaaaaaaaaaaaaaaagaaaatatataaaaaagagaggggg

SEQ ID NO: 13775 - DNA, 342 bp, Zea mays
  Clone ID: LIB3150-046-Q1-N1-A5
tcatcaacgctcgctcgacactgtcactgactagtttctctactagatgtcgggtatagagctgcctgcaatccgccgctgagaagggaggatcggaatcgacgatgaggtcgtttgctcctgtctttctgtcggcggtcgtggcctggctggagctggcggtcaccgctcatggcggcaacttctaccaggacacatagatgacctggggcgatggccgcggcaaggtatttgaccggcggtcgcggcctggacctgacgctggaccgcacgttcggctccggtttccagtccaagaacgagtacctgttcggcatgatcgtacttcatatcaagctggtg

SEQ ID NO: 13776 - DNA, 166 bp, Zea mays
  unsure at all n locations
  Clone ID: LIB3150-046-Q1-N1-A6
ttgttcttagagagaaggaaaaatatccccgaaccttttctaacgatcgggagggcnaaccctcgcgtcttcttcgacatgaccgtcggcggcgccccggcgggccggatcgtgatggagctgtacgccaacgatgtgcccaagaccgcggaaaactttcgcgcgc

SEQ ID NO: 13777 - DNA, 432 bp, Zea mays
  unsure at all n locations
  Clone ID: LIB3150-046-Q1-N1-B6
tttaagctgcttgagacccatcttggtgcatctttcactgcccgcgagggcaaggtcttctatctcaagatgaagggtgattactacagatacctcgctgagttcaagactggagctgagagaaaggacgctgctgagaacacgatggtggcatacaaggctgcccaggacattgctctggctgagcttgctccaactcaccctattaggcttggactggcacttaacttctcagtggtcttacctatgagatncttgaactcacctgatcgcgcctgcagtcttgcaaagcaggcttttgacgaggccatctcggaactggacaccctgagcgaggagtcctacaaggacagcactttgatcatgcatctccttcgtgataacttgaccctatggacttctgacatctcggaggaccctgctgaagagatt

SEQ ID NO: 13778 - DNA, 444 bp, Zea mays
  Clone ID: LIB3150-046-Q1-N1-B8
gcaagtcaatatgcggacacctgtggggaggtttctagtacagatgcgtggcgcacagtcaaaataatacactgaaatctagacaagcaaagccaccacaacttcatacagcaatcacagctcgaccaccaagtgttaaaagttttcaggaacttgaactggaggagctggacaaggcccccaagttcaaggccaagccattaaacaaaaggattcttgagagcaagggagacattggtgtatttttccatccaaagcctcaggtcacatctcccaaagaattccatttttctaccgatgttcgcttgggccctccatcagttgctgacttatttgacaagctctctcttcactctgaatgttcttcaaacagcaacagacaagatgtgcccagacgcaccataccaaaccctttcaatctacaaacagaggaaagaggtcatt

SEQ ID NO: 13779 - DNA, 410 bp, Zea mays
  unsure at all n locations
  Clone ID: LIB3150-046-Q1-N1-C2
ccgtccgagtaataaccctagnccgcnncgccaccgaagcggcgcgtcccagtgtaagcaggatgcgtcgcntngcccgccgctcgcccattgaagccgccaatctctccgctgtcaccgagggctcccgctcggaaaggtgctncgcaagggcgcccactttacgntngccccgttctctccgtcccgcccgcgggttctcaaatgtcnncgcggnnngctgtnncgacggagccctccgcncacaatgtacccaacgtgcgcctcnncatcccgatcccgcaaaggacccgacgaggtgcantgttcgtgcgccgggcacctacaaggggccgtgagtgtgaagggtggtgccagtgtgtaccgccgcccgctggtgtcatccacggtccaagcggatcactccgcga

SEQ ID NO: 13780 - DNA, 337 bp, Zea mays
  Clone ID: LIB3150-046-Q1-N1-C4
gtctacaccccaattcctaagcatgttcgtcagcaccggcccggtgctcggcctggggagttcttcaagacactagatgccgtcaaatcagatcccgccctccaaggcgatgctcctcctcaagtgaaggcgtaaagatgagtcttcccggttatgtcttatgtcatttcacactttgctgcgctgggtagggactagtttcttgtgccatttgccatttgccagcaatgtgcttgttccgagcagaataaatttctggcgagtaccatcgaagagtgactttgaacgaagtgattcgacacagtaaatttgttgttgtccatgaatacttgctctg

SEQ ID NO: 13781 - DNA, 401 bp, Zea mays
  Clone ID: LIB3150-046-Q1-N1-C5
tcttctcaccctctacagataaggaaggggaggaggtcatgatgtcgcgccgtacgttcgagcacccgaggcacggctccctcggcttccttcccaggaagcgctcctcccgtcaccgtcgcaaggtgaagtcattccctagggatgacccgcagaagccttgccatctcactgccttccttggctacaaggctggcatgactcacattgtccgtgaggttgagaagccaggattcaaactccataagaaggaaacttgtgaggctgttaccatcattgaaacccctcctcttgtcattgttgggctcgtggcatatgtgaagactccccgtggccttcgcacactcaactctgtttgggcccaacatcttagcgaagaagtgaggagaaggttctacaag

SEQ ID NO: 13782 - DNA, 312 bp, Zea mays
  unsure at all n locations
  Clone ID: LIB3150-046-Q1-N1-D12
ctaaatagatccaatggcgccgacctcaaagctgtttattgacatagggcgcgcttcacaatcncacgcgtaccatcgccgtgggctgtgggccatcaaggccaagaacggcgtcgccttcgctaaggccgacatttttctttacgtcgttgaaacaaaaattctaccttgtctaccacttcaagcccctcgtacttatcacctacaagcctaagcctaccaatctcatgtcgagcatcacgcctgggacgtttcttattctactctaactactatatggtaattattgtatcacattctattatctttttt

SEQ ID NO: 13783 - DNA, 238 bp, Zea mays
  Clone ID: LIB3150-046-Q1-N1-D3
ttcgaacccccgcagacgtacttcccgtgcgggactctttacatgggcggcgtctttcacacagtcacgtagtccatccctccacattactcaccacattgcgctacccaccgtgcgtcgtatatcgtcgtgaattgccataccacctaggcacctttaacctgccgtgactacccgggcgcgccaattgcgtgcgctatctcctattacttgcattgcgaatacttcgagctttaaa

SEQ ID NO: 13784 - DNA, 426 bp, Zea mays
  unsure at all n locations
  Clone ID: LIB3150-046-Q1-N1-D6
tcgtatcagcagagcagccggaaatttggggggggtctctagaggtggactacctcccactagattaggttccttctgcggttcgagagagcaattctagagcctgatggctaagagagagagtcctgcgatcgggatcgacctcggcaccagatactcatgcatctgcgtgtggccccacgaccggtcgtgaatgatcttcctcaactaagttgacttgaacacactagacgatgtccggttngacagacttgtagcgccagatcggttaatcaaccgacaaccacgtggtcatagacggcatcaacactcgcttcgatgccaagcgcttcatcggcaggtggaactctgaaccagctgtgcggactgtcatggatgtatatcctaaaaaggtaataacaggtcctcgagacgctgccaaaattg

SEQ ID NO: 13785 - DNA, 347 bp, Zea mays
  Clone ID: LIB3150-046-Q1-N1-D7
cagttcgataataaagcattttagtctgcgatggctggggagtcgctcttgtatctgctctgcgtagttgttggaaagaacacggaacagtctaggcctcatccatcgtaacttttttaccaataacgctgtcgtcaagatcgagcatctatgataggtctgtgacattggtgatacgtcccttaagggacatttatgtgactgtatgtagacccgttctcggcaacgtggattctcagtacaactatacatctcaagactataattcggtacattgtttggataaataaacaaaaaaagcaaacacttttcgcaccaacatcaaattgggtgcggcccgcccacgc

SEQ ID NO: 13786 - DNA, 454 bp, Zea mays
  Clone ID: LIB3150-046-Q1-N1-E11
ctgactctctccgccacctccaccctcgaggcggtccttaccatggcgtggcagggatcctccgtcttcgccgcactcgagcaggccccggaggaccccatcctcggagtgaccgttgcctacaacaaggatcccagccccgggaaggtcaacctcggggtttgcgcctaccgtaccgagtaagggaagcccctagtgctgaacgtggtcaggcgcgccgagcaaatgttgatcaataatccgtcacgtgtcaaggagtacctaccaatcaccggtctggctgaattcaataagctgagcgctaagcttatctttggcgctgacagccctgctattcaggagaatagggttgctaccgtgcagtgcctatcgggtactggttctttaagagtcggaggtgaatttcttgcaaggcactatcacgagcgcactatctacatcccacaaccaacct

SEQ ID NO: 13787 - DNA, 399 bp, Zea mays
  unsure at all n locations
  Clone ID: LIB3150-046-Q1-N1-E12
gtactctcccatgagaaccacagtaagtatccttttaataggggaggggcggactacactcatctctngcctgcaaggtgactctcctacttattccgcaataacgccgtatgttgggtgaagtaagaacgtcttttctttctcgaaatcacaaaataactgtttttttttctcttaaatcagtcaacgagatctactctatcattaacacacacatactgctaatcatgattattcctacttcctacatcttttttttcccatgtatatccacaataatttttttctacttctactttaactacatataatattctctctaacattttaacattaatgaattttttctagtttatactttaatccaatgtttttttaattttttttattaattatatt

SEQ ID NO: 13788 - DNA, 201 bp, Zea mays
  Clone ID: LIB3150-046-Q1-N1-E5
tcgcttactctccacaacggcattaatccacttcatctttttataatacggtgcacgcgccccacaattacccatattttatattttctcacaccacattacattcacacattctcctcattacaaatatttactctatcacacatttttttcacatatttcctatacttaatatcattaatataattttcttcctttatc

SEQ ID NO: 13789 - DNA, 339 bp, Zea mays
  Clone ID: LIB3150-046-Q1-N1-E8
ttcgttaccccatccttgactagctcccatgtcgttctatatggccggcgggatgaaggagttagacggcgccagccctgccaagatcttcattggcgggctctccaaggatacaagcatgagtacattcaaagaacattttgggaagtatggggatataatcgatgctgtcataatgaaggaccgctacacacaaaagcccacaggctttggctttattactttagctgatcacacattttgttgacagaaatgattgaggatgaacatgttattaatggaaaaccggttgaaattaacagaacgatccctaaaggagcttgttcctatgaaagattt

SEQ ID NO: 13790 - DNA, 430 bp, Zea mays
  Clone ID: LIB3150-046-Q1-N1-F10
gaatgaccagggatccgtcgcccgtctcgtagcattctaagatccggggcagccccgattccggctccaagcgcatcctaaggagggcgatggccgcgatcctggcgctgccgctgaccccgatcaccaaggccaatctcggcctgcttctcttaaagaagcgcgccttcttctccgccgtcgccgccgcgggcaagcgccgctgctacaagccgttccgccactacaactacgcctacgtgggcgagtaccagttctcgccctcccgctccccgctgctcccggccccgccccccggcgtcaccacctggcggagggccgtcgccaggaggcgccggggcagggccaggatggtcctcgcctccctcttctgcggcggcggcggctgccgacgagctcgaactatccgttctggtctgtctctcgcgta

SEQ ID NO: 13791 - DNA, 419 bp, Zea mays
  Clone ID: LIB3150-046-Q1-N1-F7
gttaaatctctcgtggaagaggatagagggtgagctttcaacttggggtagtgagaacgccaacgcaaagggggtttctcttttgcttcccactgatattgtagtagcggacaagtttgcagctgatgctgagagcaagattgtccctgccactgctatccctgatgactggatgggtcttgatgttggccctgatgccaccaaaacattcaacgaagcattggacaccaccaatacttgtaatttggaacggccccatgggagtgtttgagttcgagaagtttgcagctggcactgaggcgattgccaagaagctagctgagcttacaaccacgaagggtgtcactaccatcatcggctgcggctactctgttgctgctgtcgagaaggctgggctggccgacaagatgagccacatt

SEQ ID NO: 13792 - DNA, 488 bp, Zea mays
  unsure at all n locations
  Clone ID: LIB3150-046-Q1-N1-G2
ccgtccggttcttcatccgcaaggcaaagcatatttcagggcgggcgccaccgcagcgagcgagagagagaggctcnngccgccgtccgtcgaccccaagtnagctcgatgggatgccgatagnnatgacagaggggtgacccatgatgtgtcgcgccggcttcaagggcggcgctacactccgcaaccgaccctcgacgtcctgcgtcanccctcctctcacagctcaaggtccatctcaccaaattccccagccttccgccctcatttgagcagacacctaaagccgtggaggagctcaaacttgcaagggacatttatgagcatgctgttgttttgagtgtgaaacttgaggaccaagatgcatntgaacgtgatttctgtcagctaaagccttattacatggatacatgtggcataattcccccctcaccagaggagtacccaattttgggactcaatcttctgaggctgttggttcagaatag

SEQ ID NO: 13793 - DNA, 370 bp, Zea mays
  Clone ID: LIB3150-046-Q1-N1-G4
ttcttctttcttcgatgacaatttttgcgtcgtgtgtccaccgtgggcgggtgctcgatccaaaatctcttcgccctggctcccatcgtgcatgcgtccaggctgtgctactagtcgggggaggcggtcgcggtcaacctcgccttcgcactctcccatgtgcccgacgagagcgtctctccggccaacccccgcgacggcgcgggtgcatccgcggcggccatggcgcgcgggcgtgcccgcacgtggctggcgcggcgtccctggccccgaccacggagcgggtgcggtagatcctatcatggtggcaccggccccgagccctagccctggaggcgacgcaacattaagccccggccaaaccggtggt

SEQ ID NO: 13794 - DNA, 209 bp, Zea mays
  Clone ID: LIB3150-046-Q1-N1-G6
ttgtctacgcgtccgcccacgcgtccgcccgctcttctttaaacgcgggcgcgcgactcatacacccactcatcctctgctgatgacttccctgaatgtgacctattactgctccttccgcgccccgccccgtcaactcttctttttactgctagcccttgcgttacggctttcattctctccttcttaccattgctgaccactttctt

SEQ ID NO: 13795 - DNA, 187 bp, Zea mays
  unsure at all n locations
  Clone ID: LIB3150-046-Q1-N1-H1
tgcctaaatcatatctgctagtatagcgnctgatatttttttagctggtgcgtagtcacatgaattgccaccatatggtcttgaagttggtctgaccaactattcatcttcctactgcactggccttctgttggctcttcttgtgctcaatatccgtggatttgatcacgattactagggcaatgtt

SEQ ID NO: 13796 - DNA, 360 bp, Zea mays
  unsure at all n locations
  Clone ID: LIB3150-046-Q1-N1-H11
cagctactgacggcgatgtgcggcctgcagcatgtttctacatgcgcggaggcggncaccaaccgagtcccccacttaagaaactatgtgctgtagtatagccgctgactagctagctagtcgagtcatttaacgtctatgatttgataaaaaatgtgtaacgcatcactatggttggcactttcattatgagcaatgacctgaatgaacaactgaaatgaaaagaaaaaagtcttgttccaatcaattaatcatacttatttagttctaaaacttataaagtataacatcatcaaattaaatggtttttttttttttttttttttttaccgattcctgcaggcgtaccacgcgtcctta

SEQ ID NO: 13797 - DNA, 409 bp, Zea mays
  Clone ID: LIB3150-046-Q1-N1-H12
ttattcgtccgagaatactgacggatcctcccggtgaactgacgtgttttcaagagagtggatgcacgaccgagactacaccccggtaatcgtggtcatgattttcattgtgctgctcacagtcgcgttcgtgcttttctcccattattgcgtcggggaccgggcgttcatgcgcactggttatgactttgaaggctatgtgatgcgcaagttcgccgtttgcgtcgacagtggccttcccaagcgggcacatcatgatataaagaatacaaaccctcatgaggttagggttgaggtcgcgaaagaggtgcatgcttcatagccctctactcctgctcttccttttgctacgcctgctccttctactgctccttaccatgttgctacgtgagcaagagcatattaagtt

SEQ ID NO: 13798 - DNA, 141 bp, Zea mays
  Clone ID: LIB3150-046-Q1-N1-H2
gcataaccatcagatctagcaaaactctcgccactttatcaacgttgtccgaacgcgtattaaccggaaatggctcctatcgtattgagtatgaacgcctgctcccttttctacttgccccccgccacctttttttttttt

SEQ ID NO: 13799 - DNA, 436 bp, Zea mays
  Clone ID: LIB3150-046-Q1-N1-H5
tcttataaattgcctcactcaggaccggaggacttacatacgcctggaccggtgcataaagaactggagctctatcgccctagcaaaactagcccaagagaaaggatatcttagtcagagcgtattcactatacatctctcagatccttctactaagggaagtgtcaccctgctgacttatcacagcaaacgcttatacactgctgtactatggcatagggcgctggcatttctagaggctttacaagtttttaaggatgatgacatactattgcactcaacttcctggtcccaataatcactgtcgtgaggactcaaaactggccactcttccaccaccaaataatgcacttgaagtgctcctgattaactttactagtggagtgctttttggttgttgcgatctgatattttcatctcacatgatcttcaccct

SEQ ID NO: 13800 - DNA, 433 bp, Zea mays
  unsure at all n locations
  Clone ID: LIB3150-046-Q1-N1-H7
ctccgtgaacgaccccttcatcagcgcgtactacatgacctacatgttcgagtacgacactgtgcacggacagtggaagcaccatgaagtcaaggtgaaggactccaaaacccttctctttggtgagaaggaggttgctgtgtttggctgcaggaaccctgaggagatcccgtggggttcggttggtgctgaatatgttgttgagtctactggtgtntttactgaccaggagaaagcttgcagcttaatttgaaggttggtgcccaagaaggttgtcatctctgctcctagcaaggatgccctcatgtttgtcgttggtgtcaactagaaggagtacaagtctgacattatcatttgttttaatgctagctgctcaaccaactggcttgttccttttgctaacgccatcattgactagtttggtatcgttgag

SEQ ID NO: 13801 - DNA, 415 bp, Zea mays
  Clone ID: LIB3150-046-Q1-N1-H8
ttgttctctcagaccaccccccattatggcggacttttttaaatacttgtccgcctacaacaatcatcactcacaactaaatcaccattcatataaagtatctgactcccaaacccttccatcttactataatcttttttctaaataatcctgaatcaacccattaatatatcccttttaacatcttttctatttattttctgtttcagtttattactaataattcctcactcactaattaaaaaatatacttacactttcccaattcaaaacaattatatttttcttctctactttttttctttttttttttcaattcaatttttacttttacctatccaaactattttatttttttaatcttttaatcaaattcctatcctatactttttttttcattttaaaaattttttta

SEQ ID NO: 13802 - DNA, 519 bp, Zea mays
  unsure at all n locations
  Clone ID: LIB3150-047-Q1-N1-A12
tctcacgccgtccgaaatcganctaccgcacgccgtggctcgctgcgggggacgcaatctctcagcgtctggtgacangcctcctacctccgtcagaattccgacgacgagggagacgcataatccatcgatggtagtgaagtgagccgccgaagtatgtggtagccggtgggaccggttgaagggtcgctgccgagcaaaagaacaatgttgccagcgtgcggtcggctgcccgaagccggaaacgtctgctggaccgggcgtgccgtgtgataagaacccgtgatnngcagcttaaagaaagggcttaatanncggcgcctannttccctaggtccgcttacccaatgaaataatacnttnaccagttgacgccatcntngcctccaagtgaatttcnntccaaaccctagcantnnactttanngcgatanntttgtgtnntggtgccgaatagcnnttgtcgcnctgggaagaagaaaggaaaggaggganngcagtccgaggtttaaatatcat

SEQ ID NO: 13803 - DNA, 288 bp, Zea mays
  unsure at all n locations
  Clone ID: LIB3150-047-Q1-N1-A3
ncttttctctgggtccgacgccgcctcggcgtcctcttaccacgggtcgggggtcgtataagactatgaccgnggccaatgagtcacatctttnntntaccagcatctctcctacccagcatcactctcggagtacgatcgagggaggtgagatgacagtccctttgtactgaatgctttcctccgacaggccaacggcttgccgcatgatccgttttacatcggtccggaagagaaccaaggagccaattgataaattgcaaagtaccttccaccgctgggagcaaa

SEQ ID NO: 13804 - DNA, 221 bp, Zea mays
  unsure at all n locations
  Clone ID: LIB3150-047-Q1-N1-A7
tttttctccttgacatctnccgccacccgcctctacttacatccggccggcgtcttcttcattaatgtacccggcctcttctccaacatcggtgggaaggaaggatctactcattaaggactacacctacgaccataatctgtccatcttcaccgncatctcctctttagtgaatccgatcgtccgagaggccatgggctcggcgcatgatccgntctaca

SEQ ID NO: 13805 - DNA, 440 bp, Zea mays
  Clone ID: LIB3150-047-Q1-N1-A9
tgctaaatagggcaaaggaaattgttggagaactttttgagaggttgaaggtaaagcctgggattccacgcaaggatgatggttcaatagcttttgaaaatgacttcttcaaacgtcaagcttttttgacagtgtctggacagctttatgttgagacatatgcatgtgctcttagtagcgtttatacctttggaccaacattccgggcagagaactcacatacgtcacgacatttggcagagttttggatggttgaaccggaaatcgcatttgcaaacttgcatgatgacatgaactgtgcagaaaaatatgtacagtacctttgcaagtggctgcttgaccattgccaggaagatatggagtttatggtgaaaaatattataagagtgcaattgaacgcctggagcttgtttcgttaactccttttggcggatttatac

SEQ ID NO: 13806 - DNA, 350 bp, Zea mays
  unsure at all n locations
  Clone ID: LIB3150-047-Q1-N1-B2
gtacagaaagagggtggatgcgctagtgtttttctcgttacttctcctcggatactttgctgctcatgcacatgggaagggtcatgtcacagatgatgtcggtgtttctactccagctaaagaaggaattatgcaaggaaacggagcacgatgcgttgtagggtttcctccatgcaaagataacaagtgctactgctgcattggggggcgaactcatgctcgctactctaccattggcctgatgtagacatgcctgcttctaaacacanattaagatcgctgttattatatacattgtaatggtaggtaatgctattaataatatatgggaattttagttttggtattna

SEQ ID NO: 13807 - DNA, 400 bp, Zea mays
  Clone ID: LIB3150-047-Q1-N1-B9
ttctgacaacgctctctaccgtccgatgccccttttaccagcgcgggggcgggggcggaggcggcggctaccatggctgtcggaaagattcaagattatctccaagggaaagaagggtggcaagaaaaagaccgtttaccctttctctaaaaaggattggtatgacatcaaggcaccgtcggtgttcagtgtgcgcaacatcgggaagactctcgtatccaggacacagggtaccaggattgcttctgagggtctgaagcacagagtctttgaggtttgcctagctgatcttcatggcgacgaggatcaagcttacaggaaaatcatgctcctcgctgaatatgttcatgtcatgaatgtgctcacaaacttttgggcttgtattttaccactgataact

SEQ ID NO: 13808 - DNA, 429 bp, Zea mays
  Clone ID: LIB3150-047-Q1-N1-C7
ttctctcctccctacccaacaccaacgtgagcctttttaccaatcggggcgctcctcaaaccccgccgccatgaccatcgcctccgtcaagtcctcctcttcctcatccgaggttccgatcgccgaccgcaccttcttcttcttcagcgaggtggcagaaggagcaatcgctacaatcatcggctacccgttcgcaaaaaattgcggcaagtgctccaatttcctttacaggataacagcttcaataaacggacctcgtcaaggttttctaccactccaactgtttgacctgtattctgaggatgccatcctacaatgagaaccctttctctccacagtgcatacattcattctgattcttaaccgtgcaccgttctctcgactgctgcttacattactacctggtcgagagagtgtattcctccttct

SEQ ID NO: 13809 - DNA, 177 bp, Zea mays
  Clone ID: LIB3150-047-Q1-N1-D1
gtattaactggctagaggacgcctccgggggcgccaccgctgctgagtactcttaagaccgatccgacccaaagccaaacccgattgccctcgtagtcgtttgtcatcgcgcgaccgattaccccgccgccgccgcgtctgcagcggcgatggcgtcgtcgttgtcgcgggcgctgt

SEQ ID NO: 13810 - DNA, 193 bp, Zea mays
  Clone ID: LIB3150-047-Q1-N1-D5
ttcctgtacaaaaacaaaggaagggagagaatctatgactagcagcgagaacactgccggggcgactgcgacggtggcggtgttggtactagtagcggcgacgctcctggcaacggtggtgaatgcacggtcttgcttggacggcgtgctgcctccgtcgacgacgttacatggtgtggttggggatttgttg

SEQ ID NO: 13811 - DNA, 240 bp, Zea mays
  Clone ID: LIB3150-047-Q1-N1-D6
tgcttctggaggtggaaggagttctggcggatgtctaccgttttggcagtcgccaagctttcaatgtaccatttcgaagcctcggactagattgtgcaaattggacagagccaatatatgctgatttggtgaggaaagcttgtggtgatgaggaaaggatgctggcattattctttgacaggattggctggcctacatctttgccaactagtgagaaaggatcatttattaaagtgttct

SEQ ID NO: 13812 - DNA, 447 bp, Zea mays
  Clone ID: LIB3150-047-Q1-N1-D7
tcgtctacattcacgtgcaactgtcagaagcaggtttttacaccggatggaggctaacacacactcttctcttaatcccgtgttcgcctacctatccttcgtcagtgtctcgatcctccttgttgtcttcttccttttattagcctaatcttccttcatacgacataactcattatatatatacataatccattttccgtaaagcatctatttaattgattgattgtctcatattcaattattatattctcttatacatttatttaacgtattttaaatttctctttattacaataatcttatttttaattacaccaatttcctttacatttctattttataattattcttatatttctcttattctatattctttttttctttctattattatatttcctattatataattatatattcttattcttttttatatttttattttat

SEQ ID NO: 13813 - DNA, 237 bp, Zea mays
  Clone ID: LIB3150-047-Q1-N1-D8
ttttggtgcaacgagaaggagtacggggcggacattaacattgtgtgcagatgctagctgcacaaccaactgccttgctcctcttgctaaggtcatcaatgacaagttcggtatcgttgagggtctgatgaccactgtccatgccatcactgctacccagaagactgttgatgggccctcgtctaaggactggaggggtggaagggctgctagtttcaacatcattcccagcagcac

SEQ ID NO: 13814 - DNA, 199 bp, Zea mays
  unsure at all n locations
  Clone ID: LIB3150-047-Q1-N1-D9
tctggagctggcggacatcccggcgtagttccggttcacggcgcggagcgtcctcatggacggcgcgatcccgccgggcccggacgcgcagctggagggccgcctagaggacctgccgggctgcccgcggttttgttgttatggggatncgcccgccaccccncgncacggagggccnngagtgcaacctggggccacc

SEQ ID NO: 13815 - DNA, 380 bp, Zea mays
  unsure at all n locations
  Clone ID: LIB3150-047-Q1-N1-E1
tggtcaaaagcccacaacttcttctccctgctccttctattccttcgtcagccgcttctctctcttccntcctcaccttacaaaaagctagctccttcctttaccgccccttcattgctattctatcccccgccattcttttctcttctcctctccttcttctttctttctctaaacttattatcttatatttctctttttttttttttttttttttctttttttctttattcttacctcatttttatctttttttttttatcttttattttatttttcttctatttttatttttctttcttctcattatttattttctttttatcttttttatctttcaattttctttatttttctttttttattaattttcttttttt

SEQ ID NO: 13816 - DNA, 236 bp, Zea mays
  Clone ID: LIB3150-047-Q1-N1-E6
tcttgcctatacacgaacactgaccctgggcgaatttttaccacaccggcgggccacaaccttcaaaagccacttttataaccctcctaccatactacccaaactgctccaagcccttttactccatcttctcttactacgcggaggaggatgaccaaaatgacccctcaaatctcttcaacaccacatgcagttctacaaaattcacaactagtacgataaaaacaatcataaaa

SEQ ID NO: 13817 - DNA, 227 bp, Zea mays
  Clone ID: LIB3150-047-Q1-N1-E8
ttaatatgtggacattagcaaggaggagtgggatttaggtgagagcgaggaggaaagagagaaggagataaagcaggagttcagccaagcctgtgactggataaagaatcgtttgtgtgataaggttgcacgtgttgacatatctaatcgtctcaggtcatcgccatgtgttcttgttgcagcgaagtttggttggtcagccaatatggaaaggctgattagagcac

SEQ ID NO: 13818 - DNA, 297 bp, Zea mays
  Clone ID: LIB3150-047-Q1-N1-F4
ttgtggtctcccgcccctactaaaccgggggagtctgtggtggcgcaccggggtgaggtgaactgcctggcttttaacccgttcaacgaatgggttgttgcaactggttctactgacaagactgtcaaattattttatcttaggaagattgatacttctttgctcacctttgactgtcataaagaggtagtttttttatttttatatatttttatataatttatcttaatctcttttttttatgttttatttacatattgatttatttttttttttatttatttaagtttttatttt

SEQ ID NO: 13819 - DNA, 141 bp, Zea mays
  Clone ID: LIB3150-047-Q1-N1-F6
tcgttctagtggaggtcgaaggagttcggggggatttctagcgggcgggccagctccaagcattcaaagtagcattacaaatccgcgtactcatgggcacaaattgttccgagccaaaatatccttatttgcacagtaacg

SEQ ID NO: 13820 - DNA, 442 bp, Zea mays
  Clone ID: LIB3150-047-Q1-N1-F7
tttgaacaagggtctcaggggaaggggggattattgggaagacatgggcgattccacaagatgacgctcaagggcaagcttctagatactcaaagcgtgaccatagtactgctctgcgtcacagcgaaagtggcatggtagatcaggttctgttaacaacaaatgcggatggtctaagatttgtcaaggttaggatgcgatctgttcgcataccacaaattggcgaccaggttaaccacctggcatggacaaaaaggaactgttgggatgacttacactcaagaggatatgccatggacaatcgaaggcattacacctgatattattgtgaatccacatgctattccatcccgcatgactattgtgcagctgattgagtgtattatgggtaaagttgctgctcagatggggaaggaaggcgatgccactccattcacggatg

SEQ ID NO: 13821 - DNA, 462 bp, Zea mays
  unsure at all n locations
  Clone ID: LIB3150-047-Q1-N1-G4
gttgttcctaactctgaaaaaatggccgtgtacgaaatctatatagcacgcgctgccgaactctttggtgttccaaggacaagacaaatatatgagcaagcaattgaatctggcctcccagacagagatgtgctgacaatgtgcatgaaattcgctgagctagagagaagtcttggggaaatcgatcgttcgcgtgccatctatgtgcatgcatccaactatgctgatccaaacaattcttacttttggaaaggaagtggattgattttgagattcagcaacggtaactgaagatacattcagggagatgcttcgtatcaaacgcacagtggctgctagccgcaaccagacacattncatactgccagagtacttgatgcagagggatcagaagttaaacctggacgaagcaattgacactctgaagcgtgctggcgtccctgaggacgagatggcagcttt

SEQ ID NO: 13822 - DNA, 205 bp, Zea mays
  Clone ID: LIB3150-047-Q1-N1-G8
ttgtcatccgccgctgctgctgccgcttgcagatattttgaggtggcgtgcggactcataataccaattcttatttcaaacgtttccaagtgaaattcaacataaggctgcttgtcatgacagactacagggcttatattaggcttattaatcaatacacaaacatgctcatctcactctaaatacatattttttgtgctatcta

SEQ ID NO: 13823 - DNA, 430 bp, Zea mays
  Clone ID: LIB3150-047-Q1-N1-H12
tttaagcagaagctcgggcagccatgggcgctctttatggattctacatggatgggcatgaggttttcgtgaagctagcgtccgacgtcatttccaacaggaaaaacgtgaacctggcccacataacgcccacgaaggaccacatcttcgagaccccgcacaaggtctacgtcggcaacctcgcgtggtctgttcagccgcaagacctgagagagctctttacccagtgcggaaccgttgttagcacgaggctgctgacggaccgcaaagggggcaggaaccgagtctatgggttcctctcgttttcttccgcccaagagctcgaggaagcgttaaagctcgacagaacggtcttcttcggacgggatatcgtagtgaaggaagcccatgtagagcgccagacgcgctgagccgttgagtgttacccttg

SEQ ID NO: 13824 - DNA, 160 bp, Zea mays
  Clone ID: LIB3150-047-Q1-N1-H4
ctgattcctgggccgacgcgtagtcggggcgcgtttctaacacgtgggcggactcgtacttcctcatgaaagcagtgctgatttgcagcagccatttgcactacctaaggtagatgcgcatctctcactttatttttaactagccgatgatgatcattca

SEQ ID NO: 13825 - DNA, 403 bp, Zea mays
  Clone ID: LIB3150-047-Q1-N1-H7
ttgaccgcagctcaggttgcctccggcggcctctcattcctttggtgcggcactcaccaccccgccccttcctccatcttcctcgggacaacctctgttctacccgtctcccttcgggccgctggcacaggtggcccacggctcgcctaccgactccggggccgccgcgtcggtgccgccgtctcccagctccccaccacccatccagaggtagtttcttgcgagaagaagatctcaaatgtcattaaggcctgtgcggactttgcgatggcagagctggaggccccgaagatgaggtaccctacgacaggcacttatgggctcctcatgggcattctagttcaaggaactagtgctgcatcaaaacttctgcgggctaattgaattacacttttcaaagtgc

SEQ ID NO: 13826 - DNA, 487 bp, Zea mays
  Clone ID: LIB3150-048-Q1-N1-A10
tttttattgtgatcactatatcaataatagtaaggcttttaatggaagcagtgggttttatgatggatcctttgcttggaaagaaagtttgctttgtgcactttcctcaaagatttaatggttttgacctcctttttctattttcttccattaattgtttgctttttcgtatttataaaaaaacgttttggttgttttttattgggttatatttttttttcttaatatataaaattctcttttattattttttattaaattattcttttctttttttatattttattttattattttatatattcttgtttattctctatttttctattatttttatcttttattcatctattgccctttattttttatttttctccccattatttttaatattcttctttctctttttttatttatttatttttttctctccctttattgttttttattatatattttcttctataattatttttttattattttt

SEQ ID NO: 13827 - DNA, 445 bp, Zea mays
  unsure at all n locations
  Clone ID: LIB3150-048-Q1-N1-A2
ctcactttctcctcgtcggtcggaataagacgcctttctagagacgcaagtagattncttcttttttccttgtatgctagctgagtgccgtacctacagtccaacaagttgatggttgaacttttctcgccttttttctttttttcctctattttaacttcggaggttagtttcttttttttagttatcttatctttctccccatatatttttttttttttcttttgcaccgttgacttttatctgcattattatttttccttgctattatctttctttgatttttttccttcttgttttctatttctcgtcttttcttttgtaatctcttaatttttatttttttttatttttttttttatttttttatttattctttattctttatttattttattttttagtttttttttttgtttttttttcatttatttttttttatatt

SEQ ID NO: 13828 - DNA, 114 bp, Zea mays
  Clone ID: LIB3150-048-Q1-N1-A4
ttgacttctccacgcatccgtcatccaagacgggatcccgaccagccgggcatcgcctattacctcttcccgcgctccctagcgcctaagcttcatgcgctcttatttttttaa

SEQ ID NO: 13829 - DNA, 282 bp, Zea mays
  Clone ID: LIB3150-048-Q1-N1-A7
tcgttcctgtccccctcccgagtcccgggccgtctgcctaacccacgacgagacgtctcctatccgatccaagccgccatggatttcttcaagtccatcctcgccgagcccgatccggacccggcctctccgacgcctgatcaggagcctgatccggagccggaattcgccgtatccgtcttatcctccaacttcggcgggtgcggcttttgtttcccgttcttttttgtctctttgtataattatcgttatcttttttattatatcctcatttcttttttt

SEQ ID NO: 13830 - DNA, 158 bp, Zea mays
  Clone ID: LIB3150-048-Q1-N1-B1
gtcgtttttaacaaagcaacatcagagcgatagcttgtatctgatgacaagatgattaatcaaggtctggttgctacacttcagtctttctcgggcactggatcactgcgcttcgctgcatcattcatacaaagatacttccctgaagctaaagtgct

SEQ ID NO: 13831 - DNA, 86 bp, Zea mays
  Clone ID: LIB3150-048-Q1-N1-B12
ttcctactcgactgcttccctctctctgagagagtcttgactctagactgcgccgctacaacctgacgcgatggccttgtccgcga

SEQ ID NO: 13832 - DNA, 171 bp, Zea mays
  Clone ID: LIB3150-048-Q1-N1-B7
tttcgaaagagaaagcagaccaacgtagcgcacccttggagaaagaggccaaaagggaggggagagtgtcgtcatggcttccattgtcgcttccaggagggccgttcctctagttcgcgctctggagaagctcatcgcagcgtcctccgctcccgggactggctccgtcct

SEQ ID NO: 13833 - DNA, 424 bp, Zea mays
  Clone ID: LIB3150-048-Q1-N1-B9
tcttcttacacggtctccctcttcctaacgatagtttattgagagtgaagcagcgagtgggagacatggggatatggggaagggtgcgcatgggagcgattcttctgctgcagtcggctaggtgtatgttaactttttgttctttcttatatcaaaaaacattattattattgtttcctttcatgcacacttttatttatattttttttttttgtcatactatttttatttcaattttatattttattttttgtcatttttttctttaattctcttaatttaactttttgtttattttattatttttttttattaatttttttataaaatttttctatttttttttttctattaattttttttatcattattttatattttaatttattatttttgtccattttattctttttttttttttatt

SEQ ID NO: 13834 - DNA, 424 bp, Zea mays
  Clone ID: LIB3150-048-Q1-N1-C1
atctactccagagcgcaagagaaccctatcgacaccataagggtgttgctcgttgccctcgctctcctggctctcgctgcgagcgccaccttcacgcatacaagcggctgctgctgcttcctgccattcttctccgtttttctatcttgcttcgttcttttttttgcttcttattccttatttgttgttttctttattattcttcgttacttctactgctttttttctactttatatcttttattcctttttttattttttttgcttttctctatatttctttttttttttcttcttctagtttttttttctttttttttattattcttctttttttcttttatttttatattatttgttctttttttttgttttttatttgtttttatattttttttttcctaaatttctttatttttttttt

SEQ ID NO: 13835 - DNA, 76 bp, Zea mays
  Clone ID: LIB3150-048-Q1-N1-C11
ttctttggatcagattggtttcgtaactagagagggactgaagggctcggagtgccttgatttgggactctcctcc

SEQ ID NO: 13836 - DNA, 186 bp, Zea mays
  unsure at all n locations
  Clone ID: LIB3150-048-Q1-N1-D1
ttagttagcgccaccaccggccggaagaagagttctacacgatgctgcgagtggcggntagaatgctctcgtcttccctctcctagtcgccacgccgcggcggtagccagtggttccaaagccttcgctggctttaattaaaatttgcgacctctccttagctaaagtgggtcttgatctattttt

SEQ ID NO: 13837 - DNA, 452 bp, Zea mays
  Clone ID: LIB3150-048-Q1-N1-D12
tggagctgccgcagtcccaccgaccccggggcggggtcgccctccatctgctcgccgctgcctctcgtttctcttttcaataatcaagatgagccgtggtggtagtgccggtggtggtcaaagttctctgggttatctctttggaagcggtgagccccccaaaccagcagtggcaccagctgcaagtgctccacctgttgagaaaccatctgctgcaaagactgatgccgccaaaccaggttgctgctggggttaccagccaaaccaataactaccacagggctgatggtcagaacactggcaacttccttacggaccgtccttcaaccaaggtccacgctgctcctggcggtggctcttccctgggctacctgttcggtggcaactgatgcccgtgctggtgcgctcaccaaagttatcctcccctgcctgctgcgtgctatgtctgaatc

SEQ ID NO: 13838 - DNA, 218 bp, Zea mays
  Clone ID: LIB3150-048-Q1-N1-D2
ctttacctatttttccaagcggtcaaaggcgaatcactctcgagcggcggcggtgacaagaacgagacgcgcgcgctagctgaatcaagagcagggcccagggaggagagtggagagccgcccacgagcagcaatgccttactgcgatgcgggcacgtacgcagacagctacaagtgggagggcgtgagactcttataccgacgctacagcagaagat

SEQ ID NO: 13839 - DNA, 424 bp, Zea mays
  unsure at all n locations
  Clone ID: LIB3150-048-Q1-N1-E4
tgttctacgtggaggaggatctggtttcgaccgacttcaccggtgacagcaggtcgagcatcttcgacgccaaggccgggattgccctgaacgaccacttcatcaagctcgtctcgtggtacgacaacgagtggggctacagcaaccgcgtcgtcgacctgatccgccacatgttcaagacccagtaggctagtagagagatagatttctgcctccctatcgtgggtcgtccccaatggcctttggtcgcagaccatctttgctgcttgtctatgctgagaataaatgtgaacggtgcccctggacgctggatccatgctggttttggacacgctgtctttttgtggttaacttatctgctgccgtcctgtaacgaattcgcaagttttaagttctttgtgcttngntaaaagataaacaatga

SEQ ID NO: 13840 - DNA, 394 bp, Zea mays
  Clone ID: LIB3150-048-Q1-N1-E6
tcgatctcgcgaccgtataaacgagccggacggggtccaccttccgcgccgctgccactcatcgccgcgcttgcgtttcctcctctccgcttccaagatgtcgaagcgagggcgtggaggttcggctggtaacaagttccggatgtcactgggtctaccagtggcagctactgtgaactgtgccgataacactggagccaagaacctgtacatcatttctgtgaagggaatcaagggtcgccttaacaggacttcttctgcctgtgttggtgacatggttatggcgaccgtgaagaagggaaagcctgaccttagaaagaaggtgatgccagctgttattgtgaggcagcgcatgccatggcgccgaaggatggtgtctacatgtactctgaag

SEQ ID NO: 13841 - DNA, 235 bp, Zea mays
  Clone ID: LIB3150-048-Q1-N1-E9
gtttcatagttagtatatttccgcccctggaacaaagcttatggatgttagatgtctgtaaaaaaaaaaaaaaaaaaaaaaaaaaaaaaaaaaaaaaaaaaaaaaaaaaaaaaaaaaaaaaaaaaaaaaaaaaaaaaaaaaaaaaaaaaaaaaaaaaaaaaatttccctaaaaaaaaacaaaaaaaggggggggcccccccaatgttttaaactacatccgtgtaaaaattacaa

SEQ ID NO: 13842 - DNA, 212 bp, Zea mays
  Clone ID: LIB3150-048-Q1-N1-F11
ttcagaacccagcgaatccagcctggccgatgcgcatgtctcatccgggacgccgactccatcctcatccccatcgccgcggcgatggatccctccccagccccagccccagccccggctccggctccggtcccggcccctacggtggtcgagtggcccgagggcggcgcactgactcgggactgggtggcggggctggccttcactctgga

SEQ ID NO: 13843 - DNA, 206 bp, Zea mays
  Clone ID: LIB3150-048-Q1-N1-F12
ttcttcgctctcaaaccctaaccctagggctagccctctcccggcggaccgacgatgccttatgctggcggcggggcggcggacgatgaggagttccgcgccgaggtggtggtgcgcctcatcaacgaggagtactagatctggaagaagatcacacccttcctctacgtcctcgtcatcacccatgcgctcgtatgtcccttctt

SEQ ID NO: 13844 - DNA, 403 bp, Zea mays
  Clone ID: LIB3150-048-Q1-N1-G2
caccgatcgctcctctccactttccacagttgagttccactccgcctccgctgccggtcgccgactccgaaactccgacagtccgaccacaagaaggatgagtgaagaggataagactgctgcttctgctgagcagccgaagagggcccctaagctcaatgaaaggatcctctcttctctgtccaggaggtccgtagctgctcatccgtggcatgatcttgagatcggtcctgatgctcctgcttgtttcaatggtggtggtgagatcacaaagggaagcaaaagtaaatatgagcttgacaagaaaactggactgattaagggtgatcgagtcctatactcatcagttgtataccctcacaattatggtttcgttccaaggactctttgtgaagacaatgac

SEQ ID NO: 13845 - DNA, 193 bp, Zea mays
  Clone ID: LIB3150-048-Q1-N1-G7
gttccattagctttatctactccagagcggagatgatcccgatcgacgccgtgtgggtgttgctcgttgccctcgctctcctggctctcgctgcgagcgccacctccacgcatacaagcggcggctgcggctgccatccaccgccgccggttcatcttccgtcggcggtgcatcttcctcctccggttcacct

SEQ ID NO: 13846 - DNA, 284 bp, Zea mays
  Clone ID: LIB3150-048-Q1-N1-H1
ctttaatccagcaagcgctcgatacattggacgcatcatcccccagctctgccgcagcccgcccacatgagttcccgcatctccctctctggtctggtcacaggagctccgagacctctccaatggcggttaagatctacgttgtgtactattccatgtatgggcatgttggcaaactagctgacgagatcaagaaaggtgccttatctgttgaaggtgttgaggctaagatatggcaggtccctgaaattctctctgaagaagtgcttggaaagatgggcgcg

SEQ ID NO: 13847 - DNA, 204 bp, Zea mays
  Clone ID: LIB3150-048-Q1-N1-H10
attcctcccaacaccacctctcctgcaatgaccgtttcctacatcgcgtggagcatccatcatgtctgcctactgcggaaagtacatggtttagctcatcaagaatgctgcctacattggcaccccctacaaggttatccttgccgctgattactacaccgccaccatcctcaagctcctcttcagcctccttttcgtgaactt

SEQ ID NO: 13848 - DNA, 338 bp, Zea mays
  Clone ID: LIB3150-048-Q1-N1-H2
tctttatatctaagtcaagaaagatacaggtgcctgacgtatctggtggcatctcatatccttgaccgaacttctgaagttcttcggcaaacaacgattggcttttatggatctgattgagcccatttttcaaggaacaatgtgttcaaaggtttggattatttatatgccctatttgattttgaaatacaaaaagattgacatctttgttttcccccagtaccccctttgttctttatgtttaataggtccaaaacttgtgatcgttagtttgcctgcccaaataatgtagttgggtagcctctaagttgagataggtgcagtggcgatacatgtta

SEQ ID NO: 13849 - DNA, 124 bp, Zea mays
  Clone ID: LIB3150-048-Q1-N1-H6
tacatatttaacaatcttcatattttttatccctttacctttttttttcttttttaagtatttacatatcttgcttaacctttttgtccctatatatcttaaattcttttttatttctttttat

SEQ ID NO: 13850 - DNA, 412 bp, Zea mays
  Clone ID: LIB3150-048-Q1-N1-H9
tttccgatttaagcccactgtatgaacagcctggctaggcaaacgtactggagcagttatttcttaaactagaagattcaattagggattctggatgctttcctggatgtccacagaaggagcctccttccacactgttgtggaccctgtttttgatttctcagcactacgacagaagagggcaatatgacattgctttgaataaaatcgatgaggctatctcacatacaccggcctgtcatcgattctatattcagtaaagggaaagatattgcaacatgctggaaatttcacagcagcatccgcattagcagatgaagcttggtccatggatcttgctgatcgttttttaaacagcgagtgtgctatgcagatgcttcaggctgaccaggttggccttgccgagaagact

SEQ ID NO: 13851 - DNA, 88 bp, Zea mays
  Clone ID: LIB3150-049-Q1-N1-A1
agagctttgacgacgcatgcacgcctacctaagcttggattctttaaaatccaaccaatccttccgtaaattttgttcctaagctaat

SEQ ID NO: 13852 - DNA, 389 bp, Zea mays
  unsure at all n locations
  Clone ID: LIB3150-049-Q1-N1-A3
agccttccggccaaggcggttgctgccggcgctcgccataggcgtcgtggccgccgcgctcgcgtgcggcgcggccccgcagctctcggcggggttctactcgtcgagctgccccgccgtgcacagcatcgtgcgccaggccatgtcgcaagccggcacgaacaacacgcgcagcgccgncgncgtgctccgcgtcttcttccacgactgcttcgtcaatggctgcgacgcgtcgctgctgctggacgacacgcccacgacgcccggcgagaagggcgccggccccaacgccggcggctccaccgtcggcttcgacctcatcgacaccatcaaggcgcaggtcgaggccgnctgccccgccaccgtcttctgcgccgacatcctggcgc

SEQ ID NO: 13853 - DNA, 394 bp, Zea mays
  Clone ID: LIB3150-049-Q1-N1-A4
agccttccgagattccggtcctgggattgggggccaacaccaaaccaaacaactttttggtagacataaagggccctaatttggcctttctaccagtactttcatttgaaggcggtacaaggagaaacatacccaagttcgagattggtacattaatatatgctcgagtggtgaaagcaaatagtatcatgaatcccgagctctcatgcatggatgctactgggaaagctgccgaatttggacagctgaaagatggttatatgttcgacacaatcaaacttgctgtcacgaatgttgttaaagttttctcaagacctccagaactggacatgttggggaacttaacaacattcgtgacatgccaagttctgaggtccttgggaaaaaactgtcg

SEQ ID NO: 13854 - DNA, 397 bp, Zea mays
  unsure at all n locations
  Clone ID: LIB3150-049-Q1-N1-A5
agccttccgccgtatttgatctcgtttcaaatccatccatcctggtttcctccgtcccgcagcatctcaaccccatggccaagatcaagatcgggatcaatgggttcggcaggatcggaaggctggtggccagggtggccctgcagagtgacgatgtcgagctcgtcgccgtgaacgaccccttcatcagcaccgactacatgacctacatgttcaagtacgacactgtgcacggacagtggaagcaccatgaagtcaaggtgaaggactccaaaaccccttctctttggtgagaaaggaggttgctgtgtttggctgcaggaacccctgaggagatccccgtgnggttcgggtggtgctgaaatatgttgttgagtcttactggtgttttcactga

SEQ ID NO: 13855 - DNA, 423 bp, Zea mays
  Clone ID: LIB3150-049-Q1-N1-B1
agccttccgcccattttttccaactcctgaccactttctcgtcgtcccagacaagccaatcgaagccgagatacgaccatggactccaccggcaccggagcagggggtaaggggaagaagggagcggccgggcgcaaggtcggcgggccaaggaagaagtcggtgtcgaggtccgtgaaggccggtctccagttccccgtcggccgcatcgggcgctacttgaagaagggccgctacgcgcagcgtgtcggcaccggcgcccccgtctacctcgccgctgtcctcgaatacctcgccgctgaagttctggagctcgccggtaatgctgccagggacaacaagaagactcgcattattccgcggcacgtgcttctgcgatccggaacgacgaggagcttgggaagctgtttgggcgggtgacca

SEQ ID NO: 13856 - DNA, 84 bp, Zea mays
  Clone ID: LIB3150-049-Q1-N1-B2
agccttccgtccgtttttgtattctataacatgcttcgccggagtctaccacatcatcttatggagtccgagaacaaacattcg

SEQ ID NO: 13857 - DNA, 405 bp, Zea mays
  Clone ID: LIB3150-049-Q1-N1-B3
gcccgtccagccagccagatcggatcggatcgctccaccacctgctggtctgatggcgccgcccccttctagatctcgcttaaaaaaacatccccctctcgctgtgtgtcggagtaccgctttagttttgccgatccgggcacgagtgcccgctgcctctttcgtaagaggatcccgtccgccgttttcagatttcgttcggttcgtagaagaactctcaagttaagttaagttatcatggtgtgtgcttggtcgtcgtccgtcgttcgtcgtcgtcgttaaggttttaagagatgatttggtcctgtgttgccgaggggaagtccaatctgcttttcttttcttttttgtggtttgttccatcagactgaggaaggagatgagatgattattctcccagattat

SEQ ID NO: 13858 - DNA, 411 bp, Zea mays
  Clone ID: LIB3150-049-Q1-N1-B4
cttccggccggttttttccgtaccccggcggttaaaaccctagttcccattccattttggtttccgttccgccgccgtcgatggagttctggggtctcgaggtcaaacctggatccactgtcaagtgtgagcctggacatggctttatcctgcacgtttcccaggctgcccttggggaatcaaagaaaagtgacagtgccttaatgtatgtcaaagttgatgacaagaagcttgccattggaacgctctctatcgacaaatacccacagatacaattcgatttggttttcaataaagagtttgagctgtcacacacatcgaaaactaccagcgtatttttctctggctacaaggttgagcagccaattgagggagatgaaatggatcttgattctgaggatgaagaggagg

SEQ ID NO: 13859 - DNA, 416 bp, Zea mays
  Clone ID: LIB3150-049-Q1-N1-C1
cgattggcgacagccgaagccgacacccctctccgacgccgccacagcctggggcaagtcacggacggagatctctgcggagctacccgtttggctgctttccttcgtattggttactagtctgttgctatggggaaatccaaagacaagaagggttcgcgggaagcgaaggaggacaagaaattggcgcttggggtgaagaggaagcagctgaagaggaagaaggacagagtgttggaatgtgccgtcgatagcgaacccgctgccgggcatggcgttaaagaagaaaaagaattgacaaggagaaagaaaatttcattggtgaagcagaagaagaaaaataagcatgccaatgttaagagtaaccatgatacggcagatgctgggtggaatcactgtcagacagtaaatatgat

SEQ ID NO: 13860 - DNA, 412 bp, Zea mays
  unsure at all n locations
  Clone ID: LIB3150-049-Q1-N1-C2
agccttccgccttcttcccttgttttgcggcccgccacgaactcgcgacgctctcgagagatccatggatcggcgcaagggcggcaaccgcgacaccaacggcagcctggtcgaggccacggcgtcgcggctgagggtcgaatccgacgaggaggcggaagaggtggggatggaggtgaagaaagcttcgacgcgggggtggaagacgagcaggcggcggcagaggtgattggaagcgaaaagaccagcgccgactactacttcgactcctactcccacttcggtattcatgaagaaatgctaaaagatgtcttcggacaaaaacatatcaaaatgttatcacccagagtagctttcttatcaaagaacaaagtagtnccctgatgttggtgctggaacctggaattctttc

SEQ ID NO: 13861 - DNA, 413 bp, Zea mays
  Clone ID: LIB3150-049-Q1-N1-D1
cgacgataaggaggtcgcccgcgtctgcgccggcgtggagtccacccccgaggacgagatcgcctccaccctcgctgacatgaccgtggacttcaacgagccactcctagccgcggtcctccttgctgctgatcaatgctcctgtaagaagctgatttccctgttcaactatgccgcgaagaataaccccgcttccaagagcctctcgaatcttgaggttctcgtgagcaagctagctgattctgctgagatagacaaggcagacgcttacttgctttgggattcgattaaggaaataggctctgtgccaggatcagtgagtacaccgttgttgaatgaaatgattgccatattttggaagcttgagaagtcgaaagcagcgtttggaggtgtctccaagttcgatgagtttg

SEQ ID NO: 13862 - DNA, 412 bp, Zea mays
  unsure at all n locations
  Clone ID: LIB3150-049-Q1-N1-D2
ggcttctcctcccccaccggttcgtgttcaggttctggttcgtgggcgagagggaagagatggcggcgtcggacgttgagtaccgttgcttcgttggcggcctcgcctgggccaccgacgaccactccctcaacaacgccttcagcacctacggcgaggtcctcgagtcgaagatcatcctggatcgggagacgcagaggtcccgcggcttcggcttcgtcaccttctccacggaggacgcgatgcgcagcgccatcgagggcatgaacggcaaggagctcgacggccgcaacatcaccgttaacgaggcccagtcccgcggcggccgtggaggcggcggtggcggatacggtggcgggcgccgtgatggaggcggctacngcggtggcggtggaggctacggcggtggtcg

SEQ ID NO: 13863 - DNA, 359 bp, Zea mays
  Clone ID: LIB3150-049-Q1-N1-D3
gcccagcatgtggtggcggcctcgtccgtcagaagatgaagtacctccgcttcctccgcaagcggatgaacaccaagccgtcccacgggcccatccacttccgcgcccccgccaagatcctgtggcgcaccatccgcgggatgattccgcacaagaccaagaggggggaggcggctctggcgaggctcaagacgtacgagggcgtcccgccgccgtacgacaagaccaagcgtatggtcatccctgacgctcttaaggttctgaggctacagcctggacacaagtactgcctcctcggcgagctctctaaggaggtcgggtggaactaccatgacaccatcagggaacttgaggagaag

SEQ ID NO: 13864 - DNA, 412 bp, Zea mays
  unsure at all n locations
  Clone ID: LIB3150-049-Q1-N1-D4
agccttccggaaaattttcccaaaccctaacctcccgacggggatggcaaaccttccagtttttttgaaaatgaccgacggcggcgccccgcagggccgtatcgtgatggagctgtacgccaacgaggtgcccaagaccgtggagaacttgcgagcgctgtgcacggactagaagggcgtgggcaagtccgggaagccgttccactacaagggctccatcttccaccgcgtcatccccgagttcatgtgccagggctgatactacaccctcgagaacagcaccggcggacagtccatgtacggcgagaagtttcgcgacgagaagttcgngcgcaagcactccgaccccggagtgctctggatggccaacgccgggcccaacatcaacggctaccaggtattcatctgcacc

SEQ ID NO: 13865 - DNA, 292 bp, Zea mays
  Clone ID: LIB3150-049-Q1-N1-D5
accttccggctattttcccttaccaaaaaccactccgcgggggtttcaaacctcccagattgcttgaaacacagtcacaaccggttttcccaagagcgtatcaagagccggccctaccacttcgacgggatcccacccctgatgctcttgccagacggcgtcactaagaagagcgacgcactcgacgcagtatctcgatctgactagtacttcattcattgcctcgaagtacaacgctagtgcgatcatggaaactgacactggaccctcttatcaatcaactttgacatac

SEQ ID NO: 13866 - DNA, 405 bp, Zea mays
  Clone ID: LIB3150-049-Q1-N1-D6
gctcttttccccatcctgaacgctcctccgggggattcccagcgcgtcgcacatctgctgatcgtcgcacttcaagagattcgatcggcttcgccggttcgcgcccgccgccatggcgacttcctcaggaccaaaggaggcgccagcgaataaccctgggctccagaccgaggtcgaccccgccaccaaaggctacttcttgcaacaaacgatgttacgtgtgaaggacccaaaagtgagccttgacttctactcacgtgtgatgggcatgtcgttgctgaaaaggttggattttgaagagatgaaattcaggttgtattttctaggttacgaggatgtgaccttagcccctgatgatcatatcatgcggactgaatggacttttaggcaaaaagctactctcga

SEQ ID NO: 13867 - DNA, 353 bp, Zea mays
  Clone ID: LIB3150-049-Q1-N1-E1
agccttccgttaaattgtgagcggccgccctaagttttggggaataactttttcacgtatcagctaactttgaaataaattgagttactgtgtggcaatcaatacacactcggagattcttcatcacacgaatttttgttccagcaggcgtgcttatatatccaaacactatagcacgtttctcactgtgaccacataacacatatgactggtgctcttcttcaatatcctggaaaacatcctctgtattgggtacatggccttcgcgtgccatctgctctgagaaagcattcagtgcatcaataatcctgtcataccaagggtgggacctatcatgagctacaaagacatgc

SEQ ID NO: 13868 - DNA, 351 bp, Zea mays
  Clone ID: LIB3150-049-Q1-N1-E3
acccttccggccggttgccgaaaactggtagtagccggcgcgccgtcaccgtatcctcagatcagcggcgagcagataccacaccactctactgacgcccgacgagcagtgtaacattttccttcagccatgggtaaggagaagactcacatcaacattgtggtcattggccatgtcgactctggcaagtcgaccaccactggccacctgatctacaagcttggaggtattgacaagcgagtgattgagaggttcgagaaagaggctgccgagatgaacaagcggtcattcaagtatgcgtgggtgcttgacaagctcaaggctgagcgtgagagagtattacaattgata

SEQ ID NO: 13869 - DNA, 283 bp, Zea mays
  Clone ID: LIB3150-049-Q1-N1-F2
agcggatcgagatggcggcgtcggatgttgagtaccgctgcttcgtcggcggcctcgcctgggccacggacgaccactccctccacaacgccttcagcacctacggcgaggtcctcgagtccaagatcatcctcgatcgggagacgcagaggtcccgcggcttcggcttcgtcaccttctccacggaggaggcgatgcggaacgccatcgagggcatgaacggcaaggagctggacggccgcaacatcaccgtcaacgaggcccagtcccgcggcggccgtgg

SEQ ID NO: 13870 - DNA, 403 bp, Zea mays
  Clone ID: LIB3150-049-Q1-N1-F4
ccgggccgtcgcctcgcctatccgatctgccacctcctcccgtctcgcacgttccttcccaactccgcagcgtagcctctccgcggcgcgatccagatccaggtttttcagcatgggcctggtgaaggaaggcatcgacatggaggagggaacccttgagatcggcatggagtacaggactgtatctggtgttgctgggcctctggtcatattggataaagtaaagggcccaaagtaccaagaaattgtaaacatccgacttggagatggcaccaatcgccgtggtcaagtccctgaagttgatggcgaaaaagctgttgtgcaggtctttgaaggaacttctggaatagacaacaaatacacaaccgtgcagtttacagggcaggttttgaaaactcctgtc

SEQ ID NO: 13871 - DNA, 403 bp, Zea mays
  Clone ID: LIB3150-049-Q1-N1-F6
ccggtggtcatcacatctcccccaattcgccggtccctccgacctcgccgtactcctctcgctccgggttaatcgctgctgtcttctgcagttgaagtagccttttcatctgctcgccgcagttcgtccgttgcccatggcggatgaggaggtaactgatccaaaggcgttcctagaggaacgttcaaaggctaagtgtgtgtcgcagtggtatgaatatcagaaatgtgttaagaggattgagaatgacgagactgggcacaaacactgtaccggccagtactttgattactggaaatgtgttgacaagaatgttgcagaaaaactctttgagatgttaaaatgacaagaaaagttttccctacttcagttatccacccaaagttggtaataattgtatcac

SEQ ID NO: 13872 - DNA, 137 bp, Zea mays
  Clone ID: LIB3150-049-Q1-N1-G1
cttccggccgcttgtttgtttgcttccgttccggcggggggctttatttcccgggacaggcggaagttgccaccgacccccccaaaccggggaataaaaattggaattggaagggggaaatcaataaaaagtcaaaa

SEQ ID NO: 13873 - DNA, 337 bp, Zea mays
  Clone ID: LIB3150-049-Q1-N1-G3
agccttcggtttttgcacaaaacaattattggcaattaaggcttcggaggaaactacaggacattaaaaatgatgataagatgattcaagctgagggtgtggagtctctttctgaatatgagcttcgacaagcatgtcgtgaggcgtggcaccttggtttgttgtcaacagaggagatgcgtcaacagctcaaagactggctggatctatcactcaatcattctgtgccatcgtctcttctaatactctcaagagcttttactgtatctggtaaaatgaaacctgaggaggccgttgtagcaaccttatcttccctgccagatgaagttgtcgatac

SEQ ID NO: 13874 - DNA, 375 bp, Zea mays
  Clone ID: LIB3150-049-Q1-N1-G5
ctggtttttcctacggctattaccaattcctgtttgggttagggttacttagggttttgtggaggggccatggcagcggctgacgtggagtaccggcgcttggtcagcgggcttgcctgagccaccaccaactagtcgctggaaaatgccttcggctcctacggcgagatcctcgactacaaggtcatcaccgaccggaagaccgggaggggtacctacttcaggttgtataccttgtactacaagaactccatgctcgacgctatcctgaacatgaaccgcctggagctcgacggccaggacatcaccgttaacgcaggtccagagatgtgcctgcgaagctgctgtggtagctactgtagatgtcgcggctgc

SEQ ID NO: 13875 - DNA, 457 bp, Zea mays
  unsure at all n locations
  Clone ID: LIB3150-049-Q1-N1-H2
tccttcgagctttttcacgcatgaaaccctaatgacccggtgcagatcttcgccttcggggtgcttgtccgaacccncattgggccccccgggcctgaattttttcccgggccccttccgttgcttggggctcaagacaaaccacctgtacctcctgtttcccgtttcggggcctgccccttattttcattccttggcttttccctacctcttttttttccttccttttttctgggttcctttatcctattatttcttttcctttaatttaaattttnnataatatatttttttttatttagtataatttccttttatttccatttttttttctttttttacattctttatttttatattttttctttttttattttctttattttattactaattttcttatattattattttttttttttattatgatttattcatattttttttatatttttat

SEQ ID NO: 13876 - DNA, 172 bp, Zea mays
  Clone ID: LIB3150-049-Q1-N1-H3
gcatgcacgcctacctaagcctggattcttttaaagtcaaccaacccttccggccttttttacttgccgctgggtgtcatgggtggcctccttaactccgtgaagtctcttacttctatgatgatcaccctcgccgtggagtacttacaccccatactcatcgaggcggacg

SEQ ID NO: 13877 - DNA, 396 bp, Zea mays
  Clone ID: LIB3150-050-Q1-N1-B2
cgcaggcaccaactcgcgcccaccgctccgctacaccagccgacgccatcatgtctaccgtcgccgccgcccccaccgtcgtgaaatcggctccggagctcgtcgcgccagtggggccaacacccggcggcaccctcccactgtcctccatcgacaagaccgcggcggtgcgcgtgtcggtggatttcatccaggttttccccccggccgtaagagcaggcggggaccaagacaccgccgtggccgcgatgcgcgacggcttcgcgaaggcgctggtgccgtactacccggtggccggccgcatcgcggacgcgagccccggggagcctgtgggggagtgcaccgggcagggcgtctggttcgtggaggccgctgcgagctgcgcgctcggcgacg

SEQ ID NO: 13878 - DNA, 351 bp, Zea mays
  unsure at all n locations
  Clone ID: LIB3150-050-Q1-N1-B4
aggcaaccaaggatgctggtgtcattgctggcctcaatgttgctaggatcatcaatgagccaactgctgctgctattgcctatggtttggacaagaagggtggcgagaagaacatccttgtctttgaccttggtggtggcacttttgatgtcagtatcttgaccattgacaacggtgtgtttgaggtgctggccaccaatggtgacactcatcttggaggtgaggactttgaccagaggatcatggagtacttcatcaagttgatcaagaagaagtacagcaaggacatcagcaaggacaaccgtgctcttggaaagctgangaaggaagccgagcgcgccaagaaagccc

SEQ ID NO: 13879 - DNA, 363 bp, Zea mays
  Clone ID: LIB3150-050-Q1-N1-B5
gcctttgaaagttcggagccgccggcccgtccgcctccttttccgcctcccgtccccaaggccaatagttttcaagtggcaatggcggaccaggctaaccaacccactgtccttcataagctcggtggccagttccacctgcgctcgatcatctctgaaggtgtacgggcccgtaacatatgcccatctgtctcatcttatgaaaggagatttgccacaaggaactacatgacccagagcctttggggcccttcaatgtctgttagcggtggcatcaatgtcccagtgatgcagaccccgctctgtgctaatgctcctgctgagaaaggaggcaagaacttcatgattgatttcatgatgggc

SEQ ID NO: 13880 - DNA, 106 bp, Zea mays
  Clone ID: LIB3150-050-Q1-N1-B6
acccttccggccgaattgcgcgctcttacaaccaatggttaacaacaacttgttcttcaaggggcgcgttcaaggtggacccgaattcccaacaacattgcggggg

SEQ ID NO: 13881 - DNA, 353 bp, Zea mays
  Clone ID: LIB3150-050-Q1-N1-C4
agccttccgaaaattggtggggttcttccgtccattttcggccgccgccactttactcttggcccccgccacgccactaactggttcctaagtctccgctagttccgtcggcggcaggcggtggaaaaccgtgagggcggacgccggcgggggctggctatccgggctgctgggcggcaagggcggcggcgcgtccacggcgatgatggtgacgccgggaaccgtgaatgccggcgaccccgtcctgcacgagcccgcgcaggaggtggcgccgggggacgtgctgtccgagaaggtgcagggcgtcatcgaccggatggtcgacgtcatgcgcagggccccaggcgtcggcc

SEQ ID NO: 13882 - DNA, 348 bp, Zea mays
  Clone ID: LIB3150-050-Q1-N1-C5
ttacaccagaaaaattcccagttctttggtccgcgtcagaaaggcggcggcgatgtctgggcgcggcaagggcggcaagggtctgggcaagggcggcgcgaagcgccaccggaaggtgctccgcgacaacatccagggcatcaccaagccggcgatccggaggctggctaggaggggtggcgtgaagcgcatctcggggctcatctacgaggagacccgcggcgtgctcaagatctttctcgagaacgtcatccgcgacgccgtcacctacaccgagcacgcgcgccgcaggaccgtgaccgccatggacgtcgtctacgcgctcaagcgccagggacgcaccctcta

SEQ ID NO: 13883 - DNA, 406 bp, Zea mays
  Clone ID: LIB3150-050-Q1-N1-D4
ttataatttcacctccccaccaacccttctgtaggcatttgatgaaaataattgactaattgtaataatgatggttgacctattctttagtaaggtggacttgggttgactgacactttcttttgcatggttggacttgagttgaatggctggtgtattttatcccttcggttttttccgccacttattttaaaaaaaaatacgaggcacttaaattgtgtgtgcacactgtgcctgtgatgccaatcacactgacttctaaacccttttgcagtctgtcacaagggtgaagccatatatctgcacgatgccgttgaaactcgacgatggctggaacaacatccagttgaaccttgctgatctgacaaaaagggcgtacggcacaaattacgtcgagacgctgcgg

SEQ ID NO: 13884 - DNA, 199 bp, Zea mays
  unsure at all n locations
  Clone ID: LIB3150-050-Q1-N1-E10
antttacagaaaaaaaaaaaaataatctgctaattatctaacatataccgggcgccacaacaacgaaacaaacatnctgaccacactcaaaaatataaaatgttcatcaaagacaaaagatagattctgcacaatatcaaaaaataaaaacatgtgctaacaaatatacccctgcgccactctacttctaaattctcct

SEQ ID NO: 13885 - DNA, 403 bp, Zea mays
  Clone ID: LIB3150-050-Q1-N1-E2
ttcatttgcgtacacggtctccctcttcctgtcagtagtaaagtgagagtgaggcagcgagtgggagacaaggggaaatggggaagggagcgcaagggagcgatgcggcggcggcgggcggcgaggtggaggagaacatggcggcgtggctggttgccaagaacaccctcaagatcatgcccttcaagctcccgcccgtcggcccttatgatgtccgcgtgcgcatgaaggcagtggggatttgcggcagcgatgtgcactacctaagggagatgcgcatcgcgcacttcgtggtgaaggagccgatggtgatcgggcacgagtgcgcgggcgtggtcgaggaggtgggcgccggcgtgacgcacctgtccgtgggcgaccgcgtggcgctggagccgggcgt

SEQ ID NO: 13886 - DNA, 405 bp, Zea mays
  unsure at all n locations
  Clone ID: LIB3150-050-Q1-N1-E3
cgactcacgagcacagcaaggctcgctcgctcgcacacaccaagcaagcaggccgcaggcgtctcacaggctctccgccgtcccccaacgcgctttccccggcgccatggccaggctggcgctggtgctcctcctgctgctggccgtggcggcgtccgcgtgggccggcgccggcgcgagccacctcgatctgggcttgggcttcctctcctccggggaccgccggcgggagtgccgcggcacggtggccgagtgcctggacgagtcagagggcctggacctgggggcggngcccgcgtccgtggagtcccaccgccgcgcgctctacggcggcggcgggtacatcagctacggcgcgctgcggcgggacaacgtgccctgctcccgccgcggcgccagctacta

SEQ ID NO: 13887 - DNA, 408 bp, Zea mays
  Clone ID: LIB3150-050-Q1-N1-E4
acattcttctgatgttgccaggacccaacgagggggtggcggcaaatctacaaaggggggaaggtagggcctaaccggcgcagcccctgcacgaagacgggtgggctcacaggattcaactgccagtgtgggaacttgtactgcgcgctccaccgctactgcgacaagcacgactgcaagttctactaccggactgctgacacggacgccattgccaaagctaatccggtggtgaatgcagacactctctacaagatctaaggggggtttcctacggctgttgtcaggaagattacaaaccgtgataactggatatgcgaaactgctaacttgcccgcagagcctttttgttccatgtttgctactacaatcttgttgttcggcattgcaacgcacaatacacacttg

SEQ ID NO: 13888 - DNA, 403 bp, Zea mays
  Clone ID: LIB3150-050-Q1-N1-F1
taagaacatctacgacgcatgcacgccgacgtaagcctggattcttttaaagtcaaccaatccttccgcgatttttgcgagcgaaaaagaaaccaaatggggccacccatagagaaagaggctaaatgggaggcgcgagtgtcgtcatggcttccattgtcgctatcacaagggccgatcctatacttcaatctatgcagaaattcatcttagatagcttcgctatacgtactgactgcggcctcaggcctgtggcaagctccaacggtctactcagatacaacaccggcgctacgctctgacaatactaggaggccgtgtcgcaagactgatatcaatacacgagtacaataggcgggacgagcggccgtaactactctgcgcgcactctgtactcagatat

SEQ ID NO: 13889 - DNA, 400 bp, Zea mays
  Clone ID: LIB3150-050-Q1-N1-G5
ggagaccaactagcaacatagaaagcacaatagtgtaccaacaatggcagccaaaatattttgcttccttatgctccttggtctttctgcaagtgttgctaccgcaaccattttcccacaatgctcacaagctcctatagcttcccttcttcccccatacctctcaccagcggtgtcttcaatgtgtgaaaacccaattgttcaaccctacaggatccaacaggcaatcgcaacaggcatcttaccattatcacccttgttcctccaacaaccgtcagccctattacagcagttacctttggtccatttggtggcacaaaacatcaaggcacaacaactacaacaacttgtgctagcaaaccttgctgcatactctcagcaacatcagtttcttccattc

SEQ ID NO: 13890 - DNA, 406 bp, Zea mays
  unsure at all n locations
  Clone ID: LIB3150-050-Q1-N1-G6
agggttttgctgctctccgaccccgagctccgaaggccgcagcatcaggcgcggcccccctcgcgtgtgaaccgagatggcgctgccgaatcaggggaccgttgattaccccagcttcaagctcgtcatcgtcggcgatggtggaactggtaaaactacatttgtgaagaggcatctcactggagagtttgagaagaaatatgaaccaaccattggtgtggaagttcatccgttggatttcaccactaactgtggtaagatcaggttctactgctgggataccgcanggcaagagaagtttggtggcctcaaggatggatactatatccatggccagtgtgcgatcatcatgtttgatgtaacctcaaggcttacttacaagaatgttcctacgtggcataaggac

SEQ ID NO: 13891 - DNA, 53 bp, Zea mays
  Clone ID: LIB3150-051-Q1-N1-A1
accttcgcctttttgaacttctggagagccccagaagaaggggattgtcttct

SEQ ID NO: 13892 - DNA, 260 bp, Zea mays
  Clone ID: LIB3150-051-Q1-N1-A2
acgacttggaccaacgcgtgggccgtgttcgtttgccttgatccatgggcgggaaaagatccaattcaatcaacttcaacgtccggggccaatcaaagtttccggcggcaaagcaggaaggcggaagcgaaaggaatgttgcacctttaagtaccgcggcgacctggtgtttcttcctggccggcgatgggctgcttcccgtccttcgactccccggcagatgagcagcttaaccccaaattcgtggcgccgggggtacg

SEQ ID NO: 13893 - DNA, 187 bp, Zea mays
  Clone ID: LIB3150-051-Q1-N1-A4
agccttcgaatcttcccaaccattccttaccaaaagccttcattcctaactcgctcgatggcccgcacgaagcaaacggcgaggaagtccaccggcggcaaggcgccgaggaagcagttggcaactaaggcggcccgcaagtctgcccctgcgaccggcgaagttaaaaagcccaaccgtttccgcc

SEQ ID NO: 13894 - DNA, 182 bp, Zea mays
  Clone ID: LIB3150-051-Q1-N1-B1
gttcgtcgtcaccgtttgccatgggtccaatggctcgtcttggaaacctgcacttcagtaggccatctatcgtggtttctagctatatccagagttttgtgctaagacaaatcagtcagtcgttttgtgaacctattatgatggagctttatttgctgctaatatcgacctacctattaagt

SEQ ID NO: 13895 - DNA, 201 bp, Zea mays
  Clone ID: LIB3150-051-Q1-N1-B12
tttcttccggtgatgttaacactaaccgacaccccagcgcagctttcattcctcgaggaggcgccccttcttgtaccatccctgccctcatattcttcttgtacactaaaacccccatctatctcccttccctctatgcctaacttgtacacttaaccgatcaaattgataactcattttctcatgatgacatcaaagtct

SEQ ID NO: 13896 - DNA, 380 bp, Zea mays
  unsure at all n locations
  Clone ID: LIB3150-051-Q1-N1-C2
ggagactccgtgcgaccgaagccagagccagcggaaccgaacggaagcgagacccccggcggctagcgagatggacggcggcgccggcgaggaggggaagcaggagcggcacctggtgctggcccacaagctcttccttctatcccacccctccgttgatgacctctccaaggtcgccctacgcgccgaagtcctcgacaccgtgaaatccgatgatatggcgacgctgtttgagtcgctggtcgccgcgggtgtgctggagggggacgccgcgctgctggccgagatgcgtgggaggattgacgaggagatccgcaggctagatgagaaaattgctgatgcggaggagaaactgngtgagagcgaagtccggaagcaca

SEQ ID NO: 13897 - DNA, 285 bp, Zea mays
  Clone ID: LIB3150-051-Q1-N1-C4
cttccggaggccttgaccttttgaaggcagccttagaaaaggctggctacactggaaaggtggcattggatggatgttgctgcttctgagttcttcggtgagaaagacaaaactaataatcttaatttcaaggaggagaacaccgatggctcaaacaaaatttcaggcaacagcctgaaaaacctgtacaagtcctttgtttctgagtcccctatcgagtcgatcgaaaatccatttgatcaggatgactggagcacttatgcaaaactcactgatgagattgga

SEQ ID NO: 13898 - DNA, 196 bp, Zea mays
  Clone ID: LIB3150-051-Q1-N1-C6
gcggcgtctccgaatgcccctggattctcggcggcggaacgatgccctccaagtaactgcgaagagcatagtgcatgaggaatgagcttgtagctagctcatatgtctgaataataagcacagcaagaagatgaatgcatttctcggatcgttcatccggaacaataattaaaggggatccggatttgttcttgtg

SEQ ID NO: 13899 - DNA, 60 bp, Zea mays
  Clone ID: LIB3150-051-Q1-N1-D1
cttccggccaaaacattgggaacacaaaaagggcgcgccttaaaggcctttttttttggg

SEQ ID NO: 13900 - DNA, 360 bp, Zea mays
  Clone ID: LIB3150-051-Q1-N1-D10
ctttttacaagaaccctgacaaccacccgtgcctcatgtaattcttccaaagctcagcccccaaggctatgctgtttttgaacttctccaccggaccttttgattctttcaagtctgcctactctgctgccgcggaggaattcaaggacaaggaaatcaagttccttattggtgacatcgaatccagccagggtgccttccagtactttggcctgaaagaggaccagacaccccttatcctcatccaggatggtgactccaagaagttcttgaaggttcacgttgaggctgaccagatcgtctcttggttgaaggagtactttgacggcaaattgactccgttcaggaagtctgagccta

SEQ ID NO: 13901 - DNA, 351 bp, Zea mays
  unsure at all n locations
  Clone ID: LIB3150-051-Q1-N1-D4
cttcacaaacgccggcgcaaactctcgcccgagcccgacagatcttcaattccccattccgcccaccgatcgaccttcacgccagtctcggtctcttccgaaggcgtcgcgcgcggttgtttgagaggagaggaggaagatgagggagtgcatctccgtccacatcgggcaggccggcatccaagtcggcaacgcgtgctgggaactttactgcctcgagcacggcatccagcctgatggccaagtgcctggagataagaccgcgggacatcacgatgatgccttcagcaccttcttcagccaagactggtgctgggaaagacgttccccgtgcaatcttncgtgatctag

SEQ ID NO: 13902 - DNA, 409 bp, Zea mays
  Clone ID: LIB3150-051-Q1-N1-E1
agccttccgggccatggccattgctaggaaggatgagatcaacactcattttactgcacccacgcaaagtggactgtttagcaagtactatgaaaggctcaaagagatccgggaatattattggcggaacccatattgccgcttgtcagtaccaccgatgactattaagagcctctaaaggaggaaccagttattgaattcactggccaggaaacttttggccgctacctttacttgcatgagctctataacgagttcatatattccaagttcggaacactgatggaatattcagcttatgttggcggtttctcccagacggacaagatctcacatattcataaagcttccacaaaatacagagaatacttggaacacatcttggaatatctgacatcatttctgtatc

SEQ ID NO: 13903 - DNA, 182 bp, Zea mays
  Clone ID: LIB3150-051-Q1-N1-E5
taatttttttttacaaaaaaaaaaacaatacggggcatttttttataaaaaaaggggcatataaaaaaaccgtcttccacccctttcaatttccatttctcctaccctatttcctttctatcatttgcccctccccccttaatttctctccctttccctttattcttcccaactttcccttt

SEQ ID NO: 13904 - DNA, 378 bp, Zea mays
  Clone ID: LIB3150-051-Q1-N1-F1
agccttcgggattcttaacggcgttggccttcttattcgcctggaacggcggacccaaaacctttgcctccgaaggggccttggctgtattaataccatctggtaagtttaaggggtgggcctgaccttccaacattcaaaaaccccagtcccaaaaatctttaaggggggtcaaaaattgtgtcccttaaattgccaaaacccccttgcccgaacctacctaaaggttggaaaagcaaggtgtggcctgacccaaaatgaagttagtgagatctccatggcaaaactccggcagaatatcccgaagttggttaaggatgggtttatcatcaagaagcctcataagatccactctagatcccgtgcaagaagggcaca

SEQ ID NO: 13905 - DNA, 408 bp, Zea mays
  Clone ID: LIB3150-051-Q1-N1-G3
ccgtcttttatctcgtttcaaatccatccatgcgcgtttcctccgtcccgcagcatctcaaccccatggccaagatcaagatcgggatcaatgggttcggcaggatcggaaggctggtggccagggtggccctgcagagtgacgatgtcgagctcgtcgccgtgaacgaccccttcatcagcaccgactacatgacctacatgttcaagtacgacactgtgcacggacagtggaagcaccatgaagtcaaggtgaaggactccaaaacccttctctttggtgagaaggaggttgctgtgtttggctgcaggaaccctgaggagatcccgtggggttcggttggtgctgaatatgttgttgagtctactggtgttttcactgaccaggagaaggctgcagctcatttga

SEQ ID NO: 13906 - DNA, 402 bp, Zea mays
  Clone ID: LIB3150-051-Q1-N1-G7
cgctttgttgctgtggacggagagcaagggggtgttctaagacttccgctggatccgcatggtcaacaacacccgcctcaacttcgacgccttccacggcgacaaggaccacggcggcgtgcacgacggcaccggcgtcgtgctctgggagtggtgcaagggcgagaaccagagctggaagatcctgccgtggggtcccgaggccaactcctccgcggcccacgcgggaggcccgcacgccgtgcgcgtcttctgcaaggccggcggcgaggactacagcctcacggtgcgcaacggcacgtcgtgcctggcgcccaccaaccctcggtacgagtaccatcactgggtcaaggacatgcgccacagcaccctggtgcggtacgaggagggctacccggcctt

SEQ ID NO: 13907 - DNA, 340 bp, Zea mays
  Clone ID: LIB3150-051-Q1-N1-H1
cttaacctggattcctttaaatccaaccaacccttccgtttgaaattaaacaaccttttttccattctagggattctcatcgccgatgggtgggttgccctcctgctcaattcccatgtagggttatgcagctgctacaaccgcatttttagttttggtgacaataccatggacactggaaatttcattcacttgattgggaaggccccatttaagtacaaggaagccccctttggcaagacattttttaaacatgcaactggccgaatttttgaatggcgggtcctaattgatttctatgcggaagccctaaaactgccaatgataccacccattttac

SEQ ID NO: 13908 - DNA, 338 bp, Zea mays
  Clone ID: LIB3150-051-Q1-N1-H12
ggttcacggtgctcaacctggggctcaacgacgaagtggccgccgggctggcggccaagatcggtgaccgcttcgcctacgactccttccgccgcttcctcgacatgttcggcaacgtcgtgatggacatcccccacgcgctgttcgaagagaagcttgaagccatgaagaaagccaagggggtgaagaacgacaccgacctcaccgccaccggcctcaaagagctggtgagccagtacaaggacgtctacgtggaggctaatggagagccattcccctcagaccccaagaggcagctggagttggcagtgctggccgtgttcgactcctgggagagc

SEQ ID NO: 13909 - DNA, 337 bp, Zea mays
  Clone ID: LIB3150-051-Q1-N1-H2
cttaaaatccacccaacccttccattattcctgaaaaccaacattttcttttaacggtccaattcctgccaaaaggagggaccggttgcctttcctgattttccttaggcggctttgctatttggtgaattggggaacctcctaatccaggcttgttgcctacaattaattccttggttgacgttttgccaaaattggttggtattgggcacgataatttctggaaataaactttaaacagcccttagtattcttttaatattaaaaaaagccagccccttctcgtcagggttgaaatggttgcagttttgatgcttttgtagtgttttaatagctc

SEQ ID NO: 13910 - DNA, 166 bp, Zea mays
  Clone ID: LIB3150-051-Q1-N1-H3
agccttcggacaacttctccccttccttttaagggaaagaaggcaccaaacccccaaatgaggcgtgctaccgttaccaaggaaatggaccggccggccccggtatggagctccaacacttcaagggtcaacctatttccgtggcggaaacccaagggcccagccc

SEQ ID NO: 13911 - DNA, 148 bp, Zea mays
  Clone ID: LIB3150-052-Q1-N1-A4
gtgaattcgttgatgttctcgtcgggtgaacaaaggccagtacctagcttgcctgcttcataaatcgtgccggattgtaatgggcctcttagatttggcgcccctgttttggaatatagttgtatccgtgccttccctgcttgcttaa

SEQ ID NO: 13912 - DNA, 408 bp, Zea mays
  Clone ID: LIB3150-052-Q1-N1-A5
tagagccgccgccgccgccgtttggggcacggaaccttacccttggtaagcggcggtttcaacctaatccagccatgacgttcaaccggaggattggcggacgcaccaggcacggccgcggccacgtcaagtacatccgttgttccaactgcgccaagtgctgtcccaaggataaggctatcaagcggttcttggtgaggaactttgttgaccaggctgccgtgagagatgtgcaggaggcctgtgtacatgatggatatgttctacccaaatggtatgcaaaggttcatcactgtgtctaatgcgcaatccatgcgcacattgtccgtgtccgctctcgtgagaacaggaggaaccgtgagcccccgcagcgcttcagacgccgggatgatggcccaaggcctgtca

SEQ ID NO: 13913 - DNA, 286 bp, Zea mays
  Clone ID: LIB3150-052-Q1-N1-A6
ggacacttgttagcctatatacaaagccccctggggggttttgtgtgtaaaaccgtggaaacgttacttcgcgcattgtccgccgccaccagcgtttccttggcggtcgccaacgcggtttggccggaataaatatccgttggccggccttccaacaagcacttatccatcttcgagacgctgttcggaaggaacatgctgcgggcttgcaaaatcgtcaacaagcgcggcttcaggcgcgtcaccggcccgcccagtggccgttcggtctttctggtgctggggg

SEQ ID NO: 13914 - DNA, 416 bp, Zea mays
  Clone ID: LIB3150-052-Q1-N1-B2
tttaatttccccagcaatccctagaaaaagcgggcgatcctcattcgctcgagggcccggacgaagcaaacgcggaggagttcctccggcggcatggtgccgaggaagcatttgccaactaaggcggcccgcatgtctgcccctgcgaccggcggagttaaaaagccccaccgttttagcctcgataccgtcgcgctccgggagatcctgaggtaccaaaagagcccggagctgctgatccgcatgctgccgatccagcgcctgttgcgggagatcgcgcatgacttcaagaccgacctacgctttcagagctccgctgtctccgcgctgcacgaggcggctgaagcctacactggcggtctatacgaggacaccaacctgtgcgtcattcacgccaagcgcgttaccatcatgcc

SEQ ID NO: 13915 - DNA, 420 bp, Zea mays
  Clone ID: LIB3150-052-Q1-N1-B6
gcggttaattgaacggcggcgggaaggacgggaggcaccacccgcacctggtactggcgcacaagctgttcctcctgtcgcactccgacgtcaacaacctcgccaaggtcgacctacgccctgacgtgttcgcggcagtcaaatccgatgacatggcagctctgtacaagtcgttggcggcggacggcgtactggagacggacgcggcgctgctggccgagatgcgcgccaggatcgacgaggagatccggaagctcgacgagaagattgctgatgcagaggagaacttgggtgagagtgaagtgcgtgaggcccatctcgccaaatccttatatttcataagggttggggagaaggagaaagcactggagcagcttatagttactgaaagaaaaactgtagctgttgggcaaaagatgg

SEQ ID NO: 13916 - DNA, 430 bp, Zea mays
  unsure at all n locations
  Clone ID: LIB3150-052-Q1-N1-C8
cggccgctctcttttttttttttttcaccgnctctttttttcgggggtttttttatttattgtggggcggggcaggcaacaatcactttttcagctaccattctattcaaaaccagtgtaacagggaaaacacattctccacggactacattacatatagcgctggagagctcacaacagctacacatttttgatgaccataaccataagaatcgggggcggggaaaagaaaagaaaaaaggaaaactagaaagaacaaaccgcgctagaaacaatcgatgcctaaaaaaaactcactgccacacaagagcatttaattctgacctaagggggggtggaccatatcatacaggtgcaggtgcaggtgcaggacaggacaattaaactcgtgggaagcgagaaggtcctctacgtcgcaggaactttggga

SEQ ID NO: 13917 - DNA, 426 bp, Zea mays
  Clone ID: LIB3150-052-Q1-N1-E10
tcctttcgtccgtttatatctgcaccacccctccggcgacgccagcttattaaaatggtggggcgagacgttccatcaataccaggtggtgggtcgcgcgctgccgaccccagaccgatgagcaccccaagatctaccgcatgaagctctgggccactaaccaggttcgagccaagtcgaagttctggtacttcctgagaaagctgaataaggtaaagaagaccaatggccagatgctccccattaacgagatctttaaacgcaacccaaccaccattaagaactaccgcatctggctgtcgtaccaaagcaagacgctgtaccacaacatgtacaaggaataccgtgacacgaccctgaacggcgccgtggagcagatgtacaacgagattgcctatcaccaacgcttgaggaccacctgcattc

SEQ ID NO: 13918 - DNA, 419 bp, Zea mays
  Clone ID: LIB3150-052-Q1-N1-F1
cttttggattatgttttccggtatacaactgggccaaaagtaatcggtttcagttcagtttactggattggagttcactggtacttgcagcacatggtcctcacctggaagtgttcaaactggccaatgtcatttgtggtcacatactcacatgcttgattattcagttctgagttctgatctttggctgtcccgctatagtaatctttaatgttctttaccagtggatggtcaaagcagttttttgatttgcatgcaatatttgagctgtggcataagaattgactgttaactcttgtagaggtgggacaatttcactggttttgcagaatgttcataagctgtttgatttcatatatcaccctactgcatgtgaacttcctattgatagaatttttggttgctcactattatatagt

SEQ ID NO: 13919 - DNA, 351 bp, Zea mays
  Clone ID: LIB3150-052-Q1-N1-G11
ttagttaactagaaaaggctcctccgggccggatcgcccctcatctccctcgaccccgacatccccgacccgatggcgcccaaggcggagaagaagccagcggagaagaagccggcggccgaggagaaggcggagaagactaccgcagggaagaagcccaaggccgagaagcggctgcccgcgtccaagtcctacggcaaggagggcggcgagaagaacgggaagaagaacgccaagaagagcgtggagacctacaagatctacatcttcaaggtgctgaagcaggtgcacccctacatcggcatatcctccaaggccatgttcatcatgaacttcttcaataacgacatc

SEQ ID NO: 13920 - DNA, 211 bp, Zea mays
  Clone ID: LIB3150-052-Q1-N1-H1
cggagtcatgcttcttgagctaattactgggcggcgaccaattgacacaacccaattggcactgcttgttataagcacatatgtacttccatttgcatgttgtataatactaataccaattgcaaaattatagttattttttctacccttgttagttaaaaaaaaaaaaaaaaaaaaaaaaaaaaaaaaaaaaaaaaaaaaaaataaaagg

SEQ ID NO: 13921 - DNA, 236 bp, Zea mays
  Clone ID: LIB3150-052-Q1-N1-H10
ttttgtcttctcctccccctccggggggggggcgggttcgtgaggttcggcggggttcagtttcgtgggtgagcggatcgagatggcggcgtcggatgttgagtaccgctgcttcgtcggcggcctcgcctgggccacggacgaccactccctacacaacgccttcagcacctacggcgaggtcctagagtccaagatcataatatatcgggagactcactaggccctttgcattc

SEQ ID NO: 13922 - DNA, 216 bp, Zea mays
  Clone ID: LIB3150-053-Q1-N1-A12
ttgcctgtgcggcgtcgccgtcgccggatggcgaggcgatctcccggttccaggagtacctccgcatctacacagcgcagccggcgccagattacgccgcggccgtggcctctctcctgaaacaagccgccgaggctggactctaagcgcgcacgcttgagctcgtcgccgggaagcccctgcttctgctgcggtggcccggtcggcgggcgtcgc

SEQ ID NO: 13923 - DNA, 242 bp, Zea mays
  Clone ID: LIB3150-053-Q1-N1-A5
ttagtcctcggccattgcattgcctgagcggtcagcaatggaattgccaagaccaatgggcgtgcttcttctcatgttcttcgtcttgtgcagagtgggggacgcggcgacattcatgttcgtgaaccggtgcacggacacggtgtggccgggcgtcctgtccaacgccggcagcccaaggctggagcccacagggttcgagcttcctccggacgcggcacgcgctgtgccagctcctacag

SEQ ID NO: 13924 - DNA, 348 bp, Zea mays
  Clone ID: LIB3150-053-Q1-N1-A9
tcgtccagatcggctagcggggcagggctcgctgctgcttctccctccctggtactcctccagtctcggcctcccactccccagccgatttctctgcgcgcgatactccctccagtcctacctgctcgcgtcatgaattacctgccatggacgcacgccgagctcctaccgcgggtctatggtgcccaaccgactaactcatctcccttttctctgatggcgcgcccaagcactgctactgcaccgtgccgcgttccagctcagactaccctgctcctacacccggttccagctcgctggagcttctgcgcacgtgggatcccaactcgcggagctttctactgctct

SEQ ID NO: 13925 - DNA, 255 bp, Zea mays
  Clone ID: LIB3150-053-Q1-N1-H10
tctctcaaataccccttcaaaacactttttgtttcattattaacaaatttgcttcccaagtcacaaaaaaaatttgttctttcgtcaacacaaaccatttttgtatttaacccgaaagcggccttggttaaaatcattttttctatccttgttctaaagaagaaacaacatttttctgtacaaattcaccttcaaggaattcaccacattgtccctttttttcaaaaaaaaacttccctctggaattaaccaacc

SEQ ID NO: 13926 - DNA, 207 bp, Zea mays
  unsure at all n locations
  Clone ID: LIB3150-054-Q1-N1-C6
tctggaggacccancaaatgagcggaaggaagatatgtatatgatgtcgattgctccagaaaatgcgccctcgaaacctgagtatttggagattggtatcattgctggtgttcctgtttcaatcaatggccgagacctctcaccagcatccctcctcgcggagctcaatgaaatctgtggaaagcatgggattgggcgtatcgacat

SEQ ID NO: 13927 - DNA, 292 bp, Zea mays
  unsure at all n locations
  Clone ID: LIB3150-054-Q1-N1-E8
tcgccctaagcaggngagttgatttatccgctgcggccatgagtaagttgcagtctgagtctgtcaaggatgccatctcccagattgttggggatgccaaggagaagaataggaagttcactgagactgtggaacttcagattggtctgaagaattatgatccacagaaggacaagcgtttcagtggctctgttaagttgccccatatccctcgtcccaagatgaaggtgtgcatgcttggtgatgcccagcatgttgaggaggccgagaagatgggacttgactacatgga

SEQ ID NO: 13928 - DNA, 171 bp, Zea mays
  Clone ID: LIB3150-054-Q1-N1-F3
ggtgaatgtgccggaccccaaatcgttatgacctaaataaccagtcaagtcgcaagtatgaatggacttttgaggaccattgtgccctgttgaactcatgtattaccttgtgaagtccgttgtgtctggtttctacctgaccgtttcgttatctgatgctgtttctttaat

SEQ ID NO: 13929 - DNA, 401 bp, Zea mays
  Clone ID: LIB3150-054-Q1-N1-H1
cggccgcccttttttttttttttttttttttttttttttttttttgttttttgggttttttttttttttggcaggcaacaatcactttttcagctaccattttattcaaaaccagtgtaacagggaaaacacattctccacggactacattacatatagcgctagagagctcacaacagctacacattattgatgaccataaccataaaaatcggtggcggggaaaagaaaagaaaaaaggaaaacttgaaagaacaaaccgcgctagaaacgatcgatgcctaaagaagactcagtgccacacaagagcatttaattctgacctaagggtgggtggaccatatcatacaagtgcaggtgcaggtgcaggacaagacagtcaaactcgtgggaagcgagac

SEQ ID NO: 13930 - DNA, 181 bp, Zea mays
  Clone ID: LIB3150-054-Q1-N1-H4
cgaagattttggttgcctgttgcaattgcgtgtagctagcattaggtggtgtttgatttgatttgcaaaggatgtgcggtaagcacgatatcggagttccgtttgcaagggacgattgactgtcctgtctgtagcattttgtagttactacgcaaatttataaataaagttatgattagag

SEQ ID NO: 13931 - DNA, 188 bp, Zea mays
  Clone ID: LIB3150-054-Q1-N1-H8
tctctaagattttggttgcctgttgcaattgcagttaactgggcataatgtggtgtttgattagattttcaaaagatttgcggtaagcacgatatcggagttacgattgcaagggacgattgactgtcctgtctgtagcattttgtagttactacgcaaatttataaataaagttatgattatagaat

SEQ ID NO: 13932 - DNA, 308 bp, Zea mays
  Clone ID: LIB3150-055-Q1-N1-A1
cggccgccctttctttttttttttttttttttttttttttttttttttttttttttttttttttttttttttttttttttttttttttttttttttttttttttttttttttttttttttttttttttttttttaaaccaaaaaaaccttttttaaatgggaaaaaggggacaaaaaaaaccttccaaaatgccccggggggcgttggccaaggattttaaaaaatttcacccccaaagggcttttttgcccagggaggagttttgactataaaaaaaaaaaaaaaagaggggcggagaaattggggg

SEQ ID NO: 13933 - DNA, 376 bp, Zea mays
  Clone ID: LIB3150-055-Q1-N1-A10
cggccgccctttttttttttttttaaagcgaaacgagcatttttacccaattcgtacgtatccccgacaaaaatctcgggatacaacccggatcatcaccgcgctaaggcagcaagaacgcacaccggctctccctacctccgcagccgaccgaccagaccgcgtcatcgccgtccagaggcgaggcgtcttcgtcttccgcctgcaggtcctccgcgctcagcagacgatcgaagccgcgcgaaacctacggccagcaccgcaacgcatcacaccctgcggttcagccacgccacgatgtcgtccatcaccctgtccttctcgggctcgatcaggaggtcgtgcagcagcccgtggtagagcctgagggacttgt

SEQ ID NO: 13934 - DNA, 342 bp, Zea mays
  Clone ID: LIB3150-055-Q1-N1-A11
cggccgcccttttttttttttttttttttttttttttttttttaggggggccttcagggagggggtatatatatatatatagcatcaaaattatgtaatgaagagtagcactgattattgttacatgacgaaggttgagcatcatccatgggggctagattatagacagacaccctgattttacatgacgaatcgcaagaagcgcatgcattggatatccttaaccggaaagggcgctggtgttgtatacgaggagggcgccgccgccgaggatcccagcgagggtgacggcccaaatcagaagcccagtggttccaccgacgtaaacgtcgccggggggag

SEQ ID NO: 13935 - DNA, 345 bp, Zea mays
  Clone ID: LIB3150-055-Q1-N1-A12
cggccgccctttttttttttttttcgggcacacatgcatgcatggatatatatgcttcacagttgatacatttttttttgggaagcgcttcaactgttcagcaacgtgcgcggccggccaggcctcatgtatctataattctatatagagaggagaggatgcatatattcaacaacaacaataataatactgatgaagcttattgctggttatttcatccaattattgcatgcaatgatacacatgcatgggaaccaaacatccattccaaaagctaccccaaggcaaccctgccaaggcggacggcgttgacgtattccttggggctgtgcaacccgatgccgg

SEQ ID NO: 13936 - DNA, 193 bp, Zea mays
  Clone ID: LIB3150-055-Q1-N1-A2
cggccgcccttttttttttttttttttttttttttttttttttttggtttttttttttttttttttttttggggttttttttttttttttttaccccgcaaaataatccaaatgggataggcgaatttatcaataccctaaggtttttaacagcaaaacagttcaggcgccccaaaatttgactaaagcttat

SEQ ID NO: 13937 - DNA, 270 bp, Zea mays
  Clone ID: LIB3150-055-Q1-N1-A3
cggccgcttttttttttttttttttttttttttttttttttttttttttttttttttttttttttttttttttttttttttttttttttttttttttttttttttttttttttttttttttttttttttttttttatttttatgttttttttttttttttattaacccttttttttttttttttttttcgaccaaactttttttcggaataacaaattggcacaaaaaaaaaattatcataactggcgggcaattaaaaaaattttcttt

SEQ ID NO: 13938 - DNA, 287 bp, Zea mays
  Clone ID: LIB3150-055-Q1-N1-A4
cggccgccctttttttttttttttttttgccatgaagaacccaaggcaccctatcgaccggactgacactacggaaatccaaatgcatttccacagtggcataatcagcttgggcgcgaatttatacagatcttttttatgatgcaaccaacaaacaagaatctatcgagaatgagcgctcaatgtacagctctgacgttgaggagagaaacactacgtgggtacaacgtcaccaactgggggagatgaatcatcatgcagctcggcgttctctgctggtgcttggc

SEQ ID NO: 13939 - DNA, 358 bp, Zea mays
  Clone ID: LIB3150-055-Q1-N1-A5
cggccgcccttttttttttttttttcagtgaaacagcagctgagttcgagatatgaggagatggcaagcataaaccccaattcaaatccgttcccaacattgtcaccaacccaacgcgaagataaattattcactgcatgcaatacgccaagcacatgcacaagcccacatattacagaaccaaatgaggtgcaaacttaagtgcccaatgaccaaaatagcattatgacaaacttagaagccctgttcgatcaggtaatcgccgagcctctccaccaccatattgcattgccctggagtcattggctcatcatagataccggtaatcaaggacatgccagttttcttgatagtaatg

SEQ ID NO: 13940 - DNA, 359 bp, Zea mays
  Clone ID: LIB3150-055-Q1-N1-A6
cggccgccctttttttttttttttttttttttttttttttttgtttttttttttttttttttttttttttttttttttttttttttttttttttttttttttttttttttttgggggaaaattccctcccccgggggggggaaaaaccaacttttttccttttttttttaaagggggcagtttgggtttaaaaaaatgaaaaaacacccctttggggggtttaaaatcggggggaaaaaacattttggccccactaatggggggtttttttttggaaccttcccctcccctttttggggggaaaaaaaaaaagggggggggaccaaatttcccataataacatttttccaatttttttt

SEQ ID NO: 13941 - DNA, 374 bp, Zea mays
  Clone ID: LIB3150-055-Q1-N1-A7
cggccgccctttttttttttttttctaaacaaaccatttttatttgcatgtgcacatcataaatccataatgttacatataaaaacaacagaccaagtctgcccaaacaattcgagcattgtgtttaaaataacgtgaaaggttagttagaggtgccttggtcactccttattgcaatttagtgatcttgctacgcagcaacacagggcttgagcagagcaacagcttactttaattttgacatcgcagtctgaagtgtagttagggatgcagcatatgaaatacgaatgcacttgtcatccccaaatgcgttaccagggacaagggcaacctgtgctttctctaataggaagatgcaaagggactcggaattc

SEQ ID NO: 13942 - DNA, 193 bp, Zea mays
  Clone ID: LIB3150-055-Q1-N1-A8
cggccgccctttttttttttttttactagtaaatgtccatcgcatttcaattagctgacaaacgacccaaacaatacaatagcttctgcttaatattgcagaacactggagtagcgagttcaccacgagagcagcaagacacaaacgagaagaaaatagcggcagagcacagggctcgcaatcatatacggcc

SEQ ID NO: 13943 - DNA, 423 bp, Zea mays
  Clone ID: LIB3150-055-Q1-N1-A9
cggccgccctttttttttttttttccgaattgctttaattatccgagcccttttattttctctatatattttacacacagagtgtacgtactagcacataatagcatctcataccaaacgcattgagccattgacgcgttgacttcgcaccgccaccaatttgcatcaccatcatcagcccccgtacttagccttggagtcctgccacagctgctgcacggtcttgcccaggatctgggcgaagaagtcgtcggtgtagccgtccttcatcttggcgttgagcagcgcgacgaagcccggcttgagcgagtcgcagtagtccaggaacctcgccgtgacgtcgtacccctggtcccaccggtccccctgccccggctgcacccagtggcccggcgcgtaccccgccttcagccggacgtagtc

SEQ ID NO: 13944 - DNA, 341 bp, Zea mays
  unsure at all n locations
  Clone ID: LIB3150-055-Q1-N1-B1
cggncgccctttctttttttttttaatgttgcaattgcaagcgttggttgcccgtgccactaacctgtattcacatgcggaggaaaagtgttacttacaacttaaatcacaagggcactaagaaagcatagaaacaaggtacagttatcagctgtgtcacaaagaaccaattcaacagtacatcttcatcccaccaaacaacatgacagcctaaccccccccccccaaaaaaaacaccaacacaatgtgcaggggaaggaaaaacaatggcctgcagctaattcccagcaggatcttcggtggccatgcgtctccttagcttggcgcgcgtcacacggatc

SEQ ID NO: 13945 - DNA, 399 bp, Zea mays
  Clone ID: LIB3150-055-Q1-N1-B10
cggccgcccttttttttttttttttttttttttttttttttttttggtttttttttttttttttttttttttttttttataatataatttaatttttaattttttattatattttttttatattttatttttttttttgaagaaaaaaaaaaaaaaatattttaggttcaaaaaaaagccggaaaaagtaaaaaaaaaatttttgtttaaaaaaaaaaaaaatttttaaaatccaaccgcacagcttggtgctaattgtaaaaaacggagggaaaaaaaaaaaatttttttttttttgcctatagttgccccccaagaaaaacagaaagccgcgaaacatttttatttttttttgggacattttttttaaattatgggaagaaagagaactttttttcc

SEQ ID NO: 13946 - DNA, 314 bp, Zea mays
  Clone ID: LIB3150-055-Q1-N1-B11
cggccgccctttttttttttttttttaacacaaacatcaaagacacggacattatccagcagaataatccagatgtgatagtcgaatttatcaatacactaagttatataacagcaaaacagttcaggcgctccaaaatttgactagagcttataaaagaaagtgcagtactggactagaaagctacagctttatttcaatacttcacttctttgctttcttcggtgccccagtagctggagctgtggatgagacaggtggtgttatttctcgtggaccctgggccaaacctttcttccttctagcgatctttc

SEQ ID NO: 13947 - DNA, 363 bp, Zea mays
  Clone ID: LIB3150-055-Q1-N1-B2
cggccgccctttttttttttttttttttttttttttttttttttttttttttttttggaacacaacaatttttccttgccgattgaaccctggtacgggaagtaatttacatcatgggacaaactggaaccagggcgcgctcacgtgcatccgaacacctaaatttcggcagcggtggccggtggcggtgggcggtggcccctccgaccccctcatttgccgggcacaaagttggtggcgtaagcccatgcgttttttttaacggggtcggcaagggggccggaaaggtttttgagcggccctttgccgggaaaattggcctgaccaaaaaccccaacctgggaaacattgggaggggggcgg

SEQ ID NO: 13948 - DNA, 319 bp, Zea mays
  Clone ID: LIB3150-055-Q1-N1-B3
ttatagcgggcggcccccctttttttttttttttttctaaatattttttttggggaaaattaattacccccatgcaggtgccctcaaggaaaaaactggcccgggaaattttttggataaccccccaaaatcaaggtggtgaaaaccgttcccaatttttttagaaaaacggcaggcggggggggggcattcaacaaggggatgagcccccaaaacccaaccaatcccggggattttttaccgggaaatcccccaacacacctttgagaggggggggtttatttgcccccccgggggaaagaaaaaaatttttaaaagg

SEQ ID NO: 13949 - DNA, 256 bp, Zea mays
  Clone ID: LIB3150-055-Q1-N1-B4
cggccgcccttttttttttttttttgaacattactccgaacaatacacataaaaggatcgagtctccgttacacgaaatcctggaggacgaatgcagctatgcacgcaggcccatggatcttttattttatgagctaaaatggcttcgagccgagccaaggttaccatggagactctacttgttctgcagcaaggacaccgctgccttatcagtgaaccaggtgaattctccatcttgtagcacagccatctcaac

SEQ ID NO: 13950 - DNA, 313 bp, Zea mays
  Clone ID: LIB3150-055-Q1-N1-B5
cggccgccctttttttttttttttgcagatcaacactttattagtacaagctagcagcaccgtgcagcagccataatttaagtaggagtgtacaagatcacatggcaaacaaaccatccctgactgttatttcttttttctttttgattataatagcacgatacatgcatgcatgacaccagtgaaacactacatcagcatcagctggtatgaatcctccatccagcaagcatacttgtgttgcacctgtgctgcgacaccagatctcagtcgctgtcgctgctgctgctactgtggccgccgtcgtggtcgt

SEQ ID NO: 13951 - DNA, 67 bp, Zea mays
  Clone ID: LIB3150-055-Q1-N1-B6
cggccgccctttttttttttttttttttttttttttttttttttttttttcggacccggggggcgag

SEQ ID NO: 13952 - DNA, 371 bp, Zea mays
  unsure at all n locations
  Clone ID: LIB3150-055-Q1-N1-B7
cggccgccctttttttttttttttaccaaaatgttctttcaagcaaaagtaactttcctagttacaggtcctccgagttaagagtctgacagagaaacaggaaataaataaccaaccaaaattactggtccacttttctaacagatgctcacttcgttgcagttcatggtgtggtgagtaaatgtaaaatttaaagctttcgctcagctcaaactaccaagagttcctccaggcaaaaaccaccagctacaacttcaactgcgccgaactataagtagatcaacgtctcttcttgcttccttttgagctgctcttcgacgggctcgcancgaggtagataaacaatccaacaaatgagacaacagacacaa

SEQ ID NO: 13953 - DNA, 354 bp, Zea mays
  unsure at all n locations
  Clone ID: LIB3150-055-Q1-N1-B8
cggccgcccttttttttttttttttttttttttttttttttttttgttttttttttttttttttttttttttttttttttttttttttttttttttttttttttttttttttttttttttttttttttttttttttttttttttttttttttttttttttttaaaaaaaaaggggtttttaaaaaatttaaagggggnataaaagtttttttttttttattatttttagaaggggggtaattttttgagagaattaatttttttttggattaaaaaaaaaaggggtgttggtgtttttttgggaattttttttggatttttttttttaagaataaaaaaatttttttttttggg

SEQ ID NO: 13954 - DNA, 356 bp, Zea mays
  unsure at all n locations
  Clone ID: LIB3150-055-Q1-N1-B9
cggccgccctttntttttttttttttttttttttttttttttgcaggcagcatttgatcactaaccattcattgtctgataatacaaccgaattgcaaatagttcatgacatatgctccataattgacttctaacattaaaagtgccaagaacacaaatagcaaaactttgaaaatgcaaccagagacaggcacgcttgttgtcttgattgggaatgatcggacaggggcaagatcccagcaccccgacaacttgttaacgggtaccgccggaggaagagggtctggttgcccttccagggggctttccttgagggcctgttcttggggtggtgtggcccttgccacgcaggccac

SEQ ID NO: 13955 - DNA, 409 bp, Zea mays
  Clone ID: LIB3150-055-Q1-N1-C1
cagagccagccccctctttttttttttttttttcttcttttaatactttcgattccttttttcttttataattttccctctccctttaaataatttacttaaaatttattttttttttttttcccaaacccccggggccccccccaaaaaccccccccccaccccgaaagcgccccaaattcccctaaagaaaaaccaacaaaaacccggccaaaaaccagacaaaagggccccccggaaaaaaaagcttcccccaacaaataaccccaaacaacctccccgaaaaaaaaaaggccaaaccccggggcccccaaagagggggcaaaccaacaaaaaatgggggggccccaacgcccccttcccaaagggaaaaccccggcccccccctccatataaaaacccccccccc

SEQ ID NO: 13956 - DNA, 393 bp, Zea mays
  Clone ID: LIB3150-055-Q1-N1-C10
cggccgccctttttttttttttttggccatgggaactgatcagacacttcagttaccctacgtggcattctatcaccaggaaaaaaccctaccttgtaatcttcagagatcaggttaccagagaccacaagtacctaacacacagggatacatatcatctacatttcaagatttgctcccgatgtggacacacaagttgcgatccattagcatctcaagccgccttgcataatgagccttgttaaggtttattttttttttacttcccggcccaaaagcctgtttgatggcatgtcctcaatcctctgaatatcttaaattaacagctccctttctagctgacgccgtgtagacttcatgaccgtgttgaagtccatgtaagtagcatgcatg

SEQ ID NO: 13957 - DNA, 278 bp, Zea mays
  Clone ID: LIB3150-055-Q1-N1-C11
cggccgcccttttttttttttttttttttttttttttttttaaaaggtcctccaatagattcttcattcaaaaatagcatgatggtctacaggtctacaaaaaaaaatatagctcaggaatgctaaaaaaacaatgggggaaaagggagggagaaaaatagcggagtggtcgagttttggagtaatctaaaacacaagtaatggccggtggtggagcactgaagctttggacgtaggccgcaatgccccacccattcattggtctgatctgaaaaatg

SEQ ID NO: 13958 - DNA, 193 bp, Zea mays
  Clone ID: LIB3150-055-Q1-N1-C12
cggccgccctttttttttttttttttttttttttttttttttgtgggtttttttttttttttttttttttttttttttttttttttttaaaaaaaaaaaattcagaaatagatttttgtttttggaaagggggggattggaactcgaaacctttttttggggcatacccttctttacccccgggcgcgggggt

SEQ ID NO: 13959 - DNA, 277 bp, Zea mays
  Clone ID: LIB3150-055-Q1-N1-C2
cggccgcccttttttttttttttttttttttttttttttttttttgtttttttttttttttggaaaacaacccttattcatcgaatgctttcacagaaaatttatccatacatgtttgctcattggggtagacccagctgaccacctaaagctagctgtttacagattgactcaccatgtggcaacgtaggaacccatgttttttagacgactttcttcgtactaatagcctggcttggctggttaccaaacgacaaccacgagatcgcacggtttt

SEQ ID NO: 13960 - DNA, 314 bp, Zea mays
  Clone ID: LIB3150-055-Q1-N1-C3
cagagccagcccttttttttttttttttttttttttttttttttttttttttttttttttttttttttttttttttttttttttttttttttttttttttttttttttttttttttttttttttttttttggaaaaaaaataaaaaaaaaaaataaaaaaaaaaaaaaaaaaaaaaaaaaaaaaaaaaaaaaaaaattctttttttataaaaaaaaatgtttttaatatgagaaaaaaaaaaataagttttttaaaaaaaaaaaaaattataattttggagagggggttttaaaaaaaaattagggttttttaa

SEQ ID NO: 13961 - DNA, 277 bp, Zea mays
  unsure at all n locations
  Clone ID: LIB3150-055-Q1-N1-C4
cagccgcccttttttttttttttttttttttttttttttttttttggttttttttttttttttttttttttttttttttttttttttttttttcatttaaaaacaaaaaaagggagaaaatggggggggggggggggnggantataggggggggggaaggggggaattattaaaaaaggggggaaaaaaggaaaaaaatttgttgggggaaaaaaaaaagataaaattgaatgggggggggaaaaagggttaaaaatatttaaaaattagntttaat

SEQ ID NO: 13962 - DNA, 382 bp, Zea mays
  Clone ID: LIB3150-055-Q1-N1-C5
cggccgccctttttttttttttttgacgacaaaaaaaacgaccaattcatggtaacaattatagtatgcttacaacaattataagataataattgacagttgtatggtctcaacatcaaaaggccaaaacaacaatattaaaacacagtctaaccattgggggacgtctaacaaaaatacacgcacaagcagcacccaacaagacggcaactaagcatacggaatgccggaatggtacgcctaccttgtatgaacaaagaatcctattgtgcttcctcgggtgctggctgaccttcagtagtagcttcttcggacggcttggatgggtcctcattgattgcatcattgatgcccaaaacttcatccatcaactcgtcttccg

SEQ ID NO: 13963 - DNA, 358 bp, Zea mays
  unsure at all n locations
  Clone ID: LIB3150-055-Q1-N1-C6
cggccgcccttttttttttttttttttttttttttttttttggggggtttttttttttttaaaataatttttttttttttttttttttttttttttatttttttttttttttttttttnnggggacggggggggccccccggaaaatccgaaccgggcccggggggggtaccaattttccctaaagggaggccttttaaaagggggggtaattagggcaaaaagcgtgcccgggggaaaaaaggatcccccccaaaattcccccaaaaaaacaaggggaaaaaaaaaaaggtaaaaccgggggggccaaaagaggggaccaaccaaaaatattaggggtgggccaaaaggcccctttt

SEQ ID NO: 13964 - DNA, 276 bp, Zea mays
  Clone ID: LIB3150-055-Q1-N1-C7
cggccgcccttttttttttttttttttttttttttttttttttttgttttttttttttttttttttttttttttttttttttttttttttcccacccccccctgggggggaacggggtttaaattttaaaaaaaaaaaaacccttacaaaatttaaattgggcctagggaaaaaacaaggttgggacaaacaattgggggggatgcaacaaccaaataaatgtcttctggggagaaagaaacattaaaattttcggaatacctttggaggcctgaa

SEQ ID NO: 13965 - DNA, 341 bp, Zea mays
  Clone ID: LIB3150-055-Q1-N1-C8
cggccgccctttttttttttttttttttttttttttttttttgggggttttttttttttttttttttttttttttttttttttttttttttttttttttttttttttttttttttggggacccggggggccacccaaaaaaccggaaccaggccccgagggggtaccaattttcccaaaagggaggggaaaaaaagccgggggaaaacagggcaaaaagagtccccggggaaaaaagtgaatccgctaaaaatcccaaaaaaaaaaaaacccggaaaaaaaaaaggaaaacccgggggggcccaaaaagggacccaacccaaataaattggggggggccca

SEQ ID NO: 13966 - DNA, 284 bp, Zea mays
  unsure at all n locations
  Clone ID: LIB3150-055-Q1-N1-C9
cggccgccctttttttttttttttttgtttttttatggtggtgtgggtgtattttttttttttttttttgagttttatatgtggttgttaaaagacaagaagaggggggaggaaagataaaaaataaaaaanaaaaaagaaaaagaaaaagggccgaggacgtctcattttacgaagtgagaaggtgtactcctacagctgaggggcgacagaataataggaaagctaaaacgcgccgccgaagcccaaggcgccaactacgtcgaataaaaggggcaagaggt

SEQ ID NO: 13967 - DNA, 354 bp, Zea mays
  Clone ID: LIB3150-055-Q1-N1-D1
cggccgcccttttttttttttttttgttagcatgtttgttacggctttaaccaccgacttctattttttctatattatattgtctctggattacagctgcagtagttcgaataattggtttaaacttgcaaatacagcgaatagacagtacatctctagtacgaccaatttctcgtcacctttgaaacgatcagctcttgctgcagaagctggaacgaaataaatgtcggcagtacatcaagatgcattacactatgctggatatctttttagttctgtcggcagctttgacaagaccaattgtactaaccttgaactgttgctgaatccactactggaactgttgctgaatcg

SEQ ID NO: 13968 - DNA, 373 bp, Zea mays
  Clone ID: LIB3150-055-Q1-N1-D10
cggccgcccttttttttttttttttttttttttttttttttttgtgtttttttttttttttttttttttttttttttaaaaccaccatgtaattgtttgggaagaaaaaccttgattgtttttactcgcacatgggaaaaacaattcgacccaaaaaaaaaatttaaaatccaccaaatgcaaaaacttgacaaaactttccgaaaacatggccaccatggatcgggggcagtttaggccacccagattgcttgttttgaaaaaagaaaattaagcaaaagttcttgcttacccgagggcgaaaacaaaaaggttccaccccacccaaaaaaaaacaaccacggggactttctatacgaggaccaagtaagca

SEQ ID NO: 13969 - DNA, 339 bp, Zea mays
  Clone ID: LIB3150-055-Q1-N1-D11
cggccgcccttttttttttttttttttttttttttttttttttgtggtttttttttttttttttttttttttttttttaaagcaaaatcattaggataggacatgcccccgcgggatcaaacccccagaaaagggcaagggcaaacaaaggaaacaaaactggaaacccttcgaaaaggaaacaaaagccccacccctgccgggctagcttgatagcttcctaatgtacaaaaaaatatactgcgctttgttttacaaaaaccaacaggacccaccccacccccttggaaaagccgggggcgataatcgaacacaaggggacccttgggcggttccccc

SEQ ID NO: 13970 - DNA, 293 bp, Zea mays
  Clone ID: LIB3150-055-Q1-N1-D12
cggccgcccttttttttttttttttttttttttttttttttttttgtttttttttttttggagctttattttattttttttttttagaaaaatgtttaatatggggcaaaaacagatgccggaaatagttaaagcaaaaaaaaaggttaaggggaaaggaaaaggggtcctccaattgggggacaaaaaaaaaactcttttcagaaaagtgatgaagggcacccagaacgttgccggcgattggtgggaccgccgcaatttcttttggagaggcggcaggacccacgcgaacg

SEQ ID NO: 13971 - DNA, 245 bp, Zea mays
  Clone ID: LIB3150-055-Q1-N1-D2
cggccgcccttttttttttttttttattaaacaaaagcgaactcactatctgaccaaatagcaaccatgatgcatcaagcgcaacttaaatatataccaaaattatgcacaaaacaagcacaacgggagaaaattacgcaagaaaagggttccactctgcgcgcggagctcaagacagacatgctaaaacgtcaccatccactaatgcctagctgacatgaggaacctactccacctggatctaa

SEQ ID NO: 13972 - DNA, 333 bp, Zea mays
  unsure at all n locations
  Clone ID: LIB3150-055-Q1-N1-D3
cggccgcccttttttttttttttttggtgcattaatatcataataaacaggataacatgggtatgtacatatgtactcctacgcgacaacagttatatagataatcagacaacgattatggtttgcacaagaacatttgatccgacagcacgaaatcccatggaatcatatcgtgctttctttttgtttcacaatataaaaaaaaccccgtgaacacaagtcatagtgccatgcagattgccacgcgtatcacatattcacatgacagaggtaaatgacagaggtaaatcagagaggtcaaccaccgcatccgccgncgcagccaccgtcacc

SEQ ID NO: 13973 - DNA, 401 bp, Zea mays
  Clone ID: LIB3150-055-Q1-N1-D4
cggccgccctttttttttttttttttttttttttttttttttttttttttttttttttttttttttttttaaaaccgaagccttcctcaaattttatgggtcataattacaaggctccgaagtaccaaagtttaagggttctttcaacccccccgctaaaatcgataacatgggcggccaatcattttttggggggttttggatattatgaaaacgggcgggagtttttacaattttatcattaagtatggggctggacaaaaactcccatttactttttcgggccaaaaaaaatgggaacgctggccctgttttctgggaacatcaaccatcaaatgctcacccttattacttggaggctggaaactccatatgaaaggttcatccccctcaaccctggg

SEQ ID NO: 13974 - DNA, 271 bp, Zea mays
  Clone ID: LIB3150-055-Q1-N1-D5
cagcggccgccctttttttttttcctgtgcggtcgtctcgtgagttgttgaggccctctctcatctcttgtatagctgagggtggcgccatgccaggtgaatgcgatctattgactggtgctgatccagagcttccatcaactgacgctgcagatggtagactatgctttctcctctgcgatgtaagacagcaattaacagatgaaagggatgcactagctgacatggggctgtcctaaaaaaaaaataaaacgtctgctggacatttttt

SEQ ID NO: 13975 - DNA, 159 bp, Zea mays
  Clone ID: LIB3150-055-Q1-N1-D6
cggccgccctttttttttttttttttttttttttttttttttgtgggtttttttttttttttttttttttatttattattttttttttttttatttttttaaaataaaaatgttttgtatttttaaatttttattttttagggacgcggggggggaacc

SEQ ID NO: 13976 - DNA, 274 bp, Zea mays
  Clone ID: LIB3150-055-Q1-N1-D7
cggccgccctttttttttttttttttaacaaaaccaatccacattaaagaaaaaacattaacaactagtccagcttgcttattattcatcacatcccggggctcgctgcctattattttcaaacaaatacaagtgcaacagcataactgcaacagctagctaggtttgtcttcacataatagcaatataatgttacaaaggtggaacaggctcaacatgatccctcacattgttcaccgagaaaagaacactttgaatacaatggcagatgact

SEQ ID NO: 13977 - DNA, 397 bp, Zea mays
  Clone ID: LIB3150-055-Q1-N1-D8
cggccgcccttttttttttttttttaacagaaacgaatgtgatagatcacaactgctaattgttatcaccaatcgttacatacaatacaaggaatacctttgtatgaacaagaaagtcagtagcagcagcagcagctctagtcgccacatcaacggtttagcccagtccgagttccttcttcagattctcaagagcggcctctatttcagaaagaccatcatcaaagctgttcgttgacgtcttgtcatccttagcgctttttgcctgctgtccaaactgggtgtatgggtcatctccagtgacgtcctctggtctggagtcatcaatcttcaactcattctccagaaactctacaaattcctcgccaattgctgccaactcttcccaaaagctttt

SEQ ID NO: 13978 - DNA, 308 bp, Zea mays
  Clone ID: LIB3150-055-Q1-N1-D9
ggccgccctttttttttttttttacgacacccagcaaccccttgcacgctatagcaaaagccagctcaagccaggtgaatgtctcggtagcaatcctttggtgatacacttcttttccgatttaagttgagatacagtagggttccgtctccaaagccaaggaagttacttggggccaacatccttcaacgcgcagatctgctcctcccccatcgcagactggacagtcacaacaagatccttcccgctttcgaacccttccttaatctgggccacaagagtctcatcagttgggagtctaagatcat

SEQ ID NO: 13979 - DNA, 318 bp, Zea mays
  unsure at all n locations
  Clone ID: LIB3150-055-Q1-N1-E1
cggccgccctttnttttttttttttttttttttttttttttttttttttttttttttttttttttagcacaaaataaaaagatcggttccgatggcctcaaaccacaaaacaatttcttttggtccagggcaatgcctttggggacactgtcactgaaagcttcacatgggtcacgggtttcccagaatttatttacaaaaaaggggcgtttgtttacccacaacctttttgcccaaatgaaccatttatacccctttgattccaatacccgacagactccaaggcactggatctagacaaattttgtnttaccaccc

SEQ ID NO: 13980 - DNA, 437 bp, Zea mays
  Clone ID: LIB3150-055-Q1-N1-E10
cggccgccctttttttttttttttttttttttttttttttttggaatttttgccgactccaactcagcatatagaattgtttttgccgatacatagccagaattacagcatagttgatagaacaaaaaaagggagctgctcgattctccatcggcaggaccaacttacacgaaatttaacagcaaagagactaattaacatacaaatataaagataaccatcatcccacatatgaagcatgttttttggatgtccgaaaataagctttaacgagcaaaccacactccgcaacctatctcgtaggcaggagttccaaaacgggcacgcaaagagaagcaactcagtacttgtagtccttgacgtggaggctctcggtgtcggcggcagcatcacccttgtaggtgccgagggtagcctcaaagttggccttgcacctg

SEQ ID NO: 13981 - DNA, 334 bp, Zea mays
  Clone ID: LIB3150-055-Q1-N1-E11
cggccgccctttttttttttttttaaaatccaacatcaactcatcactcgtcaaaaatccaaaagcatgatcccatacaatcgcctccaacaatcgtctccaactggcatgccaaacataatggtaagcgtctaagtgcacatccatgtctcatcaacttacaccagagttcaaagctaatatttggaatcccaataaggaaacaacaggcaatttaataaccaccattcgaaatcaggtgatccacatacaccaaggtaatatttggaatccccagacttcttgctctctgtcacacatagcaggtagttcaagacatgctggggaaacatca

SEQ ID NO: 13982 - DNA, 422 bp, Zea mays
  Clone ID: LIB3150-055-Q1-N1-E12
cggccgcccttttttttttttttttttttttttttttttttttttttttggaaacctcattgtttatattcttaacaaagcacaaaagaactaaaacttagcgaattcgttacaggacggcagcagataagttaaacacaaaaagacaaccgtgtccaaaaccagcatggatccagcgtccaggggcaccgttcacatttattctcagcatagacaagcagcaaagatggtctgcgaccaaaggccatcggggacgaccctggatggggaggcagaaatatctctctctactgggtcttgaacatgtggcggatcaggtcgacaacgcggttgctgtacccccactcgttgtcgtaccaagagacgagcttgatgaagtggtcgttcagggcaatcccggccttggcgtcgaagatgctcga

SEQ ID NO: 13983 - DNA, 246 bp, Zea mays
  Clone ID: LIB3150-055-Q1-N1-E2
cggccgcccttttttttttttttttattaaatagaattgttataattatctgttcagaaggaaaccataatgattcaatcgttacttaattatatacttaaattattcagtaatttattagaactttagtaatttacgcaagagagtggatccatctcgcgcgcgggtctcaagacggtcatgctatcatttcaccatccccaaatcccttgttgtcttgagttacctcctccaccttcatcttat

SEQ ID NO: 13984 - DNA, 120 bp, Zea mays
  Clone ID: LIB3150-055-Q1-N1-E4
cggccgcccttctttttttttttttttttttttttatctccacgggcggttgttctgaaaacaaattttattgctcgacctcccgtgtttaagtgtgatcagagcgggctcatggctcga

SEQ ID NO: 13985 - DNA, 405 bp, Zea mays
  Clone ID: LIB3150-055-Q1-N1-E5
cggccgccctttttttttttttttcggtaagcaagttaaagataaacaacaatcgataactaataaagtacaagctcccagctatatttcacaccattttattctccatgcatgaggcgcactagtaacacgtgcagtactgaattaataactaacagaagcctgccgttcttctagctctggcgttcgttgttgatcgaactcagtgctcagcgggaggatggtagatcggagttggctttggctgcccgtacactggagtgggagggtggtattccggcgtgggagggtggtactccggcgccggcttgctgtgctcaggcaccgggtggtactccggcaccggcggcttgctgtggtcaggcaccgggtggtactccggcaccggcaggggtgccttgtgga

SEQ ID NO: 13986 - DNA, 210 bp, Zea mays
  Clone ID: LIB3150-055-Q1-N1-E6
cggccgcccttttttttttttttttttttttttttttttttttttttttttttaagaaacaagaaatataccctacattcaaaatgcgtggggcctgatacagccagcctccatggtaaacacaaatggagtttaagcattttttggtatgtatgaaccaatgttcttaatacggtaaggggagacgtttgaccaccgcctggacgcgta

SEQ ID NO: 13987 - DNA, 426 bp, Zea mays
  Clone ID: LIB3150-055-Q1-N1-E7
cggccgccctttttttttttttttacaagcagaagtccactttgcaaatgtatgccgacaactctcacaccatacatacatacatgcacgccagagttttatgagacacccatcctggagcccagagagccatgggtacctctacagtgtcttatggatagtatgtatagaaaattaaaggggcagtatttccagcgcatgcaattgccttcctcaggattgcgtagggctggctgtcacacaacaaaaccatttcttcgtgcttggttttgcagcataagactccaccctctcagtcctggggtccttggaaggtgagtctgtgtcttgaccattcccacccttcttctcatctctggctttgttgaatatgacagtaaatccgtctgcggaagccggatcgttgacatcccattcaccaaactt

SEQ ID NO: 13988 - DNA, 244 bp, Zea mays
  Clone ID: LIB3150-055-Q1-N1-E8
cggccgccctttttttttttttttttttttttttttttttttttaaaaacgacgggaggtttttaactgctgaaactgaagtatctgtgttacatgtgtatgttcacagcagatgaacttttactagcagatgaactttacagcgttacatgtgtttgttcacggcagcaccctgtgtgtatgtgtatgcgtatgcgcctgcgcaatctactacttggggggctcctcctccccctcctctttc

SEQ ID NO: 13989 - DNA, 370 bp, Zea mays
  Clone ID: LIB3150-055-Q1-N1-E9
cggccgccctttttttttttttttttttttttttttttttttttttttttggaagcacaaaatgagtcttgatatttaagtcatgggggaaaaaatctgtgtagtccaacagctggagattattgccttgcccttagcatcataactgaaccaaagatgagttaacagaaaacaaccccccaaaaaatagacggggagactaatggtgtgctgcaacagcaggggcaccctcagcttcctccttggccttacgagcagcagctctgatctgacgttgctcctccttgtagatcctgttcctgccctggacctccttggaggggtggaggccctcaaggtagtcctcgcggaggaggccgaattcgggggg

SEQ ID NO: 13990 - DNA, 405 bp, Zea mays
  unsure at all n locations
  Clone ID: LIB3150-055-Q1-N1-F1
cggccgcccttttttttttttttttgaactaaacgactttcaactttttttacagcagataactcacaacatacttttaatagcatacatttcacaatagttttttcacggttcacaaccgaaccaatcatattctaaatatcccaccaaccgactcatattagtgctcttgccaatttaatagccaaagcaacctatttggagtgtaagaaaaaaccttttgcaatgctttcattaacaatactgtagtattttaggcataacctcgtacgtccaccatcattgttcgctcgaccctcccactccacgcactccctccatcaccagcatatatatagtagttgccaccagagaagagagaacgaagcagagtggtcctncgtgggtgtcactgtcaggacatga

SEQ ID NO: 13991 - DNA, 369 bp, Zea mays
  unsure at all n locations
  Clone ID: LIB3150-055-Q1-N1-F10
cggccgccctttttttttttttttacaagtaagtccactgcacatcgccggttccactctgcgtgttctctcgaccgacagttttacacacatgtcggtggctcaagctcagctcaaccatatcgcgcagctgcatgccggccaggtccatcctagcacgcccaaaaatagaccagacatgggggagaagaagaggatgcattacaagtagtagataatcacgcttggatgtgatgtctctcatcttggaaagccagtggcaatgcctgcttcagcttttaaaatggtcgtgctctgctgtctgctcagccacgcacatcatcaaatgccgatcacaggtcgtgctcgggcttgtccacnccgtcgccg

SEQ ID NO: 13992 - DNA, 373 bp, Zea mays
  Clone ID: LIB3150-055-Q1-N1-F11
cggccgccctttttttttttttttttttttttttatgaatagcctcgcagcattgcaagttgtataaataaacttctacaacagagtctgatagtcacttgctatccatttaaattgttctacaggaatcctctcttggtggactcagctttcttggatatggcaatgccaacctagttggaggtgcggtacagcttcccgaatacatggagcacagcaacgacggctacgaacccaatactcatgatcagaacagtgtttggtgacattttgcggccggcagcctcatcagtgtagaattggagcattgagctggcaccgcctccaccagcagcagaaccgttggtggcctacccctcccaggcttggggtt

SEQ ID NO: 13993 - DNA, 338 bp, Zea mays
  Clone ID: LIB3150-055-Q1-N1-F12
cggccgcccttttttttttttttttttttttttttttattttttttgtttttggacccttggcacatgtcaatatatgcaaggatgtcaatagtcattggcagtttgccacacaaccatatccggactacatagctcactcaagttgcctatatttatgcgagcttgttaactaaaaacgcttggactggaaacccacccatgaatttagaatttggattaaactggcacggaattgaaactttttttagggaaaaaggatttgctactttgtgcggggaaaaagtacccacagtgaaatgtgatcgttgaacaaatcaccaaaaaagtcattttttt

SEQ ID NO: 13994 - DNA, 340 bp, Zea mays
  Clone ID: LIB3150-055-Q1-N1-F2
cggccgccctttttttttttttttttttttttttttttttttttttttttttttttttttttttttccccaaaaccggggaacataaacccacggatcccaattcgggcttgactaagggacgaccgttccttacacaaaaccgaactaaaccttgtccaacgacaagtttttcaaaggcgagttcaaactaaaccgatcgttgctgcggtttttaaagcgccttcaggatctccttacccccaaaaatcgtgaactgcccgccttcctcgttttttggaacggggaccgtgaggtcttcggccaaaaaagcaaaccttttttagcccccccccaaacct

SEQ ID NO: 13995 - DNA, 314 bp, Zea mays
  Clone ID: LIB3150-055-Q1-N1-F3
cggccgcccttttttttttttttttttttttttttttttttttttttttttttttttttttttttttttaacaagggggggaccatgctttttttggagccttaaaaaaaaaacaatttgttacaagccttgaccctttttggggggtcccaaaaccaaaaaagggaaacaaaatgtccgaccccagcgagcacaaaatttaaaagataatttaacacggtttacaatcgggagaccatttaacctgacgatgtgctagcacatgaacttgactacgataactgaaatgtggtttttttttttccaattaaagg

SEQ ID NO: 13996 - DNA, 296 bp, Zea mays
  Clone ID: LIB3150-055-Q1-N1-F4
cggccgccctttttttttttttttttttttttttccaaaaggattacatgttacaataagtttacattatacaattatcggagtgattacaaaagaaaatgattaaaaagaattacaatttaaaatgtataaaagatttataagttttaaaatacatgctagcttaagtgacaatcctcaatagagaaactaaagacgggatatacttatagaagaaggccgagcccaccggcacttagcaccatctgggataaacactacgttagtgttgttaattgacgaccacttggtgagca

SEQ ID NO: 13997 - DNA, 417 bp, Zea mays
  Clone ID: LIB3150-055-Q1-N1-F5
cggccgccctttttttttttttttttttttttttttttttttgttgaactcaccaggtacaagactagaaggaatccgttttacatcctatattgacagttgagttggaacattgtacaagcagctggaatccaaaatgtgtctagcaaagttttattcgtcctgaactccgttgcgtcatgagacaaacatcacttaattacagaataagcacaaagccctatgaacctagcaaactaattaacacactgatgcctacataaacagacagtgctgaacaggctcaacggattataaacactgggaacagatcgagcagttccagcaccagcaccattggaataccacagcttcgagaaactcaagccttcttgaggatatattgtggctcattgggcgtaccaaacattcagtcca

SEQ ID NO: 13998 - DNA, 360 bp, Zea mays
  Clone ID: LIB3150-055-Q1-N1-F6
cggccgccctttttttttttttttttttttttttttttttttgtgggtttttttttttttttttttttttttttttaaaaaaaaaaaccaccatttttggccaaacatggttcattttaggggacaacgccaacttttttttttaaattgcctttgcaatggaaggggaaaaaaaaaaaaaaaatgcttttggggggtttaattatttcaggtgggtcccccctttcggatccgaaaaaaaatgaagttgcataccatacccggtgggcttttttgcccgggacaaagttgggggggcaagcccatgcctttttttttactggagcaacaattgggtcaaagaggtttttgggggggccc

SEQ ID NO: 13999 - DNA, 429 bp, Zea mays
  Clone ID: LIB3150-055-Q1-N1-F7
cggccgccctttttttttttttttacaaaagagcaatgcactaagaatataaccatttactaaaccagacatcaactctgtttcatctgaaacatcacagcagataacaaaatagtctcagactctaagcgcggcagggcactacatcacaaatattgttcaaaaacaggtgcatttgacaactaaaacaaaataaaatattgaagtcgctgctattacagtagacgaattgatgattaaaccggcagatgaaacagtatcaccaacagccaaaaattttagagcttgtcctcaaactcagaaagaggggtcatctgttccttgagacccttcctcttgcggatatccagcaccagctgagcagcctgggagccggcctccaaaggatctgagcccatcttgtcccaatggtcaaggacacactggggg

SEQ ID NO: 14000 - DNA, 351 bp, Zea mays
  Clone ID: LIB3150-055-Q1-N1-F8
cggccgcccttttttttttttttttagcaaatgcagtggtaccgtaacctagctgatctgatgaattcaacttggcaacaacatattagaaccgttataaggaaacctttaaacacagacatgcaaggcacgtcgcaaaaggtccggagcatgccgttacaccgttcagggagaggccgtgaaaggtggtggtgggtacatcaaggcatgagcctcacttccagagcttgcgcagggacatgttcttctccgtgtctttcttcatcaccttggccactgccatctcgaaatcctcctgggtaacgtgcacccttctctcacggagagcaaacattccagcctctgtacata

SEQ ID NO: 14001 - DNA, 340 bp, Zea mays
  Clone ID: LIB3150-055-Q1-N1-F9
cggccgccctttttttttttttttggttttttttttttttttttttttttttttttttttttttttttttttttttgaggggaaaaaacaccatcccgaaaactcaaaattttttgacaaaaggtaagggcagccggtgtagcggcaaccagcgttagatggcaaccatgaactgcagtagctgattaactaccttacaatagaaatggaaagattacaatagttgcccgagattaacatttttttaagggagcatcctttcatgtagctggaggtacagttacttggccatatcctcccaggggggggaaagccggatttcggtttccattatttaaaa

SEQ ID NO: 14002 - DNA, 254 bp, Zea mays
  unsure at all n locations
  Clone ID: LIB3150-055-Q1-N1-G1
cggccgccctttnttttttttttttttttttttttatttttttttttttttttttttttttttttttttcatatttttttttttttttttttttttttttttttaaacgggacccaattggccaaatttttttttttcctttaaaccccccgcgtttttagggtttaaaagcgccattttcggcgctcttagaaataaatttagggggtttaaaacttttgaaaccccccatttggggcccgtgggtccccccg

SEQ ID NO: 14003 - DNA, 350 bp, Zea mays
  Clone ID: LIB3150-055-Q1-N1-G10
cggccgcccttttttttttttttttttttttttttttttttttttgtttttttttttttttttttttttgcacaaatcatcaagccgttgattcaaaaaacatggcataacatttaacgagtttcccctttttacactggttacaacatagtacaagtacaccatgctttgcactcgcaccacgagcattccattattgacggtttactcagcagtccttccccaccaaaaaaaatgggaagtttcatatttttgggccatcaacctgacgatgcatgtgtggtagcactcctcaaaatgctaataataagttcaactcctcatttgggggtgaaggcctgaaaaatggt

SEQ ID NO: 14004 - DNA, 362 bp, Zea mays
  Clone ID: LIB3150-055-Q1-N1-G11
cggccgcccttttttttttttttttttttttttttttttttttttattgcaaggccattatttgatctccacatatacataagccctaacatatagagacacggcacaaccatgaaagccgtatataggcacaagatctttatttgacacaagacaagacgaagacgatgaccgaattaaaggactaatcgagcatgatgtagcaggtagcctgcatcaagtcaagccgaaccataatcctacagcttgtaatacgagcgagctgagtcgatcagactgggctagctcgctggttcaccgaggcctgcctggcaccactggacgtatgtaaacaccgatagcgttgacgagcctggttcccg

SEQ ID NO: 14005 - DNA, 310 bp, Zea mays
  Clone ID: LIB3150-055-Q1-N1-G12
cggccgccctttttttttttttttttttttttttttttttttttgggtgtaaggtcattttttgcttttaataaataagctaggattttcccacggactccgaacataaactagcagaacataaaagatagcacccccccatgtttgatgccaaacagttcgcacaacggggtagggcccagatggaggagctttgtttgacaacacaccactcgagagcattttttgtcccttgccaaattggaaagccctagccctaatacaggtcgccttccttgtgggtgtggatgacgcaacctgactttgggtg

SEQ ID NO: 14006 - DNA, 289 bp, Zea mays
  Clone ID: LIB3150-055-Q1-N1-G2
cggccgccctttttttttttttttaaattggtaacatttaataacctgtattggatcgagctgtacatatgcatgcaaacgttttctctctgcagttacgtcagacggctgacacgtagggctaaccgctgccatcaatttgcaactagcttgaggattaaatttacatgtcgaggttaattcagctcacaaataatccgtttcaggaccattattttcacacagcaaaccagatcaggcagttcagcttctcctgagatagggtgaatgggggcgggagggcgcttta

SEQ ID NO: 14007 - DNA, 346 bp, Zea mays
  Clone ID: LIB3150-055-Q1-N1-G4
cggccgcccttttttttttttttttgcacacatccaacatgtatttcccctttatttgatcaccagaagacgtaaataaaacagcacccccttctgcccggttccctgacacacggctaattaatacgcataaacataaagcatccatggatggatgccttgaaacatgcatcacttgaacagaagctcacgaggcagcgtcgtcgcatgcatgtgaaagttgggcttcgcggaatggcctcaagcaacaggagtaaatatgatgtagcatagacgatcactatagttgcaggagcaagcaggagtgaggcagccaatgtatttgcatgtctcccccgtgtagcac

SEQ ID NO: 14008 - DNA, 287 bp, Zea mays
  Clone ID: LIB3150-055-Q1-N1-G5
cggccgccctttttttttttttttttttttttttttttttttgttgtttttttgggcacaggacaaaataagctctgctgctggcattacactgacaatttgtaggtcatccgttcgacaacaaattttgacagaacttccaccggccaagtgcctgactgaatgaacaatctaagttgccaacaaatggcattttaagctcagaaaaaagtaaaaaatacccatggcatttttagtccatctttactccaacaaaaaccttaaatgctggtagggtacatgaacac

SEQ ID NO: 14009 - DNA, 425 bp, Zea mays
  Clone ID: LIB3150-055-Q1-N1-G6
cggccgccctttttttttttttttttttaaaatgtcaattacaaagtttcattaaattttaagacctaaaacttttattttagtggtttttccatccgaggtagtttcaaaaattcaaattttaaaattcaaacatagttttgcatgacaaggtgatttcaaaccaaaacattgtcaactacaaagtttcataactcttcaatacctacaacttttatgttggtgattttttctttcgaggccgttttcaaaattcaatttttaaaatttttaaatttagacgtagttttagttgacaatatgacttcaaatgaaaaagttgtcaactacaaaattctataacttctaaagatctataaagtttattttggttgtttggtcatttgttcatctcacatgatggttctaacaatatgcacaaatct

SEQ ID NO: 14010 - DNA, 404 bp, Zea mays
  unsure at all n locations
  Clone ID: LIB3150-055-Q1-N1-G7
cggccgcccttttttttttttttttttttttttttttttttttttttttttttttggaaggaactaaatttctaacatggggtcgacttctgcagggacatcaaaggttagtaatacctttctgggaggctaaaatacaacatcacattgtcctttcgaatcgggtaaatactggcttgccaataaggcaggggggaaatcacaaaacggcaaaaaaaaccaggaatccaaaagggagagaatntgaagacaaaagaaacgaaattgaaactaatttacacgttgctaatctagtatctattgcccagcgagcttcacaacctccgacggacttccaagcttatccacctctgatgggccttctaattttctcaaaccatcttcacaagaattactaatgtcaa

SEQ ID NO: 14011 - DNA, 350 bp, Zea mays
  unsure at all n locations
  Clone ID: LIB3150-055-Q1-N1-G8
cggccgcccttttttttttttttttttcttttttcttttttggggggggtnccagaaaaaggcacttcgaattaattaattaatttcctttcgcccacccccctgccaaagcttctttcaacaccaaaccccaaatcttgtcccccgccaatcatggcgggaagagcctacctattctacttgggatagatgttttgctcctcctagatctagcggccaaaacaatccaagcatagtgtgtttcaacagacagcataacgaagtcacctgatcggggtgctaactgaatctttcttcctccagttaggtaaagcttataaccacccaaaaaaaagaaaggggggaaaacg

SEQ ID NO: 14012 - DNA, 267 bp, Zea mays
  Clone ID: LIB3150-055-Q1-N1-G9
cggccgcccttttttttttttttttaaaaataaaatacatgcttcggtttaggaaaagctaggtgtacaacaaccgcccacacgttgcaagctgcagggctgctttttaatcacaaatccacaaagaagagcaagaatcatatacccgtagaaaaaaaaagaatacccaacaaaacaaagaacaaacgacgccaagctggatcgtcgacgaagaattaaccggcggacgcatatcagtggcgggcgcactcggcggggagtccttgc

SEQ ID NO: 14013 - DNA, 434 bp, Zea mays
  Clone ID: LIB3150-055-Q1-N1-H1
cggccgcccttttttttttttttttttttttttttttttttttttttttggggcccaaccctccctgtagggaaaggtctcaaaaaagctatcatgacatcctcacaagaaactcagtgttcctgtttaacaatattcctagtgttgtcagccctcaaccgtacatttggcatgttatttcatttcttgcatggccatgaacgacaacaaaacagctcccaagatgcaaacagaatgggttcggtaataacaacagtacagtaataccaaatgggcacaacccgttgcctcattcaggactaaaagcgacgttacttgtcagtcaatggaaataaccaaggacctgcccacccacgttctgcctgattgcttcctcatgatccaaaacaccattcggagtagtaatcacaacataaccccactggcgtgttggg

SEQ ID NO: 14014 - DNA, 409 bp, Zea mays
  Clone ID: LIB3150-055-Q1-N1-H10
cggccgccctttttttttttttttttttttttttttttttttttttttttttttttttttttttttttttttttttttttttttttttttttttttttttttttttttttttttttttttttttttttttttttttttaaaaagggcctaaaaaaaaaaaaacccccattttttaaaaaaaggtaaaaaaaacccccaaaaaaagggaaaaaaaaaggccgggggtaaaaaaattttttcgaagtttaaaaaagggggggccattttttaaaaaaaaaaaaaaaaaacccccttttttttgggaaaaattcaaaaattaaaaaatttgggccaacattcccccggccccaaaagggggttaaaaaggggttggaaaaaacccttttttttgggcccccaatgggttttt

SEQ ID NO: 14015 - DNA, 407 bp, Zea mays
  Clone ID: LIB3150-055-Q1-N1-H11
cggccgcccttttttttttttttttttttttttttttttttttttttttttttttttttttttttttttttttttttttgagggagaaaatttcaatcttttgattatagctgggccaacaagcccaaaggggccattaaaactttaacaaggcgagtttaacacatgagttttaagttttgaacaaaaagctaaagcgcataaattaggccttttaatgaaggacccatttttttgatgtaggaagttttccacagcagcacaggggccttttaaacggttcttgataaaaccaatgtccttggggttgttggggaaaccctgcctgaaaaaaatgagcccgtactttctgatcaaaccgggggggttgcgcaaacccggaaaacccgggagccagggccgtattt

SEQ ID NO: 14016 - DNA, 395 bp, Zea mays
  Clone ID: LIB3150-055-Q1-N1-H12
cggccgccctttttttttttttttttttttggtttatgtcttgatgtattaaaacctacagaggcaactgcaaacataaacaggacccatttcctagttgaagtcgtgacgtatgacagccatggaacaaaattgcatatccatgccgacatcgaatgcattctcacaggatacaagagagcctagttcatcctcttgatgagctcgttgatgtagttctcacggttgccagcgtcgccaccctccacatagtggttcctcttcttcttgaggccaccaaggggcgctttcagcttgaatggccagaggaaagttgttggccctttttgagtgtgggccaacccgtcatgatctcgtgaacaaggtcctcgatgcagatgatattatgcttccca

SEQ ID NO: 14017 - DNA, 130 bp, Zea mays
  Clone ID: LIB3150-055-Q1-N1-H2
cggccgccctttttttttttttagtcaatcgggaaatgaatatggataagggttcggcgaatagacatacagacggtcatacaaacggccgacccgtcgagcatacagttaagaccacagttgcgaccta

SEQ ID NO: 14018 - DNA, 253 bp, Zea mays
  unsure at all n locations
  Clone ID: LIB3150-055-Q1-N1-H3
cggccgcccttnnttttttttttttttttttttttttcagcaagtgcacacaagagctgatccatagtttcagaattccacgtacatcactcagacaccaagcatagttttgagtactatatatagaacattaagtgcaaacagcgacaatccatgaaaatccgatagcaacaagggttcgatttatgctaggctacggcgcaccatctcttgcagaaggctactctgaaacaggggtgccaacttagtactc

SEQ ID NO: 14019 - DNA, 398 bp, Zea mays
  Clone ID: LIB3150-055-Q1-N1-H4
cggccgccctttttttttttttttttagaacataacaaaattcactaatatgcagaagaacaaaaggcaaaagcatcagcaacagttaagattatacagtcaaaacatcgatcgtctaatgatcacccggcgaaacaaactatccatgtctccattcccctctactgttaggctttccgaatgcacactgcagggacgatgcactgcatgccacgagattcccgctcgtcctgggttgataatgctagtcatggcagaagtgggtcgacctcccgctcttagcatttcaaagatgcctcctgtcctgtgatctttgtgctggctgggcagctggctcacctaagatgacctgacacagggataacgggatactgcacaattccaaggggcatttttat

SEQ ID NO: 14020 - DNA, 405 bp, Zea mays
  Clone ID: LIB3150-055-Q1-N1-H5
cggccgccctttttttttttttttaacccaagaaaccccttgctggggttgttaaatacactattatggaaccataaaagatactacatcgttccatacgcatataccacggcattacattttctgtatctcacattcattctttctacgaaaatttcacaaaaccaactcagatgattacagtacacaacaaaaaacaggcgcatttacatactttaattaactatagattaatgctaatattctgttttttctagtatagacgaacatgtaatgaacaagccctccaatgaacaggcatacataaataatgtgcaggttgctctgttccactggcagatgcattcctgcctgccttattgagaaccaagtttgtacacgggagcagtgcaaaatcaaaatacc

SEQ ID NO: 14021 - DNA, 390 bp, Zea mays
  unsure at all n locations
  Clone ID: LIB3150-055-Q1-N1-H6
cggccgcccttttttttttttttttttttttttttttttttgttgttttttttttncatncaggccacggataaacactaaatccttcgattttgaagatggaacagcacctaacacagggacccacacttattagctttgcggggcccattctagcaattgatgaaaaaaaaagaatcaccggggcatcgcttaaagggaggaaacgtgatcgcgaacaaagtacatccattaactgtttgggctacagcagctccaaacgacaaagcgaaagggttcatcaatattacaaccgaacaacaaaaatttgctcatgataccctttttttaagcggacgggatctccacctcgccggcgtcaatctcctgctggaggtccttggggtcctt

SEQ ID NO: 14022 - DNA, 408 bp, Zea mays
  Clone ID: LIB3150-055-Q1-N1-H7
cggccgcccttttttttttttttttccactgatgacgatacatgcgtctgtgcttagtttacatcgaccgcttacagcaggcagccattgacattgattgatgagcacacacatcgatcatgagcatacgccggctggtgcaactactacacgcctacgatctgaacaagtagagtacagggaagaccacactgttcactcgacggacggacggacggacgaatggatgggtctgatggtagtacacatgtacggcgttgctcagtcagttagttgccggggacgaagttcgtggcgtatgcccaggcgttgttggcgacggggtcggcgacgtggtcgaagaggttctcgatggggcccttgccggtgacgatggcctgcacgaagaagccgaacatggagaacatg

SEQ ID NO: 14023 - DNA, 380 bp, Zea mays
  unsure at all n locations
  Clone ID: LIB3150-055-Q1-N1-H8
cggccgcccttttttttttttttttttttttttttttttttttttttttttttttttttttttttttttttttttttttaaaaccaaaacacttggggggaataatcttaaattttaaacttggttccaaacaaaatttttggggccgatgaaaaccagtggacaacttttagtttacgtttttagcaaccttttttccaaactccccttttttttaaagttgcaaacaaacttcttgggaggagaaaccttctggacaggctttttttccttgacaggccttttaagctttacgggaacgcgcgggcgcgggcgctctttataatttcaccnggaccccaccgggccccccttggggaaaccccaccaccacgggggga

SEQ ID NO: 14024 - DNA, 106 bp, Zea mays
  unsure at all n locations
  Clone ID: LIB3150-055-Q1-N1-H9
cggccgccctttnnttttttttttttttttttttttttttttttgttttttttttttttttttttttttttttttttnnnnnaaaaacaaaatgaattcgcccttt

SEQ ID NO: 14025 - DNA, 69 bp, Zea mays
  Clone ID: LIB3150-056-Q1-N1-A4
tcggttggctttcgagggaacttaacaagccaacacaaaacccaaccgaaaaaaccattttccggcccc

SEQ ID NO: 14026 - DNA, 350 bp, Zea mays
  Clone ID: LIB3150-056-Q1-N1-A6
tcttttaaagtgaaccaagccgtccgttttaattcaattcgcgtttcggggtttggaccagccacccggcggcggcgggcaaacacagacagggccgcagggccgagcgaccggagcgccgccgccaccggcaaagccacggcacggcacccatggagtcgcgcgccctcctgcacgcccggcctgccgccctccctgcccgcgccggcctgcgcctccctccccagctcccgcgcccgcgggcagtctccttctcccccgccgccaagcccgcgctccggtccccgctcctcgcgtcgaggggccccttcctcccgcggcacgacgcgctttttgggaacgggtccttg

SEQ ID NO: 14027 - DNA, 186 bp, Zea mays
  Clone ID: LIB3150-056-Q1-N1-A8
tcgtgttacccgactcgttagacgtcagccaggagttcgaaaccaaggatcgatccacgagctttcggaaggcgaggcgcgcgcgcagcgtctaggtgctggtgccggtgccgcccatggatcgggctcgcggatccgcgtttctgctcggcgtcctgctcgcaggatccttgttcgcgttttcag

SEQ ID NO: 14028 - DNA, 354 bp, Zea mays
  Clone ID: LIB3150-056-Q1-N1-B3
ttcaggtctacttcatcaggtaattgttagtaaatattatgtgactcgaaatgatgctggccgaggaacactaaacactaggggcttcccatggtgagccccatcaccactgcctatgacgagggcttgctcccctccctttgcgtggccaacttcaaaaactaccagcagtgtgtttcacatattgaagcagcttgggatcttgcatattccattggcagctatgtgttcagtagtggttctgaccccaagtcacagcttttcgatgggcacaacgaatcaggagctaccatatacgcaagggagaatctgttgaacaatgtcttgcatgccattcgtacatgtgttctgcat

SEQ ID NO: 14029 - DNA, 310 bp, Zea mays
  unsure at all n locations
  Clone ID: LIB3150-056-Q1-N1-C4
ttggttccggttcctccacctgctctttggggacctccggggcgggggctggctccaccaccactggctgcagaggagaccgcgccaccgagacggaggccggtgaggctgcaccgcggcggcgcttctcggcggcggcggccatgagctcgcgctgcttccggcgcgcctctgcctccggagactccgcagcggggggcgggggcttgctgcgcttgggctcaggctgcgccggcggggagccctggaggctcatgcggagcgccatctggagctcctcgtnctcctcccgatcccccattggagcagc

SEQ ID NO: 14030 - DNA, 340 bp, Zea mays
  unsure at all n locations
  Clone ID: LIB3150-056-Q1-N1-E4
gatccatccgagcccaaaccctagtccagccagatctccaccgccgccggcgagagcacggcatcagatccgccgcgatggcgttccgccgcatcttatccacagcggtgcgccgccgctcggccatcgccgcggcagcgtccgggaacgcgcgcgaggcctccacggncgtcgccgcggcgcccggcgtgctagcccccgacgcgaccccggtgcgcgctcccgtgatgccgtacgatcgcatcgccgaagccgttaacgccaggctccggnggnttgagcacccagacccgcgcttcctccgttatgaagccccgttccgtcccacgccgaccacacg

SEQ ID NO: 14031 - DNA, 194 bp, Zea mays
  Clone ID: LIB3150-057-Q1-N1-A6
acgctcggggagaaaaatggaaccgcgaaggtgcgtgtcggactagggaccgtagagtaagcgacagcgaaggagggagagggggatggccgggatcgggccgatcaggcaggactgggagccggtggttgtgcggaagaaagcacccaccgccgctgccaaaaaagatgagaaagccgtcaacgccgcgcgcc

SEQ ID NO: 14032 - DNA, 342 bp, Zea mays
  Clone ID: LIB3150-057-Q1-N1-B5
cctggttcatttcttaagccgccgccaaccctttccggggctccgaacccgctggggggaaaaaaaaaaagggccggaaggggcaatggcccgctattgggcatcgaactcggacgacgtactcttggcgcgggggggggaacaccaaccgggtgagatcattgcccacgaccaggggtaaccgaccacgccctcgtacgtcgccttcaccgactccgagcgcctcatcggagatgcggccaagaaccaggtcgccatgaaccccatcaacaccgtctttgatgccaagcgtctcatcggcaggaggttcagtgatgcgtctgtccagagtgatatcaagct

SEQ ID NO: 14033 - DNA, 126 bp, Zea mays
  Clone ID: LIB3150-057-Q1-N1-B7
gtaggttttaatacatcaagacataaaccaacacgtgccccaagtgtcactcgctagggctaccaagattgttgcaaaaaagatagcactttttcccgtcactgattatatatttagttctagttt

SEQ ID NO: 14034 - DNA, 218 bp, Zea mays
  Clone ID: LIB3150-057-Q1-N1-G8
tttctttataaagacacctcatttcttatgacacggaagaatcttattatatggactactaattgaccttaaatgcctcttttaactacctatcttttcaaaacagacctccacaacttacctgaagtacatgctttctacaacttccaaatactattcaccactttatctcatccacaccatctaatctattacttatccttaaaaaacattcattc

SEQ ID NO: 14035 - DNA, 131 bp, Zea mays
  Clone ID: LIB3150-057-Q1-N1-H2
atttggtaccatcttgctatttcaccttttgcaatacaagaatgctggagtatatgttaaccttttggcattgttaaattgattttaggaagtcgtatagttagttttcttcggaagggaagagggaggtg

SEQ ID NO: 14036 - DNA, 336 bp, Zea mays
  Clone ID: LIB3150-058-Q1-N1-B1
atgcgaaaaatatccccaaaccctagctcccgagcgggagggagaacccttgcgtcttcttcgacatgaccgtaggcggagccccggcgggccggatcgtgatggagctgttcgccaacgaggtgcccaagaccgcggtgaacttacactcgctgtgcacgggcaaaaaaggcgtgtgctagtcctggaagccgctccactacaagggctccaccttgcaccgccttatccgctagtacatgtgccagggcggcgacttcacccgcggcaacggtaacggcggggagtccatctacggcgagaagatccccgacgagaagttcgagcgctagcaca

SEQ ID NO: 14037 - DNA, 269 bp, Zea mays
  Clone ID: LIB3150-058-Q1-N1-B12
aaatgcctctcaagagaaggacagttagctgattccatcatgcttaagtggcatttatttagtatttttattatacgatacacaaatcaactactggtcctggaatttgttattggaatttccgataggttatcgttgtcgggtgactaagggcacatagaaccgggatcttttgctggccatggatgttctgaatgcacttgtaacggccctggtatctgacactctcctagaatacaattcaatacaagggctgcagctctagcttg

SEQ ID NO: 14038 - DNA, 168 bp, Zea mays
  Clone ID: LIB3150-058-Q1-N1-C8
gaagctcaactaatgaacaaggggccggccccggggaaatggcgggaaccggtcacttggaagcgcgtccacaccttttccttatagggaaggtggattataaagcttggcgtgtattaattggcatatagtgtgtttctctggggagaaatggtatatcggttacac

SEQ ID NO: 14039 - DNA, 359 bp, Zea mays
  Clone ID: LIB3150-058-Q1-N1-D3
ctctcctcttccgacgacagctacacgtgacaaccgtgagctcgcgaaggaacgctgttcgcaattacggcgccggcaccatgagtaagctgcagagtgattttctgagggacgcgattgcctcaattaccaatgattgccgtgagaagcagcgcatatttgttgaaaccattgagctacaaattggactgaagaactatgaccctcaaaaggacaagcgcttcaacggttctgataagctgcctgacatccatcgccctaagatgaaggtttgcatgcttggtgatgctcagcatgttgaggaggcagagagaatgggtatagacaatatggatgtggaagccctcattaagatgaac

SEQ ID NO: 14040 - DNA, 305 bp, Zea mays
  Clone ID: LIB3150-058-Q1-N1-H10
actcgtttgaattgcctcttgaggaatggctgaccggcaacaatatatgtactttgaagtgctacaagacactatacaacaaaatggatacataatgacactaaacacgggaagccaatattacatgtatattaacagtgagccatatacatcaaggctttttaacttcaatgaatgtcgagaccagaatacaggactggcgtaactataatacataggttgggctacctgtacacctacaaaaatgtgaagacgaatttcactattgctgactaagtggcttcaactctgctaccgaagcacgg

SEQ ID NO: 14041 - DNA, 358 bp, Zea mays
  Clone ID: LIB3150-059-Q1-N1-A2
tcgtaagcatcagcggcaggagctctgggcagcgtgcgcacacgtgggttacctagctcgctctgctagcctaccatggctgaccaccaccggggcgcgacgggaggtggcgggggctacggcgacctccagcgcgggggcggcatgcacggcgaggcgcagcagcagcagaagcagggcgccatgatgacggcgctcaaggccgcgacggccgcgaccttcggcgggtcgatgctggtgctgtccgggctgatcctggccggcaccgtgatcgcgctcacggtggccacccccgtgctggtgatcttcagcccggtgcgctgggccgccgccatcgcgctggcgctcatgggggccg

SEQ ID NO: 14042 - DNA, 332 bp, Zea mays
  Clone ID: LIB3150-059-Q1-N1-A8
agccgtgcgttttgtgcgcacacatgggctacctagctcgctctgataacctaccgtggctgacgaccaccagaaaccccacggcgaagaaacccggggtagggggagcccccgcccgaaaaaacaaccgcacggcgaggcgcaacagcagcagaagcagggcgccatgatgacggcgctcaaggccgcgacggacgcgaccttcggcgggtcgatgctggtgctgaccgggctgatcctggccggcaccgtgatcgcgctcacggtggccacccccgtgctggtgatcttcagcccggtgcctggggcgccgccatcgcgctggcgctcat

SEQ ID NO: 14043 - DNA, 376 bp, Zea mays
  unsure at all n locations
  Clone ID: LIB3150-059-Q1-N1-B4
attcgatctcgtttcaaatccatccatcctcgtttcctccgtcccgcagcatctcaaccccatggccaagatcaagatcgggatcaatgggttcggcaggatcggaaggctggtggccagggtggccctgcagagtgacgatgtcgagctcgtcgccgtgaacgaccccttcatcagcaccgactacatgacctacatgttcaagtacgacactgtgcacggacagtggaagcaccatgaagtcaaaggggaaggactccaaaacccttctctttggtgagaaggaggttgctgtgtttggctgcaggaaccctgaggagatcccgtggggttcggttggtgctgaatatgttgntgagtctactggtgttttcac

SEQ ID NO: 14044 - DNA, 400 bp, Zea mays
  unsure at all n locations
  Clone ID: LIB3150-059-Q1-N1-B6
aaaaaaaaaaaaaaacgtcccngtttaaaaaaaaaaaaaaaaaaaaagggggggggaatnntttgaaaaaaaggaaaaaaaaaaaaaaaaaaaaaaaaaaaaaaaaaaaaaaaaaaaaaaaaaaaaaaaaaaaaaaaaaaggggggggntncccccccatgaaaaccccccccccccccccggcccccccccccttaacggggggggnntcaaaccccccccgccccaaaccccccccctcccccccccccaaagaaaaatggtttcccattcccccccccccccccaccccggccccaaaaaaaaaaacccccccccccccccccccagggcccccccccccccccttgccagccccccccccccccccccccctttccgaaacccccccccccccccc

SEQ ID NO: 14045 - DNA, 205 bp, Zea mays
  Clone ID: LIB3150-059-Q1-N1-B8
atcggtgacagtccagctgggacgcccggttgctaccctggcatgtgctaggccgcgtggcggccagcatgctagacgtgccctactaggaagacgacaacggtgtggtaatgacggatggctcctagctccgaaccgcagacacgggtgtacgaagagtacagctactaatacgccacatcggcaaacagcttgcccgaatacc

SEQ ID NO: 14046 - DNA, 340 bp, Zea mays
  Clone ID: LIB3150-059-Q1-N1-C8
gggaaactagagctggctaaccctcggatcgcgaatggtccacagagaggcaaacggcaagactcgctgaaagctcctgatctcgcgcagggggggtcgcctgagatcacagagacaatggtgaaagcaggtgctggcctcgccggcactgatgacaagggcaccatctgattttcacaggaaggggatggtgcgaccaccgggactggaagtatctgtggcctcaagccaggctctcatgggttccatgtacacgcgctaggcgacaccaccaacggctgcatgtcgactgggccacactataatcctggtggcaaggagcagggagcaccggaagaag

SEQ ID NO: 14047 - DNA, 383 bp, Zea mays
  Clone ID: LIB3150-059-Q1-N1-D4
atgcgctatgctgggattgcacacagacgtaacctcgcgtcctgtgtatctggccagtcgtacactcgagctgtctagacctcggttcgcgaatcttcacagagaggcagactgcaacgactcgctgcaagctcctcatctcgcgcagggcgggttgtctgagatcacactgacaatggtgaacgcagttgctgtcctcgccggcactgatgtctagggcaccatcttcttttcacaggaaggggatggtccgaccaccgtgactggaagtatctctggcctcaagccaggcctccatgggttccatgtgcacgcgcttggcgacaccaccaacggctgcatgtcgactgggccacacttcaatcctgttggcaaggagcatg

SEQ ID NO: 14048 - DNA, 373 bp, Zea mays
  Clone ID: LIB3150-059-Q1-N1-F7
agccgtccaatccctttttaaaaagggaataataaaatgggcttattattccttattactccaagcaaggatccggattgctctgaattgactgaaccatggcggcgacaatggcagtgacgaccattgtgacgaagagcaaagagagctggtcgtcattgcaagtcccggcggtggcatttccttggaagccacgaagtggcaagaccggcggcctcgagttccctcgccgggcgatgttcgccagcgtcggccttaacgtgtgccccggcgtaccagcggggcgcgacccgcgggagcccgatcccaaagtcgtccgggcggccgacaactgcgacatcgcgcgccagcttggcggccccgttcccgggca

SEQ ID NO: 14049 - DNA, 269 bp, Zea mays
  Clone ID: LIB3150-059-Q1-N1-F8
agccttcggttaccccgcgggcgggggccttccgggttggaaaccgattttttttgggttttgggctttttctaatttctaactaacaacggaacggtacaatggcctaatctgaaaacctaccctcgtgccggggcatgcgaaacgtgacacaagtagtcttcaagcgtacggatttcaacgacttgacggatctgcggccaatggactgactggggtcacatacgcaacctctgcctcgttggctcactctgggaccgccttcgtca

SEQ ID NO: 14050 - DNA, 255 bp, Zea mays
  Clone ID: LIB3150-059-Q1-N1-G3
ctggaagtcggtgatggggtttttgaggtgctgtctacatcaggtgacactcaccttggtggtgatgactttgacaagaaaattgtggattgcttcgttggaaacttcaaaaatgatgagggtattgacttgctaaaagataagcaagctctccaacaattgaataaaccggatgaaaaggcaaaaatggagctgtcatctttgacccaaacaaacatagccttgcctttattacagctactgcggatggcccca

SEQ ID NO: 14051 - DNA, 325 bp, Zea mays
  unsure at all n locations
  Clone ID: LIB3150-059-Q1-N1-G7
aaaaaaacatttccgggagtccgaaccaccaccaaaagggcggcaggccaaaggttccgcttcccacagctgctagctagctagcgtttgcaagagtagcagtagcgctccatcgagcaatggccgtgatggccgaagtagtgttgaccaccggcgcggcgcttccgagcccggctcgcagccgctgccggncgcggcgaagaacgcagacgctgagaagctccagttcatcgaggagatgacctccaacgtggacgccgtgcacgagcgcgtgctgggggagatcctcgcccgcaacgccggcaccgagtacctcgccaagtac

SEQ ID NO: 14052 - DNA, 55 bp, Zea mays
  Clone ID: LIB3150-059-Q1-N1-H3
gcgcgggcaacgacggccgccgtggacctggactcttcgaacccccaaatcgcga

SEQ ID NO: 14053 - DNA, 287 bp, Zea mays
  Clone ID: LIB3150-059-Q1-N1-H4
cggccgcccttttttttttttttttaatatatattctgtctattttgtgttttttttttaactagtggcggcgcgcaaaaatcacttgttaagctaccattttatatcaaaacccgggtaacagggaaaacaaattttccacagactacattaaaaatagcgctggataactaccaacggatgcccgtgatttaaaaccattaccaaaaaaagagggggcggggaaaacaaaagaaaaaggtaaaacttgaggggaccaacccccctctaaacaaaagcagcctaaa

SEQ ID NO: 14054 - DNA, 226 bp, Zea mays
  Clone ID: LIB3150-060-Q1-N1-C2
tcggtgccggacagcacctgcactgaaggagtcggatggtccaggactcgtgacaacaaaaaatgctggggatgcaataacccgtttgcagcctgtatctggacccactagagacagcagccagatagtggtaacaggtggcataggacatcgagctgatggtgaagcaagagtgcaagaacggagacatacaacacgggccatactaggatctgctcaagggaac

SEQ ID NO: 14055 - DNA, 208 bp, Zea mays
  Clone ID: LIB3150-060-Q1-N1-G3
cgggcgcacgttttttgtatcctttatagcgatccacgcgttcgtccacgcgtccgtccacgcgtcggcgagcagggcctaattacgtttttctgcgccgataactttgaaaacgtgtggaacagggaaaatacattgtcgccggactcgatagtgtattggcgataagacctcatacttcctccgaattggtcgtgacaatacgcgg

SEQ ID NO: 14056 - DNA, 66 bp, Zea mays
  unsure at all n locations
  Clone ID: LIB3150-060-Q1-N1-H11
ggcaaccaaaccatctcgactcgtggggaagtttcgctctcgcggnggtcgacttcctaaggttcg

SEQ ID NO: 14057 - DNA, 328 bp, Zea mays
  Clone ID: LIB3150-061-Q1-N1-C4
cggacgccccaataattgaccgccgcctcctggcggcccaccagttcctattatgaggagtcttataacagctcgtcgtcatgatcatcatagctgcctgctgggagaaattgttctctgaccacaacacaccacatactacccgccggcatcataaggagagccggctgtgccgcctgaggaggcgtcctaccaacaatagctgcgcgctgactactggctgttcagcaggcaaaacagctgtgccgcctgctgtaatgaagaatccaacaccccgcgagaagaggcttgcttattattcgccaccatggtggttcttcttttcacc

SEQ ID NO: 14058 - DNA, 211 bp, Zea mays
  unsure at all n locations
  Clone ID: LIB3150-063-P2-K1-A11
atcccaaaccatcacncatcatcaagccgcccatttcaaacaggtggggtagcaaacaacaaacttttcataaaaataaaaattttccaacctttttatccataccacaattcaacacacatttcacccaatattattttttaccctatcattccacaaacaatcaaatccccctatattatctcaatccattacttttcccaattcccca

SEQ ID NO: 14059 - DNA, 419 bp, Zea mays
  Clone ID: LIB3150-063-P2-K1-B11
caggaaaatctacaaacttaatatcagaaggtaaaataacaggttgcaatcagccatggcaataaaaaaaggctggtgacgccaacagcaatagccacatgagttcataacaccagaacagaagaactagccaattatcaaaaagattcagataagtttgccagctcgtttgaactgctgaaggtacaaaaattctttttagtaaccgcccttgagatcgttgaccacatcataaggaataggagggactgtctcgagtgtagcaccctcaaccatgaaaccaggtttgtttcccacaggcttgcttttggtgctgtacacctcaccgtgggccttggcataccgcttgaggtgggtattcttggctttccttaatcggaacttttccgtgaaacgggggggttttacatttttcacgc

SEQ ID NO: 14060 - DNA, 344 bp, Zea mays
  unsure at all n locations
  Clone ID: LIB3150-063-P2-K1-B6
gccggaattcccgggcgggcgcgcctttttttttttttnnnaaaaacataataccacaaatttaataagtatcattagtgattacattatcggagggtgagaaataataaccatagggggtaatgcagcggaaataactaacggagaaaaccgagtaacatggtgaagcctggccacactactcctcctggtcctctcctgcggaagcagtaacccactcgaccgtctatcccggtggcagggatggaggccaagtcacaccattaaccaaacattctaaagagtacctttaatttaacacttagatagtgtttgttgggggaggtactatttttctctgcttt

SEQ ID NO: 14061 - DNA, 344 bp, Zea mays
  Clone ID: LIB3150-063-P2-K1-B9
gaatgaactcgtctcttttttcaccatcgatctctgaccaacaggcgctgggtttgatgctagctaccgcggcaccattcaccaccatatattgttcaacacgcatcatagattctattacaccacaagtgtatcagagaggagaaaatccgacattaggctaatgagaagaaaaaaaagaatcccatagttacatcatcactcatgcctcatgcccgagatggcgagcctcatcatcttaaaattcatcacttgccccagaaaaccaatggtcaccacagcttaatcttatgccgctttcgaaccgaagcccttagtagaaaggaggaggatcgtcgttattc

SEQ ID NO: 14062 - DNA, 226 bp, Zea mays
  Clone ID: LIB3150-063-P2-K1-C2
aaaataaaaacatacaattgtttttgttataaaaacaaacccttcaagagggggtattcttgttggacagggggtcaataccccaacctatatctactgtcaagctaccttaaaaatgtggaaatactcaccaaggtgtaaacacttttaaattaaaaatttcgcttaagtaccaaaaaaattacttgttaccaaaataaaacaatcttcaactacttccttcctc

SEQ ID NO: 14063 - DNA, 362 bp, Zea mays
  Clone ID: LIB3150-063-P2-K1-C7
gaagcctcaaaactctgcactttttatcaggtgtactagatacaatgggggatggatagtaccgtaccattgggggttcatctataataactaaacagtcatttacaaatcttacggggttatatagcttatagcatattagtatgaggaatgagtcatcttttacatccaacttatgcacaatccctactcagaacttgcccttaatgaaaccgcccaagccattgatttttaagaattttttgatcacaagtgccataatagcaagagtcagtccaaatgctgtcaaggttaacagcctgtcatgctttggcttcttgatcgcaacatcaggattcttgggagactaactaactcttgga

SEQ ID NO: 14064 - DNA, 436 bp, Zea mays
  unsure at all n locations
  Clone ID: LIB3150-063-P2-K1-E1
aaaacataaacataattttccatatagcaggcagtgtactccgaccgaggccactgaaagcgatacgggcatacagtcgacgaacacacgcctagctacgacctgctcgactcgatcggaatcacaacacaccagaacagctaaattatcacccaacatccagatgattaaccaactgggaaacatgactgacgaaaggaaactaatacggagtaattattattagacgggatgatgaccctcctgatgcagatccaggcctccctctccttgtgcggntgtgctgctgctgctcttgattattacttgtcttccactgaagcaagtggcgttgccgcctggctcgtgcctgcgacgatctcctttttgggctggggcagatccttgaggaatcccttgacggccgccgccagatccttgtagcgcttccctattt

SEQ ID NO: 14065 - DNA, 444 bp, Zea mays
  Clone ID: LIB3150-063-P2-K1-E3
agggggaatattacatttggggagagaagaaaatcacagaacttccagtaacatgagcattttcactcagcagagcagtacaaataatcagagtttcaaaatgaacaaatccatccgggtcataagcatatgaaccacagcatgatttaagaactggcaggccacacatgccagatcgaccacagctgagaacgtcacaacgtacatgttcctggatgcatgggtatcataaaaatgcaaaaccatgacattcgacatggccccagaaatagacatttcactatgagtatgaatggaacaagattacaattgcaaacatgcattgatctgccttacctctaacaaataagcatgatttcagaatcctggggtttgggcttcagtcattcagtggcacagaagtcctaacctctgattccccaaaccccttgaaaattaatcttg

SEQ ID NO: 14066 - DNA, 359 bp, Zea mays
  Clone ID: LIB3150-063-P2-K1-G12
cggggcgggcggcctttttttttttttttttttatgcaaagcctctttttatttacccctgctactatctaaagtcgatatagggtacattcatgctagggtagtgtatttaatacacacacaaaaaaaatatgaaacagtgagcaagataaattaaacatcattcttgggatacatgaaccaaaagagtcgagcttacagcagcaaaaaggaaaccaagggtacttacttgctcattctccccgaactgtgattacattcatcttgcggattgcatccatatcgacattttgtgcattgcatatttgcatgcatatcatgttgtgggagcgcagttgctacggcccttgccatgacat

SEQ ID NO: 14067 - DNA, 383 bp, Zea mays
  unsure at all n locations
  Clone ID: LIB3150-063-P2-K1-G5
tngnccacatcgnctttcttttaaagaatcaaaaccgcaatctagggggggttataaagccagtggggtgggcaacaacacactacagacgttattaggaaaactttaaacataagcatgcgccccccaactcgagataacattgtccaaagcattccgttactcctttacactgctcttggtaaaagattttgatatcaaggcactgccactagctttaagaaggctgttaaaggtatgcactagcctcactttcaaatcttgcacatggacatgttcttctccgtgttttttttcattaccttggccactgatcattttaattgcttcttggaaacgttcaccctttttttacgaagagcaaacattttctaccctttttc

SEQ ID NO: 14068 - DNA, 432 bp, Zea mays
  unsure at all n locations
  Clone ID: LIB3150-063-P2-K1-H3
cggcggaggcttcacacacacacaccacgagcggaaggagatcgccggaagtaggggggaggcgcggagatgagcggaagcgcgttcaacgcgttcaagtcgggggtggccgtggcgtgtagtccccggctgtacatcacgctggtgcggggcctcccgggcacgcggcgcctccaccgtcgcacgctcgaggccatgcgcctccgccgctgccaccgcaccgtcgagcaccgtaccacgccgtcgctgctcggaatgctcacccaggtgaagcgcctcgtcgccgtcgagaccgaggagatgtacaacgcgcgcaagcatgccgaggcggagaggcgcgcgcccagacccccgctcgtcgtctcccaccaccagccaccgncgtcggctttgaagccggcagcccgcgccgcggagggtgctgctgccact

SEQ ID NO: 14069 - DNA, 327 bp, Zea mays
  Clone ID: LIB3150-063-P2-K1-H4
tggctttattatattattatctttatgagatcgccgggagagcaagaaaacaataactccaaacttaataacgcaataccaaagcggggggatagagtcttacaacgtaagttgtaaaccacacaacgacagatagataagaaccgccagaaacataacacgataggagccacttagggcagatcacaggatagcagtggcacacaagcccgacgactccttgccagtagagcgtttagtactctgccttctcgagcgcagccagatccttacgaacctcagaaaaattgtcctttttcatacccttaccgacagaccaattcacaa

SEQ ID NO: 14070 - DNA, 393 bp, Zea mays
  Clone ID: LIB3150-063-P2-K1-H8
ctaccaaaattttttatctatgacggcaaataccaaatcaggggcttctttaacaaaacagaggactacaacaaaccaatttcaatcatatcaccaataaccacaaacctttatcacaccattttacataacaaacccaaaaactccaatataatacaatcactatagccacaaatacaattttcaacaaaaccacctttaactttttcattaaaaacaaaaatactatcacctccgaaaatttaatcaaaaaccccacatatcctttatttccctaaagctcacaaaacacccatttctaaaaaccccttctcactttcataaataataactctaccaattttttcattatacccaattttaaaaaaataccatcccttcacaaattttctt

SEQ ID NO: 14071 - DNA, 244 bp, Zea mays
  Clone ID: LIB3150-063-P2-K1-H9
aaaaccaccaaaaaattttcatggggtattataaaaaagagggggtgttttaaaaaaaaaaaaccaatttactacattacaactccaaaaaaatatcaaattttaccactttattcacaacacaaacttttatttcccatccccttttacgattgccaaatcctaacatttattcctttcaattaacctttccaatttttcacactttttctccaaaccataaccagttattaatctctaaaaa

SEQ ID NO: 14072 - DNA, 349 bp, Zea mays
  unsure at all n locations
  Clone ID: LIB3150-064-P1-N1-A10
tncctgctaaatcatatcggagcacacaagaaagaaatttatttcccaaattctatggcatactcttccnnaggaaccanttatctacatcaattgtctaccctttgttttgcggtatttttaaaagcccttctcaaatctttaatacactttaattaacccttatagagtgttacaaatgtagtttctccttaatgaagatattctttaagaagcttcaatttatggtaataatatacttgtcacttattagcttccaatttgtcatattttttttcagttgcattcatttttttttatacattttaaacttctcttttcttatttttatgattttcaacttcatttc

SEQ ID NO: 14073 - DNA, 421 bp, Zea mays
  Clone ID: LIB3150-064-P1-N1-A5
ttattcaccgcctccccgatctcgtcgagaggaggcccattcccgaaaccgtggccgtattccaatggcgcccaaggccgagaagaagcccgccgccaagaagcctgcggaggaggagccggcggcggagaaggccacggcggggaagaagcccaagggccgagaagcggctccccgcgggcaagtccgcaggcaaggagggtggcgagaagaaggggaagaagaaggcaaagaagtcggtggagacgtacaagatctacatctttaaggtgctgaagcaggtgcacccggacattggcatctcgtccaaggccatgtccatcatgaactccttcatcaacgacatcttcgagaagctggcggcggaggcggccaagctgtcgcggtacaacaagaagcctaccattacgtcccgcgagat

SEQ ID NO: 14074 - DNA, 115 bp, Zea mays
  Clone ID: LIB3150-064-P1-N1-A6
ttggctagtccgcggggcgcccactcccaaacgccaaaaccctatctccccgggcagccacccaccccaagcaccgtggtgccgccttgcgctcgcccacaggcgccacgtatgc

SEQ ID NO: 14075 - DNA, 305 bp, Zea mays
  Clone ID: LIB3150-064-P1-N1-C7
ttctttcgccgacaaaaccagaccatcaaacaggtgccagcgccctctcgcaggcgccgcaatggagagcaccttcatcatgatcaagcctgacggcgtccagaggggcctcattggtgagatcatcagccgttttgagaagaagggcttctacctcaaggccttgaagcttgtgaacgtggagaggtcgtttgctgagaagcactacgccgattctcgcctccaagcccttcttccatggcctcgtggactacattatctctggccctgtggtggccatggtctgtgagggcaagagcgtcttt

SEQ ID NO: 14076 - DNA, 240 bp, Zea mays
  Clone ID: LIB3150-064-P1-N1-D4
acatccttttttgtttacggtaactactctacctccgaacggccttcttaatatacaccagggctctctctaccccttctcaaatccttttttccatacttctccttattctacctctcgtcaacattacttgacctactactcactatcattatacatgctaatataaaaacttgaccattaatatcatattcacattttactattaatatatcacatactttcaccccattattttca

SEQ ID NO: 14077 - DNA, 167 bp, Zea mays
  unsure at all n locations
  Clone ID: LIB3150-064-P1-N1-D5
acctcaagttacctccatgtgcactgtttttttgttnaaaaacacacaaaaaaaaaccatcaaaaaaacaaacaaacaatacaacaccaaaaacaacactaacaccaacaacacaaaaaacaacctcccacaacaaattaaaaaaaaaaaaaaaagccccccccccc

SEQ ID NO: 14078 - DNA, 128 bp, Zea mays
  Clone ID: LIB3150-064-P1-N1-E11
tctacttgatgggctacaccaccatgaagagctttttaatactctacggggcttatcactttaccaatttcttccccttctaatagcgccaccagatccatcccttataaaatctcactcgatagctt

SEQ ID NO: 14079 - DNA, 120 bp, Zea mays
  Clone ID: LIB3150-064-P1-N1-F12
ttctcttgtcttctcctccccctcttaccaagggggcttcgtgttagggttactgagggttttgtggagggtcgatggcggtggttgatgtggagtaccgttgctttttttagtgttctt

SEQ ID NO: 14080 - DNA, 184 bp, Zea mays
  unsure at all n locations
  Clone ID: LIB3150-064-P1-N1-G3
tctcccttggcgagcgtctgtgaccancaaggtgtggtagcttgtctcgagagtcaatgcattgttctacgctacataactacacacactatctcatgtgctattttggaccgctttaacagccctaataactgcaaagccatttctcactttcatgtatcacacaaaacatatattcatactt

SEQ ID NO: 14081 - DNA, 149 bp, Zea mays
  Clone ID: LIB3150-064-P1-N1-G7
tctttcctgtacttcaacacccttctctcttaggaaagactatttttctttattcgggtgcgactctcccttacaacatcccatttttcttccttctttcactcaatttatctttctataactactttatatacatcactattctcata

SEQ ID NO: 14082 - DNA, 354 bp, Zea mays
  unsure at all n locations
  Clone ID: LIB3150-064-P1-N1-H1
acgtccgtcctctctttcccgctccntgcccaaagcaggctctactttttgagggggcaatccanaccatgctaaccaacccactgtccttcataagctaggtggccagttccacctgagctccatcttctttgaaggtgtactttcccgtaacatctgcctttctttctcatcttattaaaggagatttgtcactaggaactacattacccatatccttttgtgcccttcaatgtctgttagcggttgcatcaattttccattgattcccactccgttttttgccaattctccaacccttaaatactgctcaaactttattaattattttcattattttcctttattttcaac

SEQ ID NO: 14083 - DNA, 233 bp, Zea mays
  Clone ID: LIB3150-064-P1-N1-H10
ttttcctgtctagaccagccttcaaactattggggagggctccctctccgagaaagcagacaatcctcatctcctcctgcttcctctctctctctccctcgccgtaccttctttacaccaggactgccaaaatgaaactcgtcagattccttatgaagctaaacaatgagacggtcaccatcgagctcaagaactgcactgttgttcactgtaccatcaccggtgttgtcata

SEQ ID NO: 14084 - DNA, 156 bp, Zea mays
  unsure at all n locations
  Clone ID: LIB3150-064-P1-N1-H7
tttcttgtttactgatgctattgntgcggtgaagtttgtacattggagccgcggggagagtttccgcccaatgatagtgtatagggtcacgcataataacacgatgtgctggctgatggtgcccattcaggcgagagcgatgttatcaacccatct

SEQ ID NO: 14085 - DNA, 257 bp, Zea mays
  Clone ID: LIB3150-064-P2-K1-A1
attatctcatatgatctattcgaacacaactgtatttaatacatcaactgaaaatacccacaagagggggtagaccctgctcaagatatcacgggcctaggcaaaaaaacgttctacatctcacattgcaacctgaaaactactatcaactcactaaagaactagcatttccagctccataaacgtgaaacaagcaaagaaaaagccgttggattgtacaagctttttgaagcatgataccatgtttataactcctg

SEQ ID NO: 14086 - DNA, 381 bp, Zea mays
  Clone ID: LIB3150-064-P2-K1-A5
attatacggtaaggaacctttcaaatgtgcacaagtatccccaaagaacggaaattcacgtcgtgcggattgctccattttccgctccaactttccatacaggtataaaaccaaaaaaccacaaaagaaaagcaatccagttaaccaaacttcaacacattattttccacccaaggaagcattacaaaaacaatttcaataatgtgattagcataacactaggattcccattttaagacaaaaccttaaattttaggccaagtaactggaatcgcccattcccacaccttaaaagtttgcccaccaattcaccataattaacttgccaatccacttagtttaaaccatttcgaaagctatttaaatttttttaaaccaatt

SEQ ID NO: 14087 - DNA, 406 bp, Zea mays
  Clone ID: LIB3150-064-P2-K1-B11
ctaaaaaaaccggaaatttctcgtgttttgacgcgcccactaaatctatacatacattgatcatatttaccaacccatcacttgtttacctaatattcacttacacattgcttcaacatttatatctcaaatatattaaaacaaaataaaggatatttttataaaccaaacctttcttttatgatcaaaactcacaccacaattcccttattaaaactcaacttaaatgatcaatttcaatcttcctcaaaaatcttaaatttatcttcccccccaaatttcttttcttccattcccaccaatctatttaatcctcactaaacaaaatcctttttattaccattacttttcttcccccaccaaaaattacaacttttccttttaccctttttaacctccctatttt

SEQ ID NO: 14088 - DNA, 180 bp, Zea mays
  Clone ID: LIB3150-064-P2-K1-B3
ggctagaccagcaagattaccttttccatcaaggtcattttaggcaaacgacatggcaaccagttcttaccaccactcgtcagaatctagagagattgaaaaaaaaacaattcttttcttcttttggggctcccaccacaaaattacctgagtagctctcgagcaaacactaccatacat

SEQ ID NO: 14089 - DNA, 193 bp, Zea mays
  Clone ID: LIB3150-064-P2-K1-B5
gggcaaacagatttaaattctttttttcaacaaaatacatctgacgttcaaacaatctggaactgcgggccgacattcttccaatcacaccaatatgtccaagaaaatccaatggccaatggagatacagggaatgttacttaatactacctccgttctcaaatatttgtcgcccgctagttcatttttgaac

SEQ ID NO: 14090 - DNA, 387 bp, Zea mays
  Clone ID: LIB3150-064-P2-K1-C3
actcaaaaaagtataggcttcaagcacaattgttccaatattacaggagattgtggcagcattggaatgagcccatatttttttatacatgaaaagaactaggcacgctaagaaaacaaacccaagtttcctcaagacgctatctagtagttcctgtaactcatcgagtgtcctccctacagttattaacacctgaaagggaccctgagtctatcaccctaaactcccagaaacagttgtacagctaagcagagattatgacaggattaccgaggtcaccagccttgctacttcaaggagacgatccaggttatgctagtaaggtgttgaaggtacatgatgtgattgaaaatggatgcttccatagtacctttgtagaccacaatt

SEQ ID NO: 14091 - DNA, 309 bp, Zea mays
  Clone ID: LIB3150-064-P2-K1-C5
ggacactcgccagccgccacaggactgccccatgagttctatggatcttttgggggcgggacaaaatgtaactgttgacacatcttgctctcaacattgcacggcagaatgtccatccggcaaaataatctaatattgtcgaattggtatggcctcaaatttcagccacacagagataggacaatcataaaccgaacctcagctgcattaacatgacacgaaaaaaaaacaagaaatacacgtccaaaacagagcaggcagcgcaaaggaccaatttggtttgcgcttaggccttccgccgaccaactt

SEQ ID NO: 14092 - DNA, 114 bp, Zea mays
  unsure at all n locations
  Clone ID: LIB3150-064-P2-K1-D2
agtgtcaaaagagtcacttgtgatgttatatcaaatnntcagaagtgtgcataacacgagtggtatatggaaccgatgtgggaaggcatagtctacanaaacnntctggtttca

SEQ ID NO: 14093 - DNA, 321 bp, Zea mays
  Clone ID: LIB3150-064-P2-K1-E1
gcattgcatatatggttccaacgcattcttttcgcattggaaagatcgcccaatctaacaaaataatgatggcaaaccatgcctcgtacaaaacaaaggcgacgtcttccatagttgctgaacaaatatcactgcgacaaaaaattttcccaaccctaaatgatacagggtagtgtacactccaaacctttcttaacgtgcctcggtaccttaatattctactatttcaagtcaaccttttctttatatgtacaaccttaaccctttattataacattgtcatctaatcatccatcctttactcattcctctttctctttc

SEQ ID NO: 14094 - DNA, 163 bp, Zea mays
  Clone ID: LIB3150-064-P2-K1-E2
cccaaaacagagcatctaaagacgatggagggggtccatatttttttattatcccctaaacctatcattaaatttaaattggcgaaaaatagtgcccaaagagaacttttttaacacttcacccctaaaccatactttttactacatgttagcaagcaatttc

SEQ ID NO: 14095 - DNA, 391 bp, Zea mays
  Clone ID: LIB3150-064-P2-K1-E3
agccaataatgattcattcattcattaggagaaaggagatgagatctcatacatggttgattcagaggacaggcgtgggacattatcagaaattcataatgcagcagcctatgaccaggcccttctcttgagtcagtcacccccacttcctcgcgcaagcaggctgacaaatgttggaacactagccacacagtggctggctgtctaacgcaaacaccactcgagagtcgagaagaccgcgatgcatcgcaccctgcctcttttatttggggatcgccgcagccagcagaattattattagggtaccagctagtagtttctttcgttcgttcaccaagggaggatcttccagcgctgtgtgtctccctcgcaccactttcagagcacgatc

SEQ ID NO: 14096 - DNA, 466 bp, Zea mays
  unsure at all n locations
  Clone ID: LIB3150-064-P2-K1-E7
gcgggcgcgctttttttttttttttttttgaccggcgtaaccagaaaattctttttaattaatttcacacatactgtgacacgaaancatcactttttggtggagagattgcacnacataaaaccacacaaagcagccgctcactgtcacgacggcgagctcgttgctccgtcacgcaaggcagccgcctagcggggcgccgacgtaacgtttactcatatctcgccgtcccatagctcgtcgagggacttgtagggcccgtgctcggagacgtagcgacggccctggttgatcttccgctgggggatcttgctgatgcgctgcctctcctcctcgctcagctcccagtccacgatgtccaggttctccttcatccgcccctcgtcgaaactcttcacgatcaagcagtccccctgcttgtacacccacctcaggcacacctgtgccacggtcttgcccttggact

SEQ ID NO: 14097 - DNA, 354 bp, Zea mays
  Clone ID: LIB3150-064-P2-K1-F2
gcgaataatcttaattttaaacttgtttccagacaaaatcttaggggcagatggaaacaagtagacaactggaaggtcacgtcataagcaacctaatgtccagactcgcctagatatagaagtagcaaacaaactactcggcagcagcaacctcctgcacagcctcatctccctcgacaggcctctcaagcttcacaccaacatcctctttgtagtcgccatgaacctccatgagcttcccaagatcgaacttgggggccttgagtatcttcaccttgcggatgaagacgttttgaagtgggaagatgctggaggtagacttctcaatctccttaccaataacttctgggaatg

SEQ ID NO: 14098 - DNA, 437 bp, Zea mays
  Clone ID: LIB3150-064-P2-K1-F4
gacaacatcttggctgcacattgttatagctcgacgagcagaggaaattataagcgggggttcataggaccgtaggcacaagtgaggaaactactgcggtgtgatgcgtccatatacatacgcagcaaacttcttcgtactaccagataaacaaatacacggtaacagaggagaggatcccttcgcttcgcctgtatcagtagaaccttttttttttgtttgccagcctacggaagaacggtcctcacctccttcctgtctacaccaaacgactccaaaccgcagtcattaacataaacatttgtgaagagctcatatggatcaggcagtggacactccttcgctttagcaatggcagcgtcgacttgctttctgaactccttctccatgttctttagctcttgggccgttgcgaactcatggaccaacatgagctt

SEQ ID NO: 14099 - DNA, 323 bp, Zea mays
  unsure at all n locations
  Clone ID: LIB3150-064-P2-K1-F7
gaacggaaagtgtggaccaaagtttgcttcaattctgccaaattattaaaccgactgacaaaggcaaaaaaaaacgatgggtgtaanatcagacaaaatctgcccaaacattcactaaaattttgccctgagaaagaaaaccacaagcccaaaactgtcatcgtaatctttgggcgccaaccaaacgcgtttgccactatttgaccgacagcgcatttgaatctagcattggggccaaccaggaatgccagcaacaacaacgagtgcattaggtgatgaaagcacagatggattcacatacaacagctggtacaaaaaaagac

SEQ ID NO: 14100 - DNA, 209 bp, Zea mays
  Clone ID: LIB3150-064-P2-K1-G7
ggcccggcccaaacaaacaccgaaccagggagagaaaaaaaatgatagactgttattcctaacctaacctacgaggcttccaactacgggggggggggacgttggcccgccggcccccccgcgtagccgccggaaaaaccgcgttttgggccgccttcttctaacgggcatttggcccctcctttcttggccttccagttgttgaagca

SEQ ID NO: 14101 - DNA, 268 bp, Zea mays
  unsure at all n locations
  Clone ID: LIB3150-065-P2-K1-A1
gctataacattcacatcattccatgtgcaccacaatacaagcacagaccaggggcatagtcncaaaatttcaggaggctgcgccacaacaaggccctcatacaggcgctgcgaatagcaatggtgcaacaaaaaaaataaatctagaatcactttaatccaggtcatcttcagcatcggccgtttggaggccaaaacaatgccacttgtatggtttccaacagcttcaccaccctcaaaaccaattgcgtcgagtgaaaactacttca

SEQ ID NO: 14102 - DNA, 214 bp, Zea mays
  Clone ID: LIB3150-065-P2-K1-A10
tttttatttcgcgcgcactaacgatttatttatgggttcaatctaattacaggcgggtcctttttactgttactacaaataattaacttaaaaacacccaccgacccccaactaaatttttacataacctaaattggatacacaaacatgcctactaaaaaaaaaacacgtaccaataccccctttctaacaaacgcccaccctctatttctaa

SEQ ID NO: 14103 - DNA, 350 bp, Zea mays
  unsure at all n locations
  Clone ID: LIB3150-065-P2-K1-A3
aacacaagaacatactgcagccttaagtatcatagatttactcntttcanttgcatagggcatcagagtctagggagaacgaacaaagggtcccacaattcaagcctaagggctcaacattgacaaatttattacgagaaagacaatacgacaatctgcttgttcacattgactccagatgcaaaagaccacatgcagcagaatgtatcactccaggatagggtctatttaagcatcagcaaaccccagttcggagagcttgaggtgggcctctttgtagtcatcaaagaaagcctttttaatcgcaggatatttcttgacaagagggccgaaaacaaggtcactcaaca

SEQ ID NO: 14104 - DNA, 230 bp, Zea mays
  Clone ID: LIB3150-065-P2-K1-A7
ggaaacgaaatggctttattcttttaactctgaaaagggccctcccagattaggcgcaaggggacactatctcaacaaccgacaccacatccatcctacaatcctccagtatacggtaacataagtaaactaggaataggaaaactttggtacggagctaatgacatcatgggcacaaatgtacacataaggaaggtatcgccagtggtggatgctcagggaacggaggc

SEQ ID NO: 14105 - DNA, 270 bp, Zea mays
  Clone ID: LIB3150-065-P2-K1-B10
ccaaaaacatcttaaatattttgcattggttcatggtcttaagaggagggtttatctttctacaaaaatcataaagaagcaaatggccttgaatctaaaaataaccccacttatattggctaacgggacaaatcacaccatggcatatctacaaaattacctcgcttggagtctgggttcccgcacaatttgcctgcgccttatgaatactacatgtttctggctagagagcgaaaacctattgaaggaaaacaaaaaggcttttccacc

SEQ ID NO: 14106 - DNA, 310 bp, Zea mays
  Clone ID: LIB3150-065-P2-K1-B2
gcggcgcttgtttttttttttttttttttttttttttcgagtctaaagtctaaactgatatatgatcatgcaacagggggtgcaacttatttgcgcgcgggggacaaaaaaaatgtccaaaatcaaaatacagagttgcctgatttctaaatactttctcttgcacttgcactgctgcccacttttaagcattagtttttgacctcactgaagacctaatttaagttaataaaaatattcagcttttctttgaggatatacaaccttgtaaacttcttccgttcccaaaatcttgttccttttagcttta

SEQ ID NO: 14107 - DNA, 286 bp, Zea mays
  unsure at all n locations
  Clone ID: LIB3150-065-P2-K1-B7
gacgtcgcgcacgtccaccatgttcctcgtcttctcctcggtgttttctcctttcaggtacgtcacgaagcgcatgctggtggcgttgagccggggctgcagcancggccccagaacccacggcgggcagacggtgaccacgtccatcgtcccagtcctctcgccgtacgccagcgcctcgcgttcggccaccgtcttggaaacgcagtaccagttcttagtggttctgcagtagtcctcgtccgaccagcagtcttcgtcgacgacggcgccgtcggggatgctg

SEQ ID NO: 14108 - DNA, 202 bp, Zea mays
  Clone ID: LIB3150-065-P2-K1-C1
aaaaatacttcattttttttttttctcccatctaatcctcatctgggcgggttttactcaaggcaggaagggccaaccattctttttactaaaaaaactacccatcccactttcacacaccctattctttctttccacctttccacccatttttattccccccatattttttaataataacaaaaaaaaacaatgttattca

SEQ ID NO: 14109 - DNA, 364 bp, Zea mays
  Clone ID: LIB3150-065-P2-K1-C12
attaaaagtaataacagattagaaagtccttggagaaaggatgggtacagttacaacacgtgccaagatacgacgggaatttgcttcttagaaacagaaataaaaacatgatttcatctatcacagattttcaacggtcaacgcacaacagaaagggcgcaccacgcacgggcctgcactacaacattagaaacagaaacaaaaacatgatttcatctatcacagattttcaatctgcgtcctgcgctgcgctgcgctgcctgcatcagtgccaaaccaaaatgcatgctgttcctcgagactccaagtctgttccggttgtatggcgagccgcgcgccttcttttgctacgccacttggagct

SEQ ID NO: 14110 - DNA, 344 bp, Zea mays
  unsure at all n locations
  Clone ID: LIB3150-065-P2-K1-C2
gcgggcttgttttttttttttttttttttntaagaaactagcaccacaagggctcgacgttaagaattattattgggtgggcacctgcggaagatggtcaggtgcataaataaaaattgaaataagttgacaacagaggcccatcggtagcccaacacggtaaagcagctgccatgattactcatagttgggctaccaaatgtataatcctgtgaatgcaacttccaagcagaacaatcgaagtgttaaacaatatacatttttgtggtgcagctgttcatgggtgtgtttcctatctctgtgtatcacttctctctcttcgatactccttagtggaactcttt

SEQ ID NO: 14111 - DNA, 216 bp, Zea mays
  Clone ID: LIB3150-065-P2-K1-C3
agccaataatgaagcagaccttcagttggagaacggagaacccatctccaagatgggcaactcaaagctctggcgagagcacatgttcagacagtcatacaccagcacgctacgaccaggcccctcatttgagacagaaacctccactgcctggtgcaagcccggtgacatacggtggagcactagccattcattgtgactgctagctatacgcaa

SEQ ID NO: 14112 - DNA, 446 bp, Zea mays
  Clone ID: LIB3150-065-P2-K1-C4
aaactccattctctatgatatgtccatttaacaagagaggaaaaaagatatgtatgtacaactgccacgtggggattggtgccaggaaggtaatgagaaaaggagggaaaatttctgggcagccacaacacacggcactggcaggggatatagcaaaatctgcacatgtctacccgaatcattacttcttcgcaaagaaaaagaaaacgctacttcctctttttgctggggcgaccaccgaaaattttcatgcgggactcagacctgcttagtcttagtcttgctatgacttgcggccaccaccacactgctgctactgatgccagttcctttcttcgtcgttgctcgggctttctcctttgccttgaagtcctctagggtctggaactccttccttaaaagccttttcagctttggaagtttatctacaggaccgtttatttgga

SEQ ID NO: 14113 - DNA, 150 bp, Zea mays
  Clone ID: LIB3150-065-P2-K1-C5
aaactccaaagccaaaaatcttctcattattctcatcaccaaatctgggggtatcagaggttgtggcgagggagcattgcacctacaaggatgcgaacaagttacaagctcaaggcattgattaatcgcacagaggtggcggcgcgccac

SEQ ID NO: 14114 - DNA, 439 bp, Zea mays
  Clone ID: LIB3150-065-P2-K1-C6
gccggaattcccgggcgggcgcgcttttttttttttttttttttatataatcgataattgattatgtattgaagaacagagttttgaaccatggagcagtttggaaggggtacgggggtggggaaaaaaaggacatgggattgtatcttttatgagcacttctactagtaatgttcacatagcatggctctgtaataatactgtttatcactacattcaccattagcatgcaattcgtttgccaaagtagaaggcagtcttatacaagtacctgagctgcagttatgctattaattgtaaccttgaaaggtgagcatgaaacgtaattcattctagttcttcgtgaagaaggtctcattattatggttttcaactcttttttttcacaaattgcctattcttaatgtatagccttatatttattttacttatattttat

SEQ ID NO: 14115 - DNA, 235 bp, Zea mays
  unsure at all n locations
  Clone ID: LIB3150-065-P2-K1-C7
aatcnaaaattttttttttaaaacaaaaccnttttnattagagagggctattttttgaaacgggccgggatcataaataaaaatataaataattttacaacagaggccttattaaaccctacaaaaacataaatatcattaaatacctctattctttaaattcacataaactcttatacattatttttacactcataaaaatccttttttaaaatttaaatcttaatattctttt

SEQ ID NO: 14116 - DNA, 108 bp, Zea mays
  unsure at all n locations
  Clone ID: LIB3150-065-P2-K1-C8
atattataaaactaattttttaccacaaaattntccatatacgcagggattattctaatgaaaggcggcaaaccaaacaaaatatattattatatatacaataattac

SEQ ID NO: 14117 - DNA, 411 bp, Zea mays
  Clone ID: LIB3150-065-P2-K1-D10
ttggtcaccttggcgccggttgggtccttcttctccacactcttgatgactccaacagcaaccgtctgcctcatgtcgcggacggcaaacctacccaggggaggatacgcggagaatgtctccaccaccataggcttggtgggaatcatcttcaccataccagcatcaccgttcttcaggaacttgggctccttctcgagctccttgccagatcgcctgtcgatcttggtaatgagctcagcaaacttgacggcgatgtgggaggtgtggcagtccagcactggggcatagccgttgccaatctgcccagggtggttcatgatgatgactctggaggtgaagctggcagcctccttggcagggtcatccttggagttggaggccacgaacccacgcttgagatccttgaca

SEQ ID NO: 14118 - DNA, 327 bp, Zea mays
  Clone ID: LIB3150-065-P2-K1-D12
acaaatgcagagactaaagcagttcagcaagggatgatggaaggaaacacccaaacattacccaggacacaaacaaaggttttttaacaccacaacctggcttgacagccaaacagattcatgcaagcagatcagtattcctcctcctcgtcgccggcattactgccgccctttgcggcgacctccttgtagtccttcttcagggcggccaggtcctcgcgtgcctcggagaactcccccttcttcatgcccttgccgacgtaccagtgcacgaacgcgcgcttggcgtacatgaggtcgaacttgctgttgatgcgggagaacacc

SEQ ID NO: 14119 - DNA, 360 bp, Zea mays
  Clone ID: LIB3150-065-P2-K1-D9
gatcattcacatggccaattttcctattaacattaaaggtgcacattgtgctataattatcattcacaactgttccaagtatctagtctttccaggacacatttcttgtgtcaagaacatatcactttctggctttctgcatgtgtttaccaagacaaggtagcaaggtctaatacatccctaagctaccctctgatataactgaacactaaatactgtgttctgtactagaactacatgaataaaaaaggagaatatgtagtaagaggcaatgaatgaaaactttggaattgtgcccccaataaataaaggcacctggttgtaatgtataattatgatacacaagtacaagatttgata

SEQ ID NO: 14120 - DNA, 471 bp, Zea mays
  Clone ID: LIB3150-065-P2-K1-E1
aaagaaactacaaactggaactgtatttttgtaagtgggacactctgcttcaggacggcttacaaagaattcatcgtccctattattttaaccaatagatagataagtaacgtaatcctagttatatataatggctacagcaggttccgatggttcgtactcagtccgtacgctctacacttcatgtgattgacctccattctattcatggttgcacgaataaagaacttgaccaacgcttcaacaacagcgaaagaacaaaacttcgctagccatgtgttccacaagttgattggttagctgctaaggtgtcatttgtatccggttcccaaatggtggcattgctagtccagcaatgagaataacggaatccccttcgcattgaaactagaacatttcactactagttcctggccaactttaaattcctttaggccatttgcgctaaatttatgcattccacgcacacca

SEQ ID NO: 14121 - DNA, 333 bp, Zea mays
  Clone ID: LIB3150-065-P2-K1-G1
accatagtctctttatattgcacatgggactaacgaagtcccttatcaatgggatgcattattacacagtggggcgattacaccaaggcattcattgaaaactctgcatcgaaggcattacattatccttcccaatcacacgacactagcaatgttcaaaaccccaactgatccaagctaaaaattaaattaactaaaataaaaaaacggattgcattccaccacccatgccaacattttattgattccccggggctaaatctccacaaaagctaacttaaataacccaaacaaaccgtcttagctttgaggctcaaaaactgacactaaaac

SEQ ID NO: 14122 - DNA, 442 bp, Zea mays
  Clone ID: LIB3150-065-P2-K1-G11
atatataaatttattatttttttttttttttctattatcaattattatttggttgggttttatataatggagggaggagtggtaaataaaatatattaataattttttaataaataaatatttattatatataactaatttatatttatatatacactattaaaaaaattaattttattttattttaaatacatataataaaatttaaactatttatactacattctaatttaattaattttaattattatattttactattatattttatttactatatataaaataattatatatattaattactatatattatctacaatttaaaaataataatatattataaaaatattaaaacaaatttaatatataatttaatattttataaaataatataaatataaattatattatattataatattatatatataaaatattt

SEQ ID NO: 14123 - DNA, 351 bp, Zea mays
  Clone ID: LIB3150-065-P2-K1-G2
aattaaacaacatactataattaacatatatataatatataggttcacgaggagattgtaccaaactcgggggtggttcttacaaccatcagtcatcagcacaaccaagcagattactaacaccaaacgagacatataccacacatgcaatgatacggtgcatgtactagctagtacatccatacacacacatagcttaccaactactggttattacggaatatacaaaccatgcatgcatcatatttcacaaaatgcaatgcagatatagatattacatgcatatttaatttatgcgaattcatgtctttgccctcgaccctccacgttttcagtactttcacacgccat

SEQ ID NO: 14124 - DNA, 415 bp, Zea mays
  unsure at all n locations
  Clone ID: LIB3150-065-P2-K1-G3
tntnnnnntntatattttcnngcttttattgtataaaacaacatattaaacctggggggcgttaaaaaatggggcggggcgggaccatgtccatacaaaattgcaacaattactcataagtttaagtagggagggtcgactgatgcaacacagccagggcagcataaggtacttataagctgtaacaaaataggccttgaaaacatctcaaagcactgatcattcttaggcagaggtggcagcagaagccttggcggcggcagaaagcttagacctcctcttggccaagctcttactgcggcgtgccctttgttctttcagcctttgggcaagaagcttttggtctcaatactcttagaattttttttaacgatccttttttttttgtaagaatatttagcactctttcttttgg

SEQ ID NO: 14125 - DNA, 378 bp, Zea mays
  unsure at all n locations
  Clone ID: LIB3150-065-P2-K1-G8
accggncctgattcccgggtgcgggcgcgcctttttttttttttttttttttatttgcgaacaaatacctttttcattcttctctcgtctcttttgatagggttagcaaccaagggggacagcatatataccaacacctaatccaaatgtataacggacactaacatggtgtcagaagctatctttaacacgattctatagatagataatataacttggtctaagccagtatgggtctactcattataatattcatctctttctttcttcttcttatttctgttattattatcttttttacacatttgtctttattcttcttagttttattattctttttctatatttttagttcttacttgattaatttttcttttt

SEQ ID NO: 14126 - DNA, 319 bp, Zea mays
  Clone ID: LIB3150-065-P2-K1-H10
gagactggcatccttactgtccggcactaagccgtcgaatttaccagtatcccccaacaaaacagtgcggtaataagaatatgtaagctctggcagctaaaaaaaaaacaagattcacatggatttgcacccacctctttagtttagcagatgaacgaattatgcaggagagacttctaaacctgaatgaactgccaagtccaccacggctagctatagttgccggcccacaacagcacagcaatggttagctaggctaccgctcgatggccttgtacaggacgcaagtgacgaacttggagcggaacctgtgggtgta

SEQ ID NO: 14127 - DNA, 324 bp, Zea mays
  Clone ID: LIB3150-065-P2-K1-H3
cgcttcagaactaagatttcgttttgctccattcccatttgagtggggcatagtagcctgaggacgggcgttttttataaacgacaggtggataacaaaaccaaactacagatgtatcgcaacaacaaaacggtgtattgcagcataggcaacacaaggaaaatccagaaaccactacagtaaatagtagacaaaaaataccaaattccagttacggtaccacaacaagaccaaaaaaacacaatttcattggatcctttttgccgcatcctccgcgttcattatcaatcaataccaaaagtggtctttttttctgcactggga

SEQ ID NO: 14128 - DNA, 454 bp, Zea mays
  Clone ID: LIB3150-066-P1-N1-A11
ttgttgtcgctgctctgcacatccagcgtggtactctttatactcttgaggggccgtttcataacatcaccacatagcattaaccatatcatgtcttaaagcctgatgcaagagcaagatcaatatcttcaacttgtatcataggatttcatttcatatattaagcattttcactacaattttttaattctatacgtaaccatttactcatttaattttacaatcatttttataattctttcttaaacttcttgaatatttatactttttttcttaatttttttttacttcaatataatttacatcatatttaaattttcatttttttttattactcttttttacattacccattctaatattttaatattttttttatattttaaattacttacttcttaaccttatttatctttatttatattttatattcttttatttttttttcatatat

SEQ ID NO: 14129 - DNA, 281 bp, Zea mays
  Clone ID: LIB3150-066-P1-N1-A9
tctctgaggaagaatcgcatgtcccagagaccgtggattttgaaagtggggaggggtctcatacatcattcggctgttgttaagacatgatgcatccaccaggcgtgatgatcattatagtctatgcatataccaatcatttccttaatattgcttttccatcattgttatttacttgtccttatattatttgtaatccttattagttttttctttattacattataattgtttttatttattcttatttatttaaatttcttctatatttttttttagtc

SEQ ID NO: 14130 - DNA, 181 bp, Zea mays
  unsure at all n locations
  Clone ID: LIB3150-066-P1-N1-C7
aacttattttttacagcggccgcccctttaattggggaggtgttcttacaaacgaggcaggtttccctataatgagtcntattaaatcttagcgtaatcatgatcatagctaatatctgtattaaattgttatcctatcataatttcacataatatactatccaaaatcataaattgttta

SEQ ID NO: 14131 - DNA, 115 bp, Zea mays
  Clone ID: LIB3150-066-P1-N1-C8
tctattttcaaggcaaaagcattgataccacagtcgatgtgctcttgaagggcggtggcccttgacataacaaccaggagaggatgcatttacggtcacaattaccttgatgaga

SEQ ID NO: 14132 - DNA, 380 bp, Zea mays
  unsure at all n locations
  Clone ID: LIB3150-066-P1-N1-D4
tttcatatgtgcatctgcttcaaatccatcgaggctgtaaactttatctccaaggcgggccctatcaatnaccaccaatactgttacaaagccctttgcttaaaaacctatgtaatagtagccctctgccaatatggcttcgtcctggaaaaaaaccaaattgtaaaatcttattctatctntcattttctctactaaggagttttatttgtgaaatataattcttattattattacgaatagcttttttttatttattaaatctacatctttaatgttttatttttttgtgtatctctattaatttttatttanctttaattgttcatttatttatattgtaatttttttatataaatttcatcatttttatatagaat

SEQ ID NO: 14133 - DNA, 117 bp, Zea mays
  Clone ID: LIB3150-066-P1-N1-D6
ttaagtaaatgccttgtttcattctaaatagcgaaggacaacttatagggcggcccgtccacaaacaaccaccttctacctatatgcatactacttttcactatatacagtctacta

SEQ ID NO: 14134 - DNA, 182 bp, Zea mays
  Clone ID: LIB3150-066-P1-N1-E1
tgtgccccagccacaacaaggctaaatcagggttggttactccaagcgactgggcgaagactcattcttctttttctaatatcttccaacctacattgctcgcgcgtctactccctatgatctattgtttgtagtttgttttttctactctttttctatttctttttttttattattaattt

SEQ ID NO: 14135 - DNA, 272 bp, Zea mays
  Clone ID: LIB3150-066-P1-N1-E8
tctccaccgtcgtccgccgccgccgaaggagcgtttgagaagagggtacgggcgtctccttgcccccatggcccacgagaagaagctgtccaacccgatgcgggagatcaaggtgcagaagctcgtcctcaatatctccgtctgggagagcggctaccgtctcacccgcgcctcaaaggtgctcgagcagctcagcggccatacccccgttttcttcaagtgcgaggtacactgtgcgttttttcggcattcttcgtaactagaatatcgcc

SEQ ID NO: 14136 - DNA, 55 bp, Zea mays
  Clone ID: LIB3150-066-P1-N1-F2
accggccgtcgacaactcttctttaccgtccgagagccggaagcaccacacgcgg

SEQ ID NO: 14137 - DNA, 223 bp, Zea mays
  unsure at all n locations
  Clone ID: LIB3150-066-P1-N1-G2
tcgtaatactaaatctgtactcnaaaaaaatggctgggcatactacatatgctcgagggattatactcanaataatntngatttttccatttctattattgcctcaaagctacaatctttcatacatatctaaatataatcaattttatccaactttattatacacacttaatctttttctttacactctcattatttttcatggcttttccctacaattcca

SEQ ID NO: 14138 - DNA, 225 bp, Zea mays
  unsure at all n locations
  Clone ID: LIB3150-066-P1-N1-H3
gccgaccaggctccctcgcttctgttcgcggccgtcctcgcgttcctctgtggcgcttatcgncagcgccatatccgtcaccttcacactgggctacatcccttcctacctgtatgcgacgactgggtggactacccacaccctatcttacgcgggcgaagagcgctcaccagtttgcttggatctttaagcttcggaagatgacgaggtggacagagaattctg

SEQ ID NO: 14139 - DNA, 166 bp, Zea mays
  Clone ID: LIB3150-066-P1-N1-H7
tttcttttctccaaagatgactccaataggggtggtcatcttactaacatgggggggtacaaatctctcatttctcacattgtccgtcacgttttgaagccagtattcttattacatatataagtaagcttacgatttttttactatcattgaataccttatcttt

SEQ ID NO: 14140 - DNA, 426 bp, Zea mays
  Clone ID: LIB3150-066-P2-K1-A10
agctctggagattttgatttcagcaaattagcgcagcatagggggcgattcggaaggatcggatggacattgcatccccgtaccaaaagcaaggttctatagaacaaggaaacacaagcatcaacagcgacgatcgacggaatgggccacgagggtggtatgctagtgtaatagtataacatggcgacaacacgaaaggggacatcaaaactcatcggggtccctagaaccaccaggcttcacatttaactgcctccctcacatgccatcagctggctcctcctcgtcctcatactcggcctcctcatcgtcatcagcagtcgcattctggtactgctggtactccgacacgaggtcattcatattgctctcggcctcggtgaactccatcttgtccatgcccttgcccgtgtaccagtgcaagaa

SEQ ID NO: 14141 - DNA, 417 bp, Zea mays
  Clone ID: LIB3150-066-P2-K1-A11
aataaatcaataaatctacaacattgtatcaatatgattggttacattccacgttacgaagtacatcaacatcacgttgtgtttgtaaggctaaaatgttaaaacaagagaactgcggctggcaaaccgtcaaggaatccaattgatataggtatcagtggtgaaattaacaccatatcagtccaactgacataaaagtggagcttcagtttgatacgcaggacggcaggaccagagctttgtataccgaattccaaaattatgtgtctgaccaatgctttctcatcatcagaaattcataaccgaacaaggtggcatcgtcagtgttgttattgcgcccatcgtttttcatcacattattacacttatgaaatattgggctgattgatcttacctgaaataatacattcccaaggt

SEQ ID NO: 14142 - DNA, 362 bp, Zea mays
  Clone ID: LIB3150-066-P2-K1-A4
ggcatcaccaagaagcaccatttttttccttaggagggaacttagaataaagccgggcgggggtaacagcacccatcgatccgcagtccatgctggttgatgcatgggtctgctggagccgtggatgaacacagcactaacaactgacacagagcgaccttcaatcaaaaacacagatgggcaacaacaaacacgagacgaacgaagataaacactctggactagggtaaacaacacggttgcgaacaggataacttggccgcgcgggccccaccgtttaattcctccagttcccgtcggagttgccgttacctcctccacggttgccaccgtcgtaacctccgtcaccaccaccgtagccg

SEQ ID NO: 14143 - DNA, 388 bp, Zea mays
  unsure at all n locations
  Clone ID: LIB3150-066-P2-K1-A7
agaaaaggttcatttatgacaacgcttgttcatcatacaggtgcactgatacgttcaaaccagagctaaatatcactggcaacagcatctagaaaacctaccatgtctcaggttctacaagaccaaaccactggtagcaaagtttaattctacacatcagatccaaccatccatccaccatctaacgagcaatgtacattagaacctgtttgacctgtggaagcagttcacagcggcccaaggaagtcaccagcgatcgtagcaaggagctggaattggcggtcagcctccatccagcggaaccctatgaccttgaagcgcacggcggggtccttctccagcttcgagtggtcgttcatgaacatcngattctccccacctttgtact

SEQ ID NO: 14144 - DNA, 366 bp, Zea mays
  Clone ID: LIB3150-066-P2-K1-A8
ggaccaaaacgacatctttaattccccagttttagttgcacacactaacataacagttaaaacaagattaaggacacagccttttgtttgacaacctgtgttgcaaatggggactagtcatcccaagcccaaaacaaatcacgtaagacaccaaatgaatattctttggagtaacaaggtgcattttataagggcattaaacaattttcaatactgggaggaaaacggtttaacatgggggcgggtaattttgagcccatttattttttaatgaaatatcccaatagctttcccaggagagcaatggccaccacgcccacaaaggagaatccaccattctgtttgctggcttcccctcctgaaaag

SEQ ID NO: 14145 - DNA, 363 bp, Zea mays
  Clone ID: LIB3150-066-P2-K1-A9
gggaggggggaaaaaccataggggccgaaaaacccatttgggaatggatttgaaaaaaaactgggttacaacggggggttttagattaaaaaaaacgttaaagcatttcccccgggggtttaaaatttttaaaaaaaattttttttgggaagctttttttgctttggaaaaaaaatttggaattacataattagccaaatttttgaaattctcaaatctaattggttccccctttttttatcggtcttttgaacaaactaacttttattaaaaagggtgctttggccttattttttgaaccctttcccttttttaaaaaaaaagaacccttacttttccttgaaaggtgggtttttttttatt

SEQ ID NO: 14146 - DNA, 341 bp, Zea mays
  Clone ID: LIB3150-066-P2-K1-B10
agctcacttgccaaaaaataatctacaaaagctgggccttgttcgacgccggcggggcaggattatcatacccaccgatttcacatgtggattacgcatggatggatgcatgaaaggaaacaatgattttgctacggtttgtcgtcgacctgctcgctgctctctgttcgccggcggcccatcttgccgatggaggaggcgatgctgcccatgagggtgctggtgctgcccgcgtcgccgctgaggctcatggaccggcgggctcggcagtgcctgggagactccagcttgcaccgctccttgttgttgccggccctcgtccgcgtggtcaccaccagccg

SEQ ID NO: 14147 - DNA, 417 bp, Zea mays
  Clone ID: LIB3150-066-P2-K1-B12
ggaatcaagtatggcagactgttaaaatagggtcgggtgtcaatatttccagactggagcctgttttgaagatatctgctccaacggttcacaaaagtgacaaacaaaattgtgtactatttgaaaacatggatgggaagggaaaaaattgggggccatcattcagtgtgtgaattagcgagtagcaagttccttgcaaccaggcattggagcaggatgcaggagaaataaaccccctcatgttcctcccaagtgaaaaggatatgatgtattaacagtgcctaattcgacattttagagttttgatttgaattgaaaattaattcctttggcagcgttggaggtcttcaattgcctttttccattgccaagcacgctgttttgcatccttaaatgttgacaccttctttggcgtgc

SEQ ID NO: 14148 - DNA, 385 bp, Zea mays
  Clone ID: LIB3150-066-P2-K1-B9
ccttaattcccgggtgcggccgcgccttttttttttttttttttttttttttattttcttttttttttttttttattattattttttttggttgaaacaatcccttttgtggtgagtccaaaatatctttttttacaaacattttttaccttttttacttttcaatttccatttttctttttttccaaaaaaaaaaaatttttcctcttttcttctcctttattacaaataaaaccctttttttaaaaatctcttaatcctattattttaaattttcttctcataactaaacccttaccttcatatttttcctttctttctttaaatttttcttattttatcacattatttttttttttttaactccttatatttctaccttttt

SEQ ID NO: 14149 - DNA, 439 bp, Zea mays
  Clone ID: LIB3150-066-P2-K1-C4
agagacaaacatgtccaagttcgttcataaacatggcgcttctacgagtggatgtttcatggatacaggcgggtccgctcaaggttttctcagcaacaggtttaagcagaagcagtaggcgcatcggccatctcctgttcaaccggagttttctgaaccgggtagtagtggtagtgcagctccccgacatcatccccagaaagcttcgtccaaccatcagggccaacgtggtaaacactaacacaaccaccacttgctgcatcacggaatgttgccccataaatagcccgtcgcgctaattcggcggtttcctcaactgacatgctgaagcggttaccatcatccaagataccataagcatacagtgaaccagagccaacagagaacctgtttcccacgagccgtgcaccctcactgtcaacatatttcaagccatgac

SEQ ID NO: 14150 - DNA, 254 bp, Zea mays
  Clone ID: LIB3150-066-P2-K1-C9
acttcacattataaaccatttcattaaggagagcttttttttcaacacgggagacatcaacatactgcttcctatatccaacttcctaaacattataacataaatctataaccatttacaatctcttcaataactatcatcaaccataactcctcaaccttacatatctttcgaaaatataaaatgtaatattttctaaaaccataatttcgtacattcaatcaattttcaaatcaataacttattctttctcc

SEQ ID NO: 14151 - DNA, 402 bp, Zea mays
  Clone ID: LIB3150-066-P2-K1-D6
ggaactcaaaagaagacctgctaaaataatcagggggggttcatatattcattgggcgggtcattggcctgcgtaacaaaatcaaacacttctgacactgacccaacagtccaccaggaaatcaccaaactaatttaaaatgtgctagaacatagaggctcggtataccagctaagcagagcgacctataaccagatttaagaacccaaaaaaaaaaatctggacccaacttcccgatgctacttgctacctcattcacaagcttttttccagtgttccacctttgcgtcaggctgcaacttggtcatcgatggcccagcattcccaacattttggtattgcgctgtatgcagtatccatgctctgagcaggcttccgttcgtcgcctggaccaaatcttgc

SEQ ID NO: 14152 - DNA, 289 bp, Zea mays
  unsure at all n locations
  Clone ID: LIB3150-066-P2-K1-E10
gantcgggccggcaaattttagagaaaagagggccgatctccattcccctaaaagtcaaaacccgctccatgctttccctgatctttacacatactagcagtatgcatacatcccatgaggtttctaggtgcaatttttaaggctaaacaaccatccctagcatacaagctactacagatttttaatcctacacaacgactaatacttccatattccaatagtcattacacccataaaaccattgctaaaccacccgtcttaaaaaggttgaacttttcaaccaacctt

SEQ ID NO: 14153 - DNA, 447 bp, Zea mays
  Clone ID: LIB3150-066-P2-K1-E12
aattaaagtttgtataaattagagaaacaatccggtcaggaatcggtgcgacccaccaatccagcagagacgaacaaggcctaaaggtttacccactccggacaacctgcaacgcagaccattcccgaggaactccggacaacggccttgcacatgattggacccaggctttacagtagccagatataattaaacgacgcacaacctagagtagtgttctcaagaacccacgctctaatgttcgacgattatataatcctgttacagaccctgcgatattgatactgatagccatggttcacttgggaataatgctcagcccatctcccttcgaaatcttgagtttattggactcaccacaaaccattatatcccacgtggagtcgaccagactacatttgtcacgacaagccaatgccaagcccatcactgagggaattaacacct

SEQ ID NO: 14154 - DNA, 434 bp, Zea mays
  Clone ID: LIB3150-066-P2-K1-E5
acatcaaataccacagagatttttccactcaagaaggaacttacttactggaggggctccctatctacatgacgggaaacagcttaccttctctgttcatcatcccaaagttaatattatctccactgcttccaatgcgtccactacaaccaattcctttccgtttatcatccagctcgtttggaacagcattattactgaccggcaacccccgatgaacatgaataccatgagcaacaccatcagcacaaataatatctacattatcagccaccccttggcccaatcactattataggactagaggagctttccctgtactccctacacgtaaaccacggtttcctccatgttcttatcgattctgagtgctagctcaccctgttgagaaaccatatacctcaactgctttaagtttatttctcaactcatat

SEQ ID NO: 14155 - DNA, 147 bp, Zea mays
  Clone ID: LIB3150-066-P2-K1-E6
aaatcataatataaattcaatttctttatgtaacacacaaaacttaacatgacaggcttcttagacagagcggagggctcctaccctatccacaaaacaaattctacctctctaataactagttacacttacacttttaattcataa

SEQ ID NO: 14156 - DNA, 440 bp, Zea mays
  Clone ID: LIB3150-066-P2-K1-F10
accaaaactctggtgccctagttcagcgacatttatttcatgtagggggacgtcacatgtgcctacagaaacatattattcgagttcaaaatttaatgaaccactcaattgtttactagcatccgcattatacaccctaaaattacagcgccgctggtaatacatctcagaactacagtgaaacaactttctgccttaaccactgcaaaaccagaacaagttcactcgtgctcttcctaaccttaactcggtctgtataaacctttgggcttacacctggcagaacgcacacatccaaattcatcaaccatagcaccacgtccgaaaggaagtttcaagaaaataatgatcgacttagatcagacatgatcaatcaaggccaagcaatatccttctatgtatgtacttgaaaaataacatgtagcatgcgcatattgtgt

SEQ ID NO: 14157 - DNA, 441 bp, Zea mays
  unsure at all n locations
  Clone ID: LIB3150-066-P2-K1-F11
ggcagtaaaatgcactcgttcccataaaagcatcanagtccacaggtgccattaccagggagggggagattactcatcgaaacaacatctgagtttcgatacgacgcgatgccaagcataaaccccaatccaaatccgtccccaacactgcccccaacaaacaaacccaagctaaattattcactgcatgcaatacgccaagtacatgcacgagctcacggattacagaaccaaatgaggcgcaaactttggtgcccaaatgaccaaaacagaacatgacgaacttttagaagccctgctcgatcaggtaatcgccgagcctctccaccaccatgttgcattgccctggagtcattggctcgtcgcagacaccaataatcaaggacatgccggtttttttgatagtatgcccccaaagccctttttttcttggatgacaac

SEQ ID NO: 14158 - DNA, 301 bp, Zea mays
  Clone ID: LIB3150-066-P2-K1-F2
gccgaagcgggcgggcgggttttttttttttttttttgaatcatcgacatacattttctgtgcttgaaacaatactcactatggggggacacttttcatgacaggactgacaaagaagcctacaaaaaggacaaaaaacatatcgtatgaggggcagggcgccagggatcactcttggacaagattttccacacctacaattgtcgtagtaaaatgaggcctctagactaggagtaactcacaagaactagctatgctgtaccgactacccggatatggaatggggatccgcgacacagta

SEQ ID NO: 14159 - DNA, 470 bp, Zea mays
  Clone ID: LIB3150-066-P2-K1-F3
cggcccggaattaccggtgcgggcggcctgtctttttttttttttttttttttttttatattttttttttttaccacttcctaaaatcaaattaagaagggcaaaatggtaacataggggggttacagcattcttattttgcacaacgtgaaattacaagaagggcccaaataaatagataaaagtgcacaggctaacagagcttaacagttcacacaataacagcaacgaccacaaacaaaacttgtaatgatgaaaactaggtattgctaaagcaggcccatgatcgcattattttttcttggcagtagccttggtcaccttggcgccggttggttccttttttttcacacttttgataacttcaacaacaaccgtttttcttattgtacggacagcaaacctacctaggggaggattccctttgaatgtcttcaccaccatggtcttggtgggatttatttttacca

SEQ ID NO: 14160 - DNA, 397 bp, Zea mays
  Clone ID: LIB3150-066-P2-K1-F5
gcagcagaataagagtcaaggatgacacaaataaataccaccattcggtcagacatggttttaaacaaagtactggtggagagaaagactcagcgccagcagcgtcttcctcttcatactaatgaacccccacagcagcacattaccacaaggcctaggcagctacaaaaattccaaaacatggcataaaggagaaaaaatcacaaattgtccatgaccacgacttcaacatagaaaccccaccgtccttatcaccccctctcccacggtatttcgacaaaaccaagccttaccaggttcctcaccacccttttttgttttgttttttcttgaaattgatcacagaaggtcagcaacattggcaggcagctcctcaatcaacacgttgtagaacttc

SEQ ID NO: 14161 - DNA, 430 bp, Zea mays
  Clone ID: LIB3150-066-P2-K1-F8
agatggcagaacaacaaatggcataacttccaaaagatcttacaatgagtgccaagggacaaaatgttgggaaactgtgacccagaagctcctacattgtcttttgactttttcacatcaggaaccttcatcgatctactttcacagctacacctcatttacgtgcatgaactaatacaacatttactgggccatctggttatctactaactagtatggcagtgtaactgaatagctgataagctagcaatttgttagccattagcacttgggttagaaaactcagcacgtaaggagtaattttcttgcaggacttggatatcatatcctcaaatcctaaaaaagcacacgttctttaaattgggagtctggtgttgctcttcagttgataaactcgactatcttgcccaaatcaaaatcagtggttttc

SEQ ID NO: 14162 - DNA, 425 bp, Zea mays
  Clone ID: LIB3150-066-P2-K1-F9
ggaaacaagatactttcactaagtcataaaatgggggggccaaactgataggggggtagggcttatctactgataagaactccttttcacagcacagtaaacaaagcaaaatgaaatactagaactatcctcttcactcgatacagtcaatagaaatatatataagcaacggataaactgctgttgagcttgtttttattgagcccattgtccgagtcccttggaaccgatctgccaaggttagttgcaccaccttttgaagcccatcttggttagactcatgccacgaaaaatctaccagttccatcttctcaatcatctttcaagttgatcagaacttgaagctccattaggaggcggtgcggacaagttgctagcaaacccattttttaccggtggaggatttccccattttctattttatt

SEQ ID NO: 14163 - DNA, 404 bp, Zea mays
  Clone ID: LIB3150-066-P2-K1-G12
ggaacaatacttttttcttttcatttcaagggggcattcaggtcattggtgacactgacactgccacccatggtgatgcgtgacacattattactcaatcatcgccgctaaatgactcaactagctagctagccagcggctatactacagcacatagtttcttcagtgggggacaccgccggcagcagcgtaggggcatggagtcggctgctgcaggccgcacatcgccgtcagttgctgcgctatctgcgccgccaacagccccgcgacctggccgctttgcggctgctgctgcaggatggactggaggaccaagccgaagatcgcctggtaccggtgctgcggctccacctgcctgagctgctggcaacactgctgccgcaacgactggcactgatgcgagc

SEQ ID NO: 14164 - DNA, 305 bp, Zea mays
  Clone ID: LIB3150-066-P2-K1-G3
cccatttcagccgcgccttttttttttttttttttttttttttttctatcttatttttttttttatttatttttcattctcaaaaaaaattttttaaaaaaaaaaaaaaatcttctattttcttctttttatatatattaataatccttaataattaacatctcccacctaactataataatatactatttattatttatttataccacctataatttttttacactaaataatttatacttataaaacaaatattacattttcttacataaaactaacctccttcatattttatttttttttat

SEQ ID NO: 14165 - DNA, 381 bp, Zea mays
  Clone ID: LIB3150-066-P2-K1-H1
ggcaattcaaccattccaaaccaacttattgataattaatagtagaaagtagagagacaggaaggcatataaaatacagggtccagaatgttaccacagataatgataagtcaggtaggtacgacacccagcaaccccttgcacgctatagcaaaagccagctcaagccaggtgaatgttttggtagcaatcctttggtggtacacttcttttccgatttaagttgagatacaggaggtgtccgtttccaaagccaaggaagttacttggggccaacattcttcaacgcgcagatctgtttctcccccattgtagactggacagttacaacaaagatcctttccgtttttgaacccttctttaatttgggccacaagagtt

SEQ ID NO: 14166 - DNA, 377 bp, Zea mays
  Clone ID: LIB3150-066-P2-K1-H12
gcttaaacggttgtccattatttttctcatgtactgtaaaatgagttattactggccaaatcacctcgcatctaccagtgtgctctcaagggaaacaaacattcggtccacacccagaaatataaaatgttcatcaaagacaaaagatagattctgcagaagaacaaaaaagagaaacatgtgctagcagagggacccctgcgccactctacttttcagttctcctgcttcatttatcttcattgctgtctgttattattggacttgttgggcctgcgccaatgacccatacaagtttgttctttctcggcaagccttcatcagaatcgcttcaggcgtgccaaatcattgatcacttcgctggggccgctggtggc
